United States Patent Application Publication US 2005/0228172 A9 - sequence listing, part 110

SEQ ID NO: 510960 - DNA, 607 bp, Homo sapiens
acttgtactcattttgtacaagctttatacaacagtggctttgtaaatgaatcttaagattgtagggcaaggccaggcacgatggcttactcctgtaatcctagcaccttggtaggctgaagcaggaggattgcttgaagccaggagttcgagaccagcctcagtaacatgatgaaactccatttttactaaaaaatacaaaaattagccaggtgtggttgcatacacctgtggtcccagctactytggaggctgaggtgagaggatcactttagcctgagagacggaggttgcagtgaactgagatcacagcactgcactgcagcctgggtgacagtgagaccctgtatcaaaaaaaaaaaaaaaaaaaaaaaaggagacagagccactccaagatgctttttctttgtattgggcagttaagtaggtcagttaccaaacaaaggataatttgaaagttctccaaagcagcctgtgcaaaatatctcttccgtattataccactaacaactaaaatgttgtcattactagaggctcatccagcactggtctttctcaaaaggcacacaggcctgggagggcagtgtggttttgaaacatgccagcc

SEQ ID NO: 510961 - DNA, 549 bp, Homo sapiens
aaccccttggtgcttcgtagggagatttgatgctacaccaaatctcaccagtttgtatttcaataagtcagtttaattcacccttccctgaaatcagatcctctcwgtccaatgaggcctgttatttcctactccttccccttcccattttgctaaacccctccctcttcaagcttccagccaaattccccttctcaccaacagcgtctgctcccagcttctgcagcacacgacattctgccacagtctcaaagctggggcctgccaccatcacataggtgccttcctgtagctcacgttgctcccccatttgtttccaggtactgagagccctctgcctcatagtccggtcgtaggcatcagacatggcagggaaacgatctccaaacctaggacacaggttgaattatctcacataaacggaattttaaaaattctcccacagctcctagagaagtctttaaatcctacccacctaaaaaaaacggagtaacatacatacctttcatcattgggccctctgagagggttctgaccactgaaaccagg

SEQ ID NO: 510962 - DNA, 331 bp, Homo sapiens
gccgccgggaggagcagggtggatgcacccctagctgagtctcgggtkgttcctaaccggccccgccaggcacttcccacccagctctcagcctcagagcccagcgccctagacccagggccagggcaagttctgcctgcgctcggaccccaccttagactggggctggaaaccctgggtgcctgacctggggcgtccgattcccgcagcaggaagcagaaacttcgctctggattctgccggtgggaagggtggcagccgggggaggagccggatgcggatctgagaagagacggtgcgggcggagactctcgggcccgggcggggcgca

SEQ ID NO: 510963 - DNA, 544 bp, Homo sapiens
  misc_feature (1)...(544): n = A,T,C or G
agcatttctgaaagttgaatagcctatatagaagccggaaagagtagatstgaaaatgtggaagataggatgcttggggaaagtgaaaggactcttactacatcactaaaactcctgttgctttctttaacttcctacctacctttgctacagaaaatccctgtgatctctgacctatgttcattttctaggattccttccaggtgatacagccaggcatcaccgagctgttatcctagacctgctgcaggaggcactaacagagtctggattaacctcccaggatatcgactgcattgcatacaccaagggtatggctgggagagtggtcaacgatggaggaatatacctgcaacctggctaggtcaaaatagccaacaccttacctntgccaccatcactacccctaccccacctcacatcccttatgtcccccactattgtttttttccaatctctaggattataacttccatttctatctccctaggccctggcatgggtgccccactggtttctgtggctgttgtggcccgtactgtgg

SEQ ID NO: 510964 - DNA, 514 bp, Homo sapiens
ctcgggtccattctctctgtccttgactttgtaagttagtctgcatggatgcttaagttggtccttgttacytctcttctcatttcttccctctttctcaattcccagatggctctactgagcttgctgtgctctactctggtctcagaagtaaacatgaacaatacatctgaccccaccctggctgccatttttgaaatctgtcgtgaacttgccctcctggagcctgagtttatcctcaaggtattgaggtgtgaaggaggggatgggggtgtgaagctggtagactgggagtgtggttatggtgtgtggcggggtggtgactagcttcatgttgggggtgggaggagcttctcttaggaaggatttctgggtgagtctgcggcctagtccctgtggttcagtgaagagtggggaaagagtatactagacttggtttgtttagtaagtacccattctctcaaggagcttatagtattgttagggaagcaaaatacttttccaaatatcatac

SEQ ID NO: 510965 - DNA, 442 bp, Homo sapiens
cctaaatcctttctgcaagatgacactcaaaactgcggcacaaagtgaytgcctggcttttaggggctttagtctagcacttggcctcaggatgagaaaggaagtgttgtcctggagggagaaggagtggctgttaccgtctggctcaaatggaatacttgcatgtccatagcccatctagtccaggactctggtcctcacagcatgcagatcaagcacaccttccactgtctggttcttatcccagtgccaagatgagagttagaattccccacacttttccaaagacacagggttggatttcaggctcttaccctggaccccacctctggacagatagtaatccctgtgtggggtgagccacctaggtccgtagccctgccccctggcccttcactttccccactcttctgccctccatgaataaagctgggctatattc

SEQ ID NO: 510966 - DNA, 512 bp, Homo sapiens
ttgcagtccgtaagaggaagaaccacctctatctctggatgaagaatattttaaattacctgggtcggctgatgcactatcagttctataaaaagagaaaagtttaagattagaactttaaataacataaataaatctttctttaaacaagcctctcttctcccaaattttacatttaaccattactattgtatttagtgtaatatgcactatatattatatgtaagcactcagccgtctaataagaagtctttcactgggaagagagtctcaatggaygaaatgccaacttttcactctcttctactgttctaaagacccattcagaaatatgaataactactgggattagggtgactttgctggttttagcattgaaagtctcctgtcccaggcaaaacaggacaattggttactctggtccagtgttctcctcacatgacttgataataagaataattctttctaaattctcccccatggagacggttaatcagtcaaaacatttcagc

SEQ ID NO: 510967 - DNA, 480 bp, Homo sapiens
gaatttgaaggttgcagtccgtaagaggaagaaccacctctatctctggatgaagaatattttaaattacctgggtcggctgatgcactatcagttctataaaaagagaaaagtttaagattagaactttaaataacataaataaatctttctttaaacaagcctctcttctcccaaattttacatttaaccattactattgtatttagtgtaatatgcactatatattatatgtaagcactcagccgtctaataagaagtctttcactgggaagagagtctcaatggatgaaatgccaacttttcactctcttctactgttctaaagacccattcagaaatatgaataactactgggattagggtgactttgctggttttagcattgaaagtctcctgtyccaggcaaaacaggacaattggttactctggtccagtgttctcctcacatgacttgataataagaataattctttctaa

SEQ ID NO: 510968 - DNA, 623 bp, Homo sapiens
cctccaggtgttggtgtgataactgtgaccactgaacctcttccatccactctttctcaaaccttttgctgcagaactacttacatcctaatgaagccgagaatgcacagccctaggtgttttctaggccacttctgtgccatccccatctcccacattcttagttttaattaagaggagctttgaaaagggaagaatataatttttgtgratcgttaatcaggtgaggtatgaaaagtgtaatttacatggtgtcttagttcgttttgtgctgctataacagaatacctgagcctgggtaatttataaagaacagagattgattttttacagttctgggggttgggaagtccaaggtcaaggggctgtatctggtgagggccttcttgttggggcatccctggcaagagtgaggaggaaaggggcctggccaaattcatccttgttttaaaatcaggaagccacttctctgataacagcattaatgcattcatgagggcagagcccccgtgacctaatcatctcttaaaggtccatctcccaacgctgttaccctggggattaagtttataacacttaaacgttggggggcacattgaaataataacgcatggctattcttt

SEQ ID NO: 510969 - DNA, 534 bp, Homo sapiens
aggaaacgaatgtctatgtactggcctatgtatatacacatctataaatatttctatgtgaaaccacagcgatattaagctaaacatgaattaccactgatatctccaactctaatccgttgttrtgatatggatcattttagcttcctcctcttcctgtaaattttttgcatttttattgagctataattcacataccataaaatgcactcttttgaagtatcaaatttagtcgttttaatatattcacaaggttgtgcaagtatcaccgtgatctaattgcagaccatttttaccattccacaaagaaaccctgcacctgtcagcagtcactctcccgttccacccttccctcagcccctagcaaccactgatctactttctctatggatttagctattctggacattttatataaatggaagcatacaagatggggccttttgcaagtggcttatctcacttagcttaatatttttaaggtgcatctacattgcagcttgtatcaacactttattccttttcgtggttgaa

SEQ ID NO: 510970 - DNA, 534 bp, Homo sapiens
aggaaacgaatgtctatgtactggcctatgtatatacacatctataaatatttctatgtgaaaccacagcgatattaagctaaacatgaattaccactgatatctccaactctaatccgttgttgygatatggatcattttagcttcctcctcttcctgtaaattttttgcatttttattgagctataattcacataccataaaatgcactcttttgaagtatcaaatttagtcgttttaatatattcacaaggttgtgcaagtatcaccgtgatctaattgcagaccatttttaccattccacaaagaaaccctgcacctgtcagcagtcactctcccgttccacccttccctcagcccctagcaaccactgatctactttctctatggatttagctattctggacattttatataaatggaagcatacaagatggggccttttgcaagtggcttatctcacttagcttaatatttttaaggtgcatctacattgcagcttgtatcaacactttattccttttcgtggttgaa

SEQ ID NO: 510971 - DNA, 534 bp, Homo sapiens
aggaaacgaatgtctatgtactggcctatgtatatacacatctataaatatttctatgtgaaaccacagcgatattaagctaaacatgaattaccactgatatctccaactctaatccgttgttgtgatatggatcattttagcttcctcctcttcctgtaaattttttgcatttttattgagctataattcacataccataaaatgcactmttttgaagtatcaaatttagtcgttttaatatattcacaaggttgtgcaagtatcaccgtgatctaattgcagaccatttttaccattccacaaagaaaccctgcacctgtcagcagtcactctcccgttccacccttccctcagcccctagcaaccactgatctactttctctatggatttagctattctggacattttatataaatggaagcatacaagatggggccttttgcaagtggcttatctcacttagcttaatatttttaaggtgcatctacattgcagcttgtatcaacactttattccttttcgtggttgaa

SEQ ID NO: 510972 - DNA, 534 bp, Homo sapiens
aggaaacgaatgtctatgtactggcctatgtatatacacatctataaatatttctatgtgaaaccacagcgatattaagctaaacatgaattaccactgatatctccaactctaatccgttgttgtgatatggatcattttagcttcctcctcttcctgtaaattttttgcatttttattgagctataattcacataccataaaatgcactcttttgaagtatcaaatttagtcgttttaatatattcacaaggttgtgcaastatcaccgtgatctaattgcagaccatttttaccattccacaaagaaaccctgcacctgtcagcagtcactctcccgttccacccttccctcagcccctagcaaccactgatctactttctctatggatttagctattctggacattttatataaatggaagcatacaagatggggccttttgcaagtggcttatctcacttagcttaatatttttaaggtgcatctacattgcagcttgtatcaacactttattccttttcgtggttgaa

SEQ ID NO: 510973 - DNA, 582 bp, Homo sapiens
atttcccaaatggcagtcatgtttaatatatcatcttcacactttttgccacattgacttgttttatttatttatttatttatttatttatttatttatttatttttatttttgagacagagtctcgctctgttgccaggctggagtgcagtggtgcaatctcaggtcactacaacctccacctctcaggctcaagagattctcgtgccccaccctcccgagtagctgggattacaggcacgygccaccacacccagctaatttttgtatttttagtagagacgggctttcaccatgttggccaggatggtctcagattcctgacctcaagtgatccgcctgccttggcctcccaaaatgctgggattacaggtgtgagccaccgcacccggccacacattgactcttttttacaaaaaaattatctaataagtaaatgtttaaaattatcaaaggaaatggaaagctagtttacttttttgttgttgttttttttttgagaccgaatctcactctatcacccaggctggagtgcagtgacacgatcttggctcactacaacatctgcctcctgggttcaag

SEQ ID NO: 510974 - DNA, 601 bp, Homo sapiens
tgttccacagtaaggtaattcatctgactgggttgttttgttttgttttgtctttttgtttttgttttttgagacagtcttactctgttgcccaggctagagtgcagtggcgtgatcacagctcaccaaagcctcaacatcctgggctcaggggtcctcctgcctcagcctcccaagtagctgggactacaggtgtgcgccgccacctgcctggctatttttttgtatttcttgtagacacggggtttcaccatgttgcccaggctggtctcaaactcctgggctcaagcaatcctgccgtctcagccttctaaagggctgggattacaggtgtaagccaccacacccagcccccatctaactgttttaaaaacaacttttcctaagtcgatttcatcacaaactcttttccaccatggtggcacagattggctagcagttcattcaatccacttccttattccagacaccccgatagacagtctcccttgcagttcaatgcagccacacgatagagttctagcaagtgggacaggagatgaagtgacaggcacctcttccrggcctgcctcgtacacacaccccatacagtgcttcactc

SEQ ID NO: 510975 - DNA, 615 bp, Homo sapiens
gctgtgtgcgcaagagcaagccaactaagttctctgagtcacacactaaaatgggaatcagaaagcccatcctctgtgtttgtcgagaggatctgatggtgattgatgagcttggcatggtgctcttcccatggcaggggctgggtggctggtggagggtgttatgatggtgatggtctctgctccagcggtccccgcatggagggacaccccaggcagggctttaggatgtaagcgtgggaatgagtcacacattcagtgggttggggcagagaaaggaggcagtgctgagagacagagttgggacattttttccctaaagattcagaaacaggaggagatgttcaggggtgtccacagtgcggagggagaggaagaggctgggtctggaatggaggaagttggagcagggaggtctctggacgcctccttccctgtggttccttactcagaggtattcactgagtgcctgactggtgcagggtgctctatggggcttgttggagctgaagagaaggaacagcagtgagggacatacaagggtctgcactgggccatgccrtatgccccaagctgaagaaggcccccatcccaggctggtcctcttcccagggt

SEQ ID NO: 510976 - DNA, 580 bp, Homo sapiens
gctcaagtgcagtgagggtgggcggtgcatcacagccctggcccagggccacccccaggactgggaggagagcccagagctgagaggggcagagcctgggctgcaggtctctgagtctgcatggtatgggcagtctagtggtgggaagattttctccctccccctccccactcacttatgtgcaccggcatccacgcagcctccactttcacaggctgaggtgctgtctcatttctctcaccctctgccacaccaccccttgggtctccctgacattgcgctgctttctcaggscttggctggagcacagtgcagagggggtggggatgggggagcactcctcatcgctgcttttcagaggatccccctccactcttcaaaagaaaggatgggaagtggggtgtggggctgtgtgctaaggaaggctctccttccagcttctactgcctgccccccacctcaggatcagaagtggggggctccaagggcccctcattccagagcccatgggctaaagcaagtaaagatgagtgaggattaaagcaaaaggcaaacatgaggacacagagcctgccctccc

SEQ ID NO: 510977 - DNA, 463 bp, Homo sapiens
aaccccaaacatcactgattgcagaccactgtaatcaagtataataataatgaagatgtttaaaatattgcaagaattaccaatatgtgacacagagactcaaagtgagcacatactgttgggaaaaatgatactgatagttttacttgacatgggattgccacaaaccttcaatttgaaaaagatctccaaagtgtaattttgtaaaagtttgtaaaaatatttgcgaagtgtaaaatgtggcagattaagaggagatatgtctgaagctggaaagttagggtgctgagacagaaactttaaagtcagattgcctgacgcccaagctttggccattttatttgcacaattctaggtctttacattrtaggctcattatattgttcatgcaagtctagaggagaaaactacaacaaagtctgaagtaccaatgttaaattgattatgattatttaaatgtttt

SEQ ID NO: 510978 - DNA, 456 bp, Homo sapiens
atagtatttgtttggaatttatatgcggttttgagctacaggtgcaaacatcatggaataacaattgaaaacattggcatagaatgtggattctgtataaatattttatatactcattcacaaatgttcamtttctgcattcagttctaaaatcatttcaatctaaaatgacttattttaaagatattttagcaaaacaatatttgcatgtataatttatacatttgattttatgttcttgatgttatacctgtatttccaacaagaaatatattaaatatatttattcagttactcttttcctaatgaacaccagttcacagttgtgtgtgtgtgggtgtgtctttaaatacagatgtttcatatgttctatatttgtgggttttttacttctgtcatgtcctcaggtacatacaatgtgatatttggattccagaaactgttatcactcttaat

SEQ ID NO: 510979 - DNA, 537 bp, Homo sapiens
aaaatttataaatatgttgatgstaatcattaaattgaagaataatatgtttataagtaaaatgcacaaatctcgagcctacagcttgatatatttttacaaaatgaatatgtttgtgtaaccacatcaaaatatagacgggtacccaaatttttgaagcttccttcaggtacccatcccaatgtaacccctattctgtaacccctatctagaaagataacccctattctgaattctattattaacatacaattaaaattttctatttgttttgtctgttttgaatgtttataaataaaatgaatttttttaattttttttgtctctagcttctttcattcaaatataatgtctataagctccatctatgttcctctatgaagcagcgatttgttcatttaactgttgtataatatgccattctatgaaaatagtacagtgtatttttccattctacttttgatgctacttattatcagcatttatggtataccatagaggcttctggtttttctagagtcacattaactcatctga

SEQ ID NO: 510980 - DNA, 537 bp, Homo sapiens
aaaatttataaatatgttgatggtaatcattaaattgaagaataatatgtttataagtaaaatgcacaaatctcgagcctacagcttgatatatttttacaaaatgaatatgtttgtgtaaccacatcaaaatatagacgggtacccaaatttttgaagcttccttcagrtacccatcccaatgtaacccctattctgtaacccctatctagaaagataacccctattctgaattctattattaacatacaattaaaattttctatttgttttgtctgttttgaatgtttataaataaaatgaatttttttaattttttttgtctctagcttctttcattcaaatataatgtctataagctccatctatgttcctctatgaagcagcgatttgttcatttaactgttgtataatatgccattctatgaaaatagtacagtgtatttttccattctacttttgatgctacttattatcagcatttatggtataccatagaggcttctggtttttctagagtcacattaactcatctga

SEQ ID NO: 510981 - DNA, 537 bp, Homo sapiens
aaaatttataaatatgttgatggtaatcattaaattgaagaataatatgtttataagtaaaatgcacaaatctcgagcctacagcttgatatatttttacaaaatgaatatgtttgtgtaaccacatcaaaatatagacgggtacccaaatttttgaagcttccttcaggtacccatcccaatgtaacccctattctgtaacccctatctagaaagataacccctattctgaattctattattaacatacaattaaaattttctatttgttttgtctgttttgaatgtttataaataaaatgaatttttttaattttttttgtctctagcttctttcattcaaatataatgtctataagctccatctatgttcctctatgaagcagygatttgttcatttaactgttgtataatatgccattctatgaaaatagtacagtgtatttttccattctacttttgatgctacttattatcagcatttatggtataccatagaggcttctggtttttctagagtcacattaactcatctga

SEQ ID NO: 510982 - DNA, 537 bp, Homo sapiens
aaaatttataaatatgttgatggtaatcattaaattgaagaataatatgtttataagtaaaatgcacaaatctcgagcctacagcttgatatatttttacaaaatgaatatgtttgtgtaaccacatcaaaatatagacgggtacccaaatttttgaagcttccttcaggtacccatcccaatgtaacccctattctgtaacccctatctagaaagataacccctattctgaattctattattaacatacaattaaaattttctatttgttttgtctgttttgaatgtttataaataaaatgaatttttttaattttttttgtctctagcttctttcattcaaatataatgtctataagctccatctatgttcctctatgaagcagcgatttgttcatttaactgttgtataatatgccattctatgaaaayagtacagtgtatttttccattctacttttgatgctacttattatcagcatttatggtataccatagaggcttctggtttttctagagtcacattaactcatctga

SEQ ID NO: 510983 - DNA, 568 bp, Homo sapiens
aaactttaagagaatgagttacagactaagaacatgcatttgagacaccaaattgcactgagaaaagtattctgtcttatttgtgccattacacatgttagactcatttgtttcagaaactagtttctttaaccaatatgtaaattatttataccgacacacattttagagtgtattggctgttggtgtaccatgacacatattagactgttgattgtaccattccacatgttacagttatttgtttcaggcattagagtctatttaaccaacagagaactaatttgatggtaaggtgctgccataactgatatagatataattagctaaacagtttaatgatgatctgccaagaaattgatgtcagcagttagaaaactaaagtccttttttatgcagagacagcacagttggtaaaattkttatagttgacaagttggaaagcagtgcatgtctctgacaagacttcagctctgtgggaagtgtttggaaagaaatggagtgatagtgtttgttggcatttattttctgcttttactacagtactaaacaagagagatgagctcag

SEQ ID NO: 510984 - DNA, 283 bp, Homo sapiens
atgaatagtggaagaaagcagttataaataccaactattaccacatgaccagtaacaaaaataagaactgtaactgtcatgagtattttatccttattttgctttcaagatgtttgtgtgtatatatacacatgcagttggatgatagattgatgataaattgacagatatttgttttctttcctcttgtattcacttattacctaacataagatatattaattatattttgtagtattgaagtatttttwattttaatcatattatttaagtaaccagatag

SEQ ID NO: 510985 - DNA, 636 bp, Homo sapiens
aattagcaaaatgtctcaagtcaaatttttctgcttttaaattcctttttaatcacttcctatctttgtgagtttagacaaaaaaaatttagcctttctggatttcagtgccctgtctgtgtagtaggaacaatgataatgcttacctcatggggctataacaaaactcaataaaatgaatgcaaaatatttagtcatcacaatgtctgacacttaacacaagttcaaatgtaaattttcttattttttacttgaaagggaaacagactcagaaaattatgtgactggctcattacaccrtaattacatttgggaggactgaactccagtgtttctgactcctaagtcacattccagctctttcctctacactagatttcttgaaaaggacaagttaaagatcaagaaatgaatacctcacctaattcataatgactttaaacagtacatttataatctataccttgcttattgtgacaaaggccgctgtgaaactgtactagcatattgtctcaaatatcttttacaaatacagattgagtatgtcttattcaaaatgcttgggactagaagtgtttcagattttggattttgtccgatttttgaatatttgtattatgttggctcagcttccct

SEQ ID NO: 510986 - DNA, 551 bp, Homo sapiens
acacacaggaaaatatttcagtggcaggtgttcccccatcaatctagttagtgccacttctggtctacttggccctattcctataccaagagagaaagcagtgtggccagaagaggagtatcctagagaattagccaaatcccagtttgaatgtttaaccacttacagggtttcttatgagtaccacatgtactgcacagaagcacattaatgaggcatttctactggtgatgtcaccccagatctccctgccatttgaagtggataggagatcttccattcctgtgtgaagcatttacatagacttgcatctgctgaagagcggccatgttgcttcccaaaagcggcwgcatgtcagagaactaagtctaaaatagaatataccagatcatctgcatcactcaatgaatagtatgtgaatataacttgtaacacaatgtggctatgaatttttaacatgatttctccaacacagtgagagatattgcattgacattttaataaatgtacaaaatggattaaccatttcatgatccatgtatgaaacatta

SEQ ID NO: 510987 - DNA, 595 bp, Homo sapiens
ctcagtaaacatttgtaaaatttagtagcaaactggttcaacacctagcactgataaagcaacaattttcttgaattattacagtctgagactggctgtatgtaatgttatgctatgtaaagaaaaattaagtgggaaatagtactaaattctgtctctcagttatttttgcccacaaaaatcccagaacccaggattctgtattctcttggtagcagtgtactgcattatggagagattagcttttgaacaccatcaataaacatcccacactcattcctttaacaaaactcaatggaaaaatttgaggccacaaaataagaaataaaaattcacagcataacctacaggggaaaatgtttaaggactacgatcttgaagccctgttaaaataactacatgtaataactttagaaatgaaaggcttgaagttactccaagatcacagcattcttgttatatctttctcaactaacagttgagaaacttagggtcagattcaaagactcaggcttaaatctgaaagaaggaaaacagttggttaggatgatatrttctcaaacgacactcaaagggtttgagaagaaaaaataca

SEQ ID NO: 510988 - DNA, 592 bp, Homo sapiens
tcaacaaagactttttgattgcttgttctgtgccaagacaatatgctctacccaggttatattcattttttactgaaaaaaaaaatgcattgcacccctactagtgccaggccctgttccaagccctcatgatagagaagcaaaaatattaagttcctactttcactgagcttacattatatgaagaggaaaataatagtaagcaagaaaccaggttgggcgtggtggttcacacctgtaatcctaccactttgggaggccaaggcaggaggatacccttgagcccaggaattcgagaccagcctgggcaacatagggagactctgtctcagaaaaaawaaataaattaaaaagaaaccaaacagacaaacaaacatacattaccatgttctggcaaatgctatgatgcaatatatagctaggtaggtggaaatggaacatgggatgaggacatagaaataaatctgtggtgaaacaaatggcaatattattttttgtggttttgtgcttaagaaagacagctctagaggcaagtgtgagggccagtctgaatgatggtaagactggggtctgatggttagatatcattgca

SEQ ID NO: 510989 - DNA, 581 bp, Homo sapiens
tttcaaattatattacatgttattccckcaaaatgaacttttaaatgacaaacttttggctcataagaatggcaccttcaaaaggggcgatttccactcagtctctggtggcattattccaggctagtttcaccagttaaaaaccttcaaaatgttcacttttaacacaaagtcttcccataaaaaatgtggctacattttccccccaatgactacatacatagatgggtagcagcaagaaaagatgaaaatgaaaaggcagccattaaaataaatggatcaattgtataccaagaagtatttggctcatggcaattaaaaaatggcaactagggtatgttaatagccagaggcttgagtcattactgagtatgttaagagaacgaagccagtccagtatgaccgagtaggaatatataattgtcattgcacttcatttgttatagcaaatactctaagccaataggaaatctaagctatatctagattcccaattagaacatgctgacctttaacattttcaacaatttttactgggtttagtacatcagtcattttctttactcaaactccattacgag

SEQ ID NO: 510990 - DNA, 581 bp, Homo sapiens
tttcaaattatattacatgttattcccgcaaaatgaacttttaaatgacaaacttttggctcataagaatggcaccttcaaaaggggcgatttccactcagtctctggtggcattattccaggctagtttcaccagttaaaaaccttcaaaatgttcacttttaacacaaagtcttcccataaaaaatgtggctacattttccccccaatgactacatacatagatgggtagcagcaagaaaagatgaaaatgaaaaggcagccattaaaataaatggatcaattgtataccaagaagtatttggctcatggcaattaaaaaayggcaactagggtatgttaatagccagaggcttgagtcattactgagtatgttaagagaacgaagccagtccagtatgaccgagtaggaatatataattgtcattgcacttcatttgttatagcaaatactctaagccaataggaaatctaagctatatctagattcccaattagaacatgctgacctttaacattttcaacaatttttactgggtttagtacatcagtcattttctttactcaaactccattacgag

SEQ ID NO: 510991 - DNA, 581 bp, Homo sapiens
tttcaaattatattacatgttattcccgcaaaatgaacttttaaatgacaaacttttggctcataagaatggcaccttcaaaaggggcgatttccactcagtctctggtggcattattccaggctagtttcaccagttaaaaaccttcaaaatgttcacttttaacacaaagtcttcccataaaaaatgtggctacattttccccccaatgactacatacatagatgggtagcagcaagaaaagatgaaaatgaaaaggcagccattaaaataaatggatcaattgtataccaagaagtatttggctcatggcaattaaaaaatggcaactagggtatgttaatagccagaggcttgagtcattactgagtatrttaagagaacgaagccagtccagtatgaccgagtaggaatatataattgtcattgcacttcatttgttatagcaaatactctaagccaataggaaatctaagctatatctagattcccaattagaacatgctgacctttaacattttcaacaatttttactgggtttagtacatcagtcattttctttactcaaactccattacgag

SEQ ID NO: 510992 - DNA, 546 bp, Homo sapiens
cctctggctttccttgtcactcagagtaaaatctaaatttctggtcatggtttagaaggccttacagagtctgccccttgtccattycttccaggtataccagcctgcttgctgttcctccagcataagaattccaagtatgtttccacctcaggcactttgcacctcctggtctctctgctcaaaatgcatttcctccaatagtcatacatttcccaccatccatttttcttgggttctctacttaaataccactttgtcagtaaagccttcctggcaacccattcttcttctttgattaagattttcagatcatctttttttactttttaacgtctctgagaattggacgcatctaacgattgatgatctctcacgattataattggaagcttttcttttagttggtagataaatatagttatgtatttgcaactgttgatgtctttggcttaatgaaatataacaatttagcactacctgcttctttctgcatcatcaccttttttgcctactttattttttcttcatgtcacccagatgtat

SEQ ID NO: 510993 - DNA, 546 bp, Homo sapiens
cctctggctttccttgtcactcagagtaaaatctaaatttctggtcatggtttagaaggccttacagagtctgccccttgtccattccttccaggtataccagcctgcttgctgttcctccagcataagaattccaagtatgtttccacctcaggcactttgcacctcctggtctctctgctcaaaatgcatttcctccaatagtcatacatttcccaccatccatytttcttgggttctctacttaaataccactttgtcagtaaagccttcctggcaacccattcttcttctttgattaagattttcagatcatctttttttactttttaacgtctctgagaattggacgcatctaacgattgatgatctctcacgattataattggaagcttttcttttagttggtagataaatatagttatgtatttgcaactgttgatgtctttggcttaatgaaatataacaatttagcactacctgcttctttctgcatcatcaccttttttgcctactttattttttcttcatgtcacccagatgtat

SEQ ID NO: 510994 - DNA, 546 bp, Homo sapiens
cctctggctttccttgtcactcagagtaaaatctaaatttctggtcatggtttagaaggccttacagagtctgccccttgtccattccttccaggtataccagcctgcttgctgttcctccagcataagaattccaagtatgtttccacctcaggcactttgcacctcctggtctctctgctcaaaatgcatttcctccaatagtcatacatttcccaccatccatttttcttgggttctctacttaaataccactttgtcagtaaagccttcctggcaacccattcttcttctttgattaagattttcagatcatctttttttactttttaacgtctctgagaattggacgcatctaacgattgatgatctctyacgattataattggaagcttttcttttagttggtagataaatatagttatgtatttgcaactgttgatgtctttggcttaatgaaatataacaatttagcactacctgcttctttctgcatcatcaccttttttgcctactttattttttcttcatgtcacccagatgtat

SEQ ID NO: 510995 - DNA, 604 bp, Homo sapiens
gtggtcaaattatagccaaaatcataggtcatgagcaatcctggctaaaaagttctgcctgaagagggaaaagggaaactaaatgtgccaaatggatttaatttcatgcatttaaattagaggcacaaacataattagtgtaagaagcgggaaggctactgaattagcaccatataaggctttttaaccagtattttcaaactctactagctctaaaataattttgcaaaactttgtatcctataacacattttcagttgtagcctrtaatttttatcataaatttaaacagttgcaaggaatatattttctaacattagtaaacactgaaatttgaaaattaaaatgatcttttaagtgaagtagaattcttagacctgagcaagaggaaccctgcacactgtgaaggcataccatataaattcattttaaaaatgcccaggaccctctattaccaggagcatagcatttaacactcatgcagaaagacctgtaactctaaacatctgctctcaatactaacgccattcaacaccagggaatcacttttgcacatctcctgccctagtcctccacacaaaaagaaagtgcatgtaaatgttag

SEQ ID NO: 510996 - DNA, 612 bp, Homo sapiens
tcaccacttaccttccttcttacaagaccctgctacttctttgttgtaaagctaagccttctacacctccctgtctccagccctgcccatcacacaggtcatttcctattttcctacttttttttctcttggcaataattacttcatgacattctagatattttacatttaaattttgtttatagttattctaccccctaagaggtaagccacatgagggaagggaatttggaaagtgtgattaaatgcagtatcacagtatcttgaatatagtacatgcttgataaacacttgttgaacactgcattgattgtctatgctgtgtaacaaagtaccacaaacgcagcagctcagaacaacatgtatttattatctcacaatttctgtgaatcagaactcctggctgggtcaggttgtcataagtgcaggaatctcatgagatatcagccgggcagtgatactttctcaacctcagggtcatcttcgcagaattcagtttcttgcagcttcagagctttgwtgttggctatcagccagggcccactgtcaggtcctgggggaccccaaggttccttgttccttggccctttcacagatccctctcacaatacg

SEQ ID NO: 510997 - DNA, 626 bp, Homo sapiens
ttaaccacctaataataataacaataataatattattcataaattggtataatgttttatatttaaagcattttcaggtacattatgtgtttatcctcaaaacaacactgtaaagtaggtaagactttttttatcattgttattactatcactactattattactattttataatcgaaactactgaaacctcattctaaatgacttcttcaaaacarcactaaatgacagatgtggaatgtgaatgtaggttttttgtttcagggattagtatttatgactttataccactcttttctgtgcagtgtactccatttttctcttttctaaaatgtgcttaataatagtacctacctcaccaagaaataaagagacttaattagatagtatgtaaaaagcacttagaatatagcacttagaacatagcatttatgacatatagcaaatgcttgatacacataggttattattatgaacatacattaatcagaattcaaactgtgatggttaaatagaaacttgatacataaaaacgtgctcagagtgaatttattttcaaaaccaaggacattttcaatttgcctagaatcagcaaatacttattctggtgacttctaacataaaca

SEQ ID NO: 510998 - DNA, 626 bp, Homo sapiens
ttaaccacctaataataataacaataataatattattcataaattggtataatgttttatatttaaagcattttcaggtacattatgtgtttatcctcaaaacaacactgtaaagtaggtaagactttttttatcattgttattactatcactactattattactattttataatcgaaactactgaaacctcattctaaatgacttcttcaaaacaacactaaatgacagatgtggaatgtgaatgtaggttttttgtttcagggattagtatttatgactttrtaccactcttttctgtgcagtgtactccatttttctcttttctaaaatgtgcttaataatagtacctacctcaccaagaaataaagagacttaattagatagtatgtaaaaagcacttagaatatagcacttagaacatagcatttatgacatatagcaaatgcttgatacacataggttattattatgaacatacattaatcagaattcaaactgtgatggttaaatagaaacttgatacataaaaacgtgctcagagtgaatttattttcaaaaccaaggacattttcaatttgcctagaatcagcaaatacttattctggtgacttctaacataaaca

SEQ ID NO: 510999 - DNA, 669 bp, Homo sapiens
ctgaagaccaactgaggggagcacaatgtcaccatatcaatgagaggcaagagaagggttgactggaagcaacttttrgtattaaggagcaatggtcataaaagcctttagagaagataggtgtagccatttcccagtgactgcttgaacaaggcacctgtagagaagttaaggtgacttccctgagtgccataagtgaaaggcgtataggataaaagatctctgctgccacccccacagcccttggttgctgattgctgactgtatcctcacaagcaagtgtcaccaaaaatcaccattccagtgccattctggcagcccattctcacacagtcccatacaagaaagttactacaccagccagcaagaacaaggtgcttactaagtcactctcctaaaatctgggactaacttcaggccaatgacaatcccataggtatgatttccaaacatcttaggggcatttggtagagcccatgcaagtaacaaagcagcagagggtgtcctgaaggggaaagatagggcccaaggtccatccacatcctctcagatggcactgccatctccagtcccaggtatctaagacaattttgaggaagatacttctgttgacaagggatagtgtggaactatcccagggtcctgatccagggtaccctactgatgaaa

SEQ ID NO: 511000 - DNA, 400 bp, Homo sapiens
gactacgttgacagttttttgtgactaagacctatttgttgtcagaatgttttaatgccaagtctcaggatttcaactctcaacttactcccaatatcacttttaaaaaattgtaaataatgaggttttggaaataagggtgcctctttctcaaaagttcctttttgtgtgactgtttctagaatttcatagataaataaaaacaatayagttttctttgctaaagagcttacttgttaaacagaccatcaaagtaatggctacatcttgcatgagatactggtaatttccaaagagttgtagttgctgaaaaagaaacaaaagcaaatataaatgtggcatctgccatcatagcctatttattattccctacactctttttaagtcgttaggaggcagc

SEQ ID NO: 511001 - DNA, 528 bp, Homo sapiens
gtagcatttatgcttcaggctttaggaccttgaaaggtttcagtctggtaaggttccttaagggctgcaaagcaccattttattgtggggaaacctgcaggggctgagaaacttgtgacctctggatgatagaattcttgccatcttcatatgaacctgtgatgtttcctcgcacatttacagtatttgcagagccccgcatggtgctcagtggggtgtctcccccttattatctggattgctatgtgatggaacaaactctattgaaaacaagaactcttttttattctcrtgctttgggtatgtatgcataacctaggcttagggggctctgggctgaagtcatgctttttataagcgcagagagaagttttaagcatcaattactaaagaaggagtagaatgtggcctgggatttttaacacatattttaaacatttctcatgtctccaattttttccccactcttgttttcatcaaacacacacacacacacacacacacatttaaaaataataattaaaaagt

SEQ ID NO: 511002 - DNA, 528 bp, Homo sapiens
gtagcatttatgcttcaggctttaggaccttgaaaggtttcagtctggtaaggttccttaagggctgcaaagcaccattttattgtggggaaacctgcaggggctgagaaacttgtgacctctggatgatagaattcttgccatcttcatatgaacctgtgatgtttcctcgcacatttacagtatttgcagagccccgcatggtgctcagtggggtgtctcccccttattatctggattgctatgtgatggaacaaactctattgaaaacaagaactcttttttattctcgtgctttgggtrtgtatgcataacctaggcttagggggctctgggctgaagtcatgctttttataagcgcagagagaagttttaagcatcaattactaaagaaggagtagaatgtggcctgggatttttaacacatattttaaacatttctcatgtctccaattttttccccactcttgttttcatcaaacacacacacacacacacacacacatttaaaaataataattaaaaagt

SEQ ID NO: 511003 - DNA, 480 bp, Homo sapiens
ggagtggcagactcaaactcaaaactcaagttaggagtcttgtttagtccacgaaagagaaaaccacacacacacagtttaattgacatggtctatttactctttgaattgataggaattcataaaatattgtcatccaggccctttcaaggtagatcacttgttctaaayggagtgccagacaaagaacaatcttgacttccttttatttctgctttgtcatagcaagaggtgaacaaagtatgtcttggtagttactggctgacatagtttgaaagctaaaatcccatggtagtgattaaattattttttttttcacctaatggacaaaaatggaatcaaatgtttcataaacactggtgattcttttgtagtgagtgttttctggccaaccaaagtaatttttcaacaaatgtgagtttggaaagaaactggactggaaatgcaactctgattcctggttcaattttaagttttgag

SEQ ID NO: 511004 - DNA, 612 bp, Homo sapiens
gttactttaatacatttgattaacagtctctacatccaaactttcaaggaaagattctaaaatattaccttcatcttataagcattaraacatatttcaaaacatatgaggatatatcaaaacatctgaagatatatctggtatttgcccaacagagataattgattctgcaatgtgtgccaaattatatgaaacattcttttaacatctaaaaataatgtttggtatttcctcagatatattttcatttctgctgctagctgccttgggcctcacaattttcattctgttttctgactttcaagttatataccgtggaatggaggtaagtggcattcatttgcacatctggcatgactcatgtacatggaccatgtattcattgtaattcacaagtcaattattactgtattctctttgaccaccaaatactgtgaggctatttctatatactagaagggcaaataagatatctggatttcacctatactggcctctaatggttttcatattattaatattattgggtacatttatcctgtacctacctgaaatattgtttggatactttattatgctatgttataccaatacaataaaattaatgcaata

SEQ ID NO: 511005 - DNA, 520 bp, Homo sapiens
atttcaaaacatatgaggatatatcaaaacatctgaagatatatctggtatttgcccaacagagataattgattctgcaatgtgtgccaaattatatgaaacattcttttaacatctaaaaataatgtttggtatttcctcagatatattttcatttctgctgctagctgccttgggcctcacaattttcattctgttttctgactttcaagttatataccgtggaatggaggtaagtggcattcatttgcacatctggcatgactcatgtacatggaccatgtattcattgtaattcacaagtcaattattactgtattctctttgaccaccaaatactgtgaggctatttctatatactagaagggcaaataagatatctggatttcacctatactggcctctaatggttttcatattattaatattattgggtacatttatcctgtacctacctgaaatattrtttggatactttattatgctatgttataccaatacaataaaattaatgcaataa

SEQ ID NO: 511006 - DNA, 328 bp, Homo sapiens
ttcccagcacagagccctgaggggcagcctgggcgggcatctgggcccccagagtttgggtcctcaggggctgtccagaggccaagggcaggccaacgttcccaggtgcactgagtgagcagcagcgatgactcctgaagcctggggcgtgggaactgccgctgagggaccttcccagcagcccacagaaggccctggaggaaaacaccccacttacaacgcaccaaggagaatgcccaamagcccaagataaacccagtgagagagcagaacttacacagtcagagctcaggcccggcattcaactccttgtggttgctcaggtgtt

SEQ ID NO: 511007 - DNA, 599 bp, Homo sapiens
actttgtcaccaagaccaggaacatggcaagaatgttccctcttaccacttcttttcaacattgtactggaagtcttagctaatgcaataagataagaaaaggaaataaaggtatacagattaggaagaaataaaatggtctttgtttgcagatggcacrattgtctatgaattggccaaaaaacttctggaactaataattcctgggaggggattaccctgtaagctctcataagaaccctccatgtgcagccacatcagagaaaactcaggggcacagcataatctagtggagggcatttggctcctatgttatgtgaaagatacccctcactgtccccatgtgccctcttaggggacaaggaaactgaattgagagacattggatctgccaagggaccttggtgagaggtagtgtggccccagagcagaggatatgggggcagaaactcagaagggtctgtagtgccagcagaagccatggtggaccaagtcagcctgagagaggccagtctgtgagttacaccagcagcagaagacagcaggaacaccaggagggcacctagacccgtggtcaccacccatgcagcaatcccagc

SEQ ID NO: 511008 - DNA, 515 bp, Homo sapiens
aacaggaccccaaagcaccaggtcccatgacaataaccatgaggactgaggctcttgcctgcaccttaaggggcccgttgtctggtaggaacactgcataggatgtgagtccttgatctctattattatttgcactctatggagtctggaagttgaaaacaagtgtaagctgggagcaggaggaacaacacttctccctcaaaaaggcaaacaaaacaaaagaacagtgattaccaaactattaacagtggctgctactggcagatgaacttatggtggggagtaaagggaggtgttcttctttctgtattgttccttttggaattgtttgtaattctttagaaaaatmaaaatattttataaatgaaacacaggaacaaagtataatattggtctctttgcaaatgtgaagacatttacctccagactcccccacccccccttcagtttcccataccccatcccagacaggtatcaaatgccttcctcccactggcagcttccctctggttggc

SEQ ID NO: 511009 - DNA, 501 bp, Homo sapiens
ccggagatgaaatgagattcttcctactaggtgggatgcccagattcgctagtttatgattttgaggggactcctatctcccaaattgrgctgggaggacatcgggactgaggtgaaacattggtcacccggaatattctccactcagctttccacaaaacaaagggggacaattcctctgttgtgaccacagactctttgcttggcagtttcaatcatcttctaactgatcgctagccttctgttatgccccttctgatccatcctcaagtggccacaaggagaactctgtgaaatacaaatatggatatgtcatttccttgcataaaattctctcacagtccccctcctgtggtctagaccagcactgttccataggacttcctatgatggtagaaatgtcctatatctgctctgcccaatagccatattggacagctgggtggctgtatggctactggacagagcagatatagaacccttactcacaagtggctactg

SEQ ID NO: 511010 - DNA, 501 bp, Homo sapiens
ccggagatgaaatgagattcttcctactaggtgggatgcccagattcgctagtttatgattttgaggggactcctatctcccaaattgagctgggaggacatcgggactgaggtgaaacattggtcacccggaatattctccactcagctttccacaaaacaaagggggacaattcctctgttgtgaccacagactctttgcttggcagtttcaatcatcttctaactgatcgctagccttctgttatgccccttctgatccatcctcaagtggccacaaggagaactctgtgaaatacaaatatggatatgtcatttccttgcataaaattctctcacagtccccctcctgtggtctagaccagcactgttccataggacttcctatgatggtagaaatgtcctrtatctgctctgcccaatagccatattggacagctgggtggctgtatggctactggacagagcagatatagaacccttactcacaagtggctactg

SEQ ID NO: 511011 - DNA, 498 bp, Homo sapiens
cctcagctgttggctcacaacatcttctttctggaaactcaaaggtactgcctagaaaaacccacggacgccatgctctgcatatacctcgtgctctggtgtttcagcaaacagaccctggggtcctatttagaagcacaggaaacctttttgttcatcctctgcttgcacttctgaaccatgcctggcttcctgtcagccccaggcctctgcacatgctgctcctctccctggaggaccctcagcccttctttcccctgccagctccttctcccactgcagggcccggcttcagaggcctcctctttttggctgytctccccttcctgcccctgcccaagtctgtgttcagatccggattccattaaaacaacaaaaacctaatctggctgacaagcaaaatgggaaattgttgcagggacataagatatctctcagtgtggctgggaagtaagataattggatgtgggaacaggagagaagaacaacctggctgtc

SEQ ID NO: 511012 - DNA, 453 bp, Homo sapiens
tcataaaggcagacacaagctggtcctattgtgtagtgatatggtttggctttgtgtccccacccaaatctcatcttgaattgtaatccccataatccccatgtgccaagagacagaccaggtgaaggtcattgactcatggggcagttccccaatgctgttttcatgatagtgagtgagttctcacaagatatgatggttttataggggctcttacccccttcgctgggcacttctccctcctgccactttgtgaagaaggtgccttacttccccatccacttccaccatgattgtaagcttcctgaaacctcyccagccatgtggaactgtgagaccattaaacctctttcctttctaaattacccagtcttgggcagttctttatagcagtgtgagaatggagtgatacatgtagtttctaaatttcacacccacaggattcatcagcat

SEQ ID NO: 511013 - DNA, 541 bp, Homo sapiens
aataaatgtataggaatgttctgagaagcaggaacatttagactccagccagacaggagttcaaattccacctcaaccatttcccagctatgcaagcatgagcagttcacctctctgagtgtcagattttcactggaaattgtgagaatacatgaaaatgatttatcccagagcctagcacaaggtaaaagagcaataattggaagagacagggaaaagcctttcaccaaaagctaagtgtgagttggaggcagggtgcggcctagggggcccctggctggcttttggaggacctgcatgccatttgtctccctccacggcttctrccccagacatggattcatcctgctctcatttctgcctctgagatgggtgggccccatctctccacagagccatctgcgactccctcctaccgaagtaaaatggacttttcctacgtgtctgcccaggactcagccagactgatgaactgagcttggggaacatttgaacagattgaggtgatgtttttaccaaggcccaggagcgatgcttcagg

SEQ ID NO: 511014 - DNA, 598 bp, Homo sapiens
tgcttctgggtgatggggtacatggcaagacaatgaagtccatggtcatgagcccattgctgtgcttctcttactctcaaacaaattcctttgttggaaggaatgagagataccatgatggtgaataaggtattttacaagtccataaatggggcagttggcagaagcactgtgagcagggaatgcaaattcatgtgcgggacttatatctcttctaatgaggacaaatctctgcctcctgtatgatgaaagggatccaatggactctacccaccacaagggagctaattaattccttagggaatggtggatactgaagaatgagcattggcctctgctgttggcaggcacttagtggtaccagtaaccacagcacccacagtggagaagtccaagttaatgagtccaggtgaatcctctgtatctgccaccatgttttcttccttccatctctcctctaatctcctcctcttccytcattatttcctttttcctcttttttgttttcttctttctcttgactaaatgtgattgttttccttatataataattaaaatgaattgctatctcatatctctgtaccacttaatgatctag

SEQ ID NO: 511015 - DNA, 237 bp, Homo sapiens
taagcaataatccttgtcttcaaggattctacacttagccggggaaatgagacacaygcccagacacacacatgcatgttataaaacaagatgtttatatgaacagtgtagtgaggtggcatataatgaagagccacataggtaatacctactctactccagggtggaggccaaaaagtacatactacaggtgccaatatatattacctttaatcctcaaagccatctccattttac

SEQ ID NO: 511016 - DNA, 550 bp, Homo sapiens
ctgcatctgtactcttctagaaaatgctgagattcagcagttgctcaaaaggcactgacatctaattatcatcctataggctgttgccacaagtctgcatagtgaagtcaatgctgagacaggcttcctttgccagtcagaggggctctggcttgtttacagatagaatctttaactcctttgaagggccagcgtgaggatactgggaaggttccygtgggacagttttataattgaaccagggaactcctctgtgcctgctcatatgtgatatggataagtcatgcagcaccggtcctcctgcatccaggaatgggctgacattgatctgttcactcttcagggatgctgtctcaactacttgcacaggtataattttattatattacgctgcatattaaatacctgcacttcccttttcccatcctgatacagatgatttcattttgcccacagtaacacatgcttctgtttgcacgtgaccatgatcattttctctacctctaggcttacagaagggccagaggtggtgctaatcaggaactggaaa

SEQ ID NO: 511017 - DNA, 640 bp, Homo sapiens
tgcctacgcacaagggaccatggtagtcagtacaggagggagggaagggagtcaatgacatccatgagggtcagaaggataagcaggtgccaggaggcagaagggggagaacacgctctgcgtggagaggcagcgtggggaaagcctttgagagagaggaggcatgcaggctgggcctcaaagcgtgccagggtctgttcacagccagcgaggcggagagcgtttccaggaaagaactcaggagtgcgactgcaaggcaacctcaggtggcggcaggacccacagcccccaggggagggaagtggtgagaggtgaggccaggggtcactgtggtgcatgacgatgtggcatagaccatgccttgccgggtgcagacagaaggccctggccttcctctccaggagctgggatggagggagcrcgaacaggtggccagagtcacattttcagaaaattaataagagactcatgcgcaggatggtctggaaaggatgcaaaacccacatgtggtagccaattatatttgcttcttaaatgttcttactttggaagttaaaaatatattctttatatttatctgctcccctcttctactcaaacatgttctgaatcccattactgccagaatcttgaaaaatca

SEQ ID NO: 511018 - DNA, 650 bp, Homo sapiens
tgcagagttctgcagtcactgaaaactccacctaaggaagcagcagagccaggcccacggcccctctcagcccatgcacgctgtctgctgtgcccttcagcgcgtggctgctctacgagccgggccccttyaatcccaccactgccacctcaccactgaaacgccacttcagaatgtccttccacagcagattcagtgaggtacaagggtcctgtctaagaacagcaggcggcaccacgtggcacggccccctcttcagcaaagtggctccccaggcagctccatcctgaggcctcggccccctgtgctgacggaacctctttcctgcattcacagtgggggcctccgcttcagccttcctttcagtttgttgccatctcggatctgtgctttatttaatacccaaagcagaacggaggtttttaccatgtggatgtctacagatgcccccgattcacacgaaacacactgcaccccaagttcttgaaacatggacaagagcgatagtgcctaacaaacaaggaacaaggactcggtccctggagcctgccctcccggtaagaaatgaatacagacaatcctcaagacgttatgaaatctgagattcctctatgtatgtatctacaagtaaggcacaccaaatctgtctc

SEQ ID NO: 511019 - DNA, 299 bp, Homo sapiens
tgcaaggcaaaagccacagtatccccctgcacagggctgagaggaagcaggtgggggcaggagaggtgccggcagtttgcagatgtgcagagctagtggaagacattcctcaaagtccccgtggttcaggaacccactttatttatgttttacttactttaattttttttttttttgagacggtctcactctatcgcycaggctggagtacagtggcacaatcagggatcactgcagtcttgatctcctgggctgaagggatattcccgcttcagcacccaaccccacccctggcccca

SEQ ID NO: 511020 - DNA, 517 bp, Homo sapiens
tcctggagattttatgttatgactcttgtagttctctcagagtatacctggactaaagacttcaagttctcaaaagaaaaataagactatgtatcagccatagaaacatatattaagagatgataaaagcaaacaaaatggtatattaaaagctcttgtcacttcttccagagagccaaagaaatrcctattaagcatcaactgtgtgctcagcactctattaggatgagcaaatcatttatttgggattgaacaatgacatatatactacaatgaagaacatgaaaaatatacagcataatagaaggcaaaatcagagactgtaggagccaaaaggcggggaatcaaaagaactgagatgaccagcaaagccttcaagagtcttcagtgatgagaatgatttgcctaggagccaaagccttagtcattctccttacaaagcctatgtgacagcttccctgttaattttttcacagataacattccatctcctcagaagtgtgtgaccctttgggcc

SEQ ID NO: 511021 - DNA, 557 bp, Homo sapiens
atggggtgttaattttaaatgctacgtatttagatcatagttaagaacaagtgacatgactcaatgaaatacaaattaaatgtcaaattctctttaaatttcttgttttgaactctgctttgaaacttagaagccactagacagattttgaacatcagacatctcactttctaaggaatgaaaaaaaaaatctgggttttcactcattttccgttgtgaatgtatagattgaggtcgttggcaaggaacagaaaaagattttttattagctgacaatgagattcacaaactatgtgaatcgacaaacagagcagacatctttttcaaatgatactaaacattcactttggagcacaacgtgctgaatacagaatcacataggccaactttactagatttgcataggaaaagtgcctcctgctgatgtgcataggaaatcctctctcaacattaagccctattgcagaggctttggggaaaactagaagtttttcctgtttaamataaaacagcatttttcagtgcctgctaaggagttatgccattgtctgcaaagc

SEQ ID NO: 511022 - DNA, 501 bp, Homo sapiens
agtatgagcacttaataaatgctagtagttgctgacagcacttatgaccaaaacactttcacaatcatatatgcatcagagccagggctgccgtttaaaatataatgttctcatttgcaacgggagaaatggcacgaaaatccaggcccctctaccaccggtatgtactctttccactactcagacagaggaatacttacatttgaatgagaatatccaatcttctaaaaattaactgtaaaccaaacgacaaaatttaaatggagagtgtttggggggctctggaggaatttgaaacttgtatttaatttcctggctcttcatcctgaaatgcgtctaagctagtaacagacagcaaaaccgagttcctatctctctagtgttccctgctgagataaaagcgaygtgcagcaccggatgccaacagagcaaataattagactgagtgctctttccacagccaatgaatcggaaagtgaaattttttgtggatgcacctga

SEQ ID NO: 511023 - DNA, 501 bp, Homo sapiens
agtatgagcacttaataaatgctagtagttgctgacagcacttatgaccaaaacactttcacaatcatatatgcatcagagccagggctgccgtttaaaatataatgttctcatttgcaacgggagaaatggcacgaaaatccaggcccctctaccaccggtatgtactctttccactactcagacagaggaatacttacatttgaatgagaatatccaatcttctaaaaattaactgtaaaccaaacgacaaaatttaaatggagagtgtttggggggctctggaggaatttgaaacttgtatttaatttcctggctcttcatcctgaaatgcgtctaagctagtaacagacagcaaaaccgagttcctatctctctagtgttccctgctgagataaaagcgacgtgcagcaccggatgccaacagagcaaataattasactgagtgctctttccacagccaatgaatcggaaagtgaaattttttgtggatgcacctga

SEQ ID NO: 511024 - DNA, 561 bp, Homo sapiens
caggtcactatagactccttcaccacagggacccaaaggaccttctctcttccttttgctrtttatctgagatctgccagattctcttcctacattctgtcaacctgaaataaatgaaagagtcagaatccaggttaaaagtgtttattcatgtgcaaagctgagaatggtcatgtaagtaacccagattccaaaggaatggggtcagtgctcccaagctgaaaagttaaggtcttgcttatacaggcagaaaacaaagaaatttaaccggattataatattttccatacaaggctggtttatgagttacagcaatttgattagttacagcttgttttatttcccttttccagtttagaagggtatatttaatgtttcagactgtgtgatagtcatgaggtctttgtataaaagaagtaaaagggaagttaatctataatgaagatccaacaatgaagaggcaaggggtcttctctggtgccctttaatcctttattacattttacgaaacaatgtaagtaaagtaaaggccaatctataatcagagaaacaaaggttaca

SEQ ID NO: 511025 - DNA, 390 bp, Homo sapiens
tgtttcagtcagtgaatttacagcttgtatttatggtccaaaacagaaactatatgagcatatttctctctttttttatcttctttctgtccacttttcttcctttactctctccacattgttttttcatatcttctcatatcttgctgcaaatcctctctcaacgtcaatcattttctccaaatctgtcatctcttcctttgtcttttgtcccaaatctctctgtagccctcttgctatcttctcttccatcccctcagtgcttgctctcccacacatttctcatcatgaaaacacaactccctccctctcattccrttattctctggatgtctttgttttgtccctttgtgtctgggtgtctccagatttcagtctttctttgtgtcc

SEQ ID NO: 511026 - DNA, 503 bp, Homo sapiens
taggaaagagcaaaatcataaagatatacctactttatctgctcactcaatcagactaaattcttaatggaaaagtttcttaggaacaagcaaatataaacaattactttttaattcatttttcctgatctgtataggttatttgcatgtaaatcatattgacacacaaactttactttgtcaatcatttagggcaactatgaaaagattaatacagtagttggacttttgattttccatcttgttcttacgtaraatttttgatgagactgtgatggctaaagggagggaggaagttcatcaagggcccgaaatgtctgtctgttattagaaaggagccttcattttccagaacgaatttatccatagcaatctgtaaaataaatctgtgtagaaagacgtctcaaactaggcatgataaaagttagggccatactgcaggaaagaagcttagaaggatcttctcatccagtgccctcagtttataacccaggagaggccag

SEQ ID NO: 511027 - DNA, 593 bp, Homo sapiens
atctctctagaccaacccacattctccccgcatcttttaagttcaaaatcctgccatgaactgctgtaattcccaagcatcctctgatctgaaatgtgtatattacaaagctgccgtgactaatttggtctatatagcaaggtcaaaaagtacttcccaggatcttatgctataaattagattttaaacatttagataagatattaaaacactctgaacaataaggaatgtcattgtacaactctatagtttttatttagaaaaatgagtaaaactttcagtttcatgatggcaaaagaaagatacttttgctcttgttacttctttcaaaattccataaccacaaagatgataggaaacaaaaacacaaactccagtttcaatgaaataaagaagtgactgcagtctaacatctgaagatgaaagtagttggaggaaacagcagagagaagaaaagtyaagccagtgactacaagaagcaagctgatttgtccctggaaatgtttaagaaattgagatactggatactttagaagctaaaggtaagggaagttgctaaaatgaatgggtatttagactttccatcattggtg

SEQ ID NO: 511028 - DNA, 649 bp, Homo sapiens
ggcagttctgatgttgctggcccaggaaccccactttgagaaccgcagcgttaaggcatcagcctccactcactggaagctgataaaatgcaccaagaggacagcacacaactcttcaaattacagcttcaacataaaagcctgggaagctagaagatgatctgattctaaaagcaaccctgtatctgcctgtgtctaaaagcaaccatgtatcttctctccatggccaccactcagtccaggccacctgtgcagatcacctggacagygccacagccttttcttgggctcccggcttcgctcttcccaggctgtgacccatttccccattcagcacagagggatctttatacatcagaaatcagattctgtccctgtctgaactaaaaccctgtagacagaataatgtcccctctcctagagagggcctcatcctaatccgtggagcttgtgcatacgtaagtttgcagggagagggaggcggaggtgtggctacaggtggaggcaggtggccagtcggctgatagtaagccaggaggatcatccagagtgattgggtgctccccatgtaacctggggttcttagaggtggaggagggaggtggcagaggaggctgcagggatgcaaagtgagcaggacccacccaca

SEQ ID NO: 511029 - DNA, 649 bp, Homo sapiens
ggcagttctgatgttgctggcccaggaaccccactttgagaaccgcagcgttaaggcatcagcctccactcactggaagctgataaaatgcaccaagaggacagcacacaactcttcaaattacagcttcaacataaaagcctgggaagctagaagatgatctgattctaaaagcaaccctgtatctgcctgtgtctaaaagcaaccatgtatcttctctccatggccaccactcagtccaggccacctgtgcagatcacctggacagtgccacagccttttcttgggctcccggcttcgctcttcccaggctgtgacccatttccccattcagcacagagggatctttatacatcagaaatcagattctgtccctgtctgaactaaaaccctgtagacagaataatgtcccctctcctagagagggcctcatcctaatccgtggagcttgtgcatacgtaagtttgcagggagagggaggcggaggtgyggctacaggtggaggcaggtggccagtcggctgatagtaagccaggaggatcatccagagtgattgggtgctccccatgtaacctggggttcttagaggtggaggagggaggtggcagaggaggctgcagggatgcaaagtgagcaggacccacccaca

SEQ ID NO: 511030 - DNA, 625 bp, Homo sapiens
atgatcacagaacttcctctgatttggcatcaatgttttcatagtaaacattgtatcgatgttttcatagtgaacrttgtattaatgtttactaataaaatgagtttttaataataaaatgagtttttaaaaaaacattgtattgagtttaatgctcagtccaatagtattaaactcatcattttaagtatcaatgagataatctgtgtaaagtgaatgagataatctgtgtaaagtgcttaagacagtgtctggaatttaagaaggcttaataaacaagagttaccagcaacttcattatcaccatcctcatctcattatcatatttgtcactgtcataaaaagtaaatgccttactagacttaccagtattccaataagtaaaatcagcaaataaccaccatccactcacaccttctcaggacactgaaatgcccccatagaacctggagggaacaggagcttgcaaagcacatccctggagtatttttctaagtcatccctagtgatctcagggaattctctagagtctcaggggcgagttcagttccccaaagcctctcttcgtgcctttggtgtgccttcctctaagctgctgcaccaaccttgagaaaggactccctga

SEQ ID NO: 511031 - DNA, 625 bp, Homo sapiens
atgatcacagaacttcctctgatttggcatcaatgttttcatagtaaacattgtatcgatgttttcatagtgaacgttgtattaatgtttactaataaaatgagtttttaataataaaatgagtttytaaaaaaacattgtattgagtttaatgctcagtccaatagtattaaactcatcattttaagtatcaatgagataatctgtgtaaagtgaatgagataatctgtgtaaagtgcttaagacagtgtctggaatttaagaaggcttaataaacaagagttaccagcaacttcattatcaccatcctcatctcattatcatatttgtcactgtcataaaaagtaaatgccttactagacttaccagtattccaataagtaaaatcagcaaataaccaccatccactcacaccttctcaggacactgaaatgcccccatagaacctggagggaacaggagcttgcaaagcacatccctggagtatttttctaagtcatccctagtgatctcagggaattctctagagtctcaggggcgagttcagttccccaaagcctctcttcgtgcctttggtgtgccttcctctaagctgctgcaccaaccttgagaaaggactccctga

SEQ ID NO: 511032 - DNA, 512 bp, Homo sapiens
ggtggcctggaagtggggacatccaggaacacaagaggaggatgcagtgtagatgggattgagagggagggaagaggcaggctgtgggtctcaggctcagcctaggacacttcccccagggctggatcctccagactccccttccccactttcctccagggtgagatccaagctctcgatactccatccagctacrttaggtgaatgcacatccaccaggactttcttcctccatcaccttcccgttaaggcactcggctggagaagcccggcatcctcacccccagcttgtggctctcactcagatgaaagcactcctcagtacaatgtgcaggagacagaggccatctctgatgttcctcgaaaataccagtgcccattgtcattttgctctgatattgcaagcactgcggacatgctttcttgatgaaggcttctttctgttgaattttccagagggacctttaaaagcagaatttgctagaacaaaataaaggagtgcgcagcctttt

SEQ ID NO: 511033 - DNA, 512 bp, Homo sapiens
ggtggcctggaagtggggacatccaggaacacaagaggaggatgcagtgtagatgggattgagagggagggaagaggcaggctgtgggtctcaggctcagcctaggacacttcccccagggctggatcctccagactccccttccccactttcctccagggtgagatccaagctctcgatactccatccagctacattaggtgaaygcacatccaccaggactttcttcctccatcaccttcccgttaaggcactcggctggagaagcccggcatcctcacccccagcttgtggctctcactcagatgaaagcactcctcagtacaatgtgcaggagacagaggccatctctgatgttcctcgaaaataccagtgcccattgtcattttgctctgatattgcaagcactgcggacatgctttcttgatgaaggcttctttctgttgaattttccagagggacctttaaaagcagaatttgctagaacaaaataaaggagtgcgcagcctttt

SEQ ID NO: 511034 - DNA, 584 bp, Homo sapiens
atcttctgaggaataatggcttcatgtttgtccttgtctatatataatacacacacacacacacacacacacacacacacacacacacacatatatattttttaatttttttttttttttgagatkaagttctgctcttgttgcccaggctggagtgcaatggtgtgatcttggctcaccacaacctccacctcccaggtccaagcgattctcctgcctcagccacccaagtagctgggattacaggcatgtgccccatgcctggctaattttgtatttttagtagtgacggggtttctccatgttggtcaggctggtctcaaactcctgacctcaggtgatctacctgcctcagcctcccaaagtgctgggattacaggcatgagccactgtgcccggctccatgtctatttttataagaaattaaattatcttttaagaaagaccatgtatttagaaagccacgagcattagatttttctattttctactttttttcagtcctctttcacttaaaacacatgtgcaaggcttccaaaccattttatttcttcctaatcatttataataatttttcccagaca

SEQ ID NO: 511035 - DNA, 584 bp, Homo sapiens
atcttctgaggaataatggcttcatgtttgtccttgtctatatataatacacacacacacacacacacacacacacacacacacacacacatatatattttttaatttttttttttttttgagatgwagttctgctcttgttgcccaggctggagtgcaatggtgtgatcttggctcaccacaacctccacctcccaggtccaagcgattctcctgcctcagccacccaagtagctgggattacaggcatgtgccccatgcctggctaattttgtatttttagtagtgacggggtttctccatgttggtcaggctggtctcaaactcctgacctcaggtgatctacctgcctcagcctcccaaagtgctgggattacaggcatgagccactgtgcccggctccatgtctatttttataagaaattaaattatcttttaagaaagaccatgtatttagaaagccacgagcattagatttttctattttctactttttttcagtcctctttcacttaaaacacatgtgcaaggcttccaaaccattttatttcttcctaatcatttataataatttttcccagaca

SEQ ID NO: 511036 - DNA, 584 bp, Homo sapiens
atcttctgaggaataatggcttcatgtttgtccttgtctatatataatacacacacacacacacacacacacacacacacacacacacacatatatattttttaatttttttttttttttgagatgaagttctgctcttgttgcccaggctggagtgcaatggtgtgatcttggctcaccacaacctccacctcccaggtccargcgattctcctgcctcagccacccaagtagctgggattacaggcatgtgccccatgcctggctaattttgtatttttagtagtgacggggtttctccatgttggtcaggctggtctcaaactcctgacctcaggtgatctacctgcctcagcctcccaaagtgctgggattacaggcatgagccactgtgcccggctccatgtctatttttataagaaattaaattatcttttaagaaagaccatgtatttagaaagccacgagcattagatttttctattttctactttttttcagtcctctttcacttaaaacacatgtgcaaggcttccaaaccattttatttcttcctaatcatttataataatttttcccagaca

SEQ ID NO: 511037 - DNA, 595 bp, Homo sapiens
tgaggtctgattggtggaattgcttcatgatctgattgatccaaattttaggcagtgatgacatttacaaaagtgtgcattgcagtgactattcctgctgtgatgtcatggcaagaaaattgtatatggaacgaagcactttgctcttgattaaatatgtagttcaacagattatgcaaataatgtatccccaaacacatcttcaagtaaaatggactgaaaatgtgtgaacctgtatattatagctgaggcggtatgaatgccatttcatatgtgcaaaggtggaagcaatatcacattttaaagccacccctcctgcaagctgtagagaatttagcctcagtcttcttgggggtttctcccagagtagggcaaattcatttgtttatacagatcagcctaagacagcccaactgcatatggtcctttggggttcattgcttctggctgcttctggggcaaagtgctatttaccaagcctggaacccaggcagcccttctcctctgatgcctaccaggattagggtcctgctgctgacctttcagcccctacttgatttctatmgatcctttctttagtctctcttttagggtt

SEQ ID NO: 511038 - DNA, 466 bp, Homo sapiens
gcacagatgggatccccttccacctttggaagagaggttcgggtctagaatgtacaaaggtttgttctgggctccgatctaggaaaacaaaacagcgccaagcaagaaatagtcaccttagcaaggatatcatgctatgcgaattagaatgtcttgagatatctccctttcctacattctacctcagaaaatcccattcactgcccttgtggggagcatctctatgaaccatatgatggcctcttgagctacgtctgattggaccaaagatacgtacctaaaatacaagacgattcattggccagcttgaaccagcaggctaaagactgtagtaaatcagtggtggatcagagctgaaakgtcatagagacttgaggggaagtttgaacgtgacaaagggaaagccatagcacatgtacttcaaagtttttggagaacagagaaaccatgatccaggagtgaaagc

SEQ ID NO: 511039 - DNA, 599 bp, Homo sapiens
tctcagcaacccagtggagagagtcagagatcagagagagcccttatttttttggggggggggaaaggcattaaaatttgcttttattattgatgatctccttacatttaaaacttgaggaggtacatatcaaaaaataaaacttttgagacttaggtaaagagataagtggtgggtaataaagacggrgggtggggggtcgaatgtggtcattatgtcagaaatactcttgagtgagggccctggaagtgagcacacacttatttcagaggttccagacaacaagggcaagagacaaacacagtaagtcacatagaagtctttttttagtaaaaaggaatcactggtttgagtgtcagtcatgccaagcaacatttgaataaactttcaatggcaattttgttaaaagggcaaagaccttgttcataaaggccagttcttattctggcctttaacagtaagttgagagatgagagcccttattttacaactgagaaaagtgacttggcccaggtctcctaaggaattggaggagtggcagtcggctcttctgctccagccaaggctggtccactcaccagcaaagggctaagcagcag

SEQ ID NO: 511040 - DNA, 472 bp, Homo sapiens
agccctgtggaaaacaaagcttatgctmccagcttccaggtgttgatttatagagttaagcttctttaagtatattttcctagagtcttttgtttttatttttgccatggcaccatttggagggggctttactggccagtccttctgactttctgctttctctgactttagacattagaatagttttcctgggagaagaaatcttctttgctattttaaagtacagtgggatacacagaaaatgtaaagtaaaaggtcccaacttgcatttctgtaactgttgagtaagaagtgtaaaggagcccaggtttcgctggccttccaccttggctttttgatggggagcctgagccaagtccatagaggtctagaagccaggggagaaatcagagatgaagtctaaggggaaatgcctgaatttgtgtgcagatgttttcttgagaatgccttaaggaataccagtgaggaagtg

SEQ ID NO: 511041 - DNA, 472 bp, Homo sapiens
agccctgtggaaaacaaagcttatgctaccagcttccaggtgttgatttatagagttaagcttctttaagtatattttcctagagtcttttgtttttatttttgccatggcaccatttggagggggctttactggccagtccttctgactttctgctttctctgactttagacattagaatagttttcctgggagaagaaatcttctttgctattttaaagtacagtgggatacacagaaaatgtaaagtaaaaggtcccaacttgcatttctgtaactgttgagtaagaagtgtaaaggagcccaggtttcgctggccttccaccttggctttttgatggggagcctgagccaagtccatagaggtctagaagccaggggagaartcagagatgaagtctaaggggaaatgcctgaatttgtgtgcagatgttttcttgagaatgccttaaggaataccagtgaggaagtg

SEQ ID NO: 511042 - DNA, 505 bp, Homo sapiens
actgagagttctatgcttctcctgtcatggtagagtagtgccctcttgtccaaggttttgctttctgcagtgtcagttacccatggtcacctgcatctgaaagtactaaatggaaaatcacagacataaagactytgtaagttttaaattgcatgctgttctgagttctgaaatctgccattcgctctgtcctacctgggacatgaatcatcctttcgtccagcatctccacgttgtagacgttcctatcccttagtcacttagttagtgacttagtcatctcagttaccggatagaaaaaatatagtatatatagggtttggaactatccaaggtttcaggcatccattggaagtctcggaacatattccccatggagaagggggaatgactgtgcttacaaggctgtgttgttcttgcttcttttcttatttgtctccctctccagactgtaagccccttgtattcatttactaaggctgccataaaaacatgccacaggctg

SEQ ID NO: 511043 - DNA, 641 bp, Homo sapiens
ctggaatatatccatttttttttctccttctttttaaaaccttattatagagaattttaaaaatatacaagagtagaaataattctagaacgaactcccatgttttcattacccagcctcaacaacgatcaaatcatagccaaccttgttccatcccaacccytacccacttctccctgcgttattttgaagctaattccagacataaatatttcagtctgaatttctaaaaataaggactctatcctttaaaaataagcacaatgccattatcatgccttaaaaaattaactatggtttcttatatcaaatatcaagtcaggttcaaatttccactaaagttttaagtttccattaaaagcagttgatttgaatcaggattcaaattaggacatcaggttgggattggttggcaggttttaaagtctcttttactctttgggtttctcccctaccctctggagagagctccccacaccgtggctttgctgactgcattccttgggtggactttcacttgtgcctctgtcctcgacatgtcctgtaagctggaagccgggatcagattcagatccatttttattttaagtgttatgcaaaaagacacccagtgaaggtgttagaatgagccatggcagtgg

SEQ ID NO: 511044 - DNA, 633 bp, Homo sapiens
agatgggaaggacactaacaatctattatgatcatgattattaataatcgtcattctttttcagaagtggcatgaagattatagtttgttccgaaaagtgtctgtgtatctcctaacaggcctagaactctatcaaaaaggaaagtatgttggccttttattttaccaagattattagtcaggatgctgttctctgtasatgcctacctgggaatactaagagtcacagccatgcataacctcccttgtcacatacactagtgtgcctcttctcttgcagtgctttggctttgctctaaacatcacacatggtttttcatccttcaaatgattagatgtattagctgcgagataatattgtgccaggctgtctttgtgatcaatgaagatgaactcagaaaatgaatttttgagttgacatagaccctagtgagcatttcttgttttagagatgggaaaacctgaggcctagggaagtttcatatttgctttggatggctaggccaatttgtagaagagatgagactggctacggtctttggtccttcactttttcagaattgcagccaagtaggttcttgaaatggggaaaagtgaggtctaagccctagattttagtaaaagagcactcag

SEQ ID NO: 511045 - DNA, 474 bp, Homo sapiens
ttgaatgaaacaggtgtgacatagcagaaaggacataagatttagaatctaaatacccgaattcaagccctgcctccccaaccaactagattgcaaaaataattgtgtctgtatattatatttaattcttaaaagtgtgactatrtttcccttatttccaagttcttgggaaaagaatgggcaccttattcttgcccccatatgtggctaacacaggtaacattctctctcaagactccccacaaattattgccctttaagttaatgtatgcaaagaactttgggtagtgcctagcatgtagtaagtagcatatgagtgttaactagtatggtttatctctttgtccccagcacccgcacagtgtctggcacatgctaggtgtttaataaatacaagctgatagaatgactgacaggtatttactgtccagtgtaggaaacagacatataagcaaataatggcaatggagtgag

SEQ ID NO: 511046 - DNA, 608 bp, Homo sapiens
ttatttctttttgacacaaagttatttcattctctgcaagtttccttaaatcttcattctcatggtgcagcaagtgctcggtctcctgcagctcctgctccttctcgttcagcagttttaccactgycaccagctcgggcctcctgaccttcaaatgggcctcagaccccgcctggagcttgagaaaggtccacaagggcctgccctgggcgaacagctcctccaacaatgggccaccggagctcagggaatggcaagctgggccaatggccccatggggccagagccaccgggcagtgccccacagaaaatgactctttttttttttcaagatggagtctatctctgtcacccagaatggagtatagtggcacgatctcagctcactgcaaactctgtctcctgggctcaagtgattctcccacctcaacctcctgagtagctgggataacaggtgcatgccacatacctggctaatttttgtatatttagtagagaaggggtttcatcatattggtcaggctggtcttgaactcctgccctcaagtgatccacccacctcagccctccaaagtgctgggattacaggtgtgagccaacgtgcctgg

SEQ ID NO: 511047 - DNA, 608 bp, Homo sapiens
ttatttctttttgacacaaagttatttcattctctgcaagtttccttaaatcttcattctcatggtgcagcaagtgctcggtctcctgcagctcctgctccttctcgttcagcagttttaccactgtcaccagctcgggcctcctgaccttcaaatgggcctcagaccccgcctggagcttgagaaaggtccacaagggcctgccctgggcgaacagctcctccaacaaygggccaccggagctcagggaatggcaagctgggccaatggccccatggggccagagccaccgggcagtgccccacagaaaatgactctttttttttttcaagatggagtctatctctgtcacccagaatggagtatagtggcacgatctcagctcactgcaaactctgtctcctgggctcaagtgattctcccacctcaacctcctgagtagctgggataacaggtgcatgccacatacctggctaatttttgtatatttagtagagaaggggtttcatcatattggtcaggctggtcttgaactcctgccctcaagtgatccacccacctcagccctccaaagtgctgggattacaggtgtgagccaacgtgcctgg

SEQ ID NO: 511048 - DNA, 608 bp, Homo sapiens
ttatttctttttgacacaaagttatttcattctctgcaagtttccttaaatcttcattctcatggtgcagcaagtgctcggtctcctgcagctcctgctccttctcgttcagcagttttaccactgtcaccagctcgggcctcctgaccttcaaatgggcctcagaccccgcctggagcttgagaaaggtccacaagggcctgccctgggcgaacagctcctccaacaatgggccaccggagctcagggaatggcargctgggccaatggccccatggggccagagccaccgggcagtgccccacagaaaatgactctttttttttttcaagatggagtctatctctgtcacccagaatggagtatagtggcacgatctcagctcactgcaaactctgtctcctgggctcaagtgattctcccacctcaacctcctgagtagctgggataacaggtgcatgccacatacctggctaatttttgtatatttagtagagaaggggtttcatcatattggtcaggctggtcttgaactcctgccctcaagtgatccacccacctcagccctccaaagtgctgggattacaggtgtgagccaacgtgcctgg

SEQ ID NO: 511049 - DNA, 549 bp, Homo sapiens
accgacactgaagggccatctgttcactgccaaccatatgtgtttccctcctctagtgtgagggcagtgacaaggtgtcaccttgcagtgatctctgatttggggctttcagcactgcctgaggactgtcctgatctctagctggggcaaggtccggagaccaggctggcaggagggatggaaacttgccatttggggcagagtgagccagggacatgggggaggagggatcaggtgtgtgtgtgtgggagccagtgtgtgaccagcagggccacctagggacctgggaacatcagcccacctcatccccactctccctctcctgattgtcccctcccctccaggtaagagttggggatcagaaggtacaatgctgtccagaggctggggcttagaataacctcattagaataaggttggagtctgtctttgactgtgtgactttgggcacattacttcttgttgcttctgtttccttctccataaaatggaaatataaatatttactgcacaaattktttaaggataaaacaaactaatctaagaaaa

SEQ ID NO: 511050 - DNA, 468 bp, Homo sapiens
tggcaaagtactattgttatcygtggagacttgttgcagtgttcagtgtgatttaaacttctatgtaaacttgctgtttcttttcatttacaaagttaatatattatcctctaaagttggcaataggtgggtctgactcaccctgattgggcaaagataatcacagggcttcagctttttgtaggccatgagaatctaaattcaccatataaaacctccatgtttaattgttttgtttttaggaagtcccttctagaaacatagctgccagtgatgttgtattcattccccctccaaacgtaaaatcaaaactttcaagaggacgttttgctctggaaacttctgagatcaaaggtcaaaaggttcgtgatgggcaattggctgttagtctcctgagtcatcttgatggactaaagaatgttcccggtggctactcattcctccccaccctactcccagtgcccataa

SEQ ID NO: 511051 - DNA, 415 bp, Homo sapiens
gttctaagaatgtctaagggcttaacctcccctacctcagcatagcagagaagaaaatgaaatgtatttaatatttcttgggcctcagaatatacggtacattgaagcaatacaagataaataatttaggctgtttcaactgagattggcaaaatcccaacttgtcataaacagggttttaaaagcttgatactgcataaataatttatagtttctgaagagaagttctaaatttgaaaccacgcattaaatagaagtctctgtatcaaccacagggccctcatctccttcagragctgactgagatactttacaaaaaggtcatcatcataaataaaagcaaaatatcacggcttatttcctatttttgcaaatataaaccaaacccaggatgtttaagagatatgtcatagca

SEQ ID NO: 511052 - DNA, 557 bp, Homo sapiens
gtgataaaacaataatgaggatagtacaagccctacctcataagtgaaatttattgcctataaagtcccagcccaatgcctggcacatagcaagtgatcaataaatattgttgattattattgctttataatggttttaattataaagaagttcaagaaakgaaggacatgtcatcctaatgttttctgacacttaaaataagatgactttgattggcatttttttctatataatagaatatatattttgctaaatatgtccaacccccccagactaatttatagcactcctagtttttttaagactaaaataaaatatacatatgtaggattctggagtctaaaatgaggcagcaaaattttaccaagtaaacaactgtcaacaagaataaacatttataccatattcccatgttcttaacactgtgttaagtgctatatgtggactatctcactcaatcacccagaaacaatgaggtaagcatcattattctcctttttcacctgtgaagaaaacgaagcttagagcagttgagtaacttgcccaagatcacaca

SEQ ID NO: 511053 - DNA, 590 bp, Homo sapiens
ttctccagactatttccagtgtaagactacgaagcattgcatttccaagctgtgggtttgtgacraggatccagactgtgcagatgcatcagacgaggccaactgcggtgagtgtctgtgactctgggtcttatctctccgtatttgagtcatcatctgcgacaaccacagttaaacaaatttgaacacaattcttttgaagctaaggtcttacctgaaaaggttttgtctctgtgttcacagattcataaaaacttaggttagctactttacaagaagcctggagtgataagatggaagagtaagtattccttaatataacccagaactttataaaacatagaccaaagaggtagaataagaccattatcttcttatattagagtatgcacatgatggcattaacatttagtgaacagaaataaggaaacactatattcatatcattctagaattcattttttttttgcttaaatccctaagattctgtagttattcaatgatattgtatgtcattctttaatacattacagtgtgaaaaaagataataaaaagcatctgttccatattagtagatgacagtgatcatt

SEQ ID NO: 511054 - DNA, 590 bp, Homo sapiens
ttctccagactatttccagtgtaagactacgaagcattgcatttccaagctgtgggtttgtgacgaggatccagactgtgcagatgcatcagacgaggccaactgcggtgagtgtctgtgactctgggtcttatctctccgtatttgagtcatcatctgcgacaaccacagttaaacaaatttgaacacaattcttttgaagctaaggtcttacctgaaaaggttttgtctctgtgttcacagattcataaaaacttaggttagctactttacaaraagcctggagtgataagatggaagagtaagtattccttaatataacccagaactttataaaacatagaccaaagaggtagaataagaccattatcttcttatattagagtatgcacatgatggcattaacatttagtgaacagaaataaggaaacactatattcatatcattctagaattcattttttttttgcttaaatccctaagattctgtagttattcaatgatattgtatgtcattctttaatacattacagtgtgaaaaaagataataaaaagcatctgttccatattagtagatgacagtgatcatt

SEQ ID NO: 511055 - DNA, 590 bp, Homo sapiens
ttctccagactatttccagtgtaagactacgaagcattgcatttccaagctgtgggtttgtgacgaggatccagactgtgcagatgcatcagacgaggccaactgcggtgagtgtctgtgactctgggtcttatctctccgtatttgagtcatcatctgcgacaaccacagttaaacaaatttgaacacaattcttttgaagctaaggtcttacctgaaaaggttttgtctctgtgttcacagattcataaaaacttaggttagctactttacaagaagcctggagtgataagatggaagagtaagtattccttaatataacccagaactttataaaacatagaccaaagaggtagaataagaccattatcttcttatattagagtatgcacatgatggcattaacatttagtgaacagaaataaggaaacactatattcatatcattctagaattcattttttttttgcttaaatccctaagattctgtagttattcaatgatattgtatgtcattctttaatacawtacagtgtgaaaaaagataataaaaagcatctgttccatattagtagatgacagtgatcatt

SEQ ID NO: 511056 - DNA, 611 bp, Homo sapiens
caaactgtatggtctcattcccagatgccttatcttagctgacttcacttagtgtaacaaattaatttatgcctacaattatgcaatatggcaggacacttagctatctcaaagagcaatttcacacagcatagagccggagcaagcatatgttacaggcccaaaattgaaaataggtcattcagtgaaaacaaacaaaaatcccaacaatattctaacttgatttcttactctttgtctctgtaaacaaaagtttagatatgtatttgaggcacatatatgatcttagttattcatctttaaagtacatgtttttgtgtgtatttaaaaagaccacaatgaaagccagggaattttacatttgtctccttmtcactatctaatctgaagacttccactcttaaagcaggaagtatctgtcattagtcttcatccttagatgtgaagttacccaggattctgtccttgttcccctgatgttctcactcttgaattatttgcttagttatgtttattcactctcattgatttactacatcctgaagactttcaattctctatctagttcaaacatctcagttggttgtaggacatcccctcaatagtttcaa

SEQ ID NO: 511057 - DNA, 619 bp, Homo sapiens
ttgtggagtttgataaggttcttctcacaaaatataaactgtggtcttttaatgaaacagaaggttttcacattctatggaataatagtgatttttgatgtcagctctggagaaaaaatcctggtgatatttggagaccacctgttctggatagtttccatggtaagtcaygaggtgtaccaagattcttacaacccatcaacttcttcatgcttttgtgaatatactgagaagaaatgataccactgagaaaatgatttagaatgtatttcttataaattttaattctaaggtagaaactgaaaaggttggatttacaggtggaatttaaaaaacaacaacaaaactctttctgcatttgtgaattctggcatagaaagaagaatagggaagtgaaacactgaccttacaaataatgttgaagaacataattttttaaaatgccattgctcaggatgaaaaacacatgggtttgacaagaggaggaaacatcttgttacagcatgcaagtctgtcaaaataaccttagattggtgaagagtgtttaagaattgagagggtttgggcatagggaaagcaaaaagaggaagataccaagaatttctcaggaggaaaaata

SEQ ID NO: 511058 - DNA, 635 bp, Homo sapiens
attttaataatttattgtggaagcccaggatatatgttaaaataattttgaactctgtcttgagtatgaagaagtggaatctaaagtgcttttaaaagtcagtgttcaaagtaattgcatttctttcccatttttatatagtttaaaaatacaaatcagtagcttcctctgatggctttgctgtccaggtccctctgattgccttttactctaagtttttccgtgggttttaaagtcggagcctggcctacgtagaygcacggggttttgcgtctcccaggagcgggctctcattggcagtgccacgtgcgccttgcgtgaagtccacgtgctcagcctgactgaggcgggacttcctccgtgagactgttgagtggcagccgcagggtcttgacgctgtctctttctctctcttgtccagttttcccgagcacccctgagcagcctggcctgccatgtccgggagaagacagtgagtactggggtttcctacgccggtctcgcatgttacggggttgaactgttgatccgttgtgccacggaggtggcagtggtgccgttttcggaggttcaccctcgtggagcgtcagggcaggagcagccatggtgaccgcgggtggggttttcactgcagc

SEQ ID NO: 511059 - DNA, 635 bp, Homo sapiens
attttaataatttattgtggaagcccaggatatatgttaaaataattttgaactctgtcttgagtatgaagaagtggaatctaaagtgcttttaaaagtcagtgttcaaagtaattgcatttctttcccatttttatatagtttaaaaatacaaatcagtagcttcctctgatggctttgctgtccaggtccctctgattgccttttactctaagtttttccgtgggttttaaagtcggagcctggcctacgtagatgcacggggttttgcgtctcccaggagcgggctctcattggcagtgccacgtgcgccttgcgtgaagtccacgtgctcagcctgactgaggcgggacttcctccgtgagactgttgagtggcagccgcagggtcttgacgctgtctctttctctctcttgtccagttttcccgagcacccctgagcagcctggcctgccrtgtccgggagaagacagtgagtactggggtttcctacgccggtctcgcatgttacggggttgaactgttgatccgttgtgccacggaggtggcagtggtgccgttttcggaggttcaccctcgtggagcgtcagggcaggagcagccatggtgaccgcgggtggggttttcactgcagc

SEQ ID NO: 511060 - DNA, 635 bp, Homo sapiens
attttaataatttattgtggaagcccaggatatatgttaaaataattttgaactctgtcttgagtatgaagaagtggaatctaaagtgcttttaaaagtcagtgttcaaagtaattgcatttctttcccatttttatatagtttaaaaatacaaatcagtagcttcctctgatggctttgctgtccaggtccctctgattgccttttactctaagtttttccgtgggttttaaagtcggagcctggcctacgtagatgcacggggttttgcgtctcccaggagcgggctctcattggcagtgccacgtgcgccttgcgtgaagtccacgtgctcagcctgactgaggcgggacttcctccgtgagactgttgagtggcagccgcagggtcttgacgctgtctctttctctctcttgtccagttttcccgagcacccctgagcagcctggcctgccatgtccgggagaagacagtgagtactggggtttcctacgccggtctcgcatgttacggggttgaactgttgatccgttgtgccacggaggtggcagtggtgccgttttcrgaggttcaccctcgtggagcgtcagggcaggagcagccatggtgaccgcgggtggggttttcactgcagc

SEQ ID NO: 511061 - DNA, 635 bp, Homo sapiens
attttaataatttattgtggaagcccaggatatatgttaaaataattttgaactctgtcttgagtatgaagaagtggaatctaaagtgcttttaaaagtcagtgttcaaagtaattgcatttctttcccatttttatatagtttaaaaatacaaatcagtagcttcctctgatggctttgctgtccaggtccctctgattgccttttactctaagtttttccgtgggttttaaagtcggagcctggcctacgtagatgcacggggttttgcgtctcccaggagcgggctctcattggcagtgccacgtgcgccttgcgtgaagtccacgtgctcagcctgactgaggcgggacttcctccgtgagactgttgagtggcagccgcagggtcttgacgctgtctctttctctctcttgtccagttttcccgagcacccctgagcagcctggcctgccatgtccgggagaagacagtgagtactggggtttcctacgccggtctcgcatgttacggggttgaactgttgatccgttgtgccacggaggtggcagtggtgccgttttcggaggttcaccctcgtggagcgtcagggcaggagcagccrtggtgaccgcgggtggggttttcactgcagc

SEQ ID NO: 511062 - DNA, 199 bp, Homo sapiens
tgcgctgtcccccactcccagcctggcagrccaacctgcaggaccccgggcttagctgggttctgttccgatgtcgcattttcaaggtccgctgagtccgagccctgcctgggtctggctgctgcccgcccgctctctggactgtgctgatgcagagatgcttgttttcctgtgacgtcagcgtcagctcctgcacatc

SEQ ID NO: 511063 - DNA, 199 bp, Homo sapiens
tgcgctgtcccccactcccagcctggcagaccaacctgcaggaccccgggcttagctsggttctgttccgatgtcgcattttcaaggtccgctgagtccgagccctgcctgggtctggctgctgcccgcccgctctctggactgtgctgatgcagagatgcttgttttcctgtgacgtcagcgtcagctcctgcacatc

SEQ ID NO: 511064 - DNA, 439 bp, Homo sapiens
ctgacgaccattttgcaaggtgttttttttwaaaaaaaaaacaacaaaaaaccaaaacaacaaccagcctccccagtcaggcttgtggggagccgtgggcctggggagactgggctgctgaaggtggggactgggctgctgggggaggcggctttccctctcggggggtgctggctgctggggaggctggcagcgcgcccctcccccaggtgcgaagggacctcagcagacgcagggctgctccgcacagccagcttgggccgcaggggtccttgagtgatgaagattctgtgttgatggggtgagtgggagagagacggagctggggtggttttcacacgtgcgcctgcctgcgaggagaaacgtgctgtgtcatagtttcctcggtgcctgggacggcttggcctctgctttcgtgtgagcccacgctggccatgca

SEQ ID NO: 511065 - DNA, 567 bp, Homo sapiens
ctgcggagaccatcagccagtctgcgttcggcctgtgtctgccactggctgcagggcccggggcaaaggtcttcaagtgccctgggcttcagttccccttcctggagaatgagggtgggagagtacctcccctgggggtttgcgaagatgacatgagcccgtgcatcctgggtctggaccgcatctgatacttagcaggtacttagcagcaggtactgagtagacacagtgctccacagcaaagatgtgtggcagaggcgtagtggatgcgtgatcgagacgcacagtagacacgcaaggatacacggcagagatacgtggtgggtatataatggatacagcgggcgtggtggatttataacagatatgtagcagatatgtgataggaaccaggcatgctaatgacaagtcaggaatgtcacagaggactgtgtcttctgggggtcctggggccttttcacgaggaaggattgcaggtggggctttggaaaaattgtccaatttccatcccctgtstcctttccccggtcaccgctcctacccagtagcaggtggagaaggtgactt

SEQ ID NO: 511066 - DNA, 615 bp, Homo sapiens
ctgccttccgtggctgtgtgggctcctgtgcggaggccgcccctctccctggccaagcaacactgaggcgggattgcgtcctccctctcctgaggcaggtcctgctccagacctgcttttttcccgcacgtcacgtgtcctgagacccctcagtggatgcgtcctctctccttccacggccgcacacactcccgtgcccgttgggctgggctgactgatgcatgtgggggctccgtcccatctttttcaactacagatggagctgcggtgggaaaacgtgtgcagatacctcccattttacttttgtgctggggcttttttgggatcagttcctagaagtaggggactgggtgaaaggctgatcaccctcagacaccgaacccctggaggaaacacagggagggaggatgagccctgcgaggtgcaggccttcttttaacactgaccttgggttctcaggactgccgaaatcccctctacccgggctgtgcctctccggcctgtgcctctccggcccttcggcagtgtcgagggagcccccaacacccagcagcatccagggatttcccccakggcagtgtcgggagcccccaacaccccaacagcgtccaggga

SEQ ID NO: 511067 - DNA, 612 bp, Homo sapiens
gtcaagggagccccccaaccccggcagtgtcaagggagcctgcctccgtggggtgctgccagccttaggcctgggccagtcggggtggttggatgcctgttctgggggtagagaagtcaggtagcccagggcccgcactctcaatagaccttcagagaaaaggcatcgaggtaaatgccgcactcgagtacccgtgtgatctctgggtggggccatgatccttctgggcgctggtccaagcgcgtggtgaggccgtcctctcctgcagaaccccggcctcttcgcccctgcccgctcacctrttctgtcctgctcacctcctccaggaagcctgcctggccttctccatgctgatgggcgtggccccttgtccctgcagccatgcattgacctccgtggctcctggaggccaggccacgtcctcatcccctctgggtgagtgagaggcacagcctgggtgcgtggggccgtggcggctccgaggcgccaccgctgtgtcctctcatgagtgggtgccgtccaggtctgtcctgggctggctgcgaggaggaggttggcctcgcgcggccatgtgcgtgacagtggagacatcgccagcctcctgcttgcaca

SEQ ID NO: 511068 - DNA, 526 bp, Homo sapiens
ctgggagcaaccccaatgacctgctgccaacactgcctgctagtgtgcccctgccacctccctctcttcctactacacctggggatgcatctgctaggagcacaggctactgctgcttcatgggctctgggcccagctcttcctctctctctgtctctcacctggatcattcccattggcaagtaaatatgtgctttcatctttttttgtttgtttgtttgtttttgagacagggtcttgctctgttgcccaggctggactgcagtggcatgatcatggctcatcactgcagcctcaacctcccaggytcaaatgatcttcctgcctcagcctcccaagtagctgggactacaggcatgccccaccatgcctggttatttttgcattttttgtagagttgaggtctcactatgttgtccaggctggtctcggactcctgggctcaagggatcctcctgcctcggcctccaaatgtgttgggattacaggcatgagccaccatgcctggctgctttcatcttttaat

SEQ ID NO: 511069 - DNA, 526 bp, Homo sapiens
ctgggagcaaccccaatgacctgctgccaacactgcctgctagtgtgcccctgccacctccctctcttcctactacacctggggatgcatctgctaggagcacaggctactgctgcttcatgggctctgggcccagctcttcctctctctctgtctctcacctggatcattcccattggcaagtaaatatgtgctttcatctttttttgtttgtttgtttgtttttgagacagggtcttgctctgttgcccaggctggactgcagtggcatgatcatggctcatcactgcagcctcaacctcccaggctcaaatgatcttcctgcctcagcctcccaagtagctgggactacaggcatgccccaccatgcctggttatttttgcattttttgtagagttgaggtctcactatgttgtccaggctggtctcggactcctgggctcaagggatyctcctgcctcggcctccaaatgtgttgggattacaggcatgagccaccatgcctggctgctttcatcttttaat

SEQ ID NO: 511070 - DNA, 540 bp, Homo sapiens
gtgagactcggcaaagagaggccacaaggtctgtggcactgcagaagggcagcaattcgatgccccggtgtccaggcaacggggagggccctgggcccagtgagtgcctccttcctcctgagaaggggctctaggatgggaggggcatggactgctggggtaagtggataamaagcaggggtaactggcatgtcagtgtggggtcctcacagtccgggacattctgcctgcctctgtgcccacccagccttcttataatcacccgccactgttagtgaccgaggccgcgacactgcactgtaccctttaaatctccaacaggtccgctggaggaggggagggggaggagaagagaaaggggtgggaggagagcacggggagaggaggagggagaggtgggggtgcaaggagaaaaggaagaaaaattaaaaagaggaacatgcccagagggacacagccagcccatgagaaattaaaggctgaggaaagaaaccagtgagagagggggaacaaagctccaaccctgcctggggcggggca

SEQ ID NO: 511071 - DNA, 540 bp, Homo sapiens
gtgagactcggcaaagagaggccacaaggtctgtggcactgcagaagggcagcaattcgatgccccggtgtccaggcaacggggagggccctgggcccagtgagtgcctccttcctcctgagaaggggctctaggatgggaggggcatggactgctggggtaagtggataacaagcaggggtaactggcatgtcagtgtggggtcctcacagtccgggacattctgcctgcctctgtgcccacccagccttcttataatcacccgccactgttagtgaccgaggccgcgacactgcactgtacyctttaaatctccaacaggtccgctggaggaggggagggggaggagaagagaaaggggtgggaggagagcacggggagaggaggagggagaggtgggggtgcaaggagaaaaggaagaaaaattaaaaagaggaacatgcccagagggacacagccagcccatgagaaattaaaggctgaggaaagaaaccagtgagagagggggaacaaagctccaaccctgcctggggcggggca

SEQ ID NO: 511072 - DNA, 540 bp, Homo sapiens
gtgagactcggcaaagagaggccacaaggtctgtggcactgcagaagggcagcaattcgatgccccggtgtccaggcaacggggagggccctgggcccagtgagtgcctccttcctcctgagaaggggctctaggatgggaggggcatggactgctggggtaagtggataacaagcaggggtaactggcatgtcagtgtggggtcctcacagtccgggacattctgcctgcctctgtgcccacccagccttcttataatcacccgccactgttagtgaccgaggccgcgacactgcactgtaccctttaaatctccaacaggtcygctggaggaggggagggggaggagaagagaaaggggtgggaggagagcacggggagaggaggagggagaggtgggggtgcaaggagaaaaggaagaaaaattaaaaagaggaacatgcccagagggacacagccagcccatgagaaattaaaggctgaggaaagaaaccagtgagagagggggaacaaagctccaaccctgcctggggcggggca

SEQ ID NO: 511073 - DNA, 540 bp, Homo sapiens
gtgagactcggcaaagagaggccacaaggtctgtggcactgcagaagggcagcaattcgatgccccggtgtccaggcaacggggagggccctgggcccagtgagtgcctccttcctcctgagaaggggctctaggatgggaggggcatggactgctggggtaagtggataacaagcaggggtaactggcatgtcagtgtggggtcctcacagtccgggacattctgcctgcctctgtgcccacccagccttcttataatcacccgccactgttagtgaccgaggccgcgacactgcactgtaccctttaaatctccaacaggtccgctggaggaggggagggggaggagaagagaaaggggtgggaggagagcacggggagaggaggagggagaggtgggggtgcaaggaraaaaggaagaaaaattaaaaagaggaacatgcccagagggacacagccagcccatgagaaattaaaggctgaggaaagaaaccagtgagagagggggaacaaagctccaaccctgcctggggcggggca

SEQ ID NO: 511074 - DNA, 502 bp, Homo sapiens
accttcagcaatatcaggagagaagactggttgtattataagcagattctcaccaagaaggggaaggtaagatgggtggaggaatgaggtgraagctggctccagcagaaccctccagcctctcctaggcctaccctgacagcctctggagccagagagaaccagtgtaggttgttgcatgaaggatggaggatagatgttaggaagaacttcctggcagggggatttaaagaacttatgtaaaagaagttaacaagagaggtggattttgctgtgggatggatctgatcgagtcgtgcttggaattctggcaaaaccatcccacagtggccctggcttgacaggccatcctgaagatggccgctggggctcatggaaaataaggagcaaggctggggtgatttccgtaggagagttaaggcccaagaagatgcaggcaagccagcaaagggcttagtgttcatcctaagggcaaccaaaagctctcgggggctcttgccaa

SEQ ID NO: 511075 - DNA, 502 bp, Homo sapiens
accttcagcaatatcaggagagaagactggttgtattataagcagattctcaccaagaaggggaaggtaagatgggtggaggaatgaggtgaaagctggctccagcagaaccctccagcctctcctaggcctaccctgacagcctctggagccagagagaaccagtgtaggttgttgcatgaaggatggaggatagatgttaggaagaacttcctggcagggggatttaaagaacttatgtaaaagaagttaacaagagaggtggattttgctgtgggatggatctgatcgagtcgtgcttggaattctggcaaaaccatcccacagtggccctggcttgacaggccatcctgaagatggccgctggggctcatggaaaayaaggagcaaggctggggtgatttccgtaggagagttaaggcccaagaagatgcaggcaagccagcaaagggcttagtgttcatcctaagggcaaccaaaagctctcgggggctcttgccaa

SEQ ID NO: 511076 - DNA, 502 bp, Homo sapiens
accttcagcaatatcaggagagaagactggttgtattataagcagattctcaccaagaaggggaaggtaagatgggtggaggaatgaggtgaaagctggctccagcagaaccctccagcctctcctaggcctaccctgacagcctctggagccagagagaaccagtgtaggttgttgcatgaaggatggaggatagatgttaggaagaacttcctggcagggggatttaaagaacttatgtaaaagaagttaacaagagaggtggattttgctgtgggatggatctgatcgagtcgtgcttggaattctggcaaaaccatcccacagtggccctggcttgacaggccatcctgaagatggccgctggggctcatggaaaataaggarcaaggctggggtgatttccgtaggagagttaaggcccaagaagatgcaggcaagccagcaaagggcttagtgttcatcctaagggcaaccaaaagctctcgggggctcttgccaa

SEQ ID NO: 511077 - DNA, 502 bp, Homo sapiens
accttcagcaatatcaggagagaagactggttgtattataagcagattctcaccaagaaggggaaggtaagatgggtggaggaatgaggtgaaagctggctccagcagaaccctccagcctctcctaggcctaccctgacagcctctggagccagagagaaccagtgtaggttgttgcatgaaggatggaggatagatgttaggaagaacttcctggcagggggatttaaagaacttatgtaaaagaagttaacaagagaggtggattttgctgtgggatggatctgatcgagtcgtgcttggaattctggcaaaaccatcccacagtggccctggcttgacaggccatcctgaagatggccgctggggctcatggaaaataaggagcaaggcyggggtgatttccgtaggagagttaaggcccaagaagatgcaggcaagccagcaaagggcttagtgttcatcctaagggcaaccaaaagctctcgggggctcttgccaa

SEQ ID NO: 511078 - DNA, 632 bp, Homo sapiens
tgtcaacagactccatctcacattctgcaaatattctgccttaaagataattaggggcaaactcatccttgcccaaggtgggaaaactttctggacttccactaggtttattagagcctcatatgagaaccatgatcaaacactatgtgtttttggattatacctcaaatctaaaactgttcttcgtagtggctatgacattctacattcccatcattaccattatgcaaaacagtgtggtggcttctaaataaattaaaacagacataccatatgaccagcgatccagcttatggaaatatacccaaatgggatgaaattaccaccttgtgaagatacctgctctcctgtgattattgtagcattattcacaacagccaagatatggaaactaagtgtctgtcgatggacaaatggataaagacaatgtggtatgtgtayacaatataacatgattctgccttataaaataaagagatgctgccattttccacaagatgaatggattcccaccacctctagcaatgcattttacccatttcagcccctccctgggagccggcagatccaggcccagtagtaaggactggttgtgatggagtggccagaaacagtgcaggtgatgcagaggg

SEQ ID NO: 511079 - DNA, 632 bp, Homo sapiens
tgtcaacagactccatctcacattctgcaaatattctgccttaaagataattaggggcaaactcatccttgcccaaggtgggaaaactttctggacttccactaggtttattagagcctcatatgagaaccatgatcaaacactatgtgtttttggattatacctcaaatctaaaactgttcttcgtagtggctatgacattctacattcccatcattaccattatgcaaaacagtgtggtggcttctaaataaattaaaacagacataccatatgaccagcgatccagcttatggaaatatacccaaatgggatgaaattaccaccttgtgaagatacctgctctcctgtgattattgtagcattattcacaacagccaagatatggaaactaagtgtctgtcgatggacaaatggataaagacaatgtggtatgtgtacacaatataacatgattctgccttataaaataaagagatgctgccattttccacaagatgaatggattcccaccaccwctagcaatgcattttacccatttcagcccctccctgggagccggcagatccaggcccagtagtaaggactggttgtgatggagtggccagaaacagtgcaggtgatgcagaggg

SEQ ID NO: 511080 - DNA, 574 bp, Homo sapiens
tgaggaatctcagggaaacctggagagtgttttccaattagactcagagcagagacctccatgggaatctctgattagaacaggccttgagctctgatgggagccaagagagaggctcacccagggtcagggtccttaaaacctgatggttttcacagctatcccctctcaacttgtaaaactgtgcccatctgactcagactgattcagctgaccctctttctgctgatccattttccatctctgtagacttgattctcacagttccctttcttcttctcttccctgaaaacagaagatgtgttttctgtagtcaaaattccagggcttgggtctgcaggacctgggtaggctgaggggactttctcactcaccattgtctggacactcctgttgtcttctgtgcatggaggcatttggaaaatgtagtggacattagccatgaagggaataatactagttttctccaatgggatattgatgtagagctgatcttgtgcttctcayactatctgagtttggactctcacctgtgactttgagaagagctgaggatgggcactccattgtgctg

SEQ ID NO: 511081 - DNA, 574 bp, Homo sapiens
tgaggaatctcagggaaacctggagagtgttttccaattagactcagagcagagacctccatgggaatctctgattagaacaggccttgagctctgatgggagccaagagagaggctcacccagggtcagggtccttaaaacctgatggttttcacagctatcccctctcaacttgtaaaactgtgcccatctgactcagactgattcagctgaccctctttctgctgatccattttccatctctgtagacttgattctcacagttccctttcttcttctcttccctgaaaacagaagatgtgttttctgtagtcaaaattccagggcttgggtctgcaggacctgggtaggctgaggggactttctcactcaccattgtctggacactcctgttgtcttctgtgcatggaggcatttggaaaatgtagtggacattagccatgaagggaataatactagttttctccaatgggatattgatgtagagctgatcttgtgcttctcatactatctgagtttggactctcacctgtgactttgagaagagctgrggatgggcactccattgtgctg

SEQ ID NO: 511082 - DNA, 681 bp, Homo sapiens
caattttaaatataaaatcacttgatcaattgatataaaccataaggtattctgataattgttaaaatatttctaattttattttaccaataattttgaagccagcttatttattacatatttatttaagttacatgtacttcagatgcrttagggctcattgacttaatttaaaatagttatttattttaaagtcaattttgtaccttgtagccataacacataacaaaaatatatatatatatgtacataatagatacaagcacacattcacactaatacaaagatactagagcttttactttaaaactctagctatggaatatcaatacaaactcaacagatgttcaacaaaaaagggttagatgtaaacagtggttgtcatcttaaaaccagtagaaaggccctgtaaactggaaaacaaaatatttttaagccaaaaacatatcctcatctttctttataaacttcaccataaattgattatactctcttactattctaatttttagtaaccctaattcacagtgagaagcctaggattacttaatttaacatgacatgagtttaagattttaaattactgaagacaattatgagtctaaatttaccaaattaatatttgtaaagcaatgtaaaatgtaaaggtgactctaaaaaatagatgtacattttctttac

SEQ ID NO: 511083 - DNA, 681 bp, Homo sapiens
caattttaaatataaaatcacttgatcaattgatataaaccataaggtattctgataattgttaaaatatttctaattttattttaccaataattttgaagccagcttatttattacatatttatttaagttacatgtacttcagatgcattagggctcattgacttaatttaaaatagttatttattttaaagtcaattttgtaccttgtagccataacacataacaaaaawatatatatatatgtacataatagatacaagcacacattcacactaatacaaagatactagagcttttactttaaaactctagctatggaatatcaatacaaactcaacagatgttcaacaaaaaagggttagatgtaaacagtggttgtcatcttaaaaccagtagaaaggccctgtaaactggaaaacaaaatatttttaagccaaaaacatatcctcatctttctttataaacttcaccataaattgattatactctcttactattctaatttttagtaaccctaattcacagtgagaagcctaggattacttaatttaacatgacatgagtttaagattttaaattactgaagacaattatgagtctaaatttaccaaattaatatttgtaaagcaatgtaaaatgtaaaggtgactctaaaaaatagatgtacattttctttac

SEQ ID NO: 511084 - DNA, 681 bp, Homo sapiens
caattttaaatataaaatcacttgatcaattgatataaaccataaggtattctgataattgttaaaatatttctaattttattttaccaataattttgaagccagcttatttattacatatttatttaagttacatgtacttcagatgcattagggctcattgacttaatttaaaatagttatttattttaaagtcaattttgtaccttgtagccataacacataacaaaaatatatatatatatgtacataatasatacaagcacacattcacactaatacaaagatactagagcttttactttaaaactctagctatggaatatcaatacaaactcaacagatgttcaacaaaaaagggttagatgtaaacagtggttgtcatcttaaaaccagtagaaaggccctgtaaactggaaaacaaaatatttttaagccaaaaacatatcctcatctttctttataaacttcaccataaattgattatactctcttactattctaatttttagtaaccctaattcacagtgagaagcctaggattacttaatttaacatgacatgagtttaagattttaaattactgaagacaattatgagtctaaatttaccaaattaatatttgtaaagcaatgtaaaatgtaaaggtgactctaaaaaatagatgtacattttctttac

SEQ ID NO: 511085 - DNA, 544 bp, Homo sapiens
gtctaaatttaccaaattaatatttgtaaagcaatgtaaaatgtaaaggtgactctaaaaaatagatgtacattttctttacaaagcatttcactaaacagacttaacttgattggaggtctttgaaacacagcttgattacattactgcccttagagtgggaccatttaagaaaaagggccaagaaaacatgcagtttttaattcataaagtacaattgcttatgcaaatgtgcaaagaaatgagtagccttctatagtgatgaccatttcctgtaaactgccctcagccacacctaacatagctttcaaagccacccctaaaattaccgctttcattcactattgcacacaccatgaatgaatcctctcaaagtacaaygtaattctggtagcatccaaagccaaaaacatgacacaatacaagaaagcagagctttatacttgctctgctttataccgaagaatctgccaatgattgaaaccacaaaggaagcagaaaaactcccaccatgttagtggcaagatacaagaggaaccctcct

SEQ ID NO: 511086 - DNA, 617 bp, Homo sapiens
tcgcacacagtgaatatcgtagctggtgaaggtgtatccagagctttgcgggacaccttcactgaggccccaagcttcctccttcagccccagactgcaccagctgcacctggaattgggcacctgtggagagaatacaggagtggatgaaattctttttgactgaaaagagtcctctcatccttcggagtaggtggtcctttacctgtagctgctgccaccaaaaaaatgatccttcaggtccagtccatggtgaggagctgtgttctcagcarcttctctagaggagggatgtggttgttgggtgatgctctcagggcacaagaataaccatatttaatctcagtggatctcatgatatttgcatattcatgattcagagaattttataactcaagacctgattcaggacaagaaagagaggataaatggcacatcagccatacaaaagtgagatggtgatggtccaagtcctaatcccacttgaggaaatgcatgccctgctccatttccaaacactttgtggacagaggtcctttcactgaagaaccagcacccacaggacgcgttcctcacagtgaacccatatttgattagcatggagacaatctggatca

SEQ ID NO: 511087 - DNA, 682 bp, Homo sapiens
catatgtttcttggccacacgtatgtcatctttggaaaagatggtcctttggtgtgcaacttttcaagtcttggaatcarattggatgccactatcctcataacctgttctatattgattttcacatggtacttgcattttttatacaatagtattcactaaaaatgcagttttcctaagatacttcatttcaacctggtaaaaacaaatgttaaaactgaattttctcaagctagtagttcacgcagtgtcttattaaatgttgaatattaccatgttttcctcaaaaatttaaaatatcctgtcaccacccctccttccccgtgaattcgctagggtaccattaggtaacttgacacagagtttggatgctatgactataaggaaaaactgctgggtgaaatgtcagggaatatttggaaatggtccatactcagctagtgtgtaccttttgctttttgcccatcatccttcccctgcttcctgcttgggatgtgatatgatatcttaaaatggaatagccatcttacaatcataagaatagaagcctcatcgtaaggatgatataacagtaagttataaggaactgggtcctcagtgactccttagccttactggtcctgaattgctcaccaatgaaccttttgttacaaatgaataataccacagtaaagttcctatt

SEQ ID NO: 511088 - DNA, 682 bp, Homo sapiens
catatgtttcttggccacacgtatgtcatctttggaaaagatggtcctttggtgtgcaacttttcaagtcttggaatcagattggaygccactatcctcataacctgttctatattgattttcacatggtacttgcattttttatacaatagtattcactaaaaatgcagttttcctaagatacttcatttcaacctggtaaaaacaaatgttaaaactgaattttctcaagctagtagttcacgcagtgtcttattaaatgttgaatattaccatgttttcctcaaaaatttaaaatatcctgtcaccacccctccttccccgtgaattcgctagggtaccattaggtaacttgacacagagtttggatgctatgactataaggaaaaactgctgggtgaaatgtcagggaatatttggaaatggtccatactcagctagtgtgtaccttttgctttttgcccatcatccttcccctgcttcctgcttgggatgtgatatgatatcttaaaatggaatagccatcttacaatcataagaatagaagcctcatcgtaaggatgatataacagtaagttataaggaactgggtcctcagtgactccttagccttactggtcctgaattgctcaccaatgaaccttttgttacaaatgaataataccacagtaaagttcctatt

SEQ ID NO: 511089 - DNA, 571 bp, Homo sapiens
aaaatcagtgtctttagaaatcatgagaagtgatacagttcagatcagtgatacagttcacagcatggcaggtggggcctttggtcatttatgctccctacagccagaaatctaatcgatgcatcttcatgatcattgcagctcttacagccactgtccccacttcttaagagaaaataatatgtggcaactgtcttcttactttggaggagatatgctggcatgcgcctctcataagcagatgccaagttggaattagctctataagagatttattaaaagcaagtccagtgagacgtaaagtkgggagggagccagaagaggctgagagaaccattggaccatgatgtaggtttgactgattgaaggaaagaggaaagaaggaagattggccggaactgtcttagaccgcagtacaggcatataaaagcacatcgtggagtctttgagccaaaatcattatctgtcagaggagtcccacacctcctaagaatgggccttccttagtatccctgttggcctcagtcacctaccccaggagatatagcttcattgcaaacatgatgatgaa

SEQ ID NO: 511090 - DNA, 571 bp, Homo sapiens
aaaatcagtgtctttagaaatcatgagaagtgatacagttcagatcagtgatacagttcacagcatggcaggtggggcctttggtcatttatgctccctacagccagaaatctaatcgatgcatcttcatgatcattgcagctcttacagccactgtccccacttcttaagagaaaataatatgtggcaactgtcttcttactttggaggagatatgctggcatgcgcctctcataagcagatgccaagttggaattagctctataagagatttattaaaagcaagtccagtgagacgtaaagtggggagggagccagaagaggctgagagaaccattggaccatgrtgtaggtttgactgattgaaggaaagaggaaagaaggaagattggccggaactgtcttagaccgcagtacaggcatataaaagcacatcgtggagtctttgagccaaaatcattatctgtcagaggagtcccacacctcctaagaatgggccttccttagtatccctgttggcctcagtcacctaccccaggagatatagcttcattgcaaacatgatgatgaa

SEQ ID NO: 511091 - DNA, 571 bp, Homo sapiens
aaaatcagtgtctttagaaatcatgagaagtgatacagttcagatcagtgatacagttcacagcatggcaggtggggcctttggtcatttatgctccctacagccagaaatctaatcgatgcatcttcatgatcattgcagctcttacagccactgtccccacttcttaagagaaaataatatgtggcaactgtcttcttactttggaggagatatgctggcatgcgcctctcataagcagatgccaagttggaattagctctataagagatttattaaaagcaagtccagtgagacgtaaagtggggagggagccagaagaggctgagagaaccattggaccatgatgtaggtttgactgattgaaggaaagaggaaagaaggaagattggccggaactgtcttagaccrcagtacaggcatataaaagcacatcgtggagtctttgagccaaaatcattatctgtcagaggagtcccacacctcctaagaatgggccttccttagtatccctgttggcctcagtcacctaccccaggagatatagcttcattgcaaacatgatgatgaa

SEQ ID NO: 511092 - DNA, 571 bp, Homo sapiens
agttggaaagcgaaatccaaagcgaggcttgtcacaggcaaaacattctaatttgaatttgcttccctttaagatatttggttagtcctcttttttttcaacttacttttctytggtaataagaataaaacacaaaaataggaataaaacacagtgaacatttaaagtttcaattatgaccacacctcctgggcttaataaatacttgtgtattgaggcctctggggcataaacaacccagaaggcaaagcagttctgtgactgcctccaggggtaagtgggaagaattatttcccctcctcactatctggacacagggcagaagcagggaacataaccagccgctgagtacattgtctacttccctaaagatagcaatcacggaatggaactcacttcgcacctgtacttgaggataaaatatttaagacctctccaattcaacttcagctctttttccagcaatctctgaagttgtgagtacatactgagacctccgggctgagtctaagtgacttgagttctggaatgtgacttcaggacattcttttctttacaatggggcactcag

SEQ ID NO: 511093 - DNA, 571 bp, Homo sapiens
agttggaaagcgaaatccaaagcgaggcttgtcacaggcaaaacattctaatttgaatttgcttccctttaagatatttggttagtcctcttttttttcaacttacttttctctggtaataagaataaaacacaaaaataggaataaaacacagtgaacatttaaagtttcaattatgaccacacctcctgggcttaataaatacttgtgtattgaggcctctggggcataaacaacccaraaggcaaagcagttctgtgactgcctccaggggtaagtgggaagaattatttcccctcctcactatctggacacagggcagaagcagggaacataaccagccgctgagtacattgtctacttccctaaagatagcaatcacggaatggaactcacttcgcacctgtacttgaggataaaatatttaagacctctccaattcaacttcagctctttttccagcaatctctgaagttgtgagtacatactgagacctccgggctgagtctaagtgacttgagttctggaatgtgacttcaggacattcttttctttacaatggggcactcag

SEQ ID NO: 511094 - DNA, 604 bp, Homo sapiens
tgtacaagataagcctgggatatctcgttgtaagtgagagcaaagaagccatcaaagaccattgcatcacactaaaataacattagggccaagttgaaggatcttccactgaccaaaggcagacaattttgtatcaaaaaactatgactacaatggacaaatatatgtgtgtgtttacatatgtataaacattcatgggtggtccctaaatatcaatataatttatacttacccactagataattctgcaacatacggctcatcaaattagatattctgcaaatatgttcagccaaatccttccacctgcatctaratttacagtgatatcaaactataattttctttagaggaatccatgttcctcaccagaaaggaagaataaaaggcagttttctcaaatttgaagaacacaaggaatcatcatagttgccatccgagtttagatccatagtgcctctaacctaaggattctcacccctagctgcatattggaatcacctggtgagcctgtgctttacctctagagattctgactgaattgttccgggatgtgacctggcattggtatgtttgaaaaaactccccaagtgattctaacatg

SEQ ID NO: 511095 - DNA, 624 bp, Homo sapiens
tgtagaagcagaaggaatatgtaggtagagaattagcaatttatcagcacccccaaatattcatattatatatatatatttttagtatatatacatactaaattatatatgtatatacatgtagtgtatatatactagattatattatgtatatttttatatatttagtatatacactaaatggatatatatcttctaggagtttaattgaaaagtagaagcagctctgcaatatagaagatgaaaaaagatctgcaagccatttactcacaaagtcccattataattcaagaygcgacaaatttatctcgacagttggtaaaattaatcattctaactttcagatttataaggcagagattgttttaagcctaagaaagaaaagttgtggtaaaataaatttacatctttattaaagttatgataaagcattttaagttgttttctaataaaatattttttacttctcattttagcaaaccaattttctacctcccctccctccataataaaggatccactgtgggaaatattacaaaaaagttctccctctttgaagaaatgaacaaatcgaaggtctgtgttatgtgataatcttgctgaaatacgaaagacacaggtcag

SEQ ID NO: 511096 - DNA, 565 bp, Homo sapiens
ttagatccatttcttgtttttggtagcttaaaaggtaagacctggatactaagaaatgtttggtttgtagggcagcagcaactgtgagaaatatacacaagctttccaagcaaaattctggctttagaggtagatgacttgtacagtttgccgtcattaatggcttggtgataaaatgactatttagccaaaagaagatgcatgctaatttcacataccccttccgactcaaactgctctcattcattcacgcatttcttcatttcttcattcatggatatttattgagtaacttcaagttcttttttaggcagtggggaaatgaggtgaagagaacagataaaatcttctgccttcatgaagtatatatgctggtagatataagaatatataaataaacacataagtaaaatttataggatgtcagatggtgacaggatttatggcgaaaggtaagacacagaagggggacagagggtaaaatggttgctrgtggtcaggaaagacttcactgagagggtcacatttaagcaaaagtctgaagcaattgagagagtgagccagg

SEQ ID NO: 511097 - DNA, 295 bp, Homo sapiens
tcaccaagtagctgatactcctccattccagaatttatcaacacataccacgatttgtgctacactagtctcattttcctatttcgcacttttcagaaattccgtcttcctctgcatcgctatcctctkattaatgtgctctttcttctaaccttcctcttcatcagtctgaatctcaaaattttacctgattactccaatacacttcggtttctacgtttgagtatggctttgcaaatttatgtgtgaactcctaacgctggacctaaaatatggactgccttatttggttatt

SEQ ID NO: 511098 - DNA, 295 bp, Homo sapiens
tcaccaagtagctgatactcctccattccagaatttatcaacacataccacgatttgtgctacactagtctcattttcctatttcgcacttttcagaaattccgtcttcctctgcatcgctatcctcttattaatgtgctctttcttctaaccttcctcttcatcagyctgaatctcaaaattttacctgattactccaatacacttcggtttctacgtttgagtatggctttgcaaatttatgtgtgaactcctaacgctggacctaaaatatggactgccttatttggttatt

SEQ ID NO: 511099 - DNA, 654 bp, Homo sapiens
ccaaagtgctaagattacaggcatgagccaccgtgctaggtcaatatttacaatctttatgtcaggtaatcgaggccttagcattttaagaccagttatatgcagttagctacctcttttctctacttttccaataatcacaatcccttaaaaatattaatatcagggatcttttgaaatcagtttcaaaaggtrttaaaagcagtgagaattttgtttcaagctcactgagttgtttctaggattaaaaaacatataaagtatttagcatattgtgtagaatgtaatcagagctcaatgcaagtcagtttatattattttcattgtgaaagctagacttatttgaaatggttccaaaaataaatcctacaagaaacatcctcgaaagtgactatttattatattatacataaaagtaccccaaatagtgtacattacctccagcttatgttaaattctgtctttgtcaataataacctctaatttaattgaagttaatcatatctcttaattagctattcccattattataataaagagcagttaccaggaaaatctagccatagtaacccacatataaatgaatgctttcagtaagcaaataaaataatttcaacaagtttccaggccatttaactaagtactgctctactt

SEQ ID NO: 511100 - DNA, 575 bp, Homo sapiens
ctgtgggcaattgtaattcaaacttgcttaaaactcattaagaaaaaagtgattaaccattgtcatactaaaggattgggaggctggctcttctaatgactttattccctatttattgagtgtttcctcagataaattaatacttctatacttggaggtcatgcctgtaggtagactgaaragctcgttcatctctggcaaagcttcaacctgtaaaacagagaaatgtctttattggaaactttatgtactgagtactgggaaaatagttgaaattgtttaccacagttcttatgaaataaagtggacccatgggagcatcacatgtgtctgctacattgtttgaaaaataatgtttatgtccatatgagtatgtgaagagaggagtgaaaggttagagcccatgttagagacattaaacatttaagatttttcataaaataaaaaggtttcattcttaaagaatttttatgatttatctgctcactctccttcaccaccacggaataattccaatatcaaaattaacattattcaaaactattttgaaaaagttaaaaagaataactgtagaa

SEQ ID NO: 511101 - DNA, 631 bp, Homo sapiens
agaaatgaatgttgattgcataatatcactgaggcactatatatgatatttagcaatcttgtaggaatatctaacaggtacaggaatttttagcaatggcaaaccaatatggcaccaattgagttgttcaacattctcctcaaaaagatttttttaccactgctcttcagggactcttatttaggattatcatgttatgctgcatcagtcaatttctgattagtgtcagcatattgyttaaaacaaaaaaaaatcaaaatctttatttatgatttttgtcaatggttataaagagcttccttgaaaatcatgctatggattaagaaagaggcaatgaagccggagtaagtatcataagtgtgtgagctctctgctcatacaaacgatttatatgttcaggacctacttgatccagtcctatataccacttccacttcatagtgaatttaggacaaagttatgtcttaatgtattagacaatatttagttcattagtttattgtgcacagctcaagccagatagtcacctgatgtcctatagtcaggtctttggtcaaataagaagccaagagctgtttctaaaaaagaaagtttttatctgcagaagttgactcagctttcctctaggatc

SEQ ID NO: 511102 - DNA, 628 bp, Homo sapiens
gttgtgcaatttgctagtagcaggtacagaaaaatcagagctttggatgagtaaaggttaggaacaatgtcactgggactaagtatacccaaacaaggggagaccacagtctgaagaattttgacacttaacaccaatgagaagttgataaaaatactccatttacccttatgtgattattacttattgtacacctgtgttgaaatacctcatgtactccatatatatgtgtatgkgtgtgtatatatatatacccctactatatactcataaaaatacaaaaagtcaattaataaaaaagtatacagagctaaattagaaagtgaactttgaaaggggatgaagtatgtgccttgtagggacaatattttacaaagcaaccccttttttgatggcctgccaggagtgacactcaaaatatgagaccaaactctcagaatgagcacagtgtagatgcagtgttgaagcagagttgaagcagagcccttggggaaacgacaagggtgatagaaggtgctcactgactcagggaagcactcatttgccatttagcatacagatttttcaatattttaaaaatgtgtagtgataccattgcataccagttaaatagcagcaatttcagcag

SEQ ID NO: 511103 - DNA, 610 bp, Homo sapiens
ctgaagacattcctgatgttaaagcattayagaatatgcatagaatatttgttgttatccccatcattgttattactgttattatgaattaaccagcatttattatgtgcttactatgtgctaggcatgatgttcagtatttttagcacattgctaaacaagcatcatcttttttaacctttgcaataatttctgaagtacataccaattttagagatgaagaaactgaggctcagaaaagctgaacagtttgctcaaggtaacaaaactaggaaatgactggcacaaactataaatgcaaatttctggctccagtgcctatactcttacctagtatgctgtactgccatgtctgtgaaatatacatagaagtattttcctcttaaaataactataagctccacaagtcagaaatcctgttctccaagccatggtagccactaaagcaattaatatattgggccctcaagtagctactcagtaaatatttgttacagagataagtgaataccaatcctgctctgggaatctgagtttttataaaaatgagacatgaatatacactgttaaaaaattactatattctcaagtatgtgcccctagtttctct

SEQ ID NO: 511104 - DNA, 600 bp, Homo sapiens
tcctgatgttaaagcattacagaatatgcatagaatatttgttgttatccccatcattgttattactgttattatgaattaaccagcatttattatgtgcttactatgtgctaggcatgatgttcagtatttttagcacattgctaaacaagcatcatcttttttaacctttgcaataatttctgaagtacataccaattttagagatgaagaaactgaggctcagaaaagctgaacagtttgctcaaggtaacaaaactaggaaatgactggcacaaactataaatgcaaatttctggctccagtgcctatactcttacctagtatgctgtactgccatgtctgtgaaatatacatagaagtattttcctcttaaaataactataagctccacaagtcagaaatcctgttctccaagccatggyagccactaaagcaattaatatattgggccctcaagtagctactcagtaaatatttgttacagagataagtgaataccaatcctgctctgggaatctgagtttttataaaaatgagacatgaatatacactgttaaaaaattactatattctcaagtatgtgcccctagtttctct

SEQ ID NO: 511105 - DNA, 510 bp, Homo sapiens
tataaagtaaatgaaacacactcttattatattcttctacttgaggtagaagaattctaaattaaaacttggaaaaaagaatttttatccgtgcaaaagatttgaggtatgtactatagttttataaatcaayagaaaaaaatggaaggacacagccatggctgggcaattcacaaaaggaaaaataaaaatggcaataaataatgtggcagattgtgtttaccaaaggtggccacaactgtgtctcccggttttacatattcttctctattgtgacaatgtcactctgtcatcagaaggtggagtcttttcacttccttgaatctgagtggatccttcgactgttttgaccaagactatgtggtagaagcgaagttccagttccaggtattgctcttatttcacctgacaagtttggtttcctgccttttggaagctgaccactatgttagaaatgtaatcaccctgaaatcactatgtcgtgagaaacccaaaggcaagtgaagaagc

SEQ ID NO: 511106 - DNA, 614 bp, Homo sapiens
tgcttgggaggctgaggcaggaggatcacttgaacgtgagaggyggaggttacagtgagcagagattgcgctactgcactccatcctgggcaacagtgagaccctgtctcaaaacaaaaaactccacaaactttcaagccattttgaaaatgttcagaaatttcttgaatattttattaagaacattttatcttactagatttgaaaaatattttgtggtttatttattcattttaaaaatagaattaaaaaaatttttttcagagataaggtcttgctttgtcacccaggctggagtgtagtggtgtgatcatagctcactgtaactttaaactcctgggcgcaagcaggtctgcctcagccacccaagtagttagcactacaggtgcacaccactatgctagctaatctttaaatttttcatagagttggaatcttgctctgttgcccaggctgctctcaaactcctgacctcagtgatcctcccaccttggcctcacaatatgctggaattacaggagtgagccactgtacctggcctaaaatcgactttgtttcttagagtagtttgagttcacagcaaattgaacagaaggtaaagagacttcccaaat

SEQ ID NO: 511107 - DNA, 614 bp, Homo sapiens
tgcttgggaggctgaggcaggaggatcacttgaacgtgagaggtggaggttacagtgagcagagattgygctactgcactccatcctgggcaacagtgagaccctgtctcaaaacaaaaaactccacaaactttcaagccattttgaaaatgttcagaaatttcttgaatattttattaagaacattttatcttactagatttgaaaaatattttgtggtttatttattcattttaaaaatagaattaaaaaaatttttttcagagataaggtcttgctttgtcacccaggctggagtgtagtggtgtgatcatagctcactgtaactttaaactcctgggcgcaagcaggtctgcctcagccacccaagtagttagcactacaggtgcacaccactatgctagctaatctttaaatttttcatagagttggaatcttgctctgttgcccaggctgctctcaaactcctgacctcagtgatcctcccaccttggcctcacaatatgctggaattacaggagtgagccactgtacctggcctaaaatcgactttgtttcttagagtagtttgagttcacagcaaattgaacagaaggtaaagagacttcccaaat

SEQ ID NO: 511108 - DNA, 180 bp, Homo sapiens
taatgcaatttttaaaacaacaataggctattgttttacacatctctctgaaaactatacatttattgactttatctagaagggcagtaactatgtatctctttattaatctttctcctaaacatactgaaaatattttgcagtacacccttaggacttrttaggtttataaagaaaagg

SEQ ID NO: 511109 - DNA, 607 bp, Homo sapiens
ggtgtgttgggtttggggtcaatgagatgaagaacaagagggttmtatcacaaacaaccacatagggaggggaagctttaactaggccaaaggtggcagggtagaaatgggtttcagataacgtatgtcagcctagaaatgggtgcagaggcagcaactacattaaacacatttatgacagcagctaagctgacatacctgatgcaggatacttaaggattctcccctgggaaactgatgggcctaagagaaaatatctgtggttagtgacattaagggaggggaggggatccccacatgaaatggctgggtcctagcccaatcagcctgcaagcaaagccccaaaccaagaggcctccttctgggaaacaaagcttccaagcaaccccgccttcattacaaactgacatgcagtgattactagacctgtggggaactcctaacacatgaaagaaaaagaccaaaacaaaaacaagcaagcaaaacagaaacaagaaacttgttataaatgaaggcaatgcagacaagaggagaaaatttgaaaagaaaatttaaactctggttaatcatttcaaaaggataaaagaagatgtgccttcatgaaaca

SEQ ID NO: 511110 - DNA, 429 bp, Homo sapiens
tgaggggtgtgttgggtttggggtcaatgagatgaagaacaagagggttatatcacaaacaaccacatagggaggggaagctttaactaggccaaaggtggcagggtagaaatgggtttcagataaygtatgtcagcctagaaatgggtgcagaggcagcaactacattaaacacatttatgacagcagctaagctgacatacctgatgcaggatacttaaggattctcccctgggaaactgatgggcctaagagaaaatatctgtggttagtgacattaagggaggggaggggatccccacatgaaatggctgggtcctagcccaatcagcctgcaagcaaagccccaaaccaagaggcctccttctgggaaacaaagcttccaagcaaccccgccttcattacaaactgacatgcagtgattactag

SEQ ID NO: 511111 - DNA, 607 bp, Homo sapiens
ggtgtgttgggtttggggtcaatgagatgaagaacaagagggttatatcacaaacaaccacatagggaggggaagctttaactaggccaaaggtggcagggtagaaatgggtttcagataacgtatgtcagcctagaaatgggtgcagaggcagcaactacattaaacacatttatgacagcagctaagctgacatacctgatgcaggatacttaaggattctcccctgggaaactgatgggcctaagagaaaatatctgtggttagtgacattaagggaggggaggggatccccacatgaaatggctgggtcctagcccaatcagcctrcaagcaaagccccaaaccaagaggcctccttctgggaaacaaagcttccaagcaaccccgccttcattacaaactgacatgcagtgattactagacctgtggggaactcctaacacatgaaagaaaaagaccaaaacaaaaacaagcaagcaaaacagaaacaagaaacttgttataaatgaaggcaatgcagacaagaggagaaaatttgaaaagaaaatttaaactctggttaatcatttcaaaaggataaaagaagatgtgccttcatgaaaca

SEQ ID NO: 511112 - DNA, 519 bp, Homo sapiens
gtaaacaataaaaaaaagctcgtgcccaaagtgtttctgactacaatacgcctctgatgcaaaatgcctagagcttattcaccactcactaccaaaacacctttttgcttgtatttattgtaaatcctctgcttgtttagcttacttaatccatattttaacaattgaaaggcacaatatcaaggrtaaaatgggatgacatgggcggaaagaccatcagaagagtaggaatttgggcattgtaacttgacctgcttttgtctccctctttcccactctatattggttttgaaaactagctgccctgttaccacccagaggtggagactgggtttggagctcttcaacaagtcccattcccagagcattgtcattattttacctgtctatcagctccctggacaagtcccattcccaatgcatttttatttgccctgactcagaactcactctgcagaaaagcactttccccaaagtgtttgtggggggggaaaaaagaagcaattgttcagcatttgc

SEQ ID NO: 511113 - DNA, 619 bp, Homo sapiens
aacatgggccgattgagagtgcaggctcccaactgcccccgtgggaggggacctcccttggctccacatgtggcaccctccgagggaggtgggagtgtgggggcagggagctggcccagcacatgcaggtggccctgagctgcatctctgtcctccactccactgtgcttattctccacagtgagcgcctacctcctgctggatcagagcctctacagggtggaaggggaaacagaggcacgtaactcagaccaaaataatgctgcagcagagcagggatttgagttcctgaycacaaaacccaccatagaagcataactatccccagtgtcctcacctgaaatggaagcagcacatgagagccccggccacaccagcaaaggctgagcattcatcgaactcagagccggcttcagggtgcggacagcagccagcagggctctgggctgttgctcagagctgggcagcacgcagcaaacgcccccttgccaggagatgtgccctctgacaaagacccattcttcagagaccctgcaggctgcagctatgctgtcactaaaaagcaaatttataacccaagagttgataatttaagcaagaattgggaggagctaaaatc

SEQ ID NO: 511114 - DNA, 641 bp, Homo sapiens
atgcctcctgaaggccacacaataactcagtgttcactgaaaacacaacctctccactgagaatccctgttttcccactaatggagaaggggtggtgtgaggtcagagtatagagaggaaccccagtttctagaagagagggaaggaagggcctrgggattgtgctgcctttgggtggagggagaaggaaggggcaggtctctgatagaagcaggggcagaggacagcctcaactggccggttccagtcacagagcccagtcagtgagaggttcatcattaactgtcaaatggtggttttaatcagctctgctcctcagtggaagatagatttaatatcaaggcacattttcagagccattagtttaattatgacaggtgtctgcaaactggatgactctgctttcagatctgagtgacagcatttaattctctaggtccatggggacgctgggttactttaccaaaatgagcctccattgaaagtctaagtgttttccattcccttctccccccttgccttcctcctcctctctttttatcctactgtacacgtcaaaaggaggaaatggatagaaaattgtgcttcagcagaagagaaaataatttaccttgcccattagtcttactggggcttccagc

SEQ ID NO: 511115 - DNA, 655 bp, Homo sapiens
ggttagcattttttttctcagaatgacttcaaaataatgatagatgaaacccattcatagttttctgactacactctatatggttgccagaagtttttaatctattactgatgtttctgaaagaatgttgaataccatgtaaaaagtgggtttttttttttttagtatgcactctttacagtaaaacactttggactatacccctaaaattggggakatatatatatatctatatatatcttatacatattaatataacatacatttatatggcttatatatatagcttatgtatttatatattgtatataacatgtgtatcagcatatttatattttacaaaccttattagtcaaaaaggtaagagttttttaagtggcgtaattaaagaaaaatgaaatttctgttttttttcctatggcacaaatactacttttgaaaatcagcaatctgggtcctgccttgcttccaaaaactacctttgaaactaatacaagaagaccagccttttaagatagctcaggaatacaatacttcatcttaaataaacaactttcaaaaaaaaatcagagcttgatctgtatcctatttcactgttagttacacgatgctataccttgtgctttgccatactgacatttctcattttttatca

SEQ ID NO: 511116 - DNA, 637 bp, Homo sapiens
tgtgtgcggccttgagatgggagagcactgaggggacctcgggggaggcccggcagaggacacagctgcctgcaggaaggccttaaagctcagaaggycacccgagaggggctgtgactttcccataagggaacaagtgtccagcggggtgggtgatgctgtcacctcccagtcacagctctccaggacattccagaattgacaaccagtgcaccctacagtctgtatccagcagacatcagcccacccctgcccagggccatcggctgccataaatggggcctctgtcttgaatatgtgggttcctgggtcacccagcattgtgtaaggaaggtgtctctcaagatgaggagtggagggggcacagctgcttctgtggctggactctggtcttgcacaccaaggctctgtttcttcatctgcaaacaaggacaatttgccctgagccccttccatgttggctggtgaagccaccgcccaggtctggtgggagtccccagggagggagtggtccttcagcagtgccaggcaggggtgcccagggtctgcaggggcaaaggggtggaattcagagtccaagagacagatgtgcttggaggagagggggccgtcttccaggaacctggagggaaaggag

SEQ ID NO: 511117 - DNA, 526 bp, Homo sapiens
gatggtcacccggctagacagtcacctggatatatgttcacctggatagatggtcacctggctagatagtcacctggatggacagtcacctggacagatggtcrcctggctagacagtcacctggatggatggtcacctggatagatggtcacccgactagacagtcacctggatggattgtcaaccagctagaccgtcacctggatggatggtcacctggatggacagtcacctggatgaatgggcacccagctggctgctctgagtacagctctcacaaaacctttgcttcccccctccaagttcacgacctttcctccactcttccctgcccaagcacttctaattaatgtaactttgcctaagctgagatcctggggttctttcagtacctgtcccaggcagtggcagggccaggagaagggagatggctgagtataggcaaatgtctctatgccacacatatatccatcccgttttcccagctggaagtcgcaaatccttttcttcctgttttcagatctt

SEQ ID NO: 511118 - DNA, 446 bp, Homo sapiens
aggcaagggtccgctgccccacaactggccagccctggccagcgcaggctgctgtctttgagcctttccaccatgctgtggccttcatgtgtgtttctctgacatctggccaggctgagcacctcgatgtccactggccrgctgtgtggcctctttcatccacagcctgttaggtctcttgcttatctcccattcggctttctgacgtttcctcattgatgtccaggagtccttccatactctgggatgagtcatgggttatgtggatggcaaggacactctgtcctttaaaattactgttttattgtttttccatttttcctcaatgtcgtttgtatctttttctctccttcagcttatacagtattaattttcttttgtgaattttttccttcctataaactccttaatcgtacatttcttcactcttcttttagaggttatct

SEQ ID NO: 511119 - DNA, 486 bp, Homo sapiens
gtggtcacagctttcttcccgtggacgcctctgaagccsactgggtaaactcacggcctccatttgatgctggggaaatggagaagcaggaagcccatgtgatgtccagggtagagggctgaaggggctggggctggtctcagtctgtttggagagccgcagtcagggctaaccacccaccttctccatcagcttggggtcccatccacaccagcagccctccaagcctgcctcctgcacctcggcttcctgcaccactggaggaagctccagagtgagcccggcacaccaccctgtaaatccagcctcgccccaggcccccagatttctttctacctcacccagggatcaagaaagagctttaatgacacggtcccttccaacgccagcagcaatgatcccaggcagggaagttctcatccccaaggaccccgggaagcggagtgtcagcgggtcagggtggaacccctgagccagggcacccca

SEQ ID NO: 511120 - DNA, 570 bp, Homo sapiens
acctatgaccttcagatttactgaaaaacaaaaaattggcaatgccaattatgtcactcattgttgtcccagggctcatcacctatgaagatgacaatagcaaaaatatccaccaatatttttccccaaaggtcccttaagagatgagccagacccctyaatgcctggtgaaagattttgaacaattcttaatactaaagccagaataatctttctaaaactcaaattgaatagcatcattctcttgtgaaaattcttcctattgcccttagagtaaagccctgatacctccttaacaaaacccacaagacactgcatgaccttgctaccactgactacctcagcctcatctcaagcaattctcctctccattttttgagctcatggcacaatggctttcttttagttccttaaaaacaacatgggcaatcctgcctcaaggcccttgatcatggtgttctctcttaataaatgttctccacttaggaaattccattgttcaggtctcagcttaaaagtcaattgtgtcccagctattgcagggtggtgggtggctgaggtggaatggtc

SEQ ID NO: 511121 - DNA, 570 bp, Homo sapiens
acctatgaccttcagatttactgaaaaacaaaaaattggcaatgccaattatgtcactcattgttgtcccagggctcatcacctatgaagatgacaatagcaaaaatatccaccaatatttttccccaaaggtcccttaagagatgagccagaccccttaatgcctggtgaaagattttgaacaattcttaatactaaagccagaataatctttctaaaactcaaattgaatagcatcattctcttgtgaaaattcttcctattgcccttagagtaaagccctgatacctccttaacaaaacccacaagacactgcatgaccttgctaccactgactacctcagcytcatctcaagcaattctcctctccattttttgagctcatggcacaatggctttcttttagttccttaaaaacaacatgggcaatcctgcctcaaggcccttgatcatggtgttctctcttaataaatgttctccacttaggaaattccattgttcaggtctcagcttaaaagtcaattgtgtcccagctattgcagggtggtgggtggctgaggtggaatggtc

SEQ ID NO: 511122 - DNA, 570 bp, Homo sapiens
acctatgaccttcagatttactgaaaaacaaaaaattggcaatgccaattatgtcactcattgttgtcccagggctcatcacctatgaagatgacaatagcaaaaatatccaccaatatttttccccaaaggtcccttaagagatgagccagaccccttaatgcctggtgaaagattttgaacaattcttaatactaaagccagaataatctttctaaaactcaaattgaatagcatcattctcttgtgaaaattcttcctattgcccttagagtaaagccctgatacctccttaacaaaacccacaagacactgcatgaccttgctaccactgactacctcagcctcatctcaagcaattctcctctccattttytgagctcatggcacaatggctttcttttagttccttaaaaacaacatgggcaatcctgcctcaaggcccttgatcatggtgttctctcttaataaatgttctccacttaggaaattccattgttcaggtctcagcttaaaagtcaattgtgtcccagctattgcagggtggtgggtggctgaggtggaatggtc

SEQ ID NO: 511123 - DNA, 604 bp, Homo sapiens
ggctttagctcagggggctactcaacatttgctgtcatcttcctcctggtaccattaggctaacctgggcatgtccttttaatgacattggtggaggacaagggcacmagcagaaacatacaagtgttcttttgagcctctgtttctgtcacatttaccaacattccgttggccaaaacaatttcacatgggtgagttgagagttagagtggggcactgtgaggactcaaggcaaagggcatggctacagggaggggtgaaggattgggacaatttttgcaatatattatatagcccatactgctaatcaaatcaaagtttatagatctaacggaagcgtacgatttctgatttccttgatgaaacacttatcttttcagctttactgatgcccagtctctttttgataggctgggggaaagtcagagaaaccagaaatgggaaaaggttgaagtgagatcttgaaagggataggtaattattaacaattagctattgcatgcattgtataatttcagatgtacccggctcatctccttttataggacactgaagcccaaagcagcacagtgtatcacccacattcccccagccatgttaatga

SEQ ID NO: 511124 - DNA, 604 bp, Homo sapiens
ggctttagctcagggggctactcaacatttgctgtcatcttcctcctggtaccattaggctaacctgggcatgtccttttaatgacattggtggaggacaagggcacaagcagaaacatacaagtgttcttttgagcctctgtttctgtcacatttaccaacattccgttggccaaaacaatttcacatgggtgagttgagagttagagtggggcactgtgaggactcaaggcaaagggcatggctacmgggaggggtgaaggattgggacaatttttgcaatatattatatagcccatactgctaatcaaatcaaagtttatagatctaacggaagcgtacgatttctgatttccttgatgaaacacttatcttttcagctttactgatgcccagtctctttttgataggctgggggaaagtcagagaaaccagaaatgggaaaaggttgaagtgagatcttgaaagggataggtaattattaacaattagctattgcatgcattgtataatttcagatgtacccggctcatctccttttataggacactgaagcccaaagcagcacagtgtatcacccacattcccccagccatgttaatga

SEQ ID NO: 511125 - DNA, 604 bp, Homo sapiens
ggctttagctcagggggctactcaacatttgctgtcatcttcctcctggtaccattaggctaacctgggcatgtccttttaatgacattggtggaggacaagggcacaagcagaaacatacaagtgttcttttgagcctctgtttctgtcacatttaccaacattccgttggccaaaacaatttcacatgggtgagttgagagttagagtggggcactgtgaggactcaaggcaaagggcatggctacagggaggggtgaaggattgggacaatttttgcaatatattatatagcccatactgctaatcaaatcaaagtttatagatctaacggaagcgtacgatttctgatttccttgatgaaacacttatcttttcagctttactgatgcccagtctctttttgataggctgggggaaagtcagagaaaccagaaatgggaaaaggttgaagtgagatcttgaaagggataggtaattattaacaattagctattgcatgcattgtataatttcagatgtacccggctcatctccttttataggacrctgaagcccaaagcagcacagtgtatcacccacattcccccagccatgttaatga

SEQ ID NO: 511126 - DNA, 651 bp, Homo sapiens
acaggcatgagccaccatgccccgctgaaattcttaatacttttttttctttttatttcaggcagtggcaatgttagacaagatatttttatttatttatttagagatcgcgtcttyactctgtcgcccaggctggagtgcagtggtgcaatctgggctcactgcaacctctgcctcctgggctcaagcaattctcccaccccagccacccaaggagctgggactacaggtgcctggcaccatgcccagataatttttgtatttttagtagagacggggtttcacatgttggccaggctggtctcaaactcctaacctcaagtgatctgcctgccttggcctcccaaagtgttgggattacaggtgtgagccacagagcccagcctagacaagatattcttagtaattttatccttgaagttgtgttttttaagtgaagtctgatgggacaatgaaatgtgtgtcagtggcttggggtcttgactcacatgtagccccctgccccactgctccctagggtgggttctcagcggcctgctccccttcaccggcctccactggctggctgtgccctgagaccataccacccagggccccaaaccatggtgctcaaggcccattggcctgagaggaggccccatttgttgtcat

SEQ ID NO: 511127 - DNA, 651 bp, Homo sapiens
acaggcatgagccaccatgccccgctgaaattcttaatacttttttttctttttatttcaggcagtggcaatgttagacaagatatttttatttatttatttagagatcgcgtcttcactctgtcgcccaggctggagtgcagtggtgcaatctgggctcactgcaacctctgcctcctgggctcaagcaattctcccaccccagccacccaaggagctgggactacaggtgcctggcaccatgcccagataatttttgtatttttagtagagacggggtttcacatgttggccaggctggtctcaaactcctaacctcaagtgatctgcctgccttggcctcccaaagtgttgggattacaggtgtgagccacagagcccagcctagacaagatattcttagtaattttatccttgaagttgtgttttttaagtgaagtctgatgggacaatgaaatgtgtgtcagtggcttggggtctygactcacatgtagccccctgccccactgctccctagggtgggttctcagcggcctgctccccttcaccggcctccactggctggctgtgccctgagaccataccacccagggccccaaaccatggtgctcaaggcccattggcctgagaggaggccccatttgttgtcat

SEQ ID NO: 511128 - DNA, 624 bp, Homo sapiens
ttcttatcttatagttcattcaataygcatgcatgcatgcacacatatgcttcaataaactatgagcttcgcaaaggcaagggccatggcaatcttttatttgtctacagcatgcagaatagtgactaaacatttcctgaaagtatttggaacaaataaccttattcaggccagaatcaaaggagtcaaacaactagaccaaagccagagatcaatgggcaaaatacttattttgatcaaaaaaaaagtttgaataaacagtttgtgttctctaaccctgagaaaacattatataacacttttatagttgagttcagtatgattatagattagcaacaacaataactataaaatttagtgggggagaaggttaaaaaaatgagtataccactttctgcttaggaatagaagcttcgcaaatgcagtgtctttaagacaaatatgcattagatatatatctttcctatttaaaaacttacgaaaaagatcacaagatcttcattcaaagatgtaatgtatataccaaaaattataaaggtcaatgtaatttaatataaatatataaacctctagacactggaaaaggcaaataattacacatacatgtattttattcagctttaa

SEQ ID NO: 511129 - DNA, 653 bp, Homo sapiens
tttggtacaaatacactttaaacatttgcttcctttttccttctgcatattaatcatctcaaatggcacacaaattcactctctgactgcaggacataatactatttgtaaatattttccccagagattctaggaattctgcaaatgtaaatggcaatggaatgactgttaccatgaaagtgaagagccttctctggtatgttttaccagtggattgggcactcagttcaggccttgggaatattcctttctgaattctagtatctgaacaattgcttattgttcttgttatgcactcgagaattagcttaccagttctttccaaaaatttctttctaaattaaatgtgggtacacatttgaaaactgcacactgtgtatgaatagtacacatttattttacatttttaacatcatgtacaagctgtgggaacatctggtgttttgcaaatttgggcaaatccagctgcatttcctcttccaaatatgttctctgacatttgcaggttgtgtttcattttgatttttatactctctctctctctatctatatagggcagcattgtgtgctttcaaacaygcattttttccaactttatacttctcctttctgaactaaaaattaaaagcttgctgattaatatgagaaaaaat

SEQ ID NO: 511130 - DNA, 637 bp, Homo sapiens
cataatcaaaatatcaaaataaattccaaataaagataaaactgaaatgtaaaaaataaaactatcaaagcactaaaaaatatgaaaacctgtcataatagtcttgggatttaaaggtctttcaaaggatgacagaaaagacagaaattgtaaaagaaccacaattttaaaaaaattctgaatagcaattggaaagataaatcatatataatraaaacttggcaatgtagtaaaatatttgagataggcatagggtaaatattccttatgcctcaaaataagctcctaagaatcaatagtaaaaagatgaacaccccaaaagaaaaataagtaaaggctagaaacaagtttcaaatgaaaaagtgcaaatgaagctgttcaacagacaaacactggaaagactgaaaattaatttagagaaggggccctttagtgccttagggaatggaaaataaactggtgccacatgataacaaagaccaaaattttgcatgtgcttaccctttgattcagcaattccactttgcattatccatctacaacaggcacagttctaactattttacatactcagttaatattacaatagccctatgatataagcctactattatccacattttacaggtgaagaacc

SEQ ID NO: 511131 - DNA, 637 bp, Homo sapiens
cataatcaaaatatcaaaataaattccaaataaagataaaactgaaatgtaaaaaataaaactatcaaagcactaaaaaatatgaaaacctgtcataatagtcttgggatttaaaggtctttcaaaggatgacagaaaagacagaaattgtaaaagaaccacaattttaaaaaaattctgaatagcaattggaaagataaatcatatataatgaaaacttggcaatgtagtaaaatatttgagataggcatagggtaaatattccttatgcctcaaaataagctcctaagaatcaayagtaaaaagatgaacaccccaaaagaaaaataagtaaaggctagaaacaagtttcaaatgaaaaagtgcaaatgaagctgttcaacagacaaacactggaaagactgaaaattaatttagagaaggggccctttagtgccttagggaatggaaaataaactggtgccacatgataacaaagaccaaaattttgcatgtgcttaccctttgattcagcaattccactttgcattatccatctacaacaggcacagttctaactattttacatactcagttaatattacaatagccctatgatataagcctactattatccacattttacaggtgaagaacc

SEQ ID NO: 511132 - DNA, 637 bp, Homo sapiens
cataatcaaaatatcaaaataaattccaaataaagataaaactgaaatgtaaaaaataaaactatcaaagcactaaaaaatatgaaaacctgtcataatagtcttgggatttaaaggtctttcaaaggatgacagaaaagacagaaattgtaaaagaaccacaattttaaaaaaattctgaatagcaattggaaagataaatcatatataatgaaaacttggcaatgtagtaaaatatttgagataggcatagggtaaatattccttatgcctcaaaataagctcctaagaatcaatagtaaaaagatgaacaccccaaaagaaaaataagtaaaggctagaaacaagtttcaaatgaaaaagtgcaaatgaagctgttcaacagrcaaacactggaaagactgaaaattaatttagagaaggggccctttagtgccttagggaatggaaaataaactggtgccacatgataacaaagaccaaaattttgcatgtgcttaccctttgattcagcaattccactttgcattatccatctacaacaggcacagttctaactattttacatactcagttaatattacaatagccctatgatataagcctactattatccacattttacaggtgaagaacc

SEQ ID NO: 511133 - DNA, 438 bp, Homo sapiens
ccaacccttcctatgacctttcttctttcagcaacaacagcaacttcccctatttccaaaaggccctgtttatgcctatctttattagtgttttaagtccatcaaccctcaaatgtgaacactgtttagaaggaaacatcaaagattttattccataactgtgtcaaaggaayccagtttagagactgggtaaagattcttcattttcaaacatgatacatgagggagagggaaaaaaaacctgtacaatctcacaccctgtaaagagaaagattgctgatttccaaatattacttttgccttttcctaaggccataacggatgcccatcagaactaaagcccgcacatgcaaataaaataagagacagcttagagggagattcatgattcacccgacattaatcatggagcctccaattctgacacatccaaggtac

SEQ ID NO: 511134 - DNA, 683 bp, Homo sapiens
tttatctgtcaacctgctttcatactcatcacttcctatcaattataagcattacacctatgtgccttataacttcctctagactatagatttgtgtgtgtgtgtgtgtgtatgtgcgtgtgtaacagggtctcactctgtcacccagactggagtgcaatggcacaatcacggctcactgcagccttgacctccccaggctcaggtgatcctcctgcctcagcctgcaaagtagctaggactacagrcacacgccaccatacccagctaatttttttggtattttttgtacagatgaggtttagccatgttgccaaggctggtcttgaactcctgggttcaagcaatctgcccacctcagcctcccaaagtgttaggattataggtgtgagccacggcacccagctgactatagatttttgaccgaaatcttacctttgcagaattgatcactccctatatgtggctcccactgcctccaatccaggctacaatcagagcatctatatcattttacagcaattgattatttacatttccctctttgtcactggattatgaattccttgaagggaggttccacatcttgtttatatctgtacctccagtgcctacatcacaaaaaaaataaggggaagcttttcatgtacttgcaatttcccttttctctactgatccagaaa

SEQ ID NO: 511135 - DNA, 683 bp, Homo sapiens
tttatctgtcaacctgctttcatactcatcacttcctatcaattataagcattacacctatgtgccttataacttcctctagactatagatttgtgtgtgtgtgtgtgtgtatgtgcgtgtgtaacagggtctcactctgtcacccagactggagtgcaatggcacaatcacggctcactgcagccttgacctccccaggctcaggtgatcctcctgcctcagcctgcaaagtagctaggactacagacacacgccaccatacccagctaatttttttggtattttttgtacagatgaggtttagccatgttgccaaggctggtcttgaactcctgggttcaagcaatctgcccacctcagcctcccaaagtgttaggattataggtgtgagccacggcacccagctgactatagattyttgaccgaaatcttacctttgcagaattgatcactccctatatgtggctcccactgcctccaatccaggctacaatcagagcatctatatcattttacagcaattgattatttacatttccctctttgtcactggattatgaattccttgaagggaggttccacatcttgtttatatctgtacctccagtgcctacatcacaaaaaaaataaggggaagcttttcatgtacttgcaatttcccttttctctactgatccagaaa

SEQ ID NO: 511136 - DNA, 651 bp, Homo sapiens
cagctgcatcttgcataaagccacccacaggctgggaattccaccactgtttcctaatcacttcatcctggacaacgtcagtgttggctgaaggttgacagcaacgctctaacagcgttgttgtaaggttcaaatgaaaccacgcatgagagtgagtagtatgttccctctgctcctaacttttaactttacctccttcacatttctgctcaaatattaacttcttccaatgaggtctatttaagataggtggcaatccacccaactcccacccaattcctgatttccatgattcttctttcctttttactgacacrtgtcaccttctatcatgttagtctgtttccccccactaaaatacaagctccataaaggctgatattatttgttggttttgtcacttttccaaatacctaaaataaggtatggcacataggaggtactcaataaatatgagatggatggataaagagaaaccaagaactcttatggaagagactcactgatcctttgacctccaacatcgtttttgtttttgttgaataagtgaacaaaagaatacaccatcaacactgatttgagcccataaatactggagattacccaaaggatataatgttgcaattttcctctagataataaaactcacat

SEQ ID NO: 511137 - DNA, 354 bp, Homo sapiens
gtgcagagcggtgggcaccctgctggcacagccccctccacatcccactccctcctcactcattttatttctgtccgtttcattttgttagcatttatcaagtcagagcatgggtagtcttggtctacatactctcaactctccagcgatcaccctctttcttgttcttgggggatcccctggcttcccagcttcttttaatcagttgcttttatgggtctacagggaaatgaccatcaattcmgaaattcagggcatcgaaaggaaaaagccaacttcaagggaaaggccttccccctgccttcgcccagtctgcccagggaggccgtaccaatcagcctgaccctgatcaca

SEQ ID NO: 511138 - DNA, 558 bp, Homo sapiens
ctgacctcttcctaccaccttgagtgacagccctgtgttccaccagactctgccatggcatggagggtgacacagtccatacagcaccgtccatttgccccctgtctccttgggggcctgttcgccctttgtatttcaggctagttggtttctctgtgtcctcagcttcctgatgggttcaggaagagttgtgatcttacagttttcccagctttgtctttttgttggggtaagaatgtcactctttctcrttttccacatctggaatggaagcagagctagtcattaatgcattttgtttcagttctccccataacctttcaaattatattattaacccatttgacagatgaagaaactgacgcagggtgggattgtttatgcctcccaatctaaaagagctattaagcagcagggctgggatttgaacagtgaaagtttggctccagaacttacactttgagccactccactctgccacctctcaagcacacagtggatccttacttaatatttgttcaattgaatataaggcaggagcgagaaggagctctgctt

SEQ ID NO: 511139 - DNA, 558 bp, Homo sapiens
ctgacctcttcctaccaccttgagtgacagccctgtgttccaccagactctgccatggcatggagggtgacacagtccatacagcaccgtccatttgccccctgtctccttgggggcctgttcgccctttgtatttcaggctagttggtttctctgtgtcctcagcttcctgatgggttcaggaagagttgtgatcttacagttttcccagctttgtctttttgttggggtaagaatgtcactctttctcattttccacatctggaatggaagcagagctagtcattaatgcattttgtttcagttctccccataacctttcaaattatattattaacccatttgacagatgaagaaactgacgcagggtgggattgtttatgcctcccratctaaaagagctattaagcagcagggctgggatttgaacagtgaaagtttggctccagaacttacactttgagccactccactctgccacctctcaagcacacagtggatccttacttaatatttgttcaattgaatataaggcaggagcgagaaggagctctgctt

SEQ ID NO: 511140 - DNA, 677 bp, Homo sapiens
cttacacacacttaccactagctgtcttaagatagtcatactggaatcaatggctaaaagcaaaggaatatgatttgagacaaacttttcccattaactactgacactttcagcaaactaatgcttagatatttttccccaggaagcctctacccctgcccagatcatttggaaacagactctcttcttcccccgccccttccccatgccccatatcaccttttaaactcagcaccaacattggtgtctccattctggggttcctgacagataaggctaagacggagaatcagctctttactaccctctttgaaccttatgtgtgaaccacaaacccaaaaatataaagtagaaaagggaccagggcaagctcagttaatttgtggttctctctagtgcactgggatraggttccagaaattatggcagttccttagtctaaacctaaggctcaacattgtgggcagttagcaagcgtttttccttaatacagaaggacaaataatttaggacaagacatgggctaggtctgataaaataaatgcattcacatctgatttaactcttctgcaagtataattgcctgtatcccagactgagctaacattctttctagcagccatgtgaccatgatcaaacgaccacagaatatatgcttctttacgtgcaacatacta

SEQ ID NO: 511141 - DNA, 641 bp, Homo sapiens
tgatttcaaataaattttataacatctatttccatttttttttcactcagtacatatgaatccactgtttaatccaaatttaaagtaacaatcattaaagtaaattaaaatggagtccaggcctgaagaatttctgagcagacaaaaccagttaggcatcataagtgatctaaaccttgtttgatctacagatataagggaaacttgagctattatcaatttctatattaaagaaaaacagaacttaagttcaaaccatcagaagtagccaacacacataatcatacaactgaagactttccagtgggataaacctaataacgtacaactttggtaccaaataaggtacaaataactgtacaactataaatagtcaaataytatctttagttttcttctgtgcctgtcctctaaaagcctccccctgtgatccctcagtggtgctcttaagccacttttatggtttggagctgcctgagtcataaatcattgtgtaaataacatatttaaaattttattgtgtcttagtttatcttttaacacagtggtcctcaacccttggttatgagctatggcttgttaggaatcagatcatacagcaggaggtgagcggcaggtgagtgagcattaccacctgagct

SEQ ID NO: 511142 - DNA, 475 bp, Homo sapiens
gaatgggaatagttgtgcttgctttgaccatgatgaaagaaggagccactgkggaagcattgtataagacaaaacaaaaacccaccacccaaacccctactaataaggctgtgtcctggccaatatcctttctaattgcactgcagttaaatggcaatgctgacagtctcttggaacattttattcaacttctggaggggctgcatttcaagtaagacttatgaggctctgtgggagatggagaaatgagcagtggtgggctggggagctccaaggagcccagcctgatgggttgaagccaatcttgagtaaaactccaggctgaatgggttcaccctggggctgacccaatgggcattgcttatgttcttaggtctgtttgcgggggaagtgcttgcacccatattattcttgacagtctttattcccattttctctgcaaatgagactgtgtggaatgttttgcccttgatta

SEQ ID NO: 511143 - DNA, 570 bp, Homo sapiens
tgtgtaccaagcactaaagtcattgagagaagtactcagcccctgccatcaatgagcttagagtctagcgagggagccagatgcagtggtggacaatggcagaacagggaggtacatgccagtgatatactgaggcagasaagtgagtccagcccagatggtgattgagcagttagggcaggcaccctaaggaagctgtccagctcactatagtgcagggcagaggatggtcatttatggaaatatacttcaaatgcatatcagagttgagagaaggtagacattgcttttctccagtgtaaaggctgcccgacctagttatcagccaagtccctggttgttgtctcaggttacaggagacctggtcagtttgcttagaaaagctcagtatttagcaattgccaaaagaagaacatttttttcccctttttgtgttgaaatcaggttagcagaggctcctgggtgtcctttgcttagaaatcccatggtcaaggaggagaactctgctgcaccatccctcctgcacacctgccacctaaggagggggatgctccttggtccatttgatgt

SEQ ID NO: 511144 - DNA, 142 bp, Homo sapiens
ttagtactgggaaactaactgaaagtggggttggagaaaaytgtgtctcctaaaagcctcatattctcctagtcaaccaggggctcctgtttgcccttccatcactctccacctgttccaggcacaccctctgtccttctcc

SEQ ID NO: 511145 - DNA, 641 bp, Homo sapiens
tgatttcaaataaattttataacatctatttccatttttttttcactcagtacatatgaatccactgtttaatccaaatttaaagtaacaatcattaaagtaaattaaaatggagtccaggcstgaagaatttctgagcagacaaaaccagttaggcatcataagtgatctaaaccttgtttgatctacagatataagggaaacttgagctattatcaatttctatattaaagaaaaacagaacttaagttcaaaccatcagaagtagccaacacacataatcatacaactgaagactttccagtgggataaacctaataacgtacaactttggtaccaaataaggtacaaataactgtacaactataaatagtcaaatattatctttagttttcttctgtgcctgtcctctaaaagcctccccctgtgatccctcagtggtgctcttaagccacttttatggtttggagctgcctgagtcataaatcattgtgtaaataacatatttaaaattttattgtgtcttagtttatcttttaacacagtggtcctcaacccttggttatgagctatggcttgttaggaatcagatcatacagcaggaggtgagcggcaggtgagtgagcattaccacctgagct

SEQ ID NO: 511146 - DNA, 624 bp, Homo sapiens
acagatttctataatctataatgaacgcattagaacactgtttcaaaactgatgtcaaaaagtgacttaagaaaattattattataattagcagtcatttttctggaaaagtaataaagtttattcctactgggaaaagcagaagcttaaaagttaatgagcatcaactgctattttagcagaataactgtgatagattattgcctacatgattattcattactagatttgtgattttaattgccatattttaatgattataaaattgttcctaatgaagcatgtcattattatttagatagtgtcatmtcttgagaaacataaaaaccttaggaaaaacttcaaaacattaacaaagtatactttttggggggttaggttcaaggacggagctgtagtttttccttgtagaacacaaaaatcctaagctttccaattcagttttaggaggtagatgaactcttttcaaggtttattttaccttattatttatttatttattattgatttatttatttattttgagacagagtcttccctctgtcacccaagctggagtgcagtggcgtgatcttggctcactacaacctcccaagcaatcctcgtgcctcagcctcccaagca

SEQ ID NO: 511147 - DNA, 517 bp, Homo sapiens
atgtgaatgacaccctgttgtttaacaacaatcatctagcctttctcacttctgtctcccatctttgccctgcgctcaccttctattgtctactgtgatggcagaaattgcctccagactctagccattgagaagtattcctgctccagggccatgctaacctcagagcagagtagaagcatcctctgggactctagtggtcccacctggcccctccasagaaatgtatcttacctttggatgtttggcttcagttgttttctggtgtccagaaggatgactatttgtccagagagagagacatttgtcacagtgccctgacttgaagctgagcatggggaagttgttctggatactctgatgaactcctatcctttatcccttagtattttatgcaagtgtgaaggggttccagggagataaaagtcatggaccaggagggttttagctagtatgatagacttcaaaatgtttttaagacaccatggtgtacaaatgaccggcccaaagaggccag

SEQ ID NO: 511148 - DNA, 598 bp, Homo sapiens
aacattgtgctattttattggcccatatctcaactagatgtaaaggagagactgctgaggtttttcaaagctgctgagcaaaacttccatctatagtttcatataggagcaaaacaaaattccagacaaaccctgagaagaatctatggcaatgatccaagcaagaaccatagacttaaggataaagtgggcattttttttcttcttcttcaaatgagagttggggctcaagaatagaaaggagataagagacatgaatgtttctcttgaaataaatcaccacaaaacaggatttgatttcctgttaagacattaaaatgataaatgattcccaaagatggaatatatatcacaaagatggggaagaacatatttgcagagacttaaaagttctgattaagracagctatgaagaaaaatgaagtagttttctctgtaagaatgagaacagatcaagtaaggagagtcaaaaatgctactcaatacctttgggtgtttgttcactatggcaacaaataaataataaaggagagattttaactttaaaagagaaatataacttcacagctatcatggaggcacattacaatgggtttta

SEQ ID NO: 511149 - DNA, 472 bp, Homo sapiens
attttcaagcttgtcctttatatctttatacatagtatcatagttgtttttataatctaagttcgataattgaaatatcttaatatttggggggcttcattgctgtgtgtttttattgcttattctttctttagttatttgcttccttgtgtgcttgrgtattttggactgttattcatcaaccttgaaaaattatttttgagacttctttgaaacctttctccagagatgatgtgttttcttttgcctttccagtcacctgagacactgtcatattgagtaattttttaattaaattcatagcctgaggttttcttgatcacccaagttctgtgaatttgggatgcaaatatatgtgaggtccggcttctggtaatatcttctcagagattctgcaaatcccctccctcagtgtcaaggcaacttttcttgtagccaggtaggggtgggagaagatgggacaagtctacag

SEQ ID NO: 511150 - DNA, 631 bp, Homo sapiens
atgtcaccagcaacaaaatgactttgtctgtgtctcagtttcctcagttagttcaactttgaactgttgtaacaataatattaaataaacaaagccactctctcatgttcactcctatctctttgcttgagttataaattgtcatgacctctttttctcttgaaagaaatttaagaaatttaaattgatcaaatcaattgtatgaaagttgatgatgtccttgtatcaaaatgtggacagagatttacatacaggtatgttcattttaacatgatttrttcattttcacatgatttagaattgcaaaattaaaatgcgtgcaacccaaataataagcaataggagaatacttaatatctgcagaataaaacaatcaactagttaaaagcctttaatgacactttttgaacaacatgatgttgaataaaaaaagcatcgcacattaaaatgacctcaactatgcaaaaaatttgtatggtcaaaaagtggaagcagacatgctaaaatgccaccaaggcaaagatggcaggactatgggtaattgttcagcatgtacaatcctttgtacagataccacacacactacaataatcttagcatggcactaaaaatatgaataataaggccgggc

SEQ ID NO: 511151 - DNA, 602 bp, Homo sapiens
aaatgactttgtctgtgtctcagtttcctcagttagttcaactttgaactgttgtaacaataatattaaataaacaaagccactctctcatgttcactcctatctctttgcttgagttataaattgtcatgacctctttttctcttgaaagaaatttaagaaatttaaattgatcaaatcaattgtatgaaagttgatgatgtccttgtatcaaaatgtggacagagatttacatacaggtatgttcattttaacatgatttgttcattttcacatgatttagaattgcaaaattaaaatgcrtgcaacccaaataataagcaataggagaatacttaatatctgcagaataaaacaatcaactagttaaaagcctttaatgacactttttgaacaacatgatgttgaataaaaaaagcatcgcacattaaaatgacctcaactatgcaaaaaatttgtatggtcaaaaagtggaagcagacatgctaaaatgccaccaaggcaaagatggcaggactatgggtaattgttcagcatgtacaatcctttgtacagataccacacacactacaataatcttagcatggcactaaaaatatgaa

SEQ ID NO: 511152 - DNA, 602 bp, Homo sapiens
aaatgactttgtctgtgtctcagtttcctcagttagttcaactttgaactgttgtaacaataatattaaataaacaaagccactctctcatgttcactcctatctctttgcttgagttataaattgtcatgacctctttttctcttgaaagaaatttaagaaatttaaattgatcaaatcaattgtatgaaagttgatgatgtccttgtatcaaaatgtggacagagatttacatacaggtatgttcattttaacatgatttgttcattttcacatgatttagaattgcaaaattaaaatgcgtgcaacccaaataataagcaataggagaatacttaatatctgcagaataaaacaatcaactagttaaaagcctttaatgacactttttgaacaacatgatgttgaataaaaaaagcatcgcacattaaaatgacctcaactatgcaaaaaatktgtatggtcaaaaagtggaagcagacatgctaaaatgccaccaaggcaaagatggcaggactatgggtaattgttcagcatgtacaatcctttgtacagataccacacacactacaataatcttagcatggcactaaaaatatgaa

SEQ ID NO: 511153 - DNA, 433 bp, Homo sapiens
attgcttttttgtaaaataagttagtcccaggttcagaaaagccgggtatttctatatggcaagacaatgctttcattgtgtgggactgctccatccactgagggacacccagcatccctggtctctgccctctaagtggyaggaatgcccactctgcccccagcattgtatcagatacaaccatcactgacacatttccaaaatgcccctctgcagaagctgttaccatcactgttgagcacctgtggatcagagctgccagtcattttaccttctcctgcctccccgaacactctgattaattaaggcttagaaaaaagatggttctgttttgccagtttcctacatgatcactatgcagagccctctcaaagatcatggtaggaactttggggtgcccttaacattctaggaagatgcttgctagtgaat

SEQ ID NO: 511154 - DNA, 612 bp, Homo sapiens
ctgctggtagctttatataattgagaccccatgtgtcactgagtttggctgggattgatttgtaagtgtaatcaaggagttaattgaaatgtatcacttaggactattcaggtttacttccactaaaattatagcacgagatsaaagcattgtcaaagattcctggaaaaagggaaagtcagtatgactgtgcttacctggagcattaattctgtgaacagtgcttagcctttcttgatgcacattgctcttggtacccgcacacatgcaaaattggaagtctgccgtttgctgttggaaaagcctagaagcctttacctgagacacttccctttaaaatccagcttctttccattggagtcatctgacctgagagaaattgaccctgttcttttctgacttgttccagcattgcagagttgaggacattctggagttactgcaatgtggatgatatctgctgttcttatgatcccacaatggttgtggattggctcattctaatccccacaaatagaaatatgccaaaaagagtagtttcaaacagatttctttttgataggaggtctgatcacagattcaacttttttgggaaagagggatacctgcctt

SEQ ID NO: 511155 - DNA, 612 bp, Homo sapiens
ctgctggtagctttatataattgagaccccatgtgtcactgagtttggctgggattgatttgtaagtgtaatcaaggagttaattgaaatgtatcacttaggactattcaggtttacttccactaaaattatagcacgagatcaaagcattgtcaaagrttcctggaaaaagggaaagtcagtatgactgtgcttacctggagcattaattctgtgaacagtgcttagcctttcttgatgcacattgctcttggtacccgcacacatgcaaaattggaagtctgccgtttgctgttggaaaagcctagaagcctttacctgagacacttccctttaaaatccagcttctttccattggagtcatctgacctgagagaaattgaccctgttcttttctgacttgttccagcattgcagagttgaggacattctggagttactgcaatgtggatgatatctgctgttcttatgatcccacaatggttgtggattggctcattctaatccccacaaatagaaatatgccaaaaagagtagtttcaaacagatttctttttgataggaggtctgatcacagattcaacttttttgggaaagagggatacctgcctt

SEQ ID NO: 511156 - DNA, 602 bp, Homo sapiens
ctgcccaggggctcctggacagcagcgctcactcaccagcctgcaggtcatacccctcatgcctgtgcggcagctaaacgcaggtcagcactagccagatgttccacccgcaaatgctaggggggtgagcaggacaaaccaggcttaacagcaaacgcttgaacaaaagaaaaaagaaggggccraggtgaacactctccccattctgcccaactcaccttcaccaggaagaaggacacgccatatgtgcggagggaccgtgcgagtttgacgtacttgaccttggcttctatctcactcatctctccgcagttcttatgctcctgcaaaagtgacagtggtcgggaccagttattgcatctctgccagcaggtggacttggagagaggtagttactgtatgtggtggagataaatggctaggaatgatcattaagtgatggttgtgtctgagacccctccatgacacaggcaactgctgaccaaggatcagagcatgcaggaagttctaacacagggatttcaaaccagagtttgagcccaaacagcctacattacttcacaactaaatgtgacaatccatgcacacatgcagtgtggtgg

SEQ ID NO: 511157 - DNA, 602 bp, Homo sapiens
ctgcccaggggctcctggacagcagcgctcactcaccagcctgcaggtcatacccctcatgcctgtgcggcagctaaacgcaggtcagcactagccagatgttccacccgcaaatgctaggggggtgagcaggacaaaccaggcttaacagcaaacgcttgaacaaaagaaaaaagaaggggccaaggtgaacactctccccattctgcccaactcaccttcaccaggaagaaggacacgccatatgtgcggagggaccgtgcgagtttgacgtacttgaccttggcttctatctcactcatctctccgcagttcttatgctcctgcaaaagtgacagtggtcrggaccagttattgcatctctgccagcaggtggacttggagagaggtagttactgtatgtggtggagataaatggctaggaatgatcattaagtgatggttgtgtctgagacccctccatgacacaggcaactgctgaccaaggatcagagcatgcaggaagttctaacacagggatttcaaaccagagtttgagcccaaacagcctacattacttcacaactaaatgtgacaatccatgcacacatgcagtgtggtgg

SEQ ID NO: 511158 - DNA, 602 bp, Homo sapiens
ctgcccaggggctcctggacagcagcgctcactcaccagcctgcaggtcatacccctcatgcctgtgcggcagctaaacgcaggtcagcactagccagatgttccacccgcaaatgctaggggggtgagcaggacaaaccaggcttaacagcaaacgcttgaacaaaagaaaaaagaaggggccaaggtgaacactctccccattctgcccaactcaccttcaccaggaagaaggacacgccatatgtgcggagggaccgtgcgagtttgacgtacttgaccttggcttctatctcactcatctctccgcagttcttatgctcctgcaaaagtgacagtggtcgggaccagttattgcatctctgccagcaggtggacttggagagaggtagttacygtatgtggtggagataaatggctaggaatgatcattaagtgatggttgtgtctgagacccctccatgacacaggcaactgctgaccaaggatcagagcatgcaggaagttctaacacagggatttcaaaccagagtttgagcccaaacagcctacattacttcacaactaaatgtgacaatccatgcacacatgcagtgtggtgg

SEQ ID NO: 511159 - DNA, 244 bp, Homo sapiens
ctgaagcagtggctggtaaagactacactcactggtgccgagagaccttccagctcagtcctgtagaaaacagtcatttcaaaagttcagtgcgagagagacactgatttgcgtatttttcacgtagatcttatatgttctaacagaaagggctcatagttctctacygcaaagagcactataaagaatatttgacctcaaagtgaggaaagctcagatctagctctcttgccacctctggaag

SEQ ID NO: 511160 - DNA, 615 bp, Homo sapiens
cagtggctggtaaagactacactcactggtgccgagagaccttccagctcagtcctgtagaaaacagtcatttcaaaagttcagtgcgagagagacactgatttgcgtatttttcacgtagatcttatatgttctaacagaaagggctcatagttctctactgcaaagagcactataaagaatatttgacctcaaagtgaggaaagctcagatctagctctcttgccacctctggaagtgtttgtgggcaagatatgtctcagcaccaggcttcatctgtgaaatttcatgagatgagctctagggtaagctgttcagcgattctcaggcgttatatgtgtcctggcatctccagtcttcatcctcttcttgggtgtgccaaggactgygtgccaggtagtaagactcacgtttattccgcatgaggtggtgctacagctttaaaggactagtttatattcatcgtttatcaccaaatcccatcatctgtttagatgcaaatttaaagagaaggaggcacttcacaaaagaggatatctaaatggccattaagtacatgcaaagatgctcaacatcattacccattaaggacataaaagttaaaacctcattgag

SEQ ID NO: 511161 - DNA, 518 bp, Homo sapiens
cttatagaaattctcaagatgcaaaggatcactggaagatcattcacataaatcttaccacttcgaattttactaaaaattttacaggctttatgaagtgctgcacacacataacaaaacatttagttarttaatcaaaaagaataattatccttattccccccactctcaaaaaaataataatcactaaaaagggagccaatctgtgttttcagcctttcaaacttgtttcttttttaccccaccctcttcaatcttttaatattcaaatctttcaacctgtttcctaaagaactttcagaaactgtcagacaagtcacacaagggcacataggcaaaggcttccacaacttgccctaggaatggtaaatttttcctctgtgttcccatagcacttactatgtatctcagtgaaagcccttggtattatgattgcttgcatgtcaatatccctcactaaactgtcagcttctatggagcaagattttttcattcttctgtttctagtgcctaattaa

SEQ ID NO: 511162 - DNA, 646 bp, Homo sapiens
tggagaggtcaaggaaataaaattctaaataaaaagagctggaagtataagagattgtgagtgaagaataagacgttgacgtctgagattttcacataatgacaatgtgtaatttgtggccatcagtgttggtcaggagaatcaaggtaaaattattggttttgaacgtgtgaagctccagaagtatgagtcacccatttggacactaagatacacaatatgacaaccagagttaaggtaaaaggaaaactatgtgaaattattccataagtataaaggagaaacccaagatacgggagaggtcagtgtcatgaaggagtgaagggtagtataagccttaatactaagataccaaagactaaattccagtgatatcagtgactccagcacttactaatttatccatgggatgtmatatgcagacatttttccaaaaaatacatttgaactagtataagctacatattatattttccctatcttaccaatacaaccaaagatatttatggattaaactatctacttttgcttcctcacagcccgcagcatttgccataccatgtattatcagttgataccataagccattaggagtagatgaagaggcactaactgctgaaacaattcctaaaaagcacataaccag

SEQ ID NO: 511163 - DNA, 664 bp, Homo sapiens
tcataatattagaaatgtgagaaagtcatctagatgaccagattgcttgagagtctgtcaatcaacctcagcaatgacaggagatattaaggttgtgctgtcagttcacctagaaatggcagataagacatggctctgatggaagaaaatgtaaattttgaccattggaaaggccctgtgaaactctgctgacctacctgagccacartggaagaactcaaagggcatgggtcccagagactctgaaaatgggatctgttgttattaaaacttaacactgtgtttagcctagtgtgactaggagtaagcataatgcaagataacttagacacttctaaggatactttcttgaatattctggaattttgtaaatttggggtaagtaaattagtctaaataactaccaccaatatataagtgcaaaacttaggaataattactaattttattaaggaacttcaatgtatgttatcatatttgacccacataactatctgtgtaaaataggcattattatctcagtttctcatgtgaaacttaaagctgttaggtagtctgtccttgcaggaatagtgtatatccaccagacaaatacatgactgtctgatgctgaagtctttgttctattacaccatgcggccatagagaaaactggaagaaattg

SEQ ID NO: 511164 - DNA, 664 bp, Homo sapiens
tcataatattagaaatgtgagaaagtcatctagatgaccagattgcttgagagtctgtcaatcaacctcagcaatgacaggagatattaaggttgtgctgtcagttcacctagaaatggcagataagacatggctctgatggaagaaaatgtaaattttgaccattggaaaggccctgtgaaactctgctgacctacctgagccacagtggaagaactcaaagggcatgggtcccagagactctgaaaatgggatctgttgttattaaaacttaacactgtgtttagcctagtgtgactaggagtaagcataatgcaagataacttagacacttctaaggatactttcttgaatattctggaattttgtaaatttggggtaagtaaattagtctaaataactaccaccaatatataagtgcaaaacttaggaataattactaattttattaaggaacttcaatgtatgttatcatatttgacccacataackatctgtgtaaaataggcattattatctcagtttctcatgtgaaacttaaagctgttaggtagtctgtccttgcaggaatagtgtatatccaccagacaaatacatgactgtctgatgctgaagtctttgttctattacaccatgcggccatagagaaaactggaagaaattg

SEQ ID NO: 511165 - DNA, 676 bp, Homo sapiens
aagccaaatatgttttgattttttaaacatactgtatttatgaatatatggttggcattgtacaaaatccaaaatttttttaacagtccattgatagcaataggtaagtatcatacagatttatatttaattttataagagaaattttaaaaaatttataatttttcatattagccacatatttttaacttcttaattgtaaacctaccttgatccctagaactgttaaatccttttaatctaaggtatgttaaagtacattgtatttggctataaacttctcttcaaatgaaattcaatcaataaaataaaaaataaacaagaaaggagtcatatttccaagcatacaagaggcaaattcaaatgcattcttctatttgttgtgctattggttgagtatgttttctccctggyacaataattgtagcattgcagttttctggcaacaaatggcttctgggggtcaccaaatgtctctgatttgctaaagcatttaatcttccacaaaagctgtttactgcttcatatatgctgaacgccaggaacattatcttttaaatcatgcctagctgctaattaacggatgtataaacgtctaacagccaagtctttaaacggagccatgagtgagtacagcagccattctgcacatagctaaaatagagatctgatgaac

SEQ ID NO: 511166 - DNA, 492 bp, Homo sapiens
atcagacagaataaaatattgtttgtaatgtttttcaatattaattaataataaatgatttttaaataattaaacacgttaatacacatatattataggtttaaggagacattataaacgtaattgccctaatattggtcatgaggtatattttctataatgaacaggaaaattattatttctgttacctgtaacaactactttttaactgactctaatacactatttaagagataactagatggatagacagtagacatggttcaatgatagtatatatggttagtgtcagaccgatattagttccacataaatcattttgtctattctaaagtgtttttctgaaatcctttttctttctcttaactatatgtgccccaaatacatttcataatattaatagaaacttaaatttttktattgaatattctataagggctcttaatgcactagattttttggctctgtattttggttctttatacttaagcc

SEQ ID NO: 511167 - DNA, 607 bp, Homo sapiens
atatgggtacaattttaatttaagtataatatctttaatttagccaattttactcagctcaaaagcattgtgacaactctagrtgagaaactaaattccagtttccaaaactttgagtgacagatgagaaacatttaatcagaaagttctacaatagtacaactatttttctatgaggttaatattttatcacattagaaacattcaaaaggctacatattgcattttacctacaagaatgccaaaaatatcaataagaagaagttctagactttctttcaaataactttctcacttgtgaattttaaatcatttttgttaaatttaatatacattcatttttttcaggtgttaaaaattaaaagtataatttggagttaatgtgtatgtaaagatgaaaagtttataaaatttaatgttaaataatagaattagtgattgatcttgttttcttttaaggttagtttcctgttagtagatagctgtaagattgagagcaatgttatggtgaggcccgttttcacaggagtaaaaatgaactgcaaaagtgaaagtttccccatttcatagttataatgtggctcaggtgtgaatgagtaggttaatc

SEQ ID NO: 511168 - DNA, 638 bp, Homo sapiens
gtgttagtcacaattctagatattggtttttagaaatttggggctaaagtatctggaatctaagtttgctattcagaatagtgtatgtagagaaactgaaggaagaaaatgcatgtttaaatttgggggcacttctgtaaagaacaaaaatgtactttaagatgatagagcccaacaactttcttttaaaaattcaggccaggcatggtggctcatrcctgtaatcctagtactttgggagtctgaaacaggtcgatcacttgagcccaggagtttgagaccagcctgagcaacatggggaaaccccatctctataaaaaaagaaaatacaaaattagccaggtgtggtggtgcatgcctgtagtcccagctacttgggaggctgaggcaggaggatcatcttagctcagggaggctaagggtgcaatgagccataatcttgccactaaaccagcctgggcaacaaactaagaccctatcttaagcaaacaaacaaacaaacaaaatgtcagtacatttaatatctgatttgtttctatcgagtattgctattctttcagaagtgttgaaaagtattttagtattgttaggtgctttaaacaaattcaaagtatgattgtaagggctattgaattttg

SEQ ID NO: 511169 - DNA, 638 bp, Homo sapiens
gtgttagtcacaattctagatattggtttttagaaatttggggctaaagtatctggaatctaagtttgctattcagaatagtgtatgtagagaaactgaaggaagaaaatgcatgtttaaatttgggggcacttctgtaaagaacaaaaatgtactttaagatgatagagcccaacaactttcttttaaaaattcaggccaggcatggtggctcatacctgtaatcctagtactttgggagtctgaaacaggtcgatcacttgagcccaggagtttgagaccagcctgagcaacatggggaaaccccatctctataaaaaaagaaaatacaaaattagccaggtgtggtggtgcatgcctgtagtcccagctacttgggaggctgaggcaggaggatcatcttagctcagggaggctaagggtgcaatgagccataatcttgccactaaaccagcctgggcaacaaactaagaccctatcttaagcaaacaaacaaacaaacaaaatgtcagtacatttaatatctgatttgtttctatcgagtattgctattctttcagaagtgttgaaaagtattttagtattgttaggtgctttaaacaarttcaaagtatgattgtaagggctattgaattttg

SEQ ID NO: 511170 - DNA, 618 bp, Homo sapiens
atattttctattttgagtaattatttytttataagaagagttctatggcaaaattatatgttgtgaaattacttgtttgtctagcatctataaatatataaatgtaatctaaattaacttctggatgggcagcaaccaaaaaagaaacgatgcagattgccaagttaaaagttttctttttcatttggtgttagttttacaaaaaaagtaaaccttttaataattacagattaatttgtgtaatattacatctgatgacatacaagcatgggctacatgtgcttcacaaacaagtgcacttacaaccaagtccataaatatttttaataattctggcataaatactattgccagacagacagctcagactatttttcttgggtaatttagtaaatatattgtttctctatgataccatgagccaccaaatttttaaacttattaccacaaggcaacaaaaatatagctacagtatcgaaatatttattgaacatacaatggcatgcacaataaaatcagatgtctcatttttgacagaattaactgccaacatggtttactttgtttccgtgaaatggatagagaaaagtcaaccttacattaaatttatatttctaa

SEQ ID NO: 511171 - DNA, 618 bp, Homo sapiens
atattttctattttgagtaattatttctttataagaagagttctatggcaaaattatatgttgtgaaattacttgtttgtctagcatctataaatatataaatgtaatctaaattaacttctggatgggcagcaaccaaaaaagaaacgatgcagattgccaagttaaaagttttctttttcatttggtgttagttttacaaaaaaagtaaaccttttaataattacagattaatttgtgtaatattacatctgatgacatacaagcrtgggctacatgtgcttcacaaacaagtgcacttacaaccaagtccataaatatttttaataattctggcataaatactattgccagacagacagctcagactatttttcttgggtaatttagtaaatatattgtttctctatgataccatgagccaccaaatttttaaacttattaccacaaggcaacaaaaatatagctacagtatcgaaatatttattgaacatacaatggcatgcacaataaaatcagatgtctcatttttgacagaattaactgccaacatggtttactttgtttccgtgaaatggatagagaaaagtcaaccttacattaaatttatatttctaa

SEQ ID NO: 511172 - DNA, 518 bp, Homo sapiens
agctgtgtcccattactgtttatctcaggctctaaaacattgtctgaaggcattttcacagcttcatgtcactaggcatcttttcatctggagtttaacggcagcaactacaaaagaagaatcgatcccctctctcctctcccagtgagcacttgcctctgaggctattccctctctatacttacatttaaaataaatagattcctatgcaaaaagtggttcgttcaatggggaaggaaaaccaggccccagtgtttgtacttaactggcccattaaaaccttaaacttagatttgaatctaagttcatgtgccatatcaacataacttctggcacacctgatgcagctcatggatctgatagctcataaattctccccccactgaagttatgtccaaaggccaaatacagaaagacattttatttgtgtgtgaacagattatggctttataaagcaccagctttggagcagagcygtaatttatggcattcagacagtacaaacaaggataaagaaa

SEQ ID NO: 511173 - DNA, 666 bp, Homo sapiens
catattgaggtgtgaggctggggagaactcccaagaactccagactcccagtgcctgtgaccatgtggacctcgggtgaccccaacgcgcaggtgtcagaagcgacagctcacagaaactggagcagggtgcacaaaagcagaaaagaaaaaaaattgaaggggatttggacagagtattactagaatgaatatcatgaattttccttttytgacttcatttcaaccgtatgtttaaatcatacataaatattgtaagaggattatactttcagtagcaatccatcgctacagtgcaaaatccaaatgtgttggagtcacagtcaatgttcactataatcagtcttatttttgaggatatgccaccgccaacatgagtgacctctttgcagacatgaccattctatccatccacctctagagacacacgttacacacacaccccacatgttcctcttcaaacattgccatggactagacctcccagccttgggatgctttgcccacaaaccacatccagtctccctttcctcgctcaggacctaaaggaagtaaagatccaaatgaccaaaattatgaggcctatgagtttgactagaagtctgcaatcaggttcaagtttccatatttgagtatcttagagggttgggatttgaggctataagtg

SEQ ID NO: 511174 - DNA, 666 bp, Homo sapiens
catattgaggtgtgaggctggggagaactcccaagaactccagactcccagtgcctgtgaccatgtggacctcgggtgaccccaacgcgcaggtgtcagaagcgacagctcacagaaactggagcagggtgcacaaaagcagaaaagaaaaaaaattgaaggggatttggacagagtattactagaatgaatatcatgaattttccttttctgacttcatttcaaccgtatgtttaaatcatacataaatattgtaagaggattatactttcagtagcaatccatcgctacagtgcaaaatccaaatgtgttggagtcacagtcaatgttcactataatcagtcttatttttgaggatatgccaccgccaacatgagtgacctctttgcagacatgaccattctatccatccacctctagagacacacgttacacacacaccccacatgttcctcttcaaacattgccatggactagacctcccagccttgggatgctttgcccacaaaccacatccagtctccctttcctcgctcaggacctaaaggaagtaaagatccaaatgaycaaaattatgaggcctatgagtttgactagaagtctgcaatcaggttcaagtttccatatttgagtatcttagagggttgggatttgaggctataagtg

SEQ ID NO: 511175 - DNA, 653 bp, Homo sapiens
gaaatgctttggaacttaggagccttgcagaataggaggccctaagtgttaactgaaatgagaaaaaaagaagaaaagaattttgcagagacatactactgatacatacgtacacacacacacagtcagaatgatcgttgtccctgcttgtctgttttcaaatagtgtcaacttacataaatcttagtgttatttattggcagtcaacaacctaagccacaatacaggggactagacaacacactgttaatttggatgtccaggatgttctgaccgcaacctatattgaatatgtcatcacctayagctataatttttcattaggtaaaagtaaaacaatgaagatagccctggttatgacatacttaacaataccatgcttactctgtaatatctaattcagacactgatcatttattttactcaagattttatttcgcattttcttgggactgtaaactctttcatgagtaatacattaagtagttaccaacacttgggtgtcactcttgaagttcaacaagcaggccttacatcatgaaatagcctttgcaaataaatcttctgagtactttgaatttcaaaaaggctgtatctgaaatgagtgtttcaaactaaatcaaaaacacttttgtaatgtaagttattatgat

SEQ ID NO: 511176 - DNA, 527 bp, Homo sapiens
actactaggcagactctactcacttttcccagtcatgtcttgccgtgattcaaagtcaaaaacacttgctttcctcatgaatgctgcctaacacaagaaggaagctgggctttcctcactcacttcgcacaatgcataatacaggcagtactatgccttgtcatgctgaagagactctcattcctgtmtgaaatggaaggcccagggcaccttggaacattatagatgaagggatctcagtgatcagtctgaggaatcttaggcccaaagagactgagttgctcaaggtcacatgcctaatggcttagctagaattggaatccaggcctcctgacataaagaagccacaactcttcctatttcaaaaaatgctgagtaagtgggtgatgagatccaatttcttcagaatgaccatagaagcctaaatgaaagataatttccagagatatcagatacaggtgagactttctgaacaaacaacaccttctcacttaattgggggatttttagacctttaaatatgcatc

SEQ ID NO: 511177 - DNA, 639 bp, Homo sapiens
tcatgcctgtaatcccagcactttgggaggctgaggcaggcggatcactagagggcaggaattcaagaccagcctggccaatacggtgaaatctcatctctactaaaaatacaaaaattagctgggtatggtggcacacgcctacagtcctagctactcaggaggctgaggcaggagaatcacrtgaacctgggagactgcagtgagccgagatcacgccactgaactccagcctgggcgacagagcaagacctcatctcaaaaaaaaaaaaaaaaaaaaaaaatttccaaggaagaattgtaactagctttctattgtgcagagatacatatacaggtacatacatacatgtacatatacacgcatacatacataaacacacacgcgtatatatgtaaatagccataattatgataaagtgcaggctatatttaacaaaaagagagatctcgcagaaagagtttccagaggtcacagtacatcaatctcatagcactttattttatcaaacctaattttcctgatcagaagtgtcaaagttcatgttctcattagtgcgggcagagttccgagaaacatttcacaatctaaaaagagtctttctccttagttacaggatcactggcagaaaagaacat

SEQ ID NO: 511178 - DNA, 639 bp, Homo sapiens
tcatgcctgtaatcccagcactttgggaggctgaggcaggcggatcactagagggcaggaattcaagaccagcctggccaatacggtgaaatctcatctctactaaaaatacaaaaattagctgggtatggtggcacacgcctacagtcctagctactcaggaggctgaggcaggagaatcacgtgaacctgggagactgcagtgagccgagatcacgccactgaactccagcctgggcgacagagcaagacctcatctcaaaaaaaaaaaaaaaaaaaaaaaatttccaaggaagaattgtaactagctttctattgtgcagagatacatatacaggtacatacatacatgtacatatacacgcatacatacataaacacacacgcrtatatatgtaaatagccataattatgataaagtgcaggctatatttaacaaaaagagagatctcgcagaaagagtttccagaggtcacagtacatcaatctcatagcactttattttatcaaacctaattttcctgatcagaagtgtcaaagttcatgttctcattagtgcgggcagagttccgagaaacatttcacaatctaaaaagagtctttctccttagttacaggatcactggcagaaaagaacat

SEQ ID NO: 511179 - DNA, 293 bp, Homo sapiens
taatctacagaagagagttctgtgggacatcaatttgggaaatggtgtgtttaaactartaaggttgagacaagaacaacgcagatatttctcacatgtgtatcaatcaatcggcagcaagcaaatcaacatcaaaacaaagtaatcaaaaaccacccaggatgccttttgcttggggtcttagtgttggcctacatatgataaaacttttcctttaacttgacaagaattatgttttccttcttagtttagcactgaggtgaaagaacaggcagacgtcccagatttattca

SEQ ID NO: 511180 - DNA, 664 bp, Homo sapiens
tcgaaactcccacaagtaaaatagtgcaaaattcatataaaaccagttacaacatgtctctttcagggtacctccctccctccaatgtaagctacaaatcagccacattaacaaaggtcgsgctgcatcttccagttaatttgaactctttccctatttgcttccatctgtgagcaaacaaaacatctccagtccttaaggggcgcctccccagcattagctgctacttttatgccatactgttggtatggtagctaggaaaaaaatgcagtgcctgaaacaggtatttgcattcctatctacatcaaagggctgaatttttctttcatgggacttagtgttttccagaacacaaaagatccatgcttagccacaatattacattttgcatttataaaccactcttcccagtttctctgagatctcctgcatgtccaaagacactcaagcacttcaccaaagagattctctgttcctgttatcaagtattttaatacaagataacaattacagtttagagaaatgctagaaaaatgcacggaaagctcccaggtgccacttaactctccttccttgctgcattccctctcccaccccatcactgaaacctgagccagccaattagatgaacagcttgtcactcctagatgcagtgcaatgtctg

SEQ ID NO: 511181 - DNA, 641 bp, Homo sapiens
ccagctaattttttgtatttttagtagagacagggtttcactgtgtcaggatggtctcgatctcctgacctcgtgatctgcctgcctcagcctcccaaagtgttgggattacaggcgtgaccctctgtgcccagcctctacttggctttttatagtcagtaaaactaactcatttttttttaaacaatcacacttttaatataggaatatgccacaatgcaaaaaaccaaaccacattttttccttttttttttttcactcytgttgcccaggcaggagtgcaatggtgagatctcggctcactgcaacttccccttcctgggttcatgcaattctcctgcctccacctcctaagtagctgggactacaggtatgcaccaccacgcctggctaattttctatttttggtagagatggggtgtcaccatgttggtcaggctggtctccaattcttaaactcaggtgatctgcccgcctaggcctcccaaagtgctgagattacaggcgtgagccactgtacccagcccaaaacacatttttaaatgaaaacaaaccaccactgttaattggtagtgtactctgtagctcaaaagctatcctctagtacaaaaaaaaagagtttaagtaaattaaaaaaaacc

SEQ ID NO: 511182 - DNA, 609 bp, Homo sapiens
tcatctcctgcctggactatctttacagtgtcgttactatacgtctgtaaccaattcaccttcccaagggtcattacagtcagttcactcttgctcaaccagcattaaatgtgaggattttaaaccacctgctaaatgattcctggagmtcaccaagtagcataatttcagtaaacgttaattactccctgcccacccaactgccacacctgaagagaatgaaaaaaaaacccataagtgaattcaattgtgggtacccaaattttttaccataaatggcacaaaagaaggatacatcagaatattatcctttttttttcttttgagacagagtctcgctctgtcgcccaggctggaatgcagtggtgcaatcttggctcactgcaactgctgcctcctaggttcaggcttttctcgtgcctcagtctcccaagtagctgggactactggcgtgtgccacctcacccagctaattttttgtatttttagcagagatgggggtttcactatgttggttaggctcgaactcctgacctcaagtgatccacctgccttggcctccgaaagcgctgggattacaggcatgagccaccgagcccggccagaata

SEQ ID NO: 511183 - DNA, 609 bp, Homo sapiens
tcatctcctgcctggactatctttacagtgtcgttactatacgtctgtaaccaattcaccttcccaagggtcattacagtcagttcactcttgctcaaccagcattaaatgtgaggattttaaaccacctgctaaatgattcctggagatcaccaagtagcataatttcagtaaacgttaattmctccctgcccacccaactgccacacctgaagagaatgaaaaaaaaacccataagtgaattcaattgtgggtacccaaattttttaccataaatggcacaaaagaaggatacatcagaatattatcctttttttttcttttgagacagagtctcgctctgtcgcccaggctggaatgcagtggtgcaatcttggctcactgcaactgctgcctcctaggttcaggcttttctcgtgcctcagtctcccaagtagctgggactactggcgtgtgccacctcacccagctaattttttgtatttttagcagagatgggggtttcactatgttggttaggctcgaactcctgacctcaagtgatccacctgccttggcctccgaaagcgctgggattacaggcatgagccaccgagcccggccagaata

SEQ ID NO: 511184 - DNA, 609 bp, Homo sapiens
tcatctcctgcctggactatctttacagtgtcgttactatacgtctgtaaccaattcaccttcccaagggtcattacagtcagttcactcttgctcaaccagcattaaatgtgaggattttaaaccacctgctaaatgattcctggagatcaccaagtagcataatttcagtaaacgttaattactccctgcccacccaactgccacacctgaagagaatgaaaaaaaaacccataagtgaattcaattgtgggtacccaaattttttaccataaatggcacaaaagaaggatacatcagaatattatcctttttttttcttttgagacagagtctcgctctgtcgcccaggctggaatgcagtggtgcaatcttggctcactgcaactgctgcctcctaggttcaggcttttctcgtgcctcagtctcccaagtagctgggactactggcgygtgccacctcacccagctaattttttgtatttttagcagagatgggggtttcactatgttggttaggctcgaactcctgacctcaagtgatccacctgccttggcctccgaaagcgctgggattacaggcatgagccaccgagcccggccagaata

SEQ ID NO: 511185 - DNA, 552 bp, Homo sapiens
ctgcaaactgaaatctgatcgagtcattctcttgctcagagcccttcaatgccttcctgacgttctcagaataaattgcagcatctttaacatgactcccacacacacccctaatcttaactgtcctcccccatgtcatcaactgtgaatctcatgccacttacccttctctcactccccatactctagctacatgacctttcccaagcttcttgtatgtcaagatcttccaggcctagagccttcattaatgctgttccccccacctggaagattcttcccttcasccttcaactgactacattcctccaatcttcacatctcagaggctccaaagatccttcttcggagcattccccgaccctcctcgcgatcctcagctctcccagcaatttaagggtaatgaccaccccactttctgcatagcacttatcccaattttcattatatattctcttgtgtgtttgctatgttcatcttagatcaatgataataaaagtagttccatgttttaagagcatacaatatagtgggcattagactgaacatttt

SEQ ID NO: 511186 - DNA, 471 bp, Homo sapiens
acaaattcagtggtcttcctctaaacgcctctggcaggtaagcacsctttgttggtgtttctaagcctctcgtcagagaagcatgtgttaggctttctctgtgatctaatttgtattccaaccactgctctgatgagcttatactgcatagatggcataatgtagctgcttaaggtgttcttaatactgcaaaagcactgctgagaactggtagaatattttttgttttgtgacttgacggctgaatcaaaacactagatcattcactcattgatcaaacatttcttgagtaggcactatgtgcaaactatagtgcaaagtgccattagaaatactaagctgacaaagaatagagtaaggcctttacacatatggagcagacagtcttgaagagggaatgacaggagatggagatgacctggcctaagagggttaccctttttggttcaaggatatcctgatttaagttgt

SEQ ID NO: 511187 - DNA, 471 bp, Homo sapiens
acaaattcagtggtcttcctctaaacgcctctggcaggtaagcaccctttgttggtgtttctaagcctctcgtcagagaagcatgtgttaggctttctcygtgatctaatttgtattccaaccactgctctgatgagcttatactgcatagatggcataatgtagctgcttaaggtgttcttaatactgcaaaagcactgctgagaactggtagaatattttttgttttgtgacttgacggctgaatcaaaacactagatcattcactcattgatcaaacatttcttgagtaggcactatgtgcaaactatagtgcaaagtgccattagaaatactaagctgacaaagaatagagtaaggcctttacacatatggagcagacagtcttgaagagggaatgacaggagatggagatgacctggcctaagagggttaccctttttggttcaaggatatcctgatttaagttgt

SEQ ID NO: 511188 - DNA, 471 bp, Homo sapiens
acaaattcagtggtcttcctctaaacgcctctggcaggtaagcaccctttgttggtgtttctaagcctctcgtcagagaagcatgtgttaggctttctctgtgatctaatttgtattccaaccactgctctgatgagcttatactgcatagatggcataatgtagctgcttaaggtgttcttaatactgcaaaagcactgctgagaactggtagaatattttttgttttgtgacttgacggctgaatcaaaacactagatcattcactcattgatcaaacatttcttgagtaggcactatgtgcaaactatagtgcaaagtgccattagaaatactaagctgacaaagaatagagtaaggcctttacacatatggagcagacagtcttgaagagggaatgacargagatggagatgacctggcctaagagggttaccctttttggttcaaggatatcctgatttaagttgt

SEQ ID NO: 511189 - DNA, 368 bp, Homo sapiens
ctgggagccaggataggagtttggtgcccatccctggaactgaagggactacctacacctccctgagttgtgtctgtttccattcagtataattcaagttggtcaacatctataaagggacctcatataagtcagcaacatgctaagagctagaaatataagtttgaaacatgctaagagctgggaacacaaaggcccctgtcctcggtgggctcataatctcatgatgcaaacccacacttgaatgcccctaaccgtggtacagcagcatgcgggatgcaccacacattgcaggagaagggaaaggagcctacctggcygggcaaagctggaggagggcttcatcatagaaggtattagtcactttc

SEQ ID NO: 511190 - DNA, 615 bp, Homo sapiens
aaggagccccagtcccacctgtgacctcaggcagtcacctgacacctctgagcctcagttttctcatctgttcagtggggatggtatatttctccttacagggctgtggaaaggacaacataatcttacacagaaaaagtagtactaagctaacattggttgagtgcctattacattctacacaacgcgctaagtactttgcatattttgtctcattgaattctgatgacaaccctgtgaagtaggaactcttactatcccccatgctatggatgcagaaactggggctcagagcagttaagtacctggccaaaggccagaaagtcaactagaattgatgtgtccattttcattcattcattcattcattcattcattcattcattcattcatcatttattgagtacccgttccaygccaggcaatgagaagcaaatcacaaatactccctgccccatggcactgacagtcttgttactgcaaagtacaaggtgcagagtaagtggaagtcaaatcagattccaacttctactcaattcccagtaggccccagactaaactctccagaacaatggtactgctcctgtggttttgcctggtgctcacgattgagac

SEQ ID NO: 511191 - DNA, 615 bp, Homo sapiens
aaggagccccagtcccacctgtgacctcaggcagtcacctgacacctctgagcctcagttttctcatctgttcagtggggatggtatatttctccttacagggctgtggaaaggacaacataatcttacacagaaaaagtagtactaagctaacattggttgagtgcctattacattctacacaacgcgctaagtactttgcatattttgtctcattgaattctgatgacaaccctgtgaagtaggaactcttactatcccccatgctatggatgcagaaactggggctcagagcagttaagtacctggccaaaggccagaaagtcaactagaattgatgtgtccattttcattcattcattcattcattcattcattcattcattcattcatcatttattgagtacccgttccatgccaggcaatgagaagcaaatcacaaatactccctgccccatggcactgacagtcttgttactgcaaagtacaaggtgcagagtaartggaagtcaaatcagattccaacttctactcaattcccagtaggccccagactaaactctccagaacaatggtactgctcctgtggttttgcctggtgctcacgattgagac

SEQ ID NO: 511192 - DNA, 615 bp, Homo sapiens
aaggagccccagtcccacctgtgacctcaggcagtcacctgacacctctgagcctcagttttctcatctgttcagtggggatggtatatttctccttacagggctgtggaaaggacaacataatcttacacagaaaaagtagtactaagctaacattggttgagtgcctattacattctacacaacgcgctaagtactttgcatattttgtctcattgaattctgatgacaaccctgtgaagtaggaactcttactatcccccatgctatggatgcagaaactggggctcagagcagttaagtacctggccaaaggccagaaagtcaactagaattgatgtgtccattttcattcattcattcattcattcattcattcattcattcattcatcatttattgagtacccgttccatgccaggcaatgagaagcaaatcacaaatactccctgccccatggcactgacagtcttgttactgcaaagtacaaggtgcagagtaagtggaagtcaaatcagattccaacttctactcaaytcccagtaggccccagactaaactctccagaacaatggtactgctcctgtggttttgcctggtgctcacgattgagac

SEQ ID NO: 511193 - DNA, 507 bp, Homo sapiens
cagtatgtttgataaaatgtgggttgaaatctccaaaaggaagagcgttcagggtcttcgaaagtcttaggattactctagaaccagagtatagaatatgcactcatatttataaatcacttactctgtgccaggctcttctgaagcccttcccatgcattaactcacttaattggtgagacaattcttgaggtagacacaatcaccattcccattctacaggtgaggaaactgactaagcaagtaagtggcacagctagaatggaaatcaatggcaccagggctcatgttctcagccaccttaccacatacaaagcttgccrtgccgggtgtttccccaggagaaaacaagtgctggcaggttaagaagggagggaggtacatctccctaatgaggagtgcacttgacaccgagttaaatggaacccattcctcgctcggctctactgctacttgctaactcctctgtggttctctgctgcccacagaggtctcctctgtagctga

SEQ ID NO: 511194 - DNA, 215 bp, Homo sapiens
acgaggctgcactccttgacctttctatgctgcacacagtcctgtgcccatcctgtcctcagatctgctgggaccatgaccaacctgccaagagcgtgggaattggtatgtgacccagctctaggaggaggtggagcaagcgaatgtaggggaagctgctcacccagtaggtttagagggagggtggggwgggggtgcagcaggaccaggcaggt

SEQ ID NO: 511195 - DNA, 556 bp, Homo sapiens
tagatagcttttccccaggatcaaggacgtcattgaaatgcaatattcctgtggatatttgcaagccagctccacatcctcccataccacaggggagggccctcaggagccctggaagctgctgtgtcccgaggcctggaatccagcaattctctcccagcattggcccctccagcactctcattcactcagtcactcagccaggcagcatcagaacacctgctctgagctgggctccacacgggagctaaagacacagacactaaaaggacacagaccctgccctcaaagacctcacagattagaaagyaaagcacacgaacacatggatgatggtgaggtcagagcgagagggttaggggagggggctggcaggcacagtgaggcgcagagtggctgcagatcacatctcctcggatgctgagggagtttcatgagacagtgacctccaagaattaggagatgttctacaggcagccaaaggtcaaagaggtgaaggaagccaaatatgttgagttggctgatgagagggcctgcagacagaaagagtcccgca

SEQ ID NO: 511196 - DNA, 522 bp, Homo sapiens
cacacccaaaggtattttgcaaagtcctagacagccacacaggcaggaggacacagacaggaggaaagtttccattttcaggcaaggagtcgttgtcatcatcacactgtttaaagacaaacaggtggagaagggaatttggttcaggctgagtrgccaagagtagcacctcaggagcagccattgaaaaatacaagcatccattgaaaaatacaagctcttttcccgctactttggacttgccctcttcttagcattggcaagtgagaactggtaggaggttttcctaagagcaggtactacagtgcccctaactgaaaatttcagccaatgcaaagaatctaggttccccaagcaattcctacaatgtctaacaaggacagattggtgtcacatttcagaatgattagctcatagggataaaaccctacatctgactggtagaacattaacagtaaagaaatcatggtcttagtgtcttgagctcaggaaattccaaaagtcagtggagcagattagaag

SEQ ID NO: 511197 - DNA, 522 bp, Homo sapiens
cacacccaaaggtattttgcaaagtcctagacagccacacaggcaggaggacacagacaggaggaaagtttccattttcaggcaaggagtcgttgtcatcatcacactgtttaaagacaaacaggtggagaagggaatttggttcaggctgagtagccaagagtagcacctcaggagcagccattgaaaaatacaagcatccattgaaaaatacaagctcttttcccgctactttggacttgccctcttcttagcattggcaagtgagaactggtaggaggttttcctaagagcaggtactacagtgcccctaactgaaaatttcagccaatgmaaagaatctaggttccccaagcaattcctacaatgtctaacaaggacagattggtgtcacatttcagaatgattagctcatagggataaaaccctacatctgactggtagaacattaacagtaaagaaatcatggtcttagtgtcttgagctcaggaaattccaaaagtcagtggagcagattagaag

SEQ ID NO: 511198 - DNA, 392 bp, Homo sapiens
gaagcagcctgttcaggatgctaccaccaaatctagacttccacatccttcatggctgggctcaccagcagcaactgcaggcacacaacctttatatcactttcatcttccaaatctggcagaaattcatctgctttgggaaatttgtctaaaacagcagcttccaatgagaaaaatgtagtttctaactttctagtttctgaaaaacaggatagatatttgagatagctactgagtgacaatttatyatatccatcatagaactctcattatttcacagactgtccttcaggctcttatccgctctccagatttcaaatataagtccacaaacccttgaggacaaatggtttcaaacttagattatctttttggattttagaaatctaaaa

SEQ ID NO: 511199 - DNA, 491 bp, Homo sapiens
aagagctgggattacaggcgtgagtcactgcacctggcccatattttataaatattgatattttactaccacaggcatgaatgctctttaatataaagtgagtaagagcttcatattgaagtcacagaagttagacttcctaaattcacatccaagatacagcctttactagccatctaacttcgcaaattaattaaccttctgtgtgtctcaatttctgcatctatcaaatgccttattgggwaaattaatgacattatccatgtcatgcatctagcagagtgccagatccataatgagcagacattcaaagaacatttatgatgtgagggtaatatcaataggaaaagatgataatcagcccacgaataacctatcgtgagcttaatttaaaaattatgtttgagtgaactaagctcagactttaatagctttgctatcaagctggcacatttgccaaggagaagttaactaatacaatgtttccttgt

SEQ ID NO: 511200 - DNA, 537 bp, Homo sapiens
ctgatgagccacttaccaccagccacgctgggggacagtgattatcaaaccttctaaactgatccatagaaagaaaaacatttaacattgtggtctagtgaccatagacaaagataactctacaagtacatgtgtatacacatgtacataatgtaaaattaaaacaagcttcacaaaccatatttattacctttactgaatatgataaaccccccctccagaagtcaggctagaaaagcttgtggaacccttctcggaatatttttaaacagataaagtacatcagattacaaaagaaaccaattataataaaatccagttatcaaatattaaataaatttgtgtttcagtaacatacttctttattaatgcattaaataacaagacctctcggcaggtctaataartactgtaattttgaaagagagatgagtgtaagtggcattttgagagatttgcagtaactgtagtgataggaagagatctgtaattttcattgttgcctaagtcacaagaattactaatcactcctgtaat

SEQ ID NO: 511201 - DNA, 566 bp, Homo sapiens
tttgtacttcatacaatgagyagaccattttcttttctcttttctttttttttttttctgagacagggtctggctctgtcgccgaggctggagtgcagtgatgtgatcttggctcgctgcagcctccacctcctgggcccaagccatcctctcacctcagcctcccaagtagctgggactgcaggcagacaccaccacacctggctcacttttaaaaaatttttgtagagaaaaattaagatttttgtagattttgccatgttgcccaggctggtctcaaactcctgagctcaagcaacccacccaccttggcctcccaaaatgctgggattacaggcgtgagccaccgtgcctggccaagcaggccattttcatatgggtatatccactaaagaagactccattggagtagagggaaatttatttctttgaccacctgctaaactgaagtcactagagcaggaatagttttgttttccctttcctggtgttttaacgtagcgtcctaaggtaacaggagctagaggacttgggggcagccacctgcagccagcttggtagacaac

SEQ ID NO: 511202 - DNA, 427 bp, Homo sapiens
atcatgtagaaaaacccagaggtgagaacaagaactcagacttgttcagagcggaaaacaaagctcagagctcacagcccaggagtcttggcygagaaggaggagatcccattcaaaggatgctgggggccccgtgaaaagggagggtgaggcccgcctgccccggagctgggggatcacagagcaagaatcctggggcccaggatgtggttcagtggtcttggtcctgggtagagaaatctctgggccccctggccagcagtgccacagaatatgatgtgagcagcgccccccagggttgggaagcagcacagccctgcagtctggaattccagggaaagaaagttcactccaacagggtcctctttgtaggttctgttctcataggaggcagagagctcaggtagccattgctatggcccccggc

SEQ ID NO: 511203 - DNA, 589 bp, Homo sapiens
ctgcggtgcccagagcttcctggagacccaaggaggggacgtctgagtagaacaacacattattctactctcctaaggttcaagcaaaggcaaagctgatggaaatcacaggagcggttgcctttgggggccacagggggatggaaagggccmtggagaacttcttagtgggggtcaccatgctctgtatcacgactgagatcttggttgcgtgggcatcttcctaactcatcgaactgtgtactgaagacccatgcagctcactgattacacctcaactttttggaagaaaagaagggaaacagcgagtattcttgtgattggtataggctgggaaatagggaggaagcctgctaagatagtagacttgggtgctgttgcacacagggccagggccaggaagcaatggccgagaaactggtgtttgcttgtataggagcggaggggacgttgacagctttggggaaggaattgatcgcctgcatccacaggtcgctggggtgggcggtgttcatgcattgcctccattcattcccacaactctggttgccctccattctctggtaaagacacgatgttccagccatga

SEQ ID NO: 511204 - DNA, 589 bp, Homo sapiens
ctgcggtgcccagagcttcctggagacccaaggaggggacgtctgagtagaacaacacattattctactctcctaaggttcaagcaaaggcaaagctgatggaaatcacaggagcggttgcctttgggggccacagggggatggaaagggccctggagaacttcttagtgggggtcaccatgctctgtatcacgactgagatcttggttgcgtgggcatcttcctaactcatcgaactgtgtactgaagacccatrcagctcactgattacacctcaactttttggaagaaaagaagggaaacagcgagtattcttgtgattggtataggctgggaaatagggaggaagcctgctaagatagtagacttgggtgctgttgcacacagggccagggccaggaagcaatggccgagaaactggtgtttgcttgtataggagcggaggggacgttgacagctttggggaaggaattgatcgcctgcatccacaggtcgctggggtgggcggtgttcatgcattgcctccattcattcccacaactctggttgccctccattctctggtaaagacacgatgttccagccatga

SEQ ID NO: 511205 - DNA, 629 bp, Homo sapiens
aggcctgctgtgtgtgtgtctaggtcggctgtgtgtayctctaggcctgctgtgtgtgtgtctgggtctgctgtgtgtatctctaggcctgctgtgtgtgtgtgtctaggtctgctgtatgtgtctctaggcctgctgtgtgtgtgtctaggtctgctgtgtgtatctctaggcctgctgtgtgtgtgtgtctaggtctgctgtatgtgtctctaggcctgctgtgtgtgtgtgtctaggtcggctgtgtgtatctctaggcctgctgtgtgtgtgtgtctaggtctgctgtgtgtgtctcctcctcctcggacgtctcctctccagggcacaagaggccaagccaacccaaatatggcatgcctatttcaagcctctccttgcctcatatctgttgatatcccactggccaaggtaagttacaaggtcaagcccaaagacaatgggagaggaagaacacttctgcctgctgggagtcagtgtcaaaggtgtgaatgtatagtccaactataagagagtgaagaatcagtaacagtaattcaatctacagtttttgaaggctactctattagcctattttgatgatacaacaagaaggaccagaggaagtcatattgcacagcaacctg

SEQ ID NO: 511206 - DNA, 636 bp, Homo sapiens
gatgttccagtccaaagtactttgggctccacacccactaacaaacttcaaagagacagaggggaaaagggtatgcatcatgggatgcacgctcatagaagagtgttccctggaatgtccaaggccccgcacttctgctggccagtcttcctcctctgtggaattcagaggcagaggaggccagagaggtcccctgggtgaggtctggcgtggcccggggcccagcggtgagagcagagcagaggtgcgaacagtgactgacgacgccgggttcctgcccttgcctccctgccccaccgccctcctggccctgatgacagacgcaccctgttccctgcagtttctgcctgccctgcacggcctgggtccctttctgctctccgagcctccccactcccatgaatggaaagtcacccacagattctgctcrgaacaaaaaaaaaaaaagagggaagtaaggcagcccacccccagtccccacttctgcccccgctaaaaatagaggcagcatctgagtggggcgtcggtgtaggcttccgggggaggtggctgctctcccacagccttggtgttttctggggaatcaacaggaggagagagaatttgagaggaacacgaggaacccccaggacccag

SEQ ID NO: 511207 - DNA, 640 bp, Homo sapiens
tcctgtgaagtcctgtgggggaacacccggccaaaagtcttggaagagggtcaaagagtcctttcgctgagaagccacgggcaaaacgcacagttcagctaacgcaccagggattccggacagacccaccgggagaggcggggaagcgtggagggaaccacagaggggacctttcagcagttggggctcctgcctgctttgaatgacgatgaacattaattgctatttggatggacccccaccactccgagacccccgagaacccgccacgtttaccrcgcaggattgttcgttacagtgggagaaacagatggaccgagagagacagagtgacagatgagacaggccaagagagatttgggcgtctcactaaccttgaaaatctgatgttcgcttcaggctgatgggggatttggctctctgcagctaaaagggaggggaggggaagaaacaagacacaagacacaaatcaaacagggacctagacacatgtcactggggcttagaaaaaaatagagagaggccagccatcgtgtccctcgtcatacggccaccaggttcagcccggaacgcacacggaccgatgctcatctcccgcggccgggacgacaagacacagcggctcccctgggcttgaatc

SEQ ID NO: 511208 - DNA, 665 bp, Homo sapiens
gagtgttgtgctttctggcttctggttggccagtgggaagtcctggcaagagctcggagggagggaggggagagagtgaggttcagtatttcttctcccctcccacgccccaggattccttctgtcttgtttctcgggcttcccccacacctttgtgattagttcctaatttgagtgtcctgcttgtttcctgttgggtgcctggatttaggatgtaaattgttgtaacctgtcttttggtggcagtctgatgtttagakatggtcatggagtcttgggtactacccagagcgagatctaggaggaggcaagccaggtgtctgtccacccgcaggtgcagacctcaccctcacggggcctgagggagaggggcctcctcacttgtctttagtcggaaagtggttcttggacttcctgtgcctgtggtcacctggccatgctgttcaaatgcagattctattcagtaggcctgggaggtctgtgagctcctaggtgatggctgtgctgccaccggccctcagctacgctttgagcagcagggatttttttattgcggtttgatttgcattgttaaaatcctggaatgacctaatcgccacctgttggggctgactgattgaactgtggtgtgtgatgggcactacacagcttttaataagtcggtg

SEQ ID NO: 511209 - DNA, 510 bp, Homo sapiens
tggcctcccactggggttcccccgcacacctgaaccgtcactgggtttaagacaccctgtggtcgttacggttcctagtgcytgtgagtaaaccctcatttatggactatgtgaattgcagagtgcatttcccagcagggctccaggcactgagaaatgaaggaatgcctcctccagggtaaatgttaccactattatagctctgggtttaccgagtgctgtcacgtgcaggtgccacgcaatgtgccctctgtgcattacctcatttaccccacggaactgtcctgcatggaaagcatgctcagtgtcctcatttacaaaggaagggaccctgaccaggcgcggtggctcaggcctgtaatcccagcactttgggaggacccgtgctcccggctgcagttacagcgtgaacacaggcctggcattagcccactgtgctgtcagcagggcatgaccggcgcttccatccgtctgcagagtgggagtcaaggagcagcagggggttaacgg

SEQ ID NO: 511210 - DNA, 481 bp, Homo sapiens
ggatggatgcgggaacctgatccgcacagaggccgcccctcacattcagccattcttgtgctttaggaagaggcagacactggatgtgcatactggtttcaagccccaccgcatgtgctgtttcctctcatattcaatcacaggatgaaaaccttccctttaaaaattaaacaatgtatccagtgaccaatgcctgaaactctgtggtctcatttgctcctcagagctgctctgagagcatggcgtcattgttcccagttttctagaagcttgcacagctataaagcggtggggttaggatttgaactcctgtcttctaactataaatgcagtgtgctttgcttggagctcccaagggtgtcctgtgaygctagaggcattgcagggaggccagcatgagggccctggggaggggtctctgcttcagcaggcagggtacaggttcagatagcctggcttcccatcctggcacagcaacttt

SEQ ID NO: 511211 - DNA, 374 bp, Homo sapiens
tcccaaacagcacaagaaaaggaaggtgggacattgagtaaaggagtctgagggtgtggtatttgccacccagaccagccatttgctttaagtcttaataaatgtacagggtaatctcatctattaagcatggacccaagcttgtgggcagtttaggttttccatccacagtgtcctaaatgatacaatgagaataacctcytgctgttgaagagagtggggaaggtcctctgtacatcctggaacctttataaagataagagaggctgcctacggaaatcacaccaaagatttcaactgcagtgggaatctcattgctccaacccagcctaataggctggatggagcaggtctttctgggttggttcatactg

SEQ ID NO: 511212 - DNA, 580 bp, Homo sapiens
tcccagggacagccatggtcagaggtggtggctgagctggcctccaaccaggaggagcagtttgccaggtagcgtcattgtagcaataagttcaaggtgccaattgtctgtctgtgtctctgtcctccatacccccccatccctaaacttcctctgtttcttattcctcctccaccttctcctttcccatctctctattctctcattgtcctccggstgccacctgcccccatccccacagcactccccggtgctgcctcgcccctgcctctgcagccaagttcccggaagctgtcctggctgctggcctgacccctgagactcccgcggagatcgtagccctggagcacaaggagacacgctgcaccctgatgcggagaggtgacaactggatgctgatgcttcgggacaccattgaggaccttagccgacagtggaggagtcatgccctcaacacctcccagtagcctggctggaggtggctttctttaggcttcagatcccaggaagatgcaccttctgagctgccttgtgcaccctccccattaagcgtaggttaggaggtttccgggaggctgct

SEQ ID NO: 511213 - DNA, 563 bp, Homo sapiens
actgcagccttaacctcctgagctcaagtgatcctcccacctcagccttgttagtagctaggactgcaggcatgtgccaccatgcccggctaatgttcgttattttttgtagagatggggttttgttatgttgcccagactggtctcgaactcccaagctcaagccatccacccactttggcctcccaaagtgctgggattatgggcatgagccacggtgcctggccaagagttaccawttcctgtgcatcaactataaattgagcacacctgggttctttaggtgtattatctctaaatcttgcaacaaagaggtgtacattattatcccccttttatacatgaggaaactgaggctcagagaggtgcctaatatcacatatgctacaaaacattataaacatgtcaagtattatcatggaaatatggacaaaatgagggtaactaaatgactgtttttgttcactgctatgttgtccatgcctggcgcttcctagatgctcagtagaggtttgttgaatgacaggatgagaagatatctagtagacttgccaggcacggga

SEQ ID NO: 511214 - DNA, 521 bp, Homo sapiens
tttgtatcgagcactgtggtaggctctgggctgcagagggcggctggccgcacgactcagtgcatcactaattggagggcgatgggaatggggagcatggtaggctttatcccatgagtggcaaagaagcccatccctcyttgcctgccagcccgctgttctctccacccttctgttagtggcagaagtcaggaagcttcctaaccactaagatgcttccgtgctctcagctagaccatccttggtgcccatcagaaccaatgccattgccggaactatcaggaacagtaattcccctagcctcaccagctctgcagccagactacctgggtcgcgcttctggcccagctctgtaaccagggcatgactcctttctctgtgcctttgttccctcattataaaatggaaagtgtcctctccacaggtggataaatgagttcatatgtgaaaagcatttagaactgtgccagttgcatactaagtgcttgataaatattaatgattattagagaaaatgattt

SEQ ID NO: 511215 - DNA, 548 bp, Homo sapiens
tatatttgtaaaatagcacaccatatggcagttrtagtgaatgaactaggtgtatgtgaatcaacactaaaaatctcaaaagcaacattgaaagaataaaaagcgagtatcaaaagaatatattcagtggccgggtgcggtaggctcacacctggaatcccagcactttgggaggccgaggcaggtggatcacgaggtcaagagttcaagaccagcctgaccaacatgatgaaaccccgtctctactaaaaatacaaaaaattagccaggcatggtggtgcgtgcctgtaatcccagctactcgggaggctgaggtaggagaatcacttgaacccgggaggcggaggttgcattgagctgagatcacaccactgcacagcctgggtgacagagtgaaactctctctctctctctctctatatatatatatatttagtattattccacatatttaaaatgtaaagacacaaagtcattctatgcattgtttctggaaacatgcaggtatacttaaattttaaaatattaatggctaaaataaaataata

SEQ ID NO: 511216 - DNA, 486 bp, Homo sapiens
aagcccaggaatgcttgggctaccagaagctggagacaggcttgggacagattctcccccagagccctcaagggaagccaagcctgctgacactttgatttyagattctggcctgcagaactgtgagacaatgcatgtttgttgtttaagccacccagtttataatagttatggcagccccagaaaactaataactccttaaagtatctttttgtctttataaaaatattttccttctggagcagtggctcacaccactccaggaggaagttacaggtcagagcaggggcttagggctggggagagctggggtgtttgagaatcccaaagaaggtaaatgtggttgtggccatgcccccaaggacgatgggttgagaggaggtccctgagtccacaggaaccttatcaggcagacccttgtaggctccaagaagggtttggattttattccaaacagtggaacagaatggtttaatctgcatgttt

SEQ ID NO: 511217 - DNA, 727 bp, Homo sapiens
gcgctgccatgggtcactaagctgttaaactacagrcgctttacctcctctgccacctgagctgactcccccagctttctctgccacctccccctgctctccctggctatgctttctactgaaggctctgggattggagcaggttttggaatacggtcctcttaataaggccaatgcggcttttaggattaatttttaaagaacatagaatttgagcagcctggttcaggagtccagaggctagtggaaaagcagaaatcaaagagctcctactatgtccagtcacagggtaactgtcatgaattaagcttgtattatgtaccaggtgggtttacatgtataatctcagcaaccctatgaaatcagtcatagcatctgtacattctagagaattgtctgaggctcagagaggttagaggactaaaaaaccaataagaaaatcaaaacccagtttgcctgactggcaagtcctttctctctacctggaagcttttgcttgtttaaatccccctggcttgtcccagatggggctagggtgtgcatgggggtgagggggagaagcaagacgtagtgaagtggttctcaaagtgtggtccaactggcagcgtcagcatcacctggaacctcattggaaatgcagattcttataccgctccaggcctcctgagtcagaaatccaacaagtgctccaggtgattctggtatgtgctcaagtttgtgaaccact

SEQ ID NO: 511218 - DNA, 620 bp, Homo sapiens
gctcatcaaacaaagtgttttggcagcagcaactaagaatttcattgtggtgggaaagatatgatattttcttggtggcagaaggagaggggaatggggtagtatcagtttcaaacctaaaagctggggcttgagtctattgcttattaattttgggatcatgggtagattattaattcactcctctgattcatgagaataataatgcttatcttgtttatggcacagagttgctgtgaggatcaggaaacttggtttggggaggcacttcctaagtaggaggtgactcatgtgtaatcacttactataagaatggatacattgggagtgactagtcctaggatttgcttgtgggagatatttagccatcagagtagttgcctcacagattgctattccaggaggaatagactttggcagttaccakgataacaaacacccaagcatttatggcaaatatgatgtaattaaagttgatttaaagaaagggcagtttttctgttttccaggtgatgttttaatgtatgctcttaaattcactgcaggcatcaactcaattgtggccattgcatcatacactggatataatcaggaagactctgttatcatgaatcgttcag

SEQ ID NO: 511219 - DNA, 597 bp, Homo sapiens
atttaaatctataatcttgagggaattaattgtactaagaaatgtatgttctacccatgaatgactagccttaataaaaggaatcttttattagatacttgaagactatgtagatttatatgtagatttattttcaaatctaccccttccctccaatctggcagacattaatactttttgcttgaatatacttttactataatggttgcaaaattataatttttttgctccattattccttctatatttattaattggcattgtgttccaaggaagtaggttgtaatccattactttattttggtgtgtgctcatattttcccagatttagacagacagagcctcttcatgctggcttttataaccttttaccttgccttcagacacacacacacacacacatacacacacacacacgttttagtatactttattgctttctggcacaggtgctttccctaacctagtcataaaattagccatttctttaaaaatttctagcttattttaatgaggaatggaaactagaaaccaaaatataggggrcagatatgctcattacagtaaatatcttttaaataaaatttgaatgccatt

SEQ ID NO: 511220 - DNA, 334 bp, Homo sapiens
tccagcgccctggcctttcggtgcacaggacgacctgagatggagcatcacccagctcttcagccacagggctgcagattcctctcccaaggccttggcctacactgtggcagtcactagaccagcactggctcacgagtgggcaacaggaagtatgcagtaggccctgggcttttccgagccctcattcagcaggaaatctgtcccgtggctgttctcacagggccaaaccttcgcgtgcatgataggtgaggggctcctccgacatcctgtcactttgcttctgcacccagagaaatgatctaccraaaatgagcacctgaatttcaaaaag

SEQ ID NO: 511221 - DNA, 468 bp, Homo sapiens
gctgtggaacagccacggcaagagcaatattcagtcaccagaaaagctgtttctgctgtagatggcttctgaaaatccagactcttacgagattttaaaacactcctctttgtaaattagaaaggtgcttttgaagtgtgagtcatccagaaagtggcatctctgagaactgagagagaaagtgctagtgagatttgagcacyggaggaaggcttcccctaccccacgtggccacggctctgggaccttggcattgcatttgtgataaaataaacggtgctccccgtccctcacacatagctcccatctaaccagtttacaagtttcaaacacagacacactgaacatcagacaaggctcttatatagggactgtgcattggtcaaggctcttcagagaagcagagccaatagcgtgtgtgtgtgtggagaagagagagagaggggagagagaggagagagagaacgg

SEQ ID NO: 511222 - DNA, 513 bp, Homo sapiens
tgctacgtgccaggaagcctgagtttaacccaagatatgtgcaagttttgaaagttggagcacaactttggaggaaatttgcctctttgtaytccgtttccttatggtctatggctggtcctggaagatgccagcatccagctccagaaactggaatggctctgcagtattacaagcccctaagccccttatttaggggttcgaagctgatcctggtgttaatatgttccttaactttatttttaacacttacagcaaagatattcctctgaaatctacttcaggtggcaaatgagacttactacactatgagaagtttgaaggcaaggactggtgtatttatttccaatggctactgtagaacatattatcacaaacttggtggcttaaagcaacactaatttagtctcttgcagttctagaggctggagaaaaatcaatttccttgtcttttccagtttctagacaccaagaacattccttggcttgtggccccgtaacactccaatatct

SEQ ID NO: 511223 - DNA, 513 bp, Homo sapiens
tgctacgtgccaggaagcctgagtttaacccaagatatgtgcaagttttgaaagttggagcacaactttggaggaaatttgcctctttgtattccgtttccttatggtctatggctggtcctggaagatgccagcatccagctccagaaaytggaatggctctgcagtattacaagcccctaagccccttatttaggggttcgaagctgatcctggtgttaatatgttccttaactttatttttaacacttacagcaaagatattcctctgaaatctacttcaggtggcaaatgagacttactacactatgagaagtttgaaggcaaggactggtgtatttatttccaatggctactgtagaacatattatcacaaacttggtggcttaaagcaacactaatttagtctcttgcagttctagaggctggagaaaaatcaatttccttgtcttttccagtttctagacaccaagaacattccttggcttgtggccccgtaacactccaatatct

SEQ ID NO: 511224 - DNA, 513 bp, Homo sapiens
tgctacgtgccaggaagcctgagtttaacccaagatatgtgcaagttttgaaagttggagcacaactttggaggaaatttgcctctttgtattccgtttccttatggtctatggctggtcctggaagatgccagcatccagctccagaaactggaatggctctgcagtattacaagcccctaagccccttatttaggggttcgaagctgatcctggtgttaatatgttccttaactttatttttaacacttayagcaaagatattcctctgaaatctacttcaggtggcaaatgagacttactacactatgagaagtttgaaggcaaggactggtgtatttatttccaatggctactgtagaacatattatcacaaacttggtggcttaaagcaacactaatttagtctcttgcagttctagaggctggagaaaaatcaatttccttgtcttttccagtttctagacaccaagaacattccttggcttgtggccccgtaacactccaatatct

SEQ ID NO: 511225 - DNA, 513 bp, Homo sapiens
tgctacgtgccaggaagcctgagtttaacccaagatatgtgcaagttttgaaagttggagcacaactttggaggaaatttgcctctttgtattccgtttccttatggtctatggctggtcctggaagatgccagcatccagctccagaaactggaatggctctgcagtattacaagcccctaagccccttatttaggggttcgaagctgatcctggtgttaatatgttccttaactttatttttaacacttacagcaaagatattcctctgaaatctacttcaggtggcaaatgagacttactacactatgagaagtttgaaggcaaggactggtgtatttatttccaatggctactgtagaacatattatcacaaacttggtggcttaaagcaacacyaatttagtctcttgcagttctagaggctggagaaaaatcaatttccttgtcttttccagtttctagacaccaagaacattccttggcttgtggccccgtaacactccaatatct

SEQ ID NO: 511226 - DNA, 518 bp, Homo sapiens
aagcagccaggaatcagggcagaacccaatttagaaggcaaatctctcgattcctaggccagtgtgctttctgctggggcccctcacccagcgtgtgcatgactgctgtattagttgcattttaattattgaggagtatatttatatacttgtataattcaaaacttttgttttagttttaagttataaaagcatttacaaagttgcttgtttttaacaacaaaaaaagaaaaactatatataaaaatgaaaataatcactttcaatccttctctactccctgcctactagggcactgatgttaacattttgatatatggtattctgtagctttttatattcttacataaacatacaaatatatacacatatgggctagaggcatgtcttcctatttttaataaactrttaaactctttctccagcattttcctttttcatgtaatagtacatcaaaagtatctttctgtatgtgtatacatcatctaattcttaatagtgccataatattctatatt

SEQ ID NO: 511227 - DNA, 628 bp, Homo sapiens
gcatggttacatgtgtccatagtcccagctactcaggaggctgaggctcaagtktgagcccaaaagttcgagactgcagtgagctatggtcatgccactgcatgtcagtgtgggcaacagagtgaggccttttctcaaaacaagcaaacaaaccctccaatttttgttcagactgtttttctctatgaattgtttttcgcttatgtaatagttctgatttctctctaacacttgtgctttctctcttaggaatacttaatgcattcttcccaagttttctttgtttaattgttctcaaagtcagggctctgagtggtgctgggagcatgttagaaatgaaaattctcaggccccacctcagaccagcaatgtctgtttagacaaggccttcatgtgacactgatgtaccttaaagtttgtgatcaatgacagattggataaagaaaacgtggtacttatacaccatggaatactatgaagtcataaaaagaacaagattatgtcctttgtggcaacatggatggagctgaagaccattatccttagcaaactaatgcaagaacagaaaaacaaatgccacctgttctctcttataagtgggaactgaatgatgagaacacatagacac

SEQ ID NO: 511228 - DNA, 519 bp, Homo sapiens
agtgaatgagctcaccacccattgcaactgtaagctctttggcacgttaagttaaatcattgttgaactcaactcttccctttgaaccctggggaatattaacatgtcctcccaagggccagggaggaacatatgtgtctttgaccctctcaaaatgaggaggatggaaactcccatgtattagccaagtacatttgctaggttgatgatgtgcaaagaggattggtcagaatcctatcccaaaaatcaggaccagctccattatttgtgggacccagggcaaaacaaaataaaaaacatgagacttcttggtcaaagattattaaggagttttaagacagtgataacagaacattaaactcagtgtgggaccctcctaagcatggggccctgtgcaactggtcaagccacatacccatgtagctggccctgctcacaatcaccaagaagccrttgtcatagatttctaataatgaactgaacagagaacatgtcaagaaaagataagaggtttatttt

SEQ ID NO: 511229 - DNA, 621 bp, Homo sapiens
cagccagtaatatccagtagacacagccatgatggcatgactcagagagagggtgtgaagattctttctttgatggcatggactttgtagtcatagattttatggagaggggctgaacattcatagatcagtccacaaaagcataagtaacccacttatgctatctaattatccctcttaaaacccataatatatgcgattcmgacctaatgtttggatctggtaacatgcctgagtatagtagatactcaacaattgagctttctttttaactttgtctgcaggacataatatttccccagagaatacactttctatgattcttaccattctgttaccaggaagataattaactggtaaggccttgaggaagaagctggcataaatatcatgagggtgtcagtggtcctataaaacaagttagacactaggtcttcttagttaggagtcttttggttataagcaactgaaatcagtttgaactacaagaacttggaagggggcattgtattttaagcctagggaatatttaatggttctcaagggtcaggaaagagctaccatcaggctcaaacttgaacctgacatgtcatcaggatgttctccatctcttttctttgc

SEQ ID NO: 511230 - DNA, 598 bp, Homo sapiens
gctgtacataacggtcactccatcccttacacttgctggaaatgaacacagtttgttcaactctaaaaccttagaaataaactgctaagccatagttcctctcaccgaacagaatcgacgtcagaccctgcttggcttggtttttcttccatcatttaacctctccatgacttcaagttctcatctgtagaagagctagatacactcagagggcttccgggggaatcaccgacatagtgcctgcaaggtgctgcacaccatacctggagtgtagcaggcacacatacatgttctctgaacgcctcagctcagcaaggggagtctggaaagagaaaaacctgcctttggattgaaacctgcctttgaaatctggctctgccctttttgaattgggcaggctgtgtgtccttggtttcttctygtctgtaaaatggctctaattacgcttcctcaagagatttttgtgaaggctcagtatacacatatatgcaaataacacaggatgctgcattaaatcctcatttcttttcactcttcttctccccaacagcagaagctaggggtgagagaaggctttgtggtgatgttcaaagctcat

SEQ ID NO: 511231 - DNA, 676 bp, Homo sapiens
atcaatattcacattctgagtgaatgatcgttaagtatagagaagaaataaatgacataaattacctgctattaagaaaaagcgtcacagttgtaactcgcaacttgaggagttgaatagtaacaaaaataggagagagtggcagagaaggaaatcttcaacatagtgacatttctcaagaaataagtggagacataacctgaacatacttcaacaattttaaatacaaataaaataagaagtcaaatatattagtgctgcttgacaattctatgatgaaatgaagtttcttgctacatgaaaatattatcacttctgttttgctcactccatcatagagttctgattcatgattccagggataggcagtatacatcagtgttttgacagcaggagataacagatattaggtgaatatttccctcaaaagaaatataagaatgagtctagacattattttctcagagttgcatctaatttcacrtgcaatcaagttgcccttggcaactcagggaaagttagcttatctccctgagttcagcataaaaaaaaaaaaatctagtcaagtcttcacatgaaatgtgtattgtttggctgaaagagcagatatccacattttgttctaaagcatcagatccatttgccaagctaatacacaagggtgatggaaaagaca

SEQ ID NO: 511232 - DNA, 676 bp, Homo sapiens
atcaatattcacattctgagtgaatgatcgttaagtatagagaagaaataaatgacataaattacctgctattaagaaaaagcgtcacagttgtaactcgcaacttgaggagttgaatagtaacaaaaataggagagagtggcagagaaggaaatcttcaacatagtgacatttctcaagaaataagtggagacataacctgaacatacttcaacaattttaaatacaaataaaataagaagtcaaatatattagtgctgcttgacaattctatgatgaaatgaagtttcttgctacatgaaaatattatcacttctgttttgctcactccatcatagagttctgattcatgattccagggataggcagtatacatcagtgttttgacagcaggagataacagatattaggtgaatatttccctcaaaagaaatataagaatgagtctagacattattttctcagagttgcatctaatttcacgtgcaatcaagttgcccttggcaactcagggaaagttagcttatctccctgagttcagcataaaaaaaaaaaaatctagtcaagtmttcacatgaaatgtgtattgtttggctgaaagagcagatatccacattttgttctaaagcatcagatccatttgccaagctaatacacaagggtgatggaaaagaca

SEQ ID NO: 511233 - DNA, 601 bp, Homo sapiens
tgaatccctccgattcctgggatttttgtggttggtaggctttttattactgcttcaatttcagaactggttattggtctgttcggggattcagtttcttcctggtttagtctgggaggctgtatgtgtccaggaatatacccatttcttctagtttttctagtttatatgcatagaggtattcataatattctttgatacttgtttatatttctatggggtcagtagtaatatcccccttattgtttctgattgtgtttatcaaatattctctcttctttattagtcaagctagtggtctaataatatatgtaaaaattctttttataaatataatgtaataataatagcatgctcatccaaagataccactaagaatatgaataggcaagtcccagattgagaaaaatgtattaataggtgtactaatagtcccagattgagaaaatgtgttaattaacatatatcagaaaaagacttatatcaggagtataaagagctcttctaaatcaacaataagaaaagcagttcaataaaaattatggcaaggatagaacasacattacatgaaggaagatgtagaaatgtccaataacccatt

SEQ ID NO: 511234 - DNA, 555 bp, Homo sapiens
tgaacagagatctattgtgaaaacagaaatggttatggaaacagaaggctggagttcagttcccagcatcagyactttgttcccattgtgctgcaatttattgggtattttaaatactccccttcactaattattttttgcagctaatttatctatattccataaatacagtatgtataggcttcataaattccaaataaatttctctggtttaccctggatcttgtactttattcttgagcatacattttgtaatgtctatggctattttcaatactagagcagtaagacaaaaatttaaataggtatttattatttaaacaattgtagaggttttattttcggatttcatgtgggaaacaatgagaggaaaacactgaaatttagacattttaatctttatatcatattcaattagactttgaatcccacaatatatcagggcttgtagtcattagaagtctaagtatgttgaaatataagagtaaagaatattctgtagaccccttttttaaaatctaggttaaagatgtcagtgtaatggaataaacaaac

SEQ ID NO: 511235 - DNA, 555 bp, Homo sapiens
tgaacagagatctattgtgaaaacagaaatggttatggaaacagaaggctggagttcagttcccagcatcagtactttgttcccaytgtgctgcaatttattgggtattttaaatactccccttcactaattattttttgcagctaatttatctatattccataaatacagtatgtataggcttcataaattccaaataaatttctctggtttaccctggatcttgtactttattcttgagcatacattttgtaatgtctatggctattttcaatactagagcagtaagacaaaaatttaaataggtatttattatttaaacaattgtagaggttttattttcggatttcatgtgggaaacaatgagaggaaaacactgaaatttagacattttaatctttatatcatattcaattagactttgaatcccacaatatatcagggcttgtagtcattagaagtctaagtatgttgaaatataagagtaaagaatattctgtagaccccttttttaaaatctaggttaaagatgtcagtgtaatggaataaacaaac

SEQ ID NO: 511236 - DNA, 535 bp, Homo sapiens
aacattaacctctaagttccaagcagtttatatttgagattaatgctaaggcaagttcacaaatagtataatgggcaatgtaggacatatgaactaagacattccacggttccaaaatgtagccatacttacacttttaaaatttagggataaattytgcaatttgcgtggaagtataaggtacatggacatttgcatcttctgtacagttatttgttgtgagaacgagagaggtctatcttatgataattagcatattgaatgtttattacactagttattgaaaaagaatctcttagtatttttgctttgctcctcaagtttagtagggaaaaaagtaaaatgaaaacaagataacacacacaataagaagaatacaaattcatttcttatgattgttagtagtagacataaatttcaaaaaatgcatttgcaagcagtatagttgatgtttcagaaactattggaatgataagccaataggttttataattgtatataaaaattatgaaaacttgtgttagtttgaaggcaa

SEQ ID NO: 511237 - DNA, 615 bp, Homo sapiens
tgggtttcactgcaaacaggtggcctccagatgcagcagcagaccgtaaaagtagagcagaaagtcaacaggtcaaattggcagggaactctcatgggrcaaactcaaggaagaggccaaaagaataaaaactaaggggaggccgggcacagtggctcatgcctatcattccagcactttgggaggccgaggcgggtggatcgtttgagatcaggagttcaagaccagcctggccaacatggcaaaaccccgtctctaccaaaaatacaaaaaaatcagccaggcgtggtggtgtgcacctgtaatcccagctactagggaggctgaggcaggagactcagttgagcctgggaggcggaggttgtagtgagccaagatcgcaccactgcactccaatctgggcagagaaaatgagaccctgtctaaaaaaaaaaaaaagaggagagttgaagggagacaagagaactatgtgatggtctaagcactgttgcccagacaagattctacatctttcttcactgtggctccagctcacccctactgagttcattccaaatcttggtgcttcattcatcactagtatcacagcagagcccaaacttcagtaggaataat

SEQ ID NO: 511238 - DNA, 335 bp, Homo sapiens
caggggcttgctgagctgtgaacaccccatcttccccaaactacagctcatctccagcttctagtttccctgcaaccccacttcttttgtacccaaataattctcatgtcctgttgacttgctccctccctggtggatcaaacctggctggtttgctgggccttggaattaccttcgggatctttccatccctgagaggttgggctcctcataggccgccagcctgactcggaggaccgtctactaccctctcctgcggacaggcccgyccatggctgccccatgaccatgcttgccctgtcccttggcttcgtgtgggtcagcttgttctgcca

SEQ ID NO: 511239 - DNA, 530 bp, Homo sapiens
ttccacatttttgggtatatttcaagcaacattctacttctggtaccaatttactgtattagtctgttttcacactgctgacaaagaaatacccgaggctgggaaacaaaaaagagatttaattggacttacagttccacacgtggaatcatggtgggaggtgaaaggcacttcttacatggcagccgcaagagaaaatgaggaagaagcaaaagtggaaacccctgataaacccatcagatctctcgagacttaattcattatcatgagaatagcacaggaaggactggtctccatgattcaattacctccccttgggtccctcctacaacatgtgggaattctgggagatataattcaagttgagttttgggtggggacacaaccaaaccatatcaggtactcagggcatcaaattacatatataaattatacamacacacacacaaatatacatatgacttggctctcagttttttaaaaccatggtttgatgggtttctgaaagggcatattataatgaaaaatct

SEQ ID NO: 511240 - DNA, 314 bp, Homo sapiens
aattaaaaacttgtctgtctggatccataatattttttattagaaagaaaataacccagtctttcgccaagggaaaaaatcttatataccagcatgtgacaagactagggttcttactaaactttttggcatgaacattgrcaatgggaaatgtcctaacctcacagataatgccgtctagctcagcatctctaaacttgcattcatggtgggacttaaatttcaagcttaataagattaagaagaaaatatttagaattaaagtaatgctggtaacacagtgacatcaaatttaaaatttcttactttgaact

SEQ ID NO: 511241 - DNA, 594 bp, Homo sapiens
ctggttccagcacaaaacaaaattaaacttagcagtcctcacaatgtatttagcttttctgatagtataatagccatgttaaaagtcacacagtgaccagaaattgaatcaaacatccytgttgtttgctgattagatctgggcaagtttcaaatttgctgaacccaggagcactggaagaacattttgtgtgactttcttctgctttgagatcataagggatcaggtagtggcaactgcaaacatgggaagggaagttaacttagagggaggtgggaatagggaaaatgaagatgaatcaaagtaggagaagcttcttacagcagacctgtattccagagcaggctacccacccactctacacctcctttctccttccacaatcacaagtttagctgggcactttgccacccataaagtaaaccacattttccaggctctcttccagagaagtgtggccatgagactgagttctggcaaagatttaagcatacttaatacatttatttaagcaattatataaagataatgggagatttttaagagccctctataaaggaagtgatacattaaagaaggaaactagtcattaat

SEQ ID NO: 511242 - DNA, 594 bp, Homo sapiens
ctggttccagcacaaaacaaaattaaacttagcagtcctcacaatgtatttagcttttctgatagtataatagccatgttaaaagtcacacagtgaccagaaattgaatcaaacatccctgttgtttgctgattagatctgggcaagtttcaaatttgctgaacccaggagcactggaagaacattttgtgtgactttcttctgctttgagatcataagggatcaggtagtggcaactgcaaacatgggaagggaagttaacttagagggaggtgggaatagggaaaatgaagatgaatcaaagtaggagaarcttcttacagcagacctgtattccagagcaggctacccacccactctacacctcctttctccttccacaatcacaagtttagctgggcactttgccacccataaagtaaaccacattttccaggctctcttccagagaagtgtggccatgagactgagttctggcaaagatttaagcatacttaatacatttatttaagcaattatataaagataatgggagatttttaagagccctctataaaggaagtgatacattaaagaaggaaactagtcattaat

SEQ ID NO: 511243 - DNA, 601 bp, Homo sapiens
tttgtatctgcgattgagtccaaaatacctagccttccaaacactacataaactagcctctgcaaactccaccaatcttacttctcatcacatttcttaccctaaatattctcaaaatgcatggaacagatgtttacactgttttctccttcatacactcgccattatgctgcattgtgtctacaatattccttacctcactatgagtcaaaattattcctattaattctttaggggttggcttaaatatctttttctcagaaaagtgtttcatgactacctgcaatctagcataagcctttcttttacacaatcacarttccctgttgttgagagttgtcttcaaatcatatttattctacaaaatttctcctacaaaataagtgtaatcagaaaattgtgaggcagtcatgttgctattgttgttattctaaagagaaatgaggcaacagattgtgatgagaacatgattaagattccatctcatatttatttgattgtatttctgagaaaatatggcttttgggttaagagattatatattgtgtatttggaacccaatgaataaatattaaatacaatatactgaagcactaataat

SEQ ID NO: 511244 - DNA, 601 bp, Homo sapiens
tttgtatctgcgattgagtccaaaatacctagccttccaaacactacataaactagcctctgcaaactccaccaatcttacttctcatcacatttcttaccctaaatattctcaaaatgcatggaacagatgtttacactgttttctccttcatacactcgccattatgctgcattgtgtctacaatattccttacctcactatgagtcaaaattattcctattaattctttaggggttggcttaaatatctttttctcagaaaagtgtttcatgactacctgcaatctagcataagcctttcttttacacaatcacaattccctgttgttgagagttgtcttcaaatcatatttattctacaaaatttctcctacaaaataagtgtaatcagaaaattgtgaggcagtcatgttgctattgttgttattctaaagagaaatgaggcaacagattgtgatragaacatgattaagattccatctcatatttatttgattgtatttctgagaaaatatggcttttgggttaagagattatatattgtgtatttggaacccaatgaataaatattaaatacaatatactgaagcactaataat

SEQ ID NO: 511245 - DNA, 528 bp, Homo sapiens
ttggagtgcagtagtatatttgcaaagaagaaatacatgatttgctaagcttgagatttaagctaatatttgaaatcaggagacttacattaagggatattttaaataataactgctatggtcctcgtccagcagactgagaatacagttataatacatcaatgataaaaaawttatacgaaattcataatgtattttatattctatttcccatgtaagcaagtgagttttaagataaaacacaatgtcattaaaagtcagatggtgaaaacagatcttggttatttcttctaccactgctagataggcctttgatagatttctttgctgtacgctacttcccagcttgcggtaggtctctcattacacaacttattttcttactgagctacctaatgctcttaacaaatcatcttttatctatttggaaaataaattatgtgtttagcttcgtggaacacattggtatctgaaccgtctacctgtagtagaaaaattacatacaacctatgcatcccaactctcctg

SEQ ID NO: 511246 - DNA, 528 bp, Homo sapiens
ttggagtgcagtagtatatttgcaaagaagaaatacatgatttgctaagcttgagatttaagctaatatttgaaatcaggagacttacattaagggatattttaaataataactgctatggtcctcgtccagcagactgagaatacagttataatacatcaatgataaaaaatttatacsaaattcataatgtattttatattctatttcccatgtaagcaagtgagttttaagataaaacacaatgtcattaaaagtcagatggtgaaaacagatcttggttatttcttctaccactgctagataggcctttgatagatttctttgctgtacgctacttcccagcttgcggtaggtctctcattacacaacttattttcttactgagctacctaatgctcttaacaaatcatcttttatctatttggaaaataaattatgtgtttagcttcgtggaacacattggtatctgaaccgtctacctgtagtagaaaaattacatacaacctatgcatcccaactctcctg

SEQ ID NO: 511247 - DNA, 528 bp, Homo sapiens
ttggagtgcagtagtatatttgcaaagaagaaatacatgatttgctaagcttgagatttaagctaatatttgaaatcaggagacttacattaagggatattttaaataataactgctatggtcctcgtccagcagactgagaatacagttataatacatcaatgataaaaaatttatacgaaattcataatgtattttatattctatttcccatgtaagcaagtgagttttaagataaaacacaatgtcattaaaagtcagatggtgaaaacagatcttggttatttcttctaccactgctagataggcctttgatagatttctttgctgtacgctacttcccagcttgcggtaggtctctcattacacaacttattttcttactgagctacctaatgctcttaacaaatcatcttttatctatttggaaaataaattatgtgtttagcttcrtggaacacattggtatctgaaccgtctacctgtagtagaaaaattacatacaacctatgcatcccaactctcctg

SEQ ID NO: 511248 - DNA, 520 bp, Homo sapiens
atcaagactggaagttccaggagcatctgattaaccaagctggagtcacttgcctgcttagtgggtagacaatcccaaaaagaaaatttccagagggagagttaattcttcaaaaggaaattagtgtgtgtgccaaagtaagggaaatgggtgatgggcaaccaaaacagtacatgttcactatcgcaagtgccagctccagaaaatctacatagaaggggtgtagagaagcaatctgattgaaaagaggcagtagggtacggttcttaatctgcattttgatagcaatcacactgttttgacttagattgtttatttatsttggtagttttgaagagttgcttaagattattgagccgggtgcagtggctcatacctgtaatcccagcactttgggaggccaaggcaggtggaaaactggaggtcaggagttcgagaccagcctggccaacatggtgaaacctcacctctaataaaaatacaaaatttagccgggcgtggtggtgcacgcctgtaatcc

SEQ ID NO: 511249 - DNA, 540 bp, Homo sapiens
ggttttgtgaatataacccaatcttttgaagtaattggtagcatccttggtcaatatttacatttctcacacttataaaaagacaaaaatctatttttgagccaaagtggagagaaggaacaagagaattttactatttttttcttttctgtaaggttttaatttttccatgtgaatatgctatcttttgtataatttgaatatatgmtttttaattgtgaccatctttataataaaaataatatttaaaaagcaaaggcagaatgaggaatataattcatgcaaatgttgactccctgttgacatctctcttacattaaaaaacaaacaaacagacaaacaaaatacataaaattagctgagtgtggtggtgggcacctgtaatcccagctactctggaggctgaggcaggagaatcgcttgaaaccgggaggcagatcttgcagtgagccaagatcgcactattgcactccagcctgggcaacaagagtgaaactccatctcaaaaaaaaaaaaagaaaaaagaaagaaaaaagtctg

SEQ ID NO: 511250 - DNA, 585 bp, Homo sapiens
atttgaagaggggcctcctggtgtctttctgaggagcattagacagtgggacaaatatttgacccatgctgctgcattgcatctcctaggtttttytgatgaaaggacttccctgagctggactgatgataaagaagccagtttctcaaggccctctggccactgagctggacccattccccaacatgactcctcagtcatcagcgtgggccacaccctgcttggaatgttgagaagaaatgatctcctctctgtggctagaagtacaccttttctttcccactggatttgagaagttgggaggaggcgttaaactctgcttgtccttttcattaatatcatgttctgtaagtctgtgttcctgtgtgaaggtacacttccctgggtagaaaaaaacctgtttttggattcactttggacctagaaaactagtcttaacatcaggctaatatcctctgcctgacatcatcactgtgatctcattcaattcattattcaatgtctcagtcctcttcacaataggtcagctctcttccttctgacttttaggcgtatatgccatcagaagtcagttaagtgattaca

SEQ ID NO: 511251 - DNA, 585 bp, Homo sapiens
atttgaagaggggcctcctggtgtctttctgaggagcattagacagtgggacaaatatttgacccatgctgctgcattgcatctcctaggtttttttgatgaaaggacttccctgagctggactgatgataaagaagccagtttctcaaggccctctggccactgagctggacccattccccaacatgactcctcagtcatcagcgtgggccacaccctgcttggaatgttgagaagaaatgatctcctctctgtggctagaagtacaccttttctttcccactggatttgagaagttgggaggaggcgttaaactctgcttgtccttttcattaatatcatgttctgtaagtctgtgttcctgtgtgaaggtacacttccctgggtagaaaaaaacctgtttttggattcactttggacctagaaaactagtcttaacatcaggctaatatcctctgcctgacatcatcactgtgatctcattcaattcattattcaatgtctcagtcctcttcacaataggtsagctctcttccttctgacttttaggcgtatatgccatcagaagtcagttaagtgattaca

SEQ ID NO: 511252 - DNA, 645 bp, Homo sapiens
tgaatgtgacaactgtaatctgtgttgaaaatcagaacgttaggcaattctgtaataatagagtaattggaggactatagatacatgttcaggacagatcagtaatattgcacaaagaataaatttcaataacaatataaacatcatatttgagaaattatcaaatcaaaagcatgcaatgcttttcttacagtactaaaattataatttcaagggctgaaggattaaacctctaataataaatgaattttatgaggtattgcatctagcagatcaggtaaaaggtggatttttacattatttttttttaattagggatttttctgaggtccagatatgaactcaaataattaagacaaaattttactctagtacataatatcaaattttatctatgccacttagaaaacattcacatataaagaaggtcaatggtttttagaaaggagcrtaatgactaaactgaaaattgtcagtacaaggcaacatattactcaaatgttcttgacactaatagattttctgcctcttgctgttgatacatggatcatatgtaaaataagaaggtccaaactggagctgctttatgtctgccaagatttacataacagaaaatgtctgtaataatttccaatagcagccctg

SEQ ID NO: 511253 - DNA, 144 bp, Homo sapiens
tgttccttttaggttttgtcatttttctgctgactttcacatcagtgaagactttgaatcttttgttccaactcaytgtttgcccacaagtagctgtttatttccctcctgtcccctgctaccccatcgtcttcccatttatct

SEQ ID NO: 511254 - DNA, 650 bp, Homo sapiens
acctcacaacaatttgaagtgggtactattttcaccttgtttcacaaatgtgaaaccgaacctcaaaagtgacaagaaagttgcttaatatcagattccttagtttgagaattacagtgacagtttgtctgatttcwataagaaatttttccattgtctcatgcccttgaaaaaaatggacacatttaggtatataattgatcagagagatgatcatatgcaatgctgactttttgtatgcctttagctcatttaagagtctaataaatgctatacatcatctctcaggaaaaaaaatgccttgtcttaaatacacataatattgcacataatttcaggaggttgttttaaatgatacattcagtattaataaataagtttactgtgacttaggaaaagttatttatcttaagtttagttattttttatgttccatttaccctttagtactttaagttttggcagcagctattttttaataatttaattttactttgaatatgtgtatataaaatgcctaatgtgataaaagtagaatatgcctggttgaaggaaacatagaaaattgaattgccactgatttggcctttccttcatctttcatggggagccagagagaatctggttcagaagacagactctagagtcaa

SEQ ID NO: 511255 - DNA, 650 bp, Homo sapiens
acctcacaacaatttgaagtgggtactattttcaccttgtttcacaaatgtgaaaccgaacctcaaaagtgacaagaaagttgcttaatatcagattccttagtttgagaattacagtgacagtttgtctgatttcaataagaaatttttccattgtctcatgcccttgaaaaaaatggacacatttaggtatataattgatcagagagatgatcatatgcaatgctgactttttgtatgcctttagctcatttaagagtctaataaatgctatacatcatctctcaggaaaaaaaatgccttgtcttaaatacacataatattgcacataatttcaggaggttgttttaaatgatacattcagtattaataaataagtttactgtgacttaggaaaagttatttatcttaagtttagttattttttatgttccatttaccctttagtacttwaagttttggcagcagctattttttaataatttaattttactttgaatatgtgtatataaaatgcctaatgtgataaaagtagaatatgcctggttgaaggaaacatagaaaattgaattgccactgatttggcctttccttcatctttcatggggagccagagagaatctggttcagaagacagactctagagtcaa

SEQ ID NO: 511256 - DNA, 505 bp, Homo sapiens
gccttctgctttctggatggtgcaggcgtgacgtccaagcccaaatttcactggagctccaagaatcgagcctggcccaggcactcactgcacgggggccaagcgtgaaaccagtgatckctccagcaaggtaacaggacagcttggtgatccttcttgccggccacaaaaggttatagccagaattccaccgaatgtggtctttctgtgtctctccccagatagtgaagctgcacaaacctgggggtggggggtggggggtgctgacctcagtggggtgtcctggagaggcaggaaccagagtttacagggtgcagatcctactgaagcaaatggacgtggcatccgtgggcagagctggctgtggctggccttccagcctggatgtctcccccccccccgcctgggtgtcaccaaatgcacccagagaccccttctaaacctggggggatgtgctgacctcagtggggtttcctggagaggcaggaagctgggtttccagggt

SEQ ID NO: 511257 - DNA, 645 bp, Homo sapiens
tggccagggcgatccctctcaggcccaggccgctgctgccaggaagagcaggaacaacagccagtcacgcctggtgatgcctctgaagtgcttatgctcccaggcatgggctgaccgcaacgtgcattctctccttttatgcccctactatttggaacgctgtattttttcatttttatttttattttttgttgtaaatctgccacttaaaaatacccagggtggagctaaaagtacagacactgctcaacttacccctggctgcggcccrataaggccgctgcgagtggaaaatgactgagtccacctgactaccgaatagcacagcgtgggggggcccaccttggcctgctgagaacactgccctgagcctgcggtgggcagaagcatcaacacgaagcctgttttgtagtcaagtgtcggatacctcatgtaatcattgactgctgtactgaaagcgaaaaactggccgtgtgggactcacacgagggtttctgctgactgtggatggcttttgcatcactataaagttgaaaactgttaagtggaactgcggtaagtcggggctgtgtgcactagagacctgagttctgccgctccatagctgtgtgactttggacacatatttgagcctgagtgtcttcc

SEQ ID NO: 511258 - DNA, 547 bp, Homo sapiens
tggccagggcgatccctctcaggcccaggccgctgctgccaggaagagcaggaacaacagccagtcacgcctggtgatgcctctgaagtgcttatgctcccaggcatgggctgaccgcaacgtgcattctctccttttatgcccctactatttggaacgctgtattttttcatttttatttttattttttgttgtaaatctgccacttaaaaatacccagggtggagctaaaagtacagacactgctcaacttacccctggctgcggcccgataaggccgctgcgagtggaaaatgactgagtccacctgactaccgaatagcacagcgtgggggggcccaccttggcctgctgagaacackgccctgagcctgcggtgggcagaagcatcaacacgaagcctgttttgtagtcaagtgtcggatacctcatgtaatcattgactgctgtactgaaagcgaaaaactggccgtgtgggactcacacgagggtttctgctgactgtggatggcttttgcatcactataaagttgaaaactgttaagtg

SEQ ID NO: 511259 - DNA, 645 bp, Homo sapiens
tggccagggcgatccctctcaggcccaggccgctgctgccaggaagagcaggaacaacagccagtcacgcctggtgatgcctctgaagtgcttatgctcccaggcatgggctgaccgcaacgtgcattctctccttttatgcccctactatttggaacgctgtattttttcatttttatttttattttttgttgtaaatctgccacttaaaaatacccagggtggagctaaaagtacagacactgctcaacttacccctggctgcggcccgataaggccgctgcgagtggaaaatgactgagtccacctgactaccgaatagcacagcgtgggggggcccaccttggcctgctgagaacactgccctgagcctgcggtgggcagaagcatcaacacgaagcctgttttgtagtcaagtgtcggatacctcatgtaatcattgactgctgtactgaaagygaaaaactggccgtgtgggactcacacgagggtttctgctgactgtggatggcttttgcatcactataaagttgaaaactgttaagtggaactgcggtaagtcggggctgtgtgcactagagacctgagttctgccgctccatagctgtgtgactttggacacatatttgagcctgagtgtcttcc

SEQ ID NO: 511260 - DNA, 645 bp, Homo sapiens
tggccagggcgatccctctcaggcccaggccgctgctgccaggaagagcaggaacaacagccagtcacgcctggtgatgcctctgaagtgcttatgctcccaggcatgggctgaccgcaacgtgcattctctccttttatgcccctactatttggaacgctgtattttttcatttttatttttattttttgttgtaaatctgccacttaaaaatacccagggtggagctaaaagtacagacactgctcaacttacccctggctgcggcccgataaggccgctgcgagtggaaaatgactgagtccacctgactaccgaatagcacagcgtgggggggcccaccttggcctgctgagaacactgccctgagcctgcggtgggcagaagcatcaacacgaagcctgttttgtagtcaagtgtcggatacctcatgtaatcattgactgctgtactgaaagcgaaaaactggccktgtgggactcacacgagggtttctgctgactgtggatggcttttgcatcactataaagttgaaaactgttaagtggaactgcggtaagtcggggctgtgtgcactagagacctgagttctgccgctccatagctgtgtgactttggacacatatttgagcctgagtgtcttcc

SEQ ID NO: 511261 - DNA, 645 bp, Homo sapiens
tggccagggcgatccctctcaggcccaggccgctgctgccaggaagagcaggaacaacagccagtcacgcctggtgatgcctctgaagtgcttatgctcccaggcatgggctgaccgcaacgtgcattctctccttttatgcccctactatttggaacgctgtattttttcatttttatttttattttttgttgtaaatctgccacttaaaaatacccagggtggagctaaaagtacagacactgctcaacttacccctggctgcggcccgataaggccgctgcgagtggaaaatgactgagtccacctgactaccgaatagcacagcgtgggggggcccaccttggcctgctgagaacactgccctgagcctgcggtgggcagaagcatcaacacgaagcctgttttgtagtcaagtgtcggatacctcatgtaatcattgactgctgtactgaaagcgaaaaactggccgtgtgggactcacacgagggtttctgctgactgtggatggcttttgcatcactataaagttgaaaactgttaagtggaactgcggtaagtcgggkctgtgtgcactagagacctgagttctgccgctccatagctgtgtgactttggacacatatttgagcctgagtgtcttcc

SEQ ID NO: 511262 - DNA, 527 bp, Homo sapiens
tgcggagcgtgaactgtctcccacttcagsgggtaagcaggtagacaggaatgtcaccatccattgtctcgtgggtgtgaatcactgcttctagactcctgtgcttttgataattattgcaaagtcatttcaacttttgctgtgttatgatctttaaaacaaatagtgtattctactgcaggataggttaattgtcattaagaggtgattccagtggtattgttaaaaaaagtacacccacaatcagtaaatttagaaagaaagttaggtgagataaaatatcatgaagatttaaaaacaccaggaaataaataccagtctgctaattttatgacaagcatcccaagaaatattggagatgatgctgagaaaataaaaatagcattaaagatcctcaaacagcccctgttcctctgactttgcagcatttggaggggaaagcactcttacattatgagggcctctggagccccacctaaatccttaagtgaaaactcccagggagcatcattttctgacagttgcag

SEQ ID NO: 511263 - DNA, 624 bp, Homo sapiens
tgtgagagtccagtgtcaagatggactgtgtttggtttcatcagtctctgtggaaggatcctggctgacctgtgtcttttgcttttacaaaccttgctggatgatctcacaatcaccttgttgcatgcacacgtaggcagagctgtagaatagactcccagtggggcagttgctgggcaaagggtaaatctctttataattttggcacatattgccagagtgccttctacagggttctatcaactgctgggcactcctgtcagcagtaagagtggctgcttctcccagcctttccagtaaaatatgttaccaacatttgaagccagrtgcagttgctcatgcctgtaatcccagcaactttgttactaacatttgggatttccgcaatggtgtgtgctaataaatgtttaacaaccacttctccaaacaaaacgaaacaaaacaaaacccaaaaccaaaaaaacaagaagccctaattgtagtatctgctgatttccatagcataaatacttctacccaggccaattgcaagctatcaacatgatgtccctgaacacggagttgggaagagatgggccgtagcacccactgtatagtatttctaccacacagatgcaagagatg

SEQ ID NO: 511264 - DNA, 569 bp, Homo sapiens
aagcagctggctgcaggatgtcctccactacytgttagtcaaatgcatgaaacattggatgaaggcaagaaggtgagatagccaggtgtggtggctcactcgtgtaatctcaacactttgtgaggctgaggcaggtggattgcttgagcccaggagtttgagaccagcctcggcaatgtggcaaaaccctgtctctacaaaaaaaatttaaaaattagccaggcatagtggtgtatgcctatagtcccagctacttgggaggctgaggttgggggattgcttgagcctgggaagcagaggttacggtgagctgagatctcaccactgctcttcagcctgggcgacaaaaaagagaatgtctcaataaataaataaataaataaataaattagttaattaattaataaaggagagataggaaccttctcctttgttgaatccaagtttagtaggatgttcctttcttttctctctctttctttttctctctttctctctctctctttctttcctttctttctttctttctccttccttccttccttccttactttctttcttccttcctt

SEQ ID NO: 511265 - DNA, 611 bp, Homo sapiens
tcttgacaagatctcaccctatcatccaggctggagtacagtggtacaatcatagctcactgcagccttcagctcttgagcttaaactatcctcccacctcagctttccaagtacctgggactctaggagcaagtcaccatgcctggtggatgttcttttctattgaaagtctagagtaattcatggccaatacttaattttagcagctttgttccttttgaatgagccctcaagccaaaaacatatccatcttttaacagtttcatttatttcctttgaaatcacttcaactggattcaatgcaatgcatttgaacagatgtttacacagtgtgttgggcattgttatgggcacatgactgagaagagaatggtcaagtttcctgccctggacagaactaaaattttaccaggaagagagatgctgagcacctaactaataaatacacagggtaatttcatttttataagagtttccaaagcaattaccatcaccaccaaagaatcagggtagattactgggtctcgacaagtgtgtgtgtgtgtgcgcacacgtgcgtgcgcatgcatgtgtgtgtcttggggargagataaggcctgaataaggaggg

SEQ ID NO: 511266 - DNA, 631 bp, Homo sapiens
atattccctaagaggggcagaggatgccaagtgttgtcattcctccattatccactgtttcactctattgccatcagaagaaacctattagaaatgacatggggctgtttacagcttttattgactttcaataaacttttgaccccacagatgagaatctgtcgtgaactaagaggtatgaactcactatagacccctaggtattgtgacacttacataagaacctggaacttccttctctsatttgtgtcagagtccttgtacttctctgcttgacagaaaaaagcataataagcacatttctatatgcaaagcacaggactctttgacaaaaactgttaagaaatagatcagccattgaaagaatgaccttaagaatattctaaaaccagagttataatttctagtagatatcctacaaaaatgtaattagcccataaccagcaacaaactaccttgatcagttacctagaaatgcatttgtttaacttagcacaccaagaaatgacatacagctagtttaaaaattaatgttttgttgagtttagaactgtttagttttatgggcaaggtaggcactcaatccattactctaaaaaatccaaaaattaatcttgtattaggccaagcc

SEQ ID NO: 511267 - DNA, 553 bp, Homo sapiens
tgtgaatatacacaatgcaatatcactaggatcaacattggtatcttctgagcctgaaggagattgtgtgctatgccaatctgtctcacagatataacttccaagaatcatgcagatgttgtctgcaaatctgagcttgattcttgtaaaaaatcttccccaataatattgtattaacaaaaartaactttttaaaaattttaactgctattagtagcaatgtgtggcctctttccatgcttacaggtgatcaaattctttagaaatatttgctcctaaaagtgaagtaggcaatctagaagtggatgtagatgcaagacttctctactctgataaagaccacttcgttttctcaaccagaaaaaatatatatatgtgtagcactatttctgccttccacaactagtgttctttggaaactgctgcccgcttaactttcctcctctggctatggggtttggagggtctatcgtagagaaaaagcattatttatttcaatttttatctcctttaaaaacattttcctagactttgcataagcttataaaaagcg

SEQ ID NO: 511268 - DNA, 553 bp, Homo sapiens
tgtgaatatacacaatgcaatatcactaggatcaacattggtatcttctgagcctgaaggagattgtgtgctatgccaatctgtctcacagatataacttccaagaatcatgcagatgttgtctgcaaatctgagcttgattcttgtaaaaaatcttccccaataatattgtattaacaaaaaataactttttaaaaattttaactgctattagtagcaatgtgtggcctctttccatgcttacaggygatcaaattctttagaaatatttgctcctaaaagtgaagtaggcaatctagaagtggatgtagatgcaagacttctctactctgataaagaccacttcgttttctcaaccagaaaaaatatatatatgtgtagcactatttctgccttccacaactagtgttctttggaaactgctgcccgcttaactttcctcctctggctatggggtttggagggtctatcgtagagaaaaagcattatttatttcaatttttatctcctttaaaaacattttcctagactttgcataagcttataaaaagcg

SEQ ID NO: 511269 - DNA, 249 bp, Homo sapiens
ttatttatagatattttcagacattcttcrcaaaaaacactgaacacagagctagtacatggtaaactatttcaatcaattattgtctcggaaggtagtacttgccttggaattcatagaataatgccactttcctgatgacatgtctaacgaagcttaagaacacttgtgccatcttccagttttttaaaggtcaactctggttttgctcaatcactattcacatcttcctataagagcacacagctc

SEQ ID NO: 511270 - DNA, 451 bp, Homo sapiens
catcgtctagtattatttgtaggaattatctgcttatttatgtgtctaaattccttgaggatagtgtcttgagcattatcacctccctaacgctctgcacaatgtgcaacatacattaggcactcaataactactttcggaatgagtgaaggctacaaaaaccacttaaaaactgtgtctgtcagtggaaggtcaataatatcttcacaaaagaaaggtagcaaaattgtatagaagcttgattttgtagaatacactctmtatcattccaagaatcaaaaacaaatttaattaaggggttaagtaaaacaactgcattcataaatatggttcttacacatgattttttgttattaatgtgtgcttaaggtgctcgataatgtaaagctgtaatgatcaggttcctaaagaagttggggtgtaggaatccagaacccgaaaccccttgatt

SEQ ID NO: 511271 - DNA, 451 bp, Homo sapiens
catcgtctagtattatttgtaggaattatctgcttatttatgtgtctaaattccttgaggatagtgtcttgagcattatcacctccctaacgctctgcacaatgtgcaacatacattaggcactcaataactactttcggaatgagtgaaggctacaaaaaccacttaaaaactgtgtctgtcagtggaaggtcaataatatcttcacaaaagaaaggtagcaaaattgtatagaagcttgattttgtagaatacactctctatcattccaagaatcaaaaacaaatttaattaaggggttaagtaaaacaactgcattcataaatatggttcttacacatgattttttgttattaatgtgtgcttaaggtgctygataatgtaaagctgtaatgatcaggttcctaaagaagttggggtgtaggaatccagaacccgaaaccccttgatt

SEQ ID NO: 511272 - DNA, 638 bp, Homo sapiens
ataggtattcaagaccacttcagtgtgaatagtctaaacaataatgccaatggcttccaaacgtctacagtggtagttgctgcttttggggtctcatttccccattagcactggactgtgaaacaatggcttacatctgtaaagggatcaatgcctctattcagaaatcacaggagctcaacgcaggaataaaaagtgatctttattcccaagtgtcaactctaattgattggcagtggctttttggagaactggactgcactgaaaaggacttgaaggggtttggagtagggaaatatgccattaactggttagtgatgtttgccagaaggactaggttatggagtttattagggcaggactggcttatgcctgttgtatttcctggtctgttccaatacytagaatggtgcccagcacatggcacataaatatttgtgaaaggaatgagcattggaggagaggaaatgatgctatgaaagctaagcgtttgccatccctggtagagatcagggaagaatgagaaatcctaggaagccctgcagaatagtctttttaggtgttgggtctacttcttatctccagcaagttgctcctagatccctaccttgtccttccaagccaagggaggagcagca

SEQ ID NO: 511273 - DNA, 638 bp, Homo sapiens
ataggtattcaagaccacttcagtgtgaatagtctaaacaataatgccaatggcttccaaacgtctacagtggtagttgctgcttttggggtctcatttccccattagcactggactgtgaaacaatggcttacatctgtaaagggatcaatgcctctattcagaaatcacaggagctcaacgcaggaataaaaagtgatctttattcccaagtgtcaactctaattgattggcagtggctttttggagaactggactgcactgaaaaggacttgaaggggtttggagtagggaaatatgccattaactggttagtgatgtttgccagaaggactaggttatggagtttattagggcaggactggcttatgcctgttgtatttcctggtctgttccaatacctagaatggtgcccagcacatggcacataaatatttgtgaaaggaatgagcattggaggagaggaaatgatgctatgaaagctaagcgtttgccatccctggtagagatcagggaagaatgagaaatcytaggaagccctgcagaatagtctttttaggtgttgggtctacttcttatctccagcaagttgctcctagatccctaccttgtccttccaagccaagggaggagcagca

SEQ ID NO: 511274 - DNA, 616 bp, Homo sapiens
cacgttatagactatcttctggaatttgtgattttattcatcattatgttatcaacactcatttaagttattttatattgccatagattattcatttttactgctatgtaatatcttatataaataaattgcaatttggttttccattttcttctcaatggtcattaagttgcttccacttttttgtaattacagagctactataaacagtcttcaaataagtaccttctgcaagaccatgagtgaaggctcttcagaacaaagtgagaatagtataagccatcaggccttctctttattttggtagaggatttactccaccaattttatactcctcccaagaaaaagcattccaagagtaactagaatatgtaaattcatgtttcctacctcctacacatgggctaccttttgagcactgagacaaaataaagcaacaaagttgctttatgactcaacttattgaaaaaaatgaggaagtaccaaccccaggcacaccccagtaatatatatcatgatatacgtcccamaaggacacacgtaaattcaaaatggagtgttaatacttacaaatcagcaacttgagagtgatgaaatgttgagtcagttcctattt

SEQ ID NO: 511275 - DNA, 474 bp, Homo sapiens
aacgttggagaggggattctggtgggaaagctttcttctgaatcggcgaaggtttttgctgaaattgggaagtcactttcatatgttargctcctattgtgtgcagggaaggagaggtgtcttctgttaagagagttttcagtagttgagtagttggagaatccaaggggcgatggggcgggggatccttcctagacttttcactgctagttaggagtggtttaatcttgcctgcaacaccggacgtaagtgcaggacccatgtttcagttgcatgcatagagtaaggaatgcgcttctggcacttactggtggtttttgtgcctttcctccaccttgagatcgttcctcttcctcctcaccgaagtttggtctcctttctttactgtttgtttattctgtaagctgttactggggcccactctgctggcacggtgcttggcacctgagattaaggataagtgaggcagaacct

SEQ ID NO: 511276 - DNA, 547 bp, Homo sapiens
tgcccgcgccctcccctgcccgcagaggtgagcttcctcaattgctcgctggacaacggcggctgcacgcattactgcctagaggaggtgggctggcggcgctgtagctgtgcgcctggctacaagctgggggacgacctcctgcagtgtcaccccgcaggtgagaagcccccaatacatcgcccaggaatcacgctgggtgcrgggtgggcaggccccctgacggggccggcgcggggggctcaggagggtttctagggagggagcgaggaacagagttgagccttggggcagcggcagacgcgcccaacaccggggccactgttagcgcaatcagcccgggagctgggcgcgccctccgctttccctgcttcctttcttcctggcgtccccgccttcctccgggcgccccctgcgcacctggggccacctcctggagcgcaagcccagtggtggctccgctccccagtctgagcgtatctggggcgaggcgtgcagcgtcctcctccatgtagcctggctgcgtttttctctgacgttgtccggc

SEQ ID NO: 511277 - DNA, 575 bp, Homo sapiens
tgtactgactttgttattttgatgctatttaattactgttgtaaaataaatcaaacaaacccacatcttaatgttattaagaggaaagacttttagtataaaaaagtctggctggggctgggtgcagtggctaacacctataatcccagcattctgggaggccgaggcgggcggatcacctcaagtcgggagttcgagaccagcctgaccaacatggagaaaccctgtctccactaaaaatacaaaattagtcggrcgtggtggcacatgcctgtaatcccagctactcaggaggctgaggcaggagaatcgcttgaacccgggaggcggaggttgcggtgaccgagattgtgccattgcactccagcctgggcaacaagagtgaaactctttctcaataataataataataataataataaattacttaattaagacgtctggctgggagcagtggctacacctataatcccagcactttgggaggccaaggcaagcaggtcacctgaggtcaggagttcgagactagcctggccaacatggtgaaactgcgtccctactaaaaatacaaaaat

SEQ ID NO: 511278 - DNA, 581 bp, Homo sapiens
cagctgggacttaactacctatttatgtgactctaaagttgacaccttttcagccatcctcagttgcttttgcagagatgcaagaggcccaggacttcacagactttggaggaagagaaatgtgcatgggatcagtgtaacagcaaggcctgggsgaaggagagctgggctctggaattggcttgccatgactgagtctgggcaagtccttgccctctctgacccgccttggggtgctcctctgaaaagggggtggataataacagcccctgctttagtgaattgttgggaagatgccaaaagatgatgcaaagaatacacataacatatgcctgcacagagcaggtgccatgtagctgctcttgttacttagtagaatagtgggatggtctaggggcctggagcatcgaggcttgagagctcctcaggagcatggccaagctgagccaccctgtgtccctagctcctggcacaaggtctggcacagtgggcctccctgaagatgtggaactgaatcgtgtggaagaggcgcttgcccaggctgagcaggagtggagcaccaggggaggacaggggaactg

SEQ ID NO: 511279 - DNA, 581 bp, Homo sapiens
cagctgggacttaactacctatttatgtgactctaaagttgacaccttttcagccatcctcagttgcttttgcagagatgcaagaggcccaggacttcacagactttggaggaagagaaatgtgcatgggatcagtgtaacagcaaggcctgggcsaaggagagctgggctctggaattggcttgccatgactgagtctgggcaagtccttgccctctctgacccgccttggggtgctcctctgaaaagggggtggataataacagcccctgctttagtgaattgttgggaagatgccaaaagatgatgcaaagaatacacataacatatgcctgcacagagcaggtgccatgtagctgctcttgttacttagtagaatagtgggatggtctaggggcctggagcatcgaggcttgagagctcctcaggagcatggccaagctgagccaccctgtgtccctagctcctggcacaaggtctggcacagtgggcctccctgaagatgtggaactgaatcgtgtggaagaggcgcttgcccaggctgagcaggagtggagcaccaggggaggacaggggaactg

SEQ ID NO: 511280 - DNA, 642 bp, Homo sapiens
gctggtgcttgtgccaggccaccacctccagccacctgctcagttcctgctaccgcaggcccagcagagccagccaggtaaggcccccaccccagatggcctccctgacgcctccacagaacttcctcaccttcccctccccctcaccctgtgtatttccccttgtctytccaggcctgctaccgacaccaaatctattccagctacctcagcaaacccagggagctcttctgacctcccagccccgggccgggcttcccacacaggtgagactgtccattgagtgcaccaggccaggccagcagcaaggcctgctgaaagctgggtaaacgggggtgggggatgagtgagagtctcctttccatttgacccagccacactctgccagtgatttgctgtgagacctcaggcaagcccatctccctgtctgggtcagcctcttcctctatagaatgaggggagctggcccagacaagtggttcttaaccctttctagtacatgagctcctttgagaatatgatgaaagatttagatctgatccccattcccccaaaatgctcatgtgtaaaaacacacaaaattgcaaggggctgcaacctttaggctgcaaagtcctcgggcctcttccagcactgcaacgg

SEQ ID NO: 511281 - DNA, 505 bp, Homo sapiens
tcaggctgaagcccagatttgtcctggggtctaggaccaggaagggttggattcagtttcaggatgagcttgggcgagggaactgttggagatgagatggctggaagtcaggactaggggacattagactagagtggatccgattagaagtaggagcccagcagtcatgaagaccaggggtccaatcagggcacatctgctgtcttgctgtgcttttggggaggtgacagtcccttcgtggagcctcagtttcctcctctgtaaaacggggtaatattagcactaaccgctaatgtgagctgtgagtcatatctagctctatgcttggcactggtgagcactcgcctttctgtgaaaagtatcaragcgctttgaggacaggcatttgtctccgtgggtttatgtgcttgctgcctgccaccctcccttggccacctcctttcatttcctgggcctagggagctatagaatggggttgtattacaggggtggacttgagactgca

SEQ ID NO: 511282 - DNA, 490 bp, Homo sapiens
gccactggtcttattccagagctcatttgaccttcctcccactcttgttggagaagggtagatattcagttagtagcggagcttgtaagactcagaaaattatataccttcatctccctaccctttgtgctgatttctctgttttatgataacaattttaaaaactgatttgtactaatattaccaagggttaggattagaaaagcaatctttctgcagattggtcaatsataaaatccattgtcctttagagtctgtttgttaagtagtgtccaatgtcaaagcctggccagatgtcctatgccgataacatagaaaatactcaggtttattgtccactcagaagccatgggcatgaatcacatatgggcatctggtagcaacaaggctgtaactggcttattgaacaggtgagactcaggagggtgtaagcagaaaactatttatttgatctcatatttcccctcaattctgttctatcagatatcat

SEQ ID NO: 511283 - DNA, 578 bp, Homo sapiens
agtcttatctgtttctcaattgcattggtaccaaaaatgtttggttactggtttgtaataaattgctaatacaaataagtctagaatatactacaagagcaaaaaccataatattatccatatttttatttatctagaatgtctcttacttagtttttagatgcaggagtcaaatctcaagaacgctaagtgacttgctaaaaagctctcagctctgacatggaatgagtatgagtaaaatccatgtttctggatgtctagtcaaatattcttctcactcactccatgtaatcatgtactgattaaaacataatggtcaaatgaggttatgtggctaaaactgaccactgaaggcataagagacatcaggatcttactcttgagacatcaggatcattctgaaaaatgctgctaagcagatttaatgtcaatcaacaatcagagccaatgtccatttgaaccacaaaaaayagattatctgaaatgggccttggctcagtatttaagtggtattcatgcaattcagaaatggctttggtgaaatctaatgctaagagactactaacaactcacagatc

SEQ ID NO: 511284 - DNA, 478 bp, Homo sapiens
aaaggcttccccaaaattaaagcctctactgctgggcttctccctggcccacccctaggtgccaaaccagagtatggcaccaagcaggagtctcagtagaacactggccaattcaacctcgtcagactcatccgaataaaatagttccaatgaaagcatggatgcagtctctcacctaatctccatgccatctccacgctggcccagaaccatttccargttgtttctaccaggacaatcaaaacaataatgtttaggtcaaaatatactaaattgcaccaaacctaaatgggacagtgccacaccatcaccaaaacaaacactgcaggaaaaaccatagcagaattatgggatcttttagggaagagcttgcaaaccatccgtactttccctataaagatgaataaaattctgttggcacaaactggcccaaagctaaccaaaatctaatttattcttatatttttaccctttagtt

SEQ ID NO: 511285 - DNA, 478 bp, Homo sapiens
aaaggcttccccaaaattaaagcctctactgctgggcttctccctggcccacccctaggtgccaaaccagagtatggcaccaagcaggagtctcagtagaacactggccaattcaacctcgtcagactcatccgaataaaatagttccaatgaaagcatggatgcagtctctcacctaatctccatgccatctccacgctggcccagaaccatttccaggttgtttctaccaggacaatcaaaacaataatgtttaggtcaaaatatactaaattgcaccaaacctaaatgggacagtsccacaccatcaccaaaacaaacactgcaggaaaaaccatagcagaattatgggatcttttagggaagagcttgcaaaccatccgtactttccctataaagatgaataaaattctgttggcacaaactggcccaaagctaaccaaaatctaatttattcttatatttttaccctttagtt

SEQ ID NO: 511286 - DNA, 602 bp, Homo sapiens
ctggcattttaaccatagcaataataatgtaataatgaacataaatattgatttattttaaatgtctggattcttgcttttgtgaatgctttatagcaaatatttatcctccaaaatgactcccttcatgaattctgaagaattttaggttacctttccattcacttgattccaattatacatatattaatatgtatatataacatatccacaaagttaaatgcattgctttgtatgatacttagaatctatctatatctacatataatatttctamtctataatatagcacgtctctctctctctgcctctctctttccttccgcgtgtgtgagtgtgtgtgtgtgtattcaggggattgctgcattgccagagccactaataaatagaatagtttccaaagaaattagtgctttgctgattacttcaaatctttgctccaatattatcacttttaccttagaatcttaaatttgaaaaaattcatgagataattgtttaaaatcttaatgacaaaaatgagatcctgatagttcattgacttaagtccacacatcttcttagtaatagaattgggactgaaactcatgtctgcagagccc

SEQ ID NO: 511287 - DNA, 592 bp, Homo sapiens
ctataaataagtagaaagagaaagccaagggagtgaagtgcaaagaaacaaattgagcttgatcattatttctagaatataacwttaaatatggttattggtatgtagaagtaatgggaaacaaatcaaaattctactaatttgcaaacaaaaccaggagtgtagcttacagaatctttgtctcttcatatcttaaaaccggaaaaggcaataaacagtttatgaaatacacagagccccaggggcaggatattccccattgccaacttcaggtgtagtgtggagcacaacagactagaaagagcctcctattggaagcacagcttaaggagaacaaagacaacggggaatctcacagagaaaaaaataaggctaacaagtgacttctcgatcgccagagcagtaggtcttcaccttcattgcctggctctggaccaatggccactgtgagtttcccagtcttccactttctaaatgagagtcttttgatagtttagatacacaggacagtggattcagatatctttgagccttttggttcttaggttgctgtacaaaaggaactataaaatgatatgatggagaggactgc

SEQ ID NO: 511288 - DNA, 555 bp, Homo sapiens
tgggctgactctgatccactatttgaaactcttagtccttagatgaacatgatctctgatcaacttgcctttgactcaaccttgaccctaatctttttgtattccctgcatctgaactgggcttgcctgtcttcttattctaagattctgctttggcttttcaatcctgtattattttcctttgaatctatagttactagcacactgttgttgctcaataaacattgtgctgaccttggacagtttaaatctattgctcacatattccttctcaattcctctaaccttctatattctgaagcaacatcttttttgcatagttcttcgattacctgattccttgcctttttctctgtttgtgttgtccaggatccatttcggcacattgaacatgaccaggcatggctaggagggacaagaaataccagcgtatctatgagatcagcaaatataccaggcagacttagcaggtgagcagagcataactagagaaaaaccttggcacatacatacccatagtagaaragaattttaaatgcttggcattcaaagaca

SEQ ID NO: 511289 - DNA, 404 bp, Homo sapiens
gtggatagctagccatctctgtcacagtctgtcctcgagaacagtgaggacttgcctgccctggcagcggaggaggttctctgggggggtgaccccttattctgtgtctccctgaccttggctttgcccttcaacattgcttgcctgtcattctccacaaccaccgacagggtgttgagagtctaccctccttagatgctgactcgggcttgagcaatcatgggcttttgcagtccakccttgcaattttgttggtgataacaattccttcagaaacatagtaggcttcatctttagtcagttccttgagccgtgaccacatccaaagttcctttcttgacagagttatgaagtctatcttccatacccttctgtttcccattcatttaaaatgaaagtggctg

SEQ ID NO: 511290 - DNA, 625 bp, Homo sapiens
tatgctcaagttcctgatataaaatgccttagtatttgcgtatagcttatgcgcatccttctgtatactttaaatcatctctagattacttatagtacctaaaacaatgcctacacatcacttcatttgtgcagatttaatgtgtagacacactggtaaactcaagttttggtttttggaactttgtgtaatttatcccccygatatttttgatttgtctcttttctccccagtatttttgacccgtcactggttgaatccatgaatgtggagctcacagataataggactgatggtagttatattgtaataatcctttaaagtggatggtgctgactcatttacatacagttgaggaaatgaaggcttagaataatttattcagccttttgttcactattaccccccgagaagactttagagatttttcctaatctaactctcatgaaattttaataccacaaatacactgtatagatccgattatgtactatatgtatatctctgctttataaaaaaaaatacaaataagattcccaccccaccctgaccaaatttcatctactctgtggagctctgccccagttgaaaatggattgtttagaagggcacataaagattgagt

SEQ ID NO: 511291 - DNA, 625 bp, Homo sapiens
tatgctcaagttcctgatataaaatgccttagtatttgcgtatagcttatgcgcatccttctgtatactttaaatcatctctagattacttatagtacctaaaacaatgcctacacatcacttcatttgtgcagatttaatgtgtagacacactggtaaactcaagttttggtttttggaactttgtgtaatttatccccctgatatttttgatttgtctcttttctccccagtatttttgacccgtcaytggttgaatccatgaatgtggagctcacagataataggactgatggtagttatattgtaataatcctttaaagtggatggtgctgactcatttacatacagttgaggaaatgaaggcttagaataatttattcagccttttgttcactattaccccccgagaagactttagagatttttcctaatctaactctcatgaaattttaataccacaaatacactgtatagatccgattatgtactatatgtatatctctgctttataaaaaaaaatacaaataagattcccaccccaccctgaccaaatttcatctactctgtggagctctgccccagttgaaaatggattgtttagaagggcacataaagattgagt

SEQ ID NO: 511292 - DNA, 519 bp, Homo sapiens
tgggtggattgcttgagtctaggcgttcaagacagcctggccaacatggtgagacccygtctctaaaaatataaaaaaaaagaaaaaacaaaaaaataaaaaagaagagcagagactatccacatgttttgttttttcattatcatctctatgaatggctggttgctcaatgctcacatacggttgtgtgtcagtatatgtgaactgctgatactaatatgagcttactgtaaaaagtgtaacttccatgtgttagatagaagatttgagaaatgtatacaggagtaagccaacattctataacatcttagttctgagagaagataaagagaatatcaatgtggtacttagggttggccaactatacccctatttagcctatgcctggttttgtaaataaagttttactggaacgcaggcacaagcattcatttaccacacattgcacacggctgtttctcagaattgcatagctgtcacagcgagcacaaggttcacagggccaaaaatatttataaa

SEQ ID NO: 511293 - DNA, 621 bp, Homo sapiens
aattaccctagactcacattcattttattattgacaaggagtcacgttctgtaagagatcctgatggttgtcctctgtaaattttccttgaaatatagtcatgtgctgcgtaatgtttctgttactgacagaccacatatgtgatgatagtcctaaaatactataaaacccaccatactttaattgtaccttttctatgtgtagatgtgtttagataaataaattcttacattgtggtaaaattacctgcagtattcagtacagtaacatgctgtacaggtttgcaccctaggaacaataggctattycatctagcataagggtatagtaggccataccatgtaggtttgtgtaagtacactctattatatttgtgtgactaaatctcttaaagacacatttctcagaatatatctctgtcattaagtgtcacatgcctgtatatggattttccattgctatattttgtaaaataatgagacacaattcacatgcaatgaaatgcacgtatcttaagtatataatctgatgaactttgagaagtgtatacacccaggtagccacacagtagtgcagaatatttctattatctcttcctgttctcctcccaccctacaactc

SEQ ID NO: 511294 - DNA, 576 bp, Homo sapiens
ttgacaagaatctataaattaagaaaagctaaagtgtaaatacatgtgatacaatttaactattggggtgcatcttcttattcatttacactgacttagtaatacatgttccatcaagagttttggaagaacctttaggaaacttaggctgttaagtatccctccatattcatmtttttttttcttttgagacgtagtttcactctttggcccaggctggagtggactagcgcaatctcggctcactgaaacctctgcctcaccgggttcaagcgattctcctgcctcagcctcccaagtagctgggattagaggcatgaaccaccgtgcccggctaatttttgtacttttagtagagatggggtttcaccatgttggccaggctggtctcaaactcctgacctcaggtgcttcacccacctcggcctcccaaagtgctgggattacaggcatgagccaccgcgcccagcccatactcatctttttagaaaagtcggaattggattggatttgatatcttttctaaataataaattttgtgcatccaattttgggctcaatttagccaatcatgca

SEQ ID NO: 511295 - DNA, 595 bp, Homo sapiens
caatgtcattgaatttggtctttccttgccttaattctccrtatttcccttttctggatgtcaggggattggatagggagcagagcccaatatgaacatgtttttccaaatagaacaagattcgagagagacgtctgtctttatatgacttctttctttgtcattatcttctgcgcaagtctggtatatgaacccaatacaaacatttgtgttggtgagtgtcttagtctattttggtggctataacagaatacgagagaccaagtggcttataaaaaacagaaatatatttctcacagttctgatgtctgggaaatccaagatgaaggcattgtgagggcctgcttcctggttcatatatggtgacttttccctgtgtcttcacatggtaaaatggggaagacagctctgtgagatattctttataagagcacaaatcctattcatgaggggtccacactcataatctaatctcttccccccacccccgccgccgccaaagtccccatctctaatagcatcacattgagggttagggttttaacatacaaattttgagggggacataaacattcagtctttagcagtgagattt

SEQ ID NO: 511296 - DNA, 610 bp, Homo sapiens
aacaataagaacacatggacacaaggaggggaacaacacacactggggcctgtcagggggtaggattgagggcgggagagcattaggaaaaactcctaatgcatgctgggcttaatacctaggtgatgagttgayaggtgcagcaaaccaccaggacacacatttacctatgtaacaaacctgcacaacctgcacatgtaccctggaattttaaattaaataatcctttccaaaactgcttctgtaaaccttcaacatttttctcatgaagtttatgtgtgagtatgttttttaaaaaaatcaaatcctgttaaagagatgagtttcaaatctgcatggagctagggtgagatcagggcagtgtgcaaagtaggggttaaaaatggaggtaacaaaggggagataagtactagggatctttcaaccatcacagtgaaaacttttagtctgttgccagctacagtctgatgagcagtttaaattctaatgtactgccaggttagacacaaaaattgttccagggccagaagttggtttgagcccataggggcagagtggaatggtttgttatgttaggattaaaagaattcagacaaggggtcaaattcat

SEQ ID NO: 511297 - DNA, 427 bp, Homo sapiens
aatgcacctactaggcccaccattggctccctgtcagaattcaagttacattttatgcatgggctagattactttctccaaagccctccctctggataygaattctaaagtgggtctcaaatagagaagggtaggtgatgtataaccacactgccttatgatttccttacaatgaattttagcctaattcttaagttcgttgtagtcattgcctcgtaaatagaaaaatgaagaagagttggtatagttagggtttccatggctcactattaccatggctgcttctctttacttccaaatcctccacaccagaacaaagcaatctcccaatatcttctatattttgtaaagaaacgcccatattagattttaagcactccttttcaatggctaatgcttaattgtttgagctgcaagccattccacc

SEQ ID NO: 511298 - DNA, 492 bp, Homo sapiens
ggttggccattagtctctttggtagtttgccaaatcatacactccagaattaagtgacttcaatgctgatactctgaaaggccttggagtcatatttttatggaatagcattactatattttaagcattctctacttccatagcaatgcttctgcagatgctatatgagaacaggtgtacacacatcagaacattttctcccaaaccatgctattgcttagagatagtctcatgttaagataccaaggcccaaattatggtgctggttccttcaaagaacagagtaacaaccatatatatagcacattctatagcattttaggttcacctctgaaacaaattcacatacaaaaataaacaagtagctttgccaggaaagaaaggtctttcctgttttgaaaaacaagtgatgaatctgtactygctatagactaaatgtgtcccccaaatttatatgttgaaatcctaactcccattgggatggtgttagga

SEQ ID NO: 511299 - DNA, 611 bp, Homo sapiens
ttgccctcatcatattgcaccagggcagttgatgcaagaggagttggcagggttattgctgtaagtaattgcctaaggtcagcgttagaaatcttgactttactttcatgagctaaacaaataaacatagatgttgacagcttaccagggtggattggagtgaggctgtggagatattctccttctctctaagtccagcaccatattttaccaccttccagatacacaaagaacagaaatccaaaaaagtaatatccttgcttataatgcagacaaatgaaatggcttggcctcttcccatctcgggaaasttctaaccgtgtgactgctaagggcacagatgaggaggcaggagagtgatcgaagagacacacctacattaggggcctcataacatgcagtgaccagttcattagtgaaacttcctccaatgagtttcctagaattttaccaattagattagtattcattctcactgcagagcatgggatagaattttacagggaaaaggtgctctctgtatgagaaaaccactctattgtaattctgtgtaaatatgtgtataaaacatttggaaagacgttcccaacatgaaaactctgattatctat

SEQ ID NO: 511300 - DNA, 611 bp, Homo sapiens
ttgccctcatcatattgcaccagggcagttgatgcaagaggagttggcagggttattgctgtaagtaattgcctaaggtcagcgttagaaatcttgactttactttcatgagctaaacaaataaacatagatgttgacagcttaccagggtggattggagtgaggctgtggagatattctccttctctctaagtccagcaccatattttaccaccttccagatacacaaagaacagaaatccaaaaaagtaatatccttgcttataatgcagacaaatgaaatggcttggcctcttcccatctcgggaaagttytaaccgtgtgactgctaagggcacagatgaggaggcaggagagtgatcgaagagacacacctacattaggggcctcataacatgcagtgaccagttcattagtgaaacttcctccaatgagtttcctagaattttaccaattagattagtattcattctcactgcagagcatgggatagaattttacagggaaaaggtgctctctgtatgagaaaaccactctattgtaattctgtgtaaatatgtgtataaaacatttggaaagacgttcccaacatgaaaactctgattatctat

SEQ ID NO: 511301 - DNA, 576 bp, Homo sapiens
aaaagtaatgaaaccaggattttaagtcaaagaggatttaagtctgagtttgcaaacagcattatttctcctcattctctgcatatatgcagtttatcttattggaagaggcacaaggagcttcgtataacctgtttttttcttgcagggaggacatagcttatggtttgtcagtggtatcctttgataatgcttctgaaggtctcccaggccaacaccttttcaagttggtggaacttctgtagaaatgtcgctgaggaggtcggaataatgtgatacagcatctgggaagttcgtctgtttcctcatcagctctttgactctttcttagaaaggttcatcaaagactgttttttttttttttttttttcctagaaaacatgattccttatatttctctgtagtaaataagagtctccttttaggttcctttattaaataagagtctccttttagattccttttctggttccttttctagtctgattcctttcctagtctcstttgctggttccacgaaggaactcttttcaaggaaaacagtgcctaagaccaggggttaggaataatagaaaa

SEQ ID NO: 511302 - DNA, 211 bp, Homo sapiens
tagggattctgtctaatccaaaagaattgaagtgagcatttgccaattacataaagtcaaatatatgtcttagatacatgaaatattgascaatggaagaaaagcattctacttcaagcagcttttgattccattctttatggtttttaaaaatttatttaaagtctctaaaaaaactggtggagaaaccatttattttaacatggttaat

SEQ ID NO: 511303 - DNA, 716 bp, Homo sapiens
actagcttctcaccttggcaaacgtataygtaccctataggtttagggtttattgtgtcaacaaattgataaatgccataaattcaacatgtttcttaacaacatctctaatatatacttcagattcatttattagttgctaaaatgacagatttcagtgctgagaatatattggctgctgctcacatgactaaaatcctgcaaatggatttgaaacacctcattatttcagaaaccaaggacttgattaatatctctttcaaagataaatctccagaatcttcacatatagccagaactcaggcacgctgcatactagttggaaacatggaaaatattaagtatagacaactgctggttggaagactagagccaggatagctcttggagacacataagtgccatcccacactccaagtccctgaagtactgggatgatgcaatggaaatatccccagaatgggagatctagtcactttcacagtaacttctgtctgtagccccttttcattctcaaagttcccactagagaagttagttgaggcgtagacaaaacagacagggagagctcttatctgttaagaattatcacatttaggtcacaatatcactgaaagcccaaattttctaggaagggagtaaaataaactcttgctgctcattaaaactccccagatatttttccttaaaacaaaagtgaataaacagaggcagcc

SEQ ID NO: 511304 - DNA, 520 bp, Homo sapiens
ctgggtgactccactatattctgattgatctaataaaacactttcaaatcaagttctttggtattagcacaagtaacacaaatcgattaaaatctaagctaaccattatcattttttaccatttgtgttggctcttcatcagatcttagctttaaatgctaaaattcactggctctgagataaccacaaatcagtctctgcttttattcttaaaatactctttaattttttaaaaggcaaccaacaagagttggggatctcctttagatctgtttgttgaaccaccaattcattagtccagtgaacaaaaatgtatgtagttactgctgtgtggcaggcattcgtctaggcacagaaaatcatgggatgataaaacatttctgtccttacggagcttacattttagtgaacagtgacaggaaatgaagaaaatgactgttaatagtagttaactaggaggctgctttagattgggtggacaggacttgyccctttaaattacttaatcttcacctgaata

SEQ ID NO: 511305 - DNA, 628 bp, Homo sapiens
aattttataatagcttatatataacaaatataaccttcctctattttgacaagatcaatcagccataaactatcttacagatttctctttttaagctttttttattattattattttaatatagagatggggtcttgctttgtggcccaggctggtctcagactccagggctcaagtgatcctcccacattggcctcccaaagtgctgggaatacaggcgtgagccaccatgccccaccccagatttcttaatgcagtttaacaactattcattatatatctactatatgccaggcattgtgctaagtgctaaggttacaaagatggatcaaacagtgtcaagtaaagaaacyagaggcacagacatacaatagaacattgtaatacaatgtggttaagtgttaataatcaggatgtgcacaggtgatatggaagcccaagggtaggtacctacctctacctactggggccagaaaagactttccttccccaagaaactagaatttgtagtgggtcctgaggggcaaataggaataggccaggcaaaaaggagaaaagacattcagagggagggaacggcatgaataaaggcagggggccaagaaacaacctagagtacatacagaat

SEQ ID NO: 511306 - DNA, 560 bp, Homo sapiens
gaacaattttggatgccaatgtcaactatttattaaatattaatataatttattttatttctaagacaaaaataaaaataaattcataattttgttctcacctgtcaatgaattgtcttatgccctcttggcttgtgagcacccacattggaatccattaattagatataaattgtgaattgccacaaaaaaattaacaaagcctatatacaaatctattttttaaatttttttgccatcataagataatatgtcaaaacagttgaaaaataaattctaagcaataaactattccagttgataaactgttatgaatacagtgggtctcgttatctcagccacagtattgattacaaaccttgcaataatagtcacaagcatgaaacaagaatagtcggtgctagcatggaaattgaggaaaagcaatgttaaaccaatgatcacttctgctagttaggagacagaagtagaaatttatcacagtgtaacaaaaccacatacagtattatcttaaatagttgccacatcagcagagarccaataatatttatttgcagagt

SEQ ID NO: 511307 - DNA, 429 bp, Homo sapiens
  misc_feature (1)...(429): n = A,T,C or G
taagtaggcagtaaagaatggtgagttttagaggacagggcagatttaaagacactgatttgaagttcatcagcacatgggtagtatgatggcatagaggtagagggcatcatctacgggaaatttacagataagaaaaggataccaaggcctgaaacaccagcatcatggaaggcatgaagaaaagagaggccccaaggaaaaaaaaagggggkggggggaagggatcagaaacacagggagaaaagtgcttcagaagccaagaggaggagttgtaaagagggatgaagtagtcaacagcacccaatgctgctaagagtcccaataaaggactccaggatggnaagttccctaagagagggaatcaagtctctatcatcatccctgaggggtatgcaggcaggaggctccatgtgtgagtttcaagtc

SEQ ID NO: 511308 - DNA, 495 bp, Homo sapiens
catcttaaagatcattgatctgccattaatctatcaggctggcrgcttctgggaaatgcagtatttggtaaaaccaggaaattccatggtcatattgccacttctgtaactcttttgctacaaattttgtcccttggtctaatgtgacattatgtgctatgttagtttgctagggctgtaagagagaatcagtttcctgcctatcacttagcttctagtggtttgctggcaatctttagagttctttggcttgtagaagcgtcaccctaattcttgctttttatcttcacccggtagtctccctgtgtttatatctgtgttcaaatttcccttttttataaggacaccagtaatagcagtaatattggatcgggggccaccggactccagtatgacctcattttaactaattacatcttcaatgaccataatttcaaataaggtcacattctgaggtactaaggtttagctcttcaacatacttttgtttggggg

SEQ ID NO: 511309 - DNA, 495 bp, Homo sapiens
catcttaaagatcattgatctgccattaatctatcaggctggcggcttctgggaaatgcagtatttggtaaaaccaggaaattccatggtcatattgccacttctgtaactcttttgctacaaattttgycccttggtctaatgtgacattatgtgctatgttagtttgctagggctgtaagagagaatcagtttcctgcctatcacttagcttctagtggtttgctggcaatctttagagttctttggcttgtagaagcgtcaccctaattcttgctttttatcttcacccggtagtctccctgtgtttatatctgtgttcaaatttcccttttttataaggacaccagtaatagcagtaatattggatcgggggccaccggactccagtatgacctcattttaactaattacatcttcaatgaccataatttcaaataaggtcacattctgaggtactaaggtttagctcttcaacatacttttgtttggggg

SEQ ID NO: 511310 - DNA, 114 bp, Homo sapiens
aatgttaattgaatgcaggccccarggagaagccccttgggcacgcatgttaagagatgaaatggtgaagtatgacattctgggggcacatgccactggaaaaagggaaaaaag

SEQ ID NO: 511311 - DNA, 630 bp, Homo sapiens
ctgcttctcaatgttgcataactgcaagcactccagtaggagcctgcagcctgctggggatgccttggtggtatgtcatcacagaacttgtaaacatatcatgccaacactgttctttaccaagaaacttaaaatatcactgacttgcctttgacaggataaaattccctgttttgaggcatttttcctctatgactaaattctcctcmcaggcctacataggagtaggtttaagaaaccttccaactcacaggaacattttccagcccagcccaaccccgcaagctgcccttcccacccaggcccataggggcgatgatgatggaactgctcatactgctcatcagtagcctgaagaagagcaggactcccaagtctgtggtccggatgctcacatttatgaaaattcctctcctgcctgatttcccacagttcttggtcttcaagactcatgcacatctgcacagcagcatctgcttccttggcatgtggctgcaatgtttagattcctgtagtgtacggatgaggcatacgaatcaaggctggttaatgctgcaggcaagaggcaaagcacagatactagtcagggagtcaggcagcctgggtcctgggtgtcattctatactcatt

SEQ ID NO: 511312 - DNA, 630 bp, Homo sapiens
ctgcttctcaatgttgcataactgcaagcactccagtaggagcctgcagcctgctggggatgccttggtggtatgtcatcacagaacttgtaaacatatcatgccaacactgttctttaccaagaaacttaaaatatcactgacttgcctttgacaggataaaattccctgttttgaggcatttttcctctatgactaaattctcctcacaggcctacataggagtaggtttaagaaaccttccaactcacaggaacattttccagcccagcccaaccccrcaagctgcccttcccacccaggcccataggggcgatgatgatggaactgctcatactgctcatcagtagcctgaagaagagcaggactcccaagtctgtggtccggatgctcacatttatgaaaattcctctcctgcctgatttcccacagttcttggtcttcaagactcatgcacatctgcacagcagcatctgcttccttggcatgtggctgcaatgtttagattcctgtagtgtacggatgaggcatacgaatcaaggctggttaatgctgcaggcaagaggcaaagcacagatactagtcagggagtcaggcagcctgggtcctgggtgtcattctatactcatt

SEQ ID NO: 511313 - DNA, 624 bp, Homo sapiens
ctgcaaggtcattgagaggctgaatgactctattgtcatagtcaagtggagtgctcaagatgactgctgagacctctgtttcatgggttcatkgggaaaaagaaggaagacaaatcacaggtttgtctgatcaggctaaaggactggatctcagtgtgttttcaaagcagtggcattggcctggctgattcagtttgtcagcaagacacaataacaagcagatgatatttaagatgtggctaggaactaatatggtatcactaaccagcagttacgagaaaaccctggaaagtagctgagggtgggcaggggctgggatgtagctaagccaaagcagttggggctctagcaggagtggccaaatggaatcagacatccatgcctgtctttaggacaagaatggcacaggcagaggaaaatatggctctgtgatgatttgaatatccttggcttggccctggctcatcagattttaggcctttggcaatgtgattaaatccagatccccactgaatggtgtggctggggctgctcatgcaccttatggccttgtacagatgggctacgatttaggcaggaccaggttgggtgtctttgggctgagcagggctgggaaagaaagca

SEQ ID NO: 511314 - DNA, 492 bp, Homo sapiens
tagccccatactaagagtcatcctccttccctactcttttctaaaaactggataagtgacatttctcttggaaaaaaaaaatggaacctaggagtaaaaggaggcctgggagtgtcatttcctcagtattccaatatttatgcctagcacttttggatgtgaagatgagtgggatagagttgagtgatattatctggtcctgggcaaaaggttctaaatattagwggatttgactcttagatttggtcagttaaattgaacccattggcaccctcagatatgattcctaatcagggctgtctttagggtggattttatttaaatgattaaatttaaatttaaataatttaaactccccactttagagtgaagtgtggggtcctccgtccatatgtatcctgtagatgctgcttctggagtgtcatttctggctcaagatgcacttgatgccaatttccatgtggataataacactggggacagtcaaaccca

SEQ ID NO: 511315 - DNA, 589 bp, Homo sapiens
tgtattatctcattcaatgtgtgaggaagagtggatttgtgggctgccacaatgagtcacttttcattgccattttccacactctagaatgcccataatgtgatgcagaattgttttcccaatgcagtcaaaattctcaagtgtgtgtgtgtgtgtgtgtgtgtgtgtgtgtgtgtgtgtgygcacgtgcgcatgcgcgcgcacgcactatcagactgattgctatgttcatcaaggtcattgattctctcatctatccaacaattgacgtaagattctaaagaagcacccctttgttctagaaatacaattttataagtctgaaaaagccagcatttgcatggtgttaaacttaaaaatctctgtaatcaatgctaatttgacatgatgaaatgcagcactttccatctcaaagctctttgcaaaaattaattaccaattaatctaaaactttagagcattatttattatctgtacactcagaacttgaaaatatttacatttcaaagcatgacatgtaaaactattctattatgttttaaagtggaaaaaaaagttcaaattctcagaaaaggacaaatcacaagta

SEQ ID NO: 511316 - DNA, 602 bp, Homo sapiens
ctgggccactactcagaagtctaggtgagtcgctgtctgagcacctgagaggaaatgcctgtcttcccagaaatacatatgaatggcagtctaattgtgtctagaattgattccttccggtgggttcttggtctcgytgacatcaagaatgaagccacggaccctcacagtgattgttacagttcttaaaggtggcgtgtctggagttgttagttcctcccagtgggtttgtggtttcgctggcttcaggagtgaagctgcagacctttgcagtgaatgttacagctcataaaggtagtgtggacccaaagagtgagcagcagcaagacttattgtgaagagcgaaagaacaaagcttccacagcctggaagggaaccctagtgggttgccgtggctggctcaggcagccagcttttattcccttatttgccaacccccctgccccaacatctgctgattggtccattttacagagtgctgattggtccgtttctacagagtgctgattggtgcatttacaaacctttagctggacacagagcactgattggtgcatttacaatcctttagctagacagaaaagttctccaagtccccaccc

SEQ ID NO: 511317 - DNA, 592 bp, Homo sapiens
cttacattcaccctaaaccacatggaatcttatgcaacaacccaaatggcatctcctccaaagtcctctctgccccctgcagtggccttggctccctgccctcatcccacaggcatgacagctgtgtgcagcctctgattctctaggcaactttaggatccagcactggcttaatccttgatgccttctattctttgaggattttctggacttgatgaagctccttttcagactctcgttctcagctttgcaggtcttagagactcatagagagaagaggtgcctggctcagaatctaagcaggaaatactgaacagcatcttcctcccatatctagatggggaatagggtgggccagctggtaggtcagaaccaaccatgggatcagctctgcctcttattaggtgacattgggtaaattactcattctctctgagcctttctggcctcatctataaaaygaggatatgatcccaacttctgagggttaaattaggtaatgcaagtaaaatactggacactatgcctgttaaggactgtatgttcacgccctgcccccaaattcttatgttgaaatcctaatctccaaagt

SEQ ID NO: 511318 - DNA, 637 bp, Homo sapiens
ccattcagaaatggagagctgtgcttccaggcagccctagtccttcccacacagattgagtcttaattaggaatgtggtcctcaggcctcagggggaccacctctgcacacggtggtgccagggccccaaagcctgtggggctggtggtgaaggaggaatctgaggtttggcctggggaccaggagggtcatstcagccccaggatccatcctgcaacatggcccagagacttgtcctcctcacctggccaagcaggatcacccacaacacgcacactccaaaccatgtgtctccctccaacctgatcacggcaatgccccgtctcagaacccatccactgagaattcacgaccaaatttgagaattaaagcagatagggccttcgtggaagaagaaagtctttctgtttgtctgtctcttgctcagtaaccaaatgcatctagataataaaataacccagagggaaggagcgtcaggaaaatgggtttatttatggtttctagccaggactgcacttaagtttttctgatattcataactagttggggagggaaagatcactgacttttcaagccccatgtcttcattaggcatgtggtccttaggccctgtgggaactgcctctgcaccctgtgg

SEQ ID NO: 511319 - DNA, 646 bp, Homo sapiens
gcagaagggccattcagaaatggagagctgtgcttccaggcagccctagtccttcccacacagattgagtcttaattaggaatgtggtcctcaggcctcagggggaccacctctgcacacggtggtgccagggccccaaagcctgtggggctggtggtgaaggaggaatctgaggtttggcctggggaccaggagggtcatctcagccccaggatccatcctgcaacatggcccagagacttgtcctcctcacctggccaagcaggatcacccacaacacgcacactccaaaccatgtgtctccctccaacctgatcacggcaatgccccgtctcagaacccatccactgagaattcacgaccaaatttgagaattaaagcagatagggccttcgtggaagaagaaagtctttctgtttgtctgtctcttgctcagtaaccaaatgcatctagataataaaataacccagagggaaggagcgtcaggaaaatgggtttatttatggtttctagccaggactgcacttaagtttttctgatattcataaytagttggggagggaaagatcactgacttttcaagccccatgtcttcattaggcatgtggtccttaggccctgtgggaactgcctctgcaccctgtgg

SEQ ID NO: 511320 - DNA, 664 bp, Homo sapiens
tgtctattatataaaacaggtattttttctttaattaagtttccaaaaacaaatttaccatgaaatgatgtttaaatgttttgttgttgttctttttttcaggtaagtgaaaagatatcttctgaagtgttctccagaaactgtgcaggtggcggttctcttagaagaaaaagaaaggcagggatccttgaaatggtaatatttcagttgtttcatatacatagaagtgtctcacatggccagcaaggtgatcattttctcttatgtgcttatacctgtttacttcattataacttgatatggctcaaacctcaaggtctgtgggaattgtttgtttttgtgtatctgcatgagagccactcataccctaatccaaagtttctgcagcccaccctcagtgggaagctcattattcataaattgtttaaaattgaaatgtcattctaaacagatcctacaagaacagacatatacaatttagactgtatagtgcaatatatatatacacrcacatatatgtgtaaatatatatatgtttgtaaccctgttttctttcgtaacagtttcctcttgaatatgaagtgccttacttttcctgtttatggcagtgttatctgtttaaaatgtatttgtagcctgtagactttcagtctaagtgacaagc

SEQ ID NO: 511321 - DNA, 589 bp, Homo sapiens
ctaatcagggatccaactgcacagtctagtcctcgagaataactaagacatcttcagagatttcaggcttgtttttgacagaaagaccacaaagattcagagtcagccacactagtatttattttatatattaaacacatccagagcactaaccatgtaggtggtattttctaagctttccacatgcatcaaatcatgggattttataatctacractctatgatgtagatgctttttttttttttttttttttgagacggagtctcgctctgttgccgaggttggagtgcagtggcgcgatctcggctcactgcaagctccgcctcccaggttcacaccattctcctgcctcagcctccccagtagctgggactacaggcacccgccaccacgcccagctaattttttgtatttttttttttttttttttttttagtagagatggggtttcaccatgttagccaggatggtctggatctcctggtctcgtgatccacctgcctcggcctcccaaagtgctgggattacagatgtgagccactgcacctggccagatgctatatctttatccccttttctttatacccc

SEQ ID NO: 511322 - DNA, 589 bp, Homo sapiens
ctaatcagggatccaactgcacagtctagtcctcgagaataactaagacatcttcagagatttcaggcttgtttttgacagaaagaccacaaagattcagagtcagccacactagtatttattttatatattaaacacatccagagcactaaccatgtaggtggtattttctaagctttccacatgcatcaaatcatgggattttataatctacaactctatgatgtagatgctttttttttttttttttttttgagacggagtctcgctctgttgccgaggttggagtgcagtggcrcgatctcggctcactgcaagctccgcctcccaggttcacaccattctcctgcctcagcctccccagtagctgggactacaggcacccgccaccacgcccagctaattttttgtatttttttttttttttttttttttagtagagatggggtttcaccatgttagccaggatggtctggatctcctggtctcgtgatccacctgcctcggcctcccaaagtgctgggattacagatgtgagccactgcacctggccagatgctatatctttatccccttttctttatacccc

SEQ ID NO: 511323 - DNA, 589 bp, Homo sapiens
ctaatcagggatccaactgcacagtctagtcctcgagaataactaagacatcttcagagatttcaggcttgtttttgacagaaagaccacaaagattcagagtcagccacactagtatttattttatatattaaacacatccagagcactaaccatgtaggtggtattttctaagctttccacatgcatcaaatcatgggattttataatctacaactctatgatgtagatgctttttttttttttttttttttgagacggagtctcgctctgttgccgaggttggagtgcagtggcgcgatctcggctcactgcaagctccgcctcccaggttcacaccattctcstgcctcagcctccccagtagctgggactacaggcacccgccaccacgcccagctaattttttgtatttttttttttttttttttttttagtagagatggggtttcaccatgttagccaggatggtctggatctcctggtctcgtgatccacctgcctcggcctcccaaagtgctgggattacagatgtgagccactgcacctggccagatgctatatctttatccccttttctttatacccc

SEQ ID NO: 511324 - DNA, 353 bp, Homo sapiens
ccatttagcattcttactggrtaagataattgggaactagttttcctccaaaatatgctgatcagtcacagtcacaaggaggagggtatgttcccagaccaaagaagagggttttaaaataatttatctggcaacactctgagagagtaatatgttggttttcagagacctatagggctaagaagatgtaactgggaaccagaagggggaaaagaaggaacttgattttttagaaacttgtgggtggctcaaactagtgttgttcaggaggtgttcaacaattgcttgaggaatgaagtaatgctatctgaagcttataaagtagaggagcaaaaaaatggcagggattgatg

SEQ ID NO: 511325 - DNA, 610 bp, Homo sapiens
agtcactgctatgtaacctaggaacaagatgtcattactatgtatgcagtctgggagctgaatatcaagctctagacctacctgtgaacattcaaacactcatttccaaactgagtaaaatggtatctgcctctgatgttgctcaattcrttaaccattattgccatattctcactgtattgtgataataaataaaatatatagttgtgattctcaaaagtttcttgaaactattcttaggccataatgtttacagggaaaaattatgagaagaaatacactcataaatgtttgaaaaatcttgcaccatataaaactttataaatttgtcttgtaatacttaggctatgttttaacttccttattttttccagggtgggagaaggaatgttctctggagaaatctgtatgatagaatagtgaaggtaactggcctgaactacagctcttgagccatctggtttcaccttcagggaggtaagtgcactgagaagtactagctaagtgtgggcacggacattggaacctcaagatgcaaaagaagagatattttcttcacatttgtaggcagactcaacagtatctttaacaggttctttgaaaaaatatt

SEQ ID NO: 511326 - DNA, 515 bp, Homo sapiens
taaaaaaactatatcatctagtttgcaacaaacttgctgcagttaaagatgctaattgcaatgattcatcataattcattgtcaagatttgacataaaatagctgggatgatttatttttagtttacatagttatatattgtgatttcagtaaatgttcactcacattttacaaaggctyattatttctctactattattattatgctctgaaaatttcaaataatttcctgtttatttttcattgtttacctgtctagtattgtcactggtaaatgtgaaatagggtgggtttttgttttcttttcttctcactgaccttatcttttacatattctgattattcttgaaccagtagcttaagtatagatgcaaaagtgatgagagtttgacttagctttggcttttattatcagatacccacaaggaaataaagctttgatctacttccttggaaagttaatcccagtgattatgtggagatgtgtgcagtgttagctacagggatatacatct

SEQ ID NO: 511327 - DNA, 625 bp, Homo sapiens
gctgccttcccagaggagagaaggttgagaattggtgagaaagcttcctggctctttgagggagctgcttgcagagtgatctgggacaaaaggcatccttgggaatgtgaggctttttttcttttyttttttttttttaactacagcagtctccaagccatccatcactcctcttttgaaccactggcttagcacagaacaaaatgggaagtgattgtgttttcttgaagagctgtttctgaatgtgatggcttcctttgaagcccagtcaaagggatgtttttattttgtttttgttttcctgaaatcccaccagtttccctcacctcctacaagacctcacaccacagcctaccatcatgcctgatacctaagtagctgccttcacagctaacaaaagacaaagaaaacacagatgcagattattctaaaggagtaagttaaagaaatgaaaggggcttcctttttaagttcaaatagcaaaagcaactaatatactttggaaagcacacgcgataacacaacacccaaattcacttggagaggttccctgtgacatgctctaacaagtcagaaattcagtaagtgtagttatatcctgcaagtgattttgaaaaggtgtaga

SEQ ID NO: 511328 - DNA, 625 bp, Homo sapiens
gctgccttcccagaggagagaaggttgagaattggtgagaaagcttcctggctctttgagggagctgcttgcagagtgatctgggacaaaaggcatccttgggaatgtgaggctttttttctttttttttttttttttaactacagcagtctccaagccatccatcactcctcttttgaaccactggcttagcacagaacaaaatgggaagtgattgtgttttcttgaagagctgtttctgaatgtgatggcttcctttgaagcccagtcaaagggatgtttttattttgtttttgttttcctgaaatcccaycagtttccctcacctcctacaagacctcacaccacagcctaccatcatgcctgatacctaagtagctgccttcacagctaacaaaagacaaagaaaacacagatgcagattattctaaaggagtaagttaaagaaatgaaaggggcttcctttttaagttcaaatagcaaaagcaactaatatactttggaaagcacacgcgataacacaacacccaaattcacttggagaggttccctgtgacatgctctaacaagtcagaaattcagtaagtgtagttatatcctgcaagtgattttgaaaaggtgtaga

SEQ ID NO: 511329 - DNA, 625 bp, Homo sapiens
gctgccttcccagaggagagaaggttgagaattggtgagaaagcttcctggctctttgagggagctgcttgcagagtgatctgggacaaaaggcatccttgggaatgtgaggctttttttctttttttttttttttttaactacagcagtctccaagccatccatcactcctcttttgaaccactggcttagcacagaacaaaatgggaagtgattgtgttttcttgaagagctgtttctgaatgtgatggcttcctttgaagcccagtcaaagggatgtttttattttgtttttgttttcctgaaatcccaccagtttccctcacctcctacaagacctcacaccacagcctaccatcatgcctgatacctaagtagctgccttcacagctaacaaaagacaaagaamacacagatgcagattattctaaaggagtaagttaaagaaatgaaaggggcttcctttttaagttcaaatagcaaaagcaactaatatactttggaaagcacacgcgataacacaacacccaaattcacttggagaggttccctgtgacatgctctaacaagtcagaaattcagtaagtgtagttatatcctgcaagtgattttgaaaaggtgtaga

SEQ ID NO: 511330 - DNA, 625 bp, Homo sapiens
gctgccttcccagaggagagaaggttgagaattggtgagaaagcttcctggctctttgagggagctgcttgcagagtgatctgggacaaaaggcatccttgggaatgtgaggctttttttctttttttttttttttttaactacagcagtctccaagccatccatcactcctcttttgaaccactggcttagcacagaacaaaatgggaagtgattgtgttttcttgaagagctgtttctgaatgtgatggcttcctttgaagcccagtcaaagggatgtttttattttgtttttgttttcctgaaatcccaccagtttccctcacctcctacaagacctcacaccacagcctaccatcatgcctgatacctaagtagctgccttcacagctaacaaaagacaaagaaaacacagatgcagattattctaaaggagtaagttaaagaaatgaaaggggcttcctttttaagttcaaatagcaaaagcaactaatatacttyggaaagcacacgcgataacacaacacccaaattcacttggagaggttccctgtgacatgctctaacaagtcagaaattcagtaagtgtagttatatcctgcaagtgattttgaaaaggtgtaga

SEQ ID NO: 511331 - DNA, 325 bp, Homo sapiens
tataataccagctacttgggaggcttaggcaggagaatcacttgaacctgggaggcagaggttgcagtgagctgagattgcgccattgtactccagcctgggcaacaaaagcaaaactccrtctcaaaaaaaaaaaaaaaaaaaaaaaggatgttacctaaggttccattgtaagataatttttcaagcaggttaagtatccaggagtttagtttcacaagccgtttgtccaattttttaaaaaagataaaagccaatcctgtaaaaacctttattccttgtccaaggttataattatgcaggtaagtctgagtgaattgaagca

SEQ ID NO: 511332 - DNA, 595 bp, Homo sapiens
tgcccttcctgcccccaagggggacttgaacttgtttcctaattcagcccttgtggggagactgacctcaggaggaacctgagcttgtagagatgttgcggaatatactcatgaccaccgatttcactgtagtgggtttgactcactatcttttttttttttttttttaactgggaacactatgtaaccacattaaagaggtctatagcaggaggaataaaagactcmtaaagcctgctgactcactggctcatgactgatttcctacacattcagctggggttgtctgctttgcttgccctgtttcttgagcccaagcgacccacacacactgcctgctgatcagtaggttatgtcagaaggccgtaagggccaaatttaagctatttttcatttaaataggcgtccctagaaatagctacgtggacttacctaatatagtatttaagtccccagcttttgaagtgattctgtcttgtaaaacctacaagcatttcagactccaattgttacagctttgcttcccagcactcagcttgcaaccccttgcttgtgtagatataactaaggttgctaacacccttttttaaatata

SEQ ID NO: 511333 - DNA, 372 bp, Homo sapiens
gagaccctatctttaagaaaataaataaataaaatgtatataggttcatttttaaagaaaaatctctaatatcccattctttataatctactaacaataaaattaaaaatcaaaagaatgagaagattctagatcaaacgaaaatagctgcaatctcaaagaaaaataagtgcattctcttataagaaaatatcctaaaataattttaaaatctaacaactttttcttttttttttaaattatactttaagttttagggtacatgtgcacaacgtgcaggttagtgccatgttggtstgctgcacctgttaactcgtcatttaacattaggtatatctcctaatgctatccctccctccctccccccacccc

SEQ ID NO: 511334 - DNA, 601 bp, Homo sapiens
gaaaataaaaacaaactccctggaaaaatcaattatttatctactttctcaaataaaaaatttaattcaaagaatgtcttattgaggcttaaaccctaaatgattttttaatgaaatgttttctactccattccagttggcagtgtagcttatagttcttgagtgaagttatctaagcaatatcaaattcttttagtcatctttacaatgaaaaacattcattcatattcaatgccagagcatttttttctaatttggtatcttcaacttccttatgtccaattagtattcattagtgtaattatgatgatggaaaggctcagtccctgttcttcaagacattaggaagtttggggaaagccttgaaacaaaatagtaaaagaaatatttggacatcccaaatgcttctttgattcaatactgtgatttgattcatcagtgaaggttggttctatgtccaggagcttgctgggggagggaagagacccatagtggcttgctgccctagaaactctgcctgccattgtcaacatttcctccggctgtcttgcttttggagggaaactctccctaaggaytgccctggttgacagaatgagag

SEQ ID NO: 511335 - DNA, 670 bp, Homo sapiens
ctataaggtgtgagtgtttttgttctctgcttatttgtaacattaataataaagaagtttaatatgttctgtaaacagtggcttccaaaaatacagagctttcagctttttccagatggctggtttttgttgaaaggctttctgaggagtgttaatttgttattcaacccttattcactcagtgtgttctcatctcactatctgtcagaaattctcttctttcaagaattctgactcttggtcatttggatgtagcattcacctgtgtgggataggagagaagaaagtgagtccctgatgcttatagagaagaagaatgctgagcattccctgacatatttcctggtcaatgcctaatatagatgaatgactttaccttttgggaaatgggaatacaataggagacttgccccagggttatgtatctagggtgggccttgatcacagaggccaggatgtccaaaaagggcaaatggaagattgaaatgtgtgttcaatttttctgcaggctgtaatggaaaagggggaatgacagtcccccttgggaataagtgtcttcctcattctgtgcagacatttagggagtattgcawgctgtgagcttctctgagcacatcttgtctcttgctttctccttgctgagcccctttcctctgttgctccgtccttc

SEQ ID NO: 511336 - DNA, 356 bp, Homo sapiens
tgtgtgtcccacttacttgtgggtrggagcatcctagcgattgtgttacatggtaggttctgagccagtgagtcggggtggtatctgagagcctacatttctaacaagctcctaggtgatgctgaggctggtgtaaagaccacactttgaggagcgaggctcctctgcaactcacggatcacaccagcctccacctcattatttcaacggagccttgaattgctatctccttctactaatgctcaggattggggatggatggaggcaagccttctagatcttcttctgtagcccccatagccaaaaatctgagtgattttgtccaaacttcacattgtatggctggcaaaagaggc

SEQ ID NO: 511337 - DNA, 494 bp, Homo sapiens
atgtgttgggagcttcagagaagcagctctgagtgctcatggtgtcaagcactggaagaccagaccatgaggtcagaacatggaggcaagaacattcgggtttacaaagcttctacgtacatcacaacaatgctgtactccaattctaggtttctggaggagagactcacattgggccagtttgaatcacwaatctatgaatctatccttgaccccatcaaataagtgtgcgtgtgtgtgtgtcgtgggagacggggtaactcaatacaaatgaagcagctaagagtccccattttggataagggggtgaggaagaatcattttgcaccggttggatgtaccaagggccacagaaggaccagaaggagcaccaacatttaaggaatcagaggaagaggtgctgccgggaagagaagcaagtgagaaggagcatccacagagtcagagagaaaggcagaatcagggcttcctgctgctgggcgagttgtgcagcc

SEQ ID NO: 511338 - DNA, 494 bp, Homo sapiens
atgtgttgggagcttcagagaagcagctctgagtgctcatggtgtcaagcactggaagaccagaccatgaggtcagaacatggaggcaagaacattcgggtttacaaagcttctacgtacatcacaacaatgctgtactccaattctaggtttctggaggagagactcacattgggccagtttgaatcacaaatctatgaatctatccttgaccccatcaaataagtgtgcgtgtgtgtgtgtcgtgggagacggggtaactcaatacaaatgwagcagctaagagtccccattttggataagggggtgaggaagaatcattttgcaccggttggatgtaccaagggccacagaaggaccagaaggagcaccaacatttaaggaatcagaggaagaggtgctgccgggaagagaagcaagtgagaaggagcatccacagagtcagagagaaaggcagaatcagggcttcctgctgctgggcgagttgtgcagcc

SEQ ID NO: 511339 - DNA, 494 bp, Homo sapiens
atgtgttgggagcttcagagaagcagctctgagtgctcatggtgtcaagcactggaagaccagaccatgaggtcagaacatggaggcaagaacattcgggtttacaaagcttctacgtacatcacaacaatgctgtactccaattctaggtttctggaggagagactcacattgggccagtttgaatcacaaatctatgaatctatccttgaccccatcaaataagtgtgcgtgtgtgtgtgtcgtgggagacggggtaactcaatacaaatgaagcagctaagagtccccattttggataagggggtgaggaagaatcattttgcaccggttggatgtaccaagggccacagaaggaccagaaggagcaccaacatttaaggaatcagaggaagaggtgctgccgggaagagargcaagtgagaaggagcatccacagagtcagagagaaaggcagaatcagggcttcctgctgctgggcgagttgtgcagcc

SEQ ID NO: 511340 - DNA, 600 bp, Homo sapiens
gcgagaaacaaaaatcaaatattgcagaaaaatgagtatctcaacaggtatttcccatgctgtagaagaaagctgtccctcactactctgttggccaagccttatgggcacaacttgaacaacstaccttcttgtttttgttttttcttttcttttttttggcagggcggggggaggttgttaatttttggagttttgggggacatttttttttttgaggcgggtctgaccgtcgccagcctggagtgtagtggcgcgatcttggctcactgcaacctctgcctcctgggttcaagcaattctcctgcctcagcctcccaggtagctgagattacaagcgcacaccaccacgctcggctaatttttgtattttagtagagacggggtttcaccatgttggccaggatggtctcgatttcttgacctcatgatccgcccccacctcagcctctcaaagtgctgagattacaggcgtgagccaccgcacccggcctatttttgtttttggtgttcctgagtgagctccaaatcttgtcttcttcgaagctttcctatcagcttctatctttgtcctcctccatcacgactctgaagatgccc

SEQ ID NO: 511341 - DNA, 560 bp, Homo sapiens
tgctacttcaaatttgttgaagattgtggtaagtattttacatgttttatcttaggaagctgtaagatatattactgataaaccgtgttcatttaaatgagacaagtcatcaattttccttaaaataagaaatatttaatacaggcttttttcccttaagaaatatgtgaaagaaraggaaaattgtcagtgatcctattacagtttggtggaccagtattaataggatttctattatttaagaatatcgagattttatttataaaattgctattatgatataatttttttatattgtaaattgtcagtttgatgactgctaagaattacaggtttgtttgaagtttatttttgcaagacagtgcagcagattctgatatattttgataattttcaaggcccatttttcaaattatactctgaagattacatttaatggaacaaaacaaattggtaacaattaggaatattcacacaatctttattttgcacaggaaaataagattgtcttgtgacggtgatcaattaaacagattgtcagatatgattccttaagctag

SEQ ID NO: 511342 - DNA, 560 bp, Homo sapiens
tgctacttcaaatttgttgaagattgtggtaagtattttacatgttttatcttaggaagctgtaagatatattactgataaaccgtgttcatttaaatgagacaagtcatcaattttccttaaaataagaaatatttaatacaggcttttttcccttaagaaatatgtgaaagaagaggaaaattgtcagtgatcctattacagtttggtggaccagtattaataggatttctattatttaagaatatcgagattttatttataaaattgctattatgatataatttttttatattgtaaattgtcagtttgatgactgctaagaattacaggtttgtttgaagtttatttttgcaagacagtgcarcagattctgatatattttgataattttcaaggcccatttttcaaattatactctgaagattacatttaatggaacaaaacaaattggtaacaattaggaatattcacacaatctttattttgcacaggaaaataagattgtcttgtgacggtgatcaattaaacagattgtcagatatgattccttaagctag

SEQ ID NO: 511343 - DNA, 608 bp, Homo sapiens
ctgccggctagcaggggtggatgctcccccgcccacttcctggaggtccctgaatgtccccatgagtagggctgaggaacaggccagaggtctggcccacctggggcccctgggcatggagaaggattggggcccaggcactttggtgaggccagtggaggccacagtcccacccagggccctgccccggctacctatgttcataatccccaggccaggatagagatcctcgctgccctctctccaggaacccctgccccgcctcaccagtgtctgggtccctccctgggcctgggttcctgcaggacctggcttgggcaccaccctgcatccctgatttccacctgtgagcctggcctgcccacgtcccccacccttcttctgccctctccccacctgggtcagcggccccctggaggcgacagggctgaggcccgtccttgcgctaagaattcctccccccaaaacctgccccttrcactgaacaggcaagactactgctaaggcagtgatctgggcgccgcaggccttccccaccttcacccccacagaagggcctgggaaggcaggtccagaccttgctttattgagggggaactccagatgag

SEQ ID NO: 511344 - DNA, 515 bp, Homo sapiens
ctgaatgccggtgcccacagcttataaaaatcaagagggagaaaagattaatggcctgtcggtccaycaccaaatactgaccaaacattacaagagtcaagaggttgagcgaggcccaggagaggaggccaactgctgtatgaagaatggtcctggccctcaaggggtttcactctggttgggaagataagacccagattcaggaaagcacaggcaaccacagaaggcagtaggtggggaggagaattccgcatgaactagacaagcttcctgaaggatatggagttggagttgggtcttaaaaggtgagaagtcttcaaatgtggcctgtgtaggaggagggagagtgctgggagcaaaggcaggaatgcaggcatgctgtggacacagggaggaccctgggttggagtggagggtaagggaaggtgctgtcatttactaagcaaccgctatgtgctgggtgctggctgggactgcatttacctcattcagtcttctcattatcagcagaatgt

SEQ ID NO: 511345 - DNA, 580 bp, Homo sapiens
ggtggttcataggcctctctgtctatgcttgccaactaggaggcagaactcctctgtcactcccacagtgacagagagcttctctgtttcccttagtactacctggaggaagtactaagtgaatgagtgaaacatacttgtactgtgatttatatcagtaggttgtctttttttaaaaaaacttaagtgacttttattgggtcttactgagtagggagctgcctctgcaatatctaaaagagaacagaaacaagaatccagayctttcagtgtgctcaggccatcagacactcaatgaacctgagttagcatttcctttttcctaaataaggcatcatgtggtatgctttaaaggtgtgcagttgggctgggtgcagtggctcacgcctgtaatcccagcactttgggagcctgaggtgggtggatcacctgaggtcaggaggttgagaccaacttgaccaacttggtgaaaccccatctctactaaaaatacaaaaaaaattagccgggtgtggtggtgagtgcctgtaatcacagctacttgggaggctgaggcaggagaattgcttgaacctgggag

SEQ ID NO: 511346 - DNA, 585 bp, Homo sapiens
acacttttaaattatggttactagtgatgtatgggaccaaatcctgccttatggatgaagtgtttgagtttgaccatatcaacactgaattcctactaatcattgtagagagggatacaatttaaggttagttttctggttgtgggtattgttcttttttaaaaaaatataaaaccaaaattgtcctttaaaaagtcattctttctgagtttcagtacattcgttggccacattgtgggtgcattacattgttagaaagataaaattaaccaaataggatcaaaatgtggtttccaggtttaggcacaatggaagtagtaagtagggaacaagtctgtgtaaaacagtcggayttatgaaaaagtagatctgagttgtggagtgatataggttgggcttcctgtaaatagactctgagattgagagttgtggacagaaggattttggggagatacatctatgaggatgtgaggaaggtgaggatgtgcagagggagaagttgatccacaggcaattgcaactgaggttgattgcaactgagttcaggagatgagctggtccttaggagttgttcccagtttagag

SEQ ID NO: 511347 - DNA, 524 bp, Homo sapiens
aaagtaaataaggcagtgtgatatttgctctgggatgaacaaacaggccagagagaagaaaatagtccagatttgtcagtcgttttatagtttttgcttttagaatcatgtttgattctaaacagctttcttaatacctaaacagctttcttaaattaataaagatgaaaccagaatgcaattaattaaaaaacaaaaataccaataaaacytgattcataaattaaaaaacttagaaaataagaattgacgagaaggaaataattattaaaagagaaaatattgaaaattgtaagagactatataaatgtcgacaaataaattttaaaaacctatgtgaaattggctctagcagatatacagcagatatagaaagtctaaacctatgcacttttgaaaatgaatggagaataaacattaaaaacattaaaagctcagtaggtggttttccaaaggaattccaccaaatatgtttacatggtccatgtcttactttttttttttttttcagtctaatgactctt

SEQ ID NO: 511348 - DNA, 578 bp, Homo sapiens
tgtcaacaattcagacttctggacctacaggaaaaacatgaccagggtagcatctctttttagtggtcaggctgtggctgggagtgactatgagcctgtgacaaggcaatgggccataatgcaggaaggtgatgaattcgcaaatctcacagtgtctattcttcctgatgatttcccagagatggatgagagttttctaatttctctccttgaagttcacctcatgaacatttcagccagtttgaaaaatcagccaaccataggacagccaaatatttctacagttgtcatagcactaaatggtgatgcctttggagtgtttgtgatctacartattagtcccaatacttccgaagatggcttatttgttgaagttcaggagcagccccaaaccttggtggagctgatgatacacaggacagggggcagcttaggtcaagtggcagtcgaatggcgtgttgttggtggaacagctactgaaggtttagattttataggtgctggagagattctgacctttgctgaaggtgagcaatggttctaaatgaatttccgttgccccagtaaagtcatcatag

SEQ ID NO: 511349 - DNA, 256 bp, Homo sapiens
cataatcatcatgtcatgttcgatggaytttaaattttttcttctcttagggacagcgtgaatcttttttacacaaagatttgagcaagaaatgtgattctttaaagaaatatatagaaccgctctactggaaacactcaactttttcttaactgttctttttgacagtctgcttcacattattcatattcctataattgttttatcccgttttcttttttgttatagagggcaatttggatagtatatgtatgtc

SEQ ID NO: 511350 - DNA, 615 bp, Homo sapiens
gagcagcagcataatcatcatgtcatgttcgatggattttaaattttttcttctcttagggacagcgtgaatcttttttacrcaaagatttgagcaagaaatgtgattctttaaagaaatatatagaaccgctctactggaaacactcaactttttcttaactgttctttttgacagtctgcttcacattattcatattcctataattgttttatcccgttttcttttttgttatagagggcaatttggatagtatatgtatgtcatgtatacacgaatctattaaatatattttctgtattttggttttccattagttttatgtacattgtagttggtgtttatctttgtaaaaagaattctggtcttgaaaataagtgtctaaaacacttaggtttattaaaatgcattcttcattcatattctttatctgcattaggttagtcctagacaccatgtaacagatctgctttagagttgaaatatgtcactaacttttggtaaactctggatttcgtatcaagatgatcgtccagttatgtagtcagacactttgttatgtaagggttgttctgcctttcatcttgggcaaaaactagaaggctgtttagtacc

SEQ ID NO: 511351 - DNA, 256 bp, Homo sapiens
cataatcatcatgtcatgttcgatggattttaaattttttcttctcttagggacagcgtgaatcttttttacacaaagatttgagcaagaaatgtgattctttaaagaaatatatagaaccgctctactggaaacactcaactttttcttaactgttctttttgacagtctgcttcacattattcatattcctataattgttttatcmcgttttcttttttgttatagagggcaatttggatagtatatgtatgtc

SEQ ID NO: 511352 - DNA, 555 bp, Homo sapiens
ttagggggagatagtttaataagttttttttattatactttaagttttagtgtacaagtgcacaatgtgcaggtttgttacatatatatacatgtgccatgttggtgtgctgcacccattaactcgataactcatatatttttccttattattgtattaaacctgaagtaactacatagaaggtagaaattgatggaagagtctatctataacataagtggtaacatttagtaagacacttctagtaactttgcattttaagacatcaagtttcatgaaaactaagtttacctgagtttttttctattagtaaaaaaaaaaaaaaattactctgactttaatatcaggtttggacactcyacaattataataccagaaacctggtgaattctcttctgcttgttccccctgctggtacctttaaatcatcttatttcttttcttgattttgttgttgttgttgttgttttaatcatacaggggtttctgttcttgtttagatagacaggcctgctgttatgtattttattacagacatgtccgtgataaagaatt

SEQ ID NO: 511353 - DNA, 536 bp, Homo sapiens
tctgtgtgtgtgtatgtgtacttatgtgcatagacatatatgtgcacactcacacagattagataagggagagagcagcaagggagcatcagttttagtattttcttatttatgaaagtatctttttaactaaataaaaggatccaagagagtaaacatatggtattgattacattcttgcaagtgctaaattcctagtcataaagggttttgtatttcaacatttccttcaggtcttcaggtggaatggaggaagcttcgtgttgcatcaaaaactccctgtccgaggtgtgctgaccrtggccttgttcaacaagggaggctctgtgttcttagccatttcccaggctaatgccaggctaaactcccttttattcagatggtctggcagtgggtttattaactttcaagaggtgcctgtcagtgggacaacagaagttgaggctttgtcttcagccaatgatatttacctaatatttgccgaaaatgtctttctaggtgagaagataaagtatttgtagtgtatatataattat

SEQ ID NO: 511354 - DNA, 199 bp, Homo sapiens
caacttgtcctaatcattttattttcagattccttttataggattgactttgaaatgttacaagttgatcttggtctraaagtttggctctgctgttagctgttaccagagagaaaggatgaaatagatgctaaatgcaatatatactgtgtgatatacacatcacatacaaatatattactatcctattatgctttgt

SEQ ID NO: 511355 - DNA, 590 bp, Homo sapiens
tattatttaaactgtcaaatagctgcacgaggcttttagtgaaaagtatccatctcctgccccatgccctcctcaaaaaattgagtgcctcctgatttcccaaaatctagaagcactcaatttctatttttagctatatcatcttatatttatgttcatatttataagatgtttacacttttggttcctgatttttaaaaaactgaaatgtaatctgaaaccttccatctatgaaacacgtggactggatttttataccccattcacacagacacacacacacatacacactcatacacactctcacaaacacttccctcttctcttctgcacatcacaatatggtcacatcacagtttttatttcggatatggcaattttaatttccagartctctttgatcgctccttttctatagcattctgtttttgttgcacggtggatatatctttgcttatctctctgagattttactttattatttgaagttccatttcctctctatggtctttgtctttctcctgagttcattttccactggtttgcattgggatctatctttcaagttagagattgtcctcaaatatctg

SEQ ID NO: 511356 - DNA, 576 bp, Homo sapiens
tgggggagtcaactggccccagctttcccagtaactctagggacaaatctagtaggcagaagcccgtctgcctactctcttcataacaggtgttgttgaagggcctggtaccctttgaagtgaaggatacagggaaactgacaggctttctcttcatcctgtccctagtggaggcagcgagatctgccatgatgctcaaatctcttccatccatctccacgtccctttccagctactgctctatttttctccttccttgacagcaacatttcggtagagctatgtgcacaaaaagctctccacttctgcagtctacacttcctccttgacctaccaccaccacctagctttcctctcactgagaccgtgacaccacagtcatcaacaactttctgtagccagatccatgggaaacttctttattctcaatctcttgggccactcagctacatttcaccccattggcacctcctctgttccaaagcattgcttttcttggtttctatgacctcattccttcttgattcttattctacctgtttkctcttcaatctctttgcatagactccttttcta

SEQ ID NO: 511357 - DNA, 553 bp, Homo sapiens
tgtagactagagattcctaatgagtttaaaaaacataacattggaactcttcagggaaatggttaagtcagagccaaaggcattgacactgaatgaagaggagccttagctaatgaaaagggagcagagagtggaagaagccagggaaggaaggtgactagaaatccagtgctggactcagagaagggaggcggaggcgagagctcaccgacagcattgttggtatgcaaagcacggcagcctcctcccaggagytggggcagcagcagcagagagggagccaggaattcagagggaaagcaggacctgcaggatggcccctgggatcacattcgggacttctgacttctggagaagactgcaccccaggtggccagggacaaggccagcctgatattagggtgtcaccaggttctgaggcaaagttggtagagtttctttcactttctccctccgtgcctttgctccctcctctctgtccacctggctctccctgacactgctatcttggtccaggtgcaaattgttgggtttcctctttgcggagtgaggg

SEQ ID NO: 511358 - DNA, 582 bp, Homo sapiens
tgagttggggagggcaggggaggcgtggccacctcaggagggagggagggagtggctcttcccattcctcttgctccttcactgggtgggtggcagggggaagcacccccaaaacctttgcccccagctcagttcacatgaatgtctcgctgaaggaagtctgttaatagactgtaatgtaaagatttatgtcttcaagcaccccccaactccctgcacccccgtttcacaaataatttctcaatgtttgtttccaagcctgagataaakaatgcatgcatttaaaaaaccgcagagtcatggggttccctctgagtagagagggatccatttttaagctcacagccctggcagtgtttgctcatgcatacatgccttcagcattagctgccagcatcttccaccctgaggctggaccctggggaaggctccttatttcttaggaactccaagcctgccttacagagcaggggcagggcaggtcatcacagcaaaggccccagagccagatgagctgggggccagtggaatgagagctaacgtcaccggacatcagtggtggaaaacggggtaactggaaga

SEQ ID NO: 511359 - DNA, 582 bp, Homo sapiens
tgagttggggagggcaggggaggcgtggccacctcaggagggagggagggagtggctcttcccattcctcttgctccttcactgggtgggtggcagggggaagcacccccaaaacctttgcccccagctcagttcacatgaatgtctcgctgaaggaagtctgttaatagactgtaatgtaaagatttatgtcttcaagcaccccccaactccctgcacccccgtttcacaaataatttctcaatgtttgtttccaagcctgagataaagaatgcatgcatttaaaaaaccgcagagtcatggggttccctctgagtagagagggatccatttttaagctcacagycctggcagtgtttgctcatgcatacatgccttcagcattagctgccagcatcttccaccctgaggctggaccctggggaaggctccttatttcttaggaactccaagcctgccttacagagcaggggcagggcaggtcatcacagcaaaggccccagagccagatgagctgggggccagtggaatgagagctaacgtcaccggacatcagtggtggaaaacggggtaactggaaga

SEQ ID NO: 511360 - DNA, 416 bp, Homo sapiens
tgtggcacttggtttcctaaacaaaattggttttattctcctcaacatgtgttcagcaagattaaagatccatcaactgcacagcttaatatgagctatactggaagcagcccatgttctcctggagtaggggtggaaaagagggagggggcagagcctgaaatcctgtttattgaatcagaaagaccattaatggatagaggatattggagaagggatggcaatgctttgtcatatttcagggaaagagatttgatcacacacacacacacamaaaacacacacaatgttttaaagtatttccatttccattgtcatttttttttccttctttttaagttggattaacagatgggcatggttgggggagatgttgctgggagtgtcagttccattcttcagcatgaaaggcggtt

SEQ ID NO: 511361 - DNA, 624 bp, Homo sapiens
taaatcattcatgaagggtccacccccatgatccaatcacctcccaccaggctccacctctaacataggggattacaattcaacatgagattttggtgaagacacagatccaaaacatatcagggatattgtgtagyattggaggaatccaggatcacaacaccctgtcctgacctgctccagaaacccttccctacaaagccaagggcaaaccaagcacagagaatatggtctgacttttatatgctctctaatacggtgggtttacagcccaacattcatgtaatccctggggcgagggagctgggcctcacccaggagagcccttcagcctgtttgccagcagcacgggacctacatccaaaacagttctatggcttttatcatgtggtctcctaagcctaaatcttagccctccagtcttgccgctttagtagtaagggaaagctggtcctgtcaatgagaagacccacgtaccagagagaagaagccatctgcttgtctctgggtctaggtcagtgcccttctcctagtctgcacacctgtccagccctctcaggtcctgcgccctgggccctgggccatgtctgccagagggaggaaaaggctcaaaagagagcagaa

SEQ ID NO: 511362 - DNA, 624 bp, Homo sapiens
taaatcattcatgaagggtccacccccatgatccaatcacctcccaccaggctccacctctaacataggggattacaattcaacatgagattttggtgaagacacagatccaaaacatatcagggatattgtgtagcattggaggaatccaggatcacaacaccctgtcctgacctgctccagaaacccttccctacaaagccaagggcaaaccaagcacagagaatatggtctgacttttatatgctctctaatacggtgggtttacagcccaacattcatgtaatccctggggcgagggagctgggcctcacccaggagagcccttcagcctgtttgccagcagcacgggacctacatccaaaacagttctatggcttttatcatgtggtctcctaagcctaaatcttagcccwccagtcttgccgctttagtagtaagggaaagctggtcctgtcaatgagaagacccacgtaccagagagaagaagccatctgcttgtctctgggtctaggtcagtgcccttctcctagtctgcacacctgtccagccctctcaggtcctgcgccctgggccctgggccatgtctgccagagggaggaaaaggctcaaaagagagcagaa

SEQ ID NO: 511363 - DNA, 624 bp, Homo sapiens
taaatcattcatgaagggtccacccccatgatccaatcacctcccaccaggctccacctctaacataggggattacaattcaacatgagattttggtgaagacacagatccaaaacatatcagggatattgtgtagcattggaggaatccaggatcacaacaccctgtcctgacctgctccagaaacccttccctacaaagccaagggcaaaccaagcacagagaatatggtctgacttttatatgctctctaatacggtgggtttacagcccaacattcatgtaatccctggggcgagggagctgggcctcacccaggagagcccttcagcctgtttgccagcagcacgggacctacatccaaaacagttctatggcttttatcatgtggtctcctaagcctaaatcttagccctccagtcttgccrctttagtagtaagggaaagctggtcctgtcaatgagaagacccacgtaccagagagaagaagccatctgcttgtctctgggtctaggtcagtgcccttctcctagtctgcacacctgtccagccctctcaggtcctgcgccctgggccctgggccatgtctgccagagggaggaaaaggctcaaaagagagcagaa

SEQ ID NO: 511364 - DNA, 609 bp, Homo sapiens
aataatacagactctacaggcctgagtaattaagtcagatattgcaagtgaaaaagccttgcaaataacagacactgcattgatgctttttggactatggtcatagcaaacacttggagttgttttatgtatgctcctcacctggggcaaaaatgcaacctcagaattcatcagttcaaatatttctcctttttaaggtctgaataaatgatcagggttggggtgttcargcagacacacctgagtttgaatcctggatttaccacttactagctctgtgactttgggcaagaaacctaaatattttgaatctaagttcttcttaactataaaatggggataataatgcttacatcacaaaggaaataatatatctgttgtgaggactgaaggagatattatagtataagtgctcagccccagtatagtagaaactcaagaaatatccccttctcctccctaacaactacaaggagggctcccctatcaatcaacctcagctttctatcatcttttgttgtgtaacaaattacctcaacatgtattggcttaaaataacaaccatgcatttagttcagaattctgtggatcagtaatttgggctgggat

SEQ ID NO: 511365 - DNA, 618 bp, Homo sapiens
ttgcagtgagctgagatcactccattgcactccagcctgggtgacagagagactctgtttcaaaaaaaaaaaaagatccaaacttggcctaggtcgcatggcaatttgacccagtaacctcatgaaagaycccaaggccctttgttctctcacagggcatactgtcattaacaatacatacaactggcttataatatcatatgatctcatttacctagtgaccactgagttaaagaaagggtttgtacctgtgagtaacccccagagtaacccccaaactgaagactccttgcaaacccgctagagggaaggagggctgccaagccaggtggcagcaagactgttcatggtgtggtggcaggagctgctcagccagatgagggacagtggggactcctgaatatactaaacaccttcttctctttcatcctttttgccctggctcctggggattcctacatctttgcaagctttctgtgggtttgagccatgtgtctcccacattttcacccaattaaccctgggagtgaaatggaagccctggcatggtctgggagacacagccacaaacattcagctctgtctgaaaattactgtactcccctccacagcacagca

SEQ ID NO: 511366 - DNA, 725 bp, Homo sapiens
gcactccagcctgggcgacaaaagtgaaactccatctcgaaaaaacaaaaagcactttgggaggccaaggcgggcagatcacctgaggtcgggagttcaagaccagcctgaccaacatggagaagccccgtctctactaaaaataaaaatacaaaattagcygggtgtggtggtgcatcctgtaatcccagctactcaggagactgaggcaggagaattgcttgaacctggaaggcagaggttgcagtgagccgagatcacaccattgcactccagcctgggcaacaagagcaaaactccctttggaaaaaaaaaggattcagcagaaacaggtaaacatggtgaaattgaggccaaaattcaagagattaggcctagactttttttttcttttgaaaattctaaccaggtttggctgttcatgaaaacttttaatagctgagttttttctgtgttttgttttaagtgggagtgaagttctgaaagggtcaggaacaaatggaagaaaatgaagctaacgggggacttggggcacagcgaactgttcttaggcccactgagtcaaaggcacaagaatcaaactggagagagtgaggagctcaagccagacaaagccaaagtggtagatttcctttcttaggccaactaggttttcctttgctgggaaggaagagtggcttttaaatttttgatctaaaatagaggtgagtttagggtgccgtaca

SEQ ID NO: 511367 - DNA, 699 bp, Homo sapiens
agctgcacccaggagtgcagggctcccaccctgccaactgggtagggggctgggctcccacctgttctggcccctgccagctccatggagcatgcagccctggccgtgcctccttggctgtagctggcatcctcacagcagcccctccagacatgctgttgctggcatcttaatgataattttatatttcttattaagtatttccaagttgtgaagtaagctctcatccaaacgctgctataaattcttmcaaaggtaagaagtatcccttagtaatcataaaacaaattagttccagtcatataaaaaaggagaaaatagaggtgaatgttccattgcattgatgattcggaaatcatagatgatattctgaatcaagccaagaaatcaaaggacattagaagcaacaataaagaggatgagggattttagaggtgagagaatcacttggaggtgtaggagtcaagagaaaacttcccattcaccttctggaggtttgcaaaaaaaatcaactcacaaaaggcagattaataggagaaagcgcatacaaatttagtttaatgtggaattataggaggatgattacccaataacccaattaggtatagatgattatatagtcgtcttcttaggggaataaacagatgagaacgtgttgattattttagggggtagtaaatgacttttatggaaattcaa

SEQ ID NO: 511368 - DNA, 134 bp, Homo sapiens
aaatattaattcatatatttacatggtaggctagattaaatttttttatcctcattgacagccacagttacgtaagtgaatggcaccaatgagaaggggtggaatttcatggraaaattattattgttctgttt

SEQ ID NO: 511369 - DNA, 417 bp, Homo sapiens
aaattccaactgttagaatcatagacatctagagcttacgtcagttttagatatttcttatgaattctcagaattcatagattctcatttttattcttagacttctcagatattcmgtttttgatagtatacccttctgagtctaatatgtcctaaagtgcgaacttgtacaatttttttttttttttttttttttttttttttttgataaggagttttactctgtcacccaggctggagtgcagtgacccgatctcggctcactgcaacctctgcctcccgggttcaagtgattgtgatgtctcagtctcccaagtagctgggattacaggctcctgccaccacatgcctagctaattgttatactttagtagaaatggggcttcgccgtgttagtcaggctggtcttgtactcct

SEQ ID NO: 511370 - DNA, 502 bp, Homo sapiens
tggttgatttcctcataggatcaacctctccctcgttcccgagaatattaactgattcacactggaagaactgaaaatacaacagttgggctggcagggagtccaccccaagatggttgggttagtgtgtgtggggcagcaggagcaatccgaatgtgacaaaagagattagcaagttcctgtgcctaagtcaatttcctgtagccggcttctccgcagagggggtttcatttgtgtgggtttaggggggtgtgtgtgcacgtgcgtttctctccattagaatatgaaacttccccagatcagaggcagaataaggcctttgccgcaccgctgggtttgcgtttaatttatcccccaccctactccgagactatgtttctctcccccttagccccattttcctccagcaaagccctacgtaaaactgaagaaaggaagactraagagtccaaatgattcctcatggaagtaaaattcccaaaaaaaaaaaaaaaaaaagtcc

SEQ ID NO: 511371 - DNA, 502 bp, Homo sapiens
tggttgatttcctcataggatcaacctctccctcgttcccgagaatattaactgattcacactggaagaactgaaaatacaacagttgggctggcagggagtccaccccaagatggttgggttagtgtgtgtggggcagcaggagcaatccgaatgtgacaaaagagattagcaagttcctgtgcctaagtcaatttcctgtagccggcttctccgcagagggggtttcatttgtgtgggtttaggggggtgtgtgtgcacgtgcgtttctctccattagaatatgaaacttccccagatcagaggcagaataaggcctttgccgcaccgctgggtttgcgtttaatttatcccccaccctactccgagactatgtttctctcccccttagccccattttcctccagcaaagccctacgtaaaactgaagaaaggaagactgaagagtccaaatgattcctcatggaagtaaaattmccaaaaaaaaaaaaaaaaaaagtcc

SEQ ID NO: 511372 - DNA, 516 bp, Homo sapiens
cccaaaaaaaaaaaaaaaaaaagtccatgccactgaccaatcttggttaatttgagcttaggaaacaacaccttagaactttcccccccatcagcttggggaaaacaagaggtggattgtctgcttcgctttgctgcattaaaaactatcaaatrttttgcaaagaacagaggcaggcttagtgagagttcgagcagccccctgccgtgcgttcacccctgtatggacgagcacctgggctgggagttacctggcgatgagttgttttttcagactcctcagagtttcattatttgcctaaaaacacaagtttacttgttttgtcctaatgggcaatccaggtgtagagaccatctgcaactacttaggttatggctaaacgcctaacccaacaaattgaacttttgtgatgtggtcacaaccgcctgtgccccaaatccctgaataactaactgttgatgctactgctcacggtgatagcttggtcaaaatacctgccgaccgtaaggataaagt

SEQ ID NO: 511373 - DNA, 543 bp, Homo sapiens
ccctgacttcactaccctgggcctcaactgctttataaattatgaatasagatacttcctaggactgtagggtggatagcaaatgaagcgaattaactgccaaatccttccttaacatcttcgttatgatcaatattatgaacctaggcaatcttcatccatacattggacacttgaccttgggatggattagacttcctcagtttcctttgtcctctgtgcaaaatctagaatattgccagcctatcgtcagagtgcaacacgtttgaggaattattgcatgattgatattgttgagagttcagattaatgtcacttcagataatccacagatgacatggaaaactggtgggctaccggtgctatttgaagtcaacgagggcttgcacttagctgggaatgggcgagagaataggattaatgcccaggaagatatatcttctgatcctcacctctcttttgtatataggtgattttttaaaaaacttccttctcctccaatcaaaactggctttgaggaaagaatgggactggatgcacatt

SEQ ID NO: 511374 - DNA, 617 bp, Homo sapiens
tagtctgatggttgcgtctgggaaaatggcctgggcaccataggagggaggtatatttttcacttttatacttttaaaatgttactataggcatgtaatcactattcaaaaaatgtaaaaacatttaaagatgccatgtgagctcaaataagggagaaatatattgcttattgggaaggcctcatacaagaggtagcatctgagctgggctctgggatgggtagaagttcaccaggaagagccagggcaggaaagcttgcagcagcaggaytgaagctgtcaaagcaggaaagaccagggagagtgtcagcaatgttgcatagtctggagaaattgcagcaaagtagtatgctgttgtttgaatataaaaatgtgtgtgtaattattatatgcattcgtacttacagcatgtgaatttatgtaataatgtaatagcttcagaaaaatgcatgagaaactgcattggctaggtaaagcagggacagggccgaggagaaaagtaaagagagagaactcggctggatggaggttatcttatacttaatatggcataaagggctttttacaaattggccccattgtccctttccaacatcatcttccacctgtgcttcagc

SEQ ID NO: 511375 - DNA, 617 bp, Homo sapiens
tagtctgatggttgcgtctgggaaaatggcctgggcaccataggagggaggtatatttttcacttttatacttttaaaatgttactataggcatgtaatcactattcaaaaaatgtaaaaacatttaaagatgccatgtgagctcaaataagggagaaatatattgcttattgggaaggcctcatacaagaggtagcatctgagctgggctctgggatgggtagaagttcaccaggaagagccagggcaggaaagcttgcagcagcaggattgaagctgtcaaagcaggaaagaccagggagagtgtcagcaatgttgcatagtctggagaaattgcagcaaagtagtatgctgttgtttgaatataaaaatgtgtgtgtaattattatatgcattcgtacttacagcatgtgaatttatgtaataatgtaatagcttcagaaaaatgcatgagaaactgcattggctaggtaaagcagrgacagggccgaggagaaaagtaaagagagagaactcggctggatggaggttatcttatacttaatatggcataaagggctttttacaaattggccccattgtccctttccaacatcatcttccacctgtgcttcagc

SEQ ID NO: 511376 - DNA, 617 bp, Homo sapiens
tagtctgatggttgcgtctgggaaaatggcctgggcaccataggagggaggtatatttttcacttttatacttttaaaatgttactataggcatgtaatcactattcaaaaaatgtaaaaacatttaaagatgccatgtgagctcaaataagggagaaatatattgcttattgggaaggcctcatacaagaggtagcatctgagctgggctctgggatgggtagaagttcaccaggaagagccagggcaggaaagcttgcagcagcaggattgaagctgtcaaagcaggaaagaccagggagagtgtcagcaatgttgcatagtctggagaaattgcagcaaagtagtatgctgttgtttgaatataaaaatgtgtgtgtaattattatatgcattcgtacttacagcatgtgaatttatgtaataatgtaatagcttcagaaaaatgcatgagaaactgcattggctaggtaaagcagggacagggccgaggagaaaagtaaagagagagaactcggctggatggaggttatyttatacttaatatggcataaagggctttttacaaattggccccattgtccctttccaacatcatcttccacctgtgcttcagc

SEQ ID NO: 511377 - DNA, 493 bp, Homo sapiens
ggaaccatactgcctttcagccccactggctatgtgatctcataaaggtcacttaacttctctaagcccctcttccctaattgtaaataggcaataataacggtgcctacctggtgtgagttggttgatggtattatttttaataataaaaattaaaataaaataatgatacctaccttacaaggtggttgtacagaattaaatgggtagtgcatgtaaaccacattgaatagtgcctggcacagagtgagtaccgtagaagtatttaccattattataatttaccttgaggggttgtcgtaagatggttctgagctagtgtatgtcatgagcctaaaacagtgcctggaacaaaacaggtactagcaaatagtagctgctatgatgatgatgatatgaaycagtactacagacacacaggagagggagcattaattctcgagatgggagaaaggagtggtgatttgggagccccgcatttaaaaggtgacag

SEQ ID NO: 511378 - DNA, 642 bp, Homo sapiens
ggtataccccactagacaataaactccaataaagacaaggattgtgtgtctttttcacyaccttatccttgatgcctagaatacagaagataatcaaatatttattgagtaaaacactattaattcatcctctatagaaagaatattctttcataacacttctatatacttgaagagttttcttctctctggattaaataataatttaaacggctcttaaagtttctcttttctaatctttactgttttctagattttctacaagatttccaaaattcaatttaaaaacaactggggtcaggctaggagcagtagctcactttgggaagccaaggcaggtggattgcttgaggccaggagttcaagaccagcctggccaacatggtaaaaccctgtctccactaaaaatacaaaaactagctaggcttggtgacacccgcctgtaatcccagctactcgggaggctgaggcacgagaatggcttgaacccaggagacagaggttgcagtgaaccgagatggcaccactgcactccagcctgggcaacagagtgagattatgtctcagaaaaagaaacaaacaaacaaaaaaactactggagtgggagaatcctatcaccttatttacttctgtattttatca

SEQ ID NO: 511379 - DNA, 639 bp, Homo sapiens
agagttggagcacatggtgttgtacctgatagggaaaatggaatgctattggaacacagagacagggttcctcacttcagaagagctgacctcaaatgacacagaggatctagagaaccaagaggaatggatgacaaggacatcatgagtgatggcctagagccaaatggctgtgatgctcctgttgtggatattgatttaaaagccaaactctaaaatactttaagagatttattctgagccaaatatgaggaccatgacccatgcatgacacagccctaggaggtcctaagaacatgtgcctctgtggttgggttacagcttgattttgtacatttcaggggagttacaggcagacatcaatcaatacatgtgaagtatacattggttcagtccagaaaggccagacaactctaagtggatgtctttggaggacttctaggtcataagtggattcaaagattttttttgtttggcaatgggttgagagttaagttattatctaaagacscagaatcaatacaaaggagtgtctgggctaagataaggggttgtggagattaaggttcttattatgtagatgaagtctcataggtggacacccttagaggcaacagatgacaaatgtttcctattcag

SEQ ID NO: 511380 - DNA, 603 bp, Homo sapiens
caaaatcatttcatcagaaatagtaacaataaaatactaaaaatatacatgccatttattgagcattccctaggtgtctgactctatgctaattgccctgaatgtwtcagcacatctaatcttcataagaagtctaggagggaaggactgttattcttccccattggagaaaggaagaagtaaagctcaaggaagttaattagctgacccaggatcacaaaagctagataataagaaatctacgattccagcatcagtcagtgtgattccagaattacaaataaggctttacttacaagtcccacttgctgagagaagtaacaatgagagttaaacatgttcacaccaaggtgtaaatgactaattgcaggccctttcctcaagctcagcatgagaggcttgaacttcataaatggcaagaagaaagcaggtaagaggaagagacaccagtaggggtgagggtggggacactgatagggaaggaagaattgttccaggaagggaagggcccaagttgcccagagccacttgtacttagcaagttgactggggtgggctctgtataaagatggaaggacagaaatgtttatgcaggaggccaca

SEQ ID NO: 511381 - DNA, 602 bp, Homo sapiens
ataaaatactaaaaatatacatgccatttattgagcattccctaggtgtctgactctatgctaattgccctgaatgtatcagcacatctaatcttcataagaagtctaggagggaaggactgttattcttccccattggagaaaggaagaagtaaagctcaaggaagttaattagctgacccaggatcacaaaagctagataataagaaatctacgattccagcatcagtcagtgtgattccagaattacaaataaggctttacttacaagtcccayttgctgagagaagtaacaatgagagttaaacatgttcacaccaaggtgtaaatgactaattgcaggccctttcctcaagctcagcatgagaggcttgaacttcataaatggcaagaagaaagcaggtaagaggaagagacaccagtaggggtgagggtggggacactgatagggaaggaagaattgttccaggaagggaagggcccaagttgcccagagccacttgtacttagcaagttgactggggtgggctctgtataaagatggaaggacagaaatgtttatgcaggaggccacaagtccttcagcagtaaagcaatggaga

SEQ ID NO: 511382 - DNA, 614 bp, Homo sapiens
cacaggctctgtctgctgccctgaagcacaaaggaagttggtctcttgaggtttttctaggaatgttttcctgtgagcaatcacaggagaagcgggagtaaaacaaacaaaggagggaaaaagatgacacaaaaacatcatgggaaggctggcggttggcagaggaggctcagattgaggaaacaatccctcatggaatgaattcttctgttagtggagtgatgcatattgacagatccaggcacatcttcaggctgcccttctgtctgtccctcacccatatattcattctacaaatatttgctgagagcctattatgtgtgaggcatcatgctaagtgcataacataaattacttcattttatcttcacagtgtccctttaaggtagggtctcttatccccatatcttacccaaggaacccgaggcttagagaaacttaaggagataaaayaacctgcccagggtcacaaagtcaggattcaaacccaggatgtcagagtccagagcctgttaccagtagagggtcctgacaaatcagtagtcgtccaggttcttggcgttttgaacaaagaattggacaaaatgcacaaacaaagcaacaaaagaatgaag

SEQ ID NO: 511383 - DNA, 675 bp, Homo sapiens
cagctgaggttcttagatgggcagccttggatctgtgcatctctggtcatggtgtacaaactgctaagtgcgtgtgcactgtgcgtggggggtgagccrggaaagctctgaattcccaaaggagtccagcttcagagaacactttagccttcctcctagagataaaagaagtcttgttggtgtcccctcctgaggttggggccagagttcccacaacttataaattgttccatcccctggcgttttcctctgtgcgtggatctcccctaccccacggaccttgaacaagggtggctttggcctcaagtggcagcccatctgggctctaggtgtttgaatgcagagttatggctgtttctttatctctttcatagttcctgtaaacatctgtccagggcctgagctcagaaggcagaatccgtcgtggagcgtgtccaactcctaccccaagagcagcctccatgtttacccacggactgggctcacacacaggcaggcagctccgagctctgagcacctcagcatccttggactctgagctagcgtggtcacatgtcggggggacagagttccccagcccttaccctgcagtcttgcttctgatagggaaaccttgagctcgtagtgactgtggggctggctctccaggacaagcccctccagtggagccaggaa

SEQ ID NO: 511384 - DNA, 558 bp, Homo sapiens
gggtttactgtggcatttccttactatttatttatttatttattttytgagacagtctcttattcactcaatggcccaggttggagtgcagtgacgtgatctcagctcgctgcaacatctgtctctcatgttcaagagattctcctgcctcagcttacagagtagctgggattataggcatgcaccaccatgcccagctaatttttgtatttttagtagaaacggggtttcatcatgttggcaggctggtctcaaactcctggcctcaagtgatccgcccacctcagcctcccaaattgttgggatcacaggggtgagccactgtgtccagcctcactatgacatttaaatgccctgatttgggagaaactcacataatttctgctcacaacaaattggccagggccagtttcatggccctgccctaccacagaggggccctgagtgtgatcttaccacgggcctggaagacagagagtagggaatgcattcatgacaaccacagtgaccttgggaaagttgtcttagttctctgggcctcctttttttcacctgaaa

SEQ ID NO: 511385 - DNA, 598 bp, Homo sapiens
tgtcaccttcacacctggccacttgcccctagatctgctggaccctgaaacacactcctcccgttactggctggttgtgggtgtcgtggtgtcacagcccctggagaaaatcccccaacccccaccaacctttgtcccctccagagagcatgggcaccttatctgcagcccaggtggctcctaatcttcttagactccaaggtgctgggtctggcaggagccagagacggagcccaggcccgccctggttttacagatgagggaactgagacccagagagagtgagtgaattacctagactcacacagcaggtcagtctgggcactgtactggatgattcctggcagggagaggggtgctggaggcatgtttaaaaatcagggactggaagagcctctcagcctcagagaagacatctgaagcagcctctgagccacacggagcaccccccgcccccaccccaatgaagtgggagaggttcccaggcgcagggggaggaaaggggtcatgcaaccacgtccttgcctcccgccacgagtgtaycccgagtcaccaggtttgctcagccgcagcagggccagccccggcggctggaagg

SEQ ID NO: 511386 - DNA, 540 bp, Homo sapiens
tgctttcctcagtgcgtggattccagtggcagcaacatctgctgggcactgtctggcccgtgggtggtcacagggtgccaaggaccctagtgctgtttcttggccctgccactcactggctgtgtgacctagggcaagtcgctcccctccctgagcctcagtttctctttgtaaaaagtggttggaagagatggtgactaaagcctcttccaggtacttaayggacgcagcctgttcccctgctgagatgctgtcttcactggctctgcgcctccgtctccctggtttggctcctgcttctttggctgctccttccaggcccccttggcctgttgtcacactccggggctcagtcctcgggactccccactcaggctgctgacttccaattcctgtctgtatcccagagacggagaggataatatctgctcattcaacaccagactgagttaaatatctaaggaatttctactctaaacccagcgtttagagccagccctgccccactggccatcatccaccacaggcaggcagaggcat

SEQ ID NO: 511387 - DNA, 540 bp, Homo sapiens
tgctttcctcagtgcgtggattccagtggcagcaacatctgctgggcactgtctggcccgtgggtggtcacagggtgccaaggaccctagtgctgtttcttggccctgccactcactggctgtgtgacctagggcaagtcgctcccctccctgagcctcagtttctctttgtaaaaagtggttggaagagatggtgactaaagcctcttccaggtacttaatggacgcagcctgttcccctgctgagaygctgtcttcactggctctgcgcctccgtctccctggtttggctcctgcttctttggctgctccttccaggcccccttggcctgttgtcacactccggggctcagtcctcgggactccccactcaggctgctgacttccaattcctgtctgtatcccagagacggagaggataatatctgctcattcaacaccagactgagttaaatatctaaggaatttctactctaaacccagcgtttagagccagccctgccccactggccatcatccaccacaggcaggcagaggcat

SEQ ID NO: 511388 - DNA, 540 bp, Homo sapiens
tgctttcctcagtgcgtggattccagtggcagcaacatctgctgggcactgtctggcccgtgggtggtcacagggtgccaaggaccctagtgctgtttcttggccctgccactcactggctgtgtgacctagggcaagtcgctcccctccctgagcctcagtttctctttgtaaaaagtggttggaagagatggtgactaaagcctcttccaggtacttaatggacgcagcctgttcccctgctgagatgctgtcttcactggctctgcgcctccgtctccctggtttggctcctgcttctttggctgctccttccaggcccccttggcctgttgtcacactccggggctcagtcctcgggactccccactcaggctgctgacttccaattcctgtctgtatcccagagacggagaggataatatctgctcattcaacaccagactgagttaaatatctaaggaatttctactctaaacccagcgtttagagccagccctgccccactggscatcatccaccacaggcaggcagaggcat

SEQ ID NO: 511389 - DNA, 609 bp, Homo sapiens
gctgtcacttggagaaggagagattcatacgaactgcgagagcatataaccagcatgtcttgagtcttttacccatgtgcctgttatatggatgctgctgtttttgtaagatgaaatgacccttggatattctgggttatgatcagcatttcttcgtctaggcgagaaaagaaacaggtgagataggaaggcatgaaggggctcatggaagagagagggctgacaggcagaaattttgagagctcacatttacgactatttggacagttcttataattttggcataaattgtaaattgttgcatgttatcaaaatagattggtgatgaacgttaaggatatatccgtggcagaataagaacacactctttgttctttggtttgctcctctagttcttccctgcttgccttgtgggactatttgcagcaatgaggggaatttatctagcaggttgkcctcgggaggcaatgaatgaaaagaggttggtgagtcctctgtgggagtccattccaggtcctggagggctgaggtgggtgtcttggagccagcagtttctgggagaagggataaagctcaccttccacaccctcctggctcctgaggagcgat

SEQ ID NO: 511390 - DNA, 391 bp, Homo sapiens
agccttcctctctcctcctcagcctctgtgtttttatcctcttctgccctgttcttcaccccctttttgcttttcataaacatcttattctcatctctaatctatactctagcagaaaagagtaggacaagtatggcctctgatactctcctctctttgcttgtcactttctgcagtccagttgttgtcacccaggacttrgggactgatgtgggcttcttgctcatccttcgtctagatcaccactgtccagtggaaacataacctgagccacttgtccaattttatattttctagtaactacattttaaaaattgaaaagaaacaggtagatcaaagtttcaatttcccaaaaagtttccatttctaaactcttatgcacctaataaca

SEQ ID NO: 511391 - DNA, 552 bp, Homo sapiens
cacatgtcaggacaaggaggtggaaccaacttacgggtgtctggggaagacacttggcagccctttcctagaagccaaaatcagagccaaactccgccaagcaccccattttgaactggactcacagggaagctgtcatctcttctgcctcattcggcctttgaactgggagtcaaggcatctaaagcaggccagtgtgactctaaaacctttgctatgttttctccatctcacatcatatatatatatatatatwtttttttttttttgagatgggatcttgctctgttgcccaggctggagtgcaatggcacaatcttggctcactgcaacctccacctccttgtttcaagcaattatcctgcctcagcctcctgagtagctgggatcacaggcacccaccaccacacctggctaatttttgtatttttagtagagacagggtttcaccatgttggccaggctggtctggaactgctgacttcagatgatccactcgcctccgcctcccaaagtgctgggattacaggtgtgaggcaccgtgcctggcct

SEQ ID NO: 511392 - DNA, 641 bp, Homo sapiens
actggccagaacagcaagaagagaactgagacctaatcctgcctctgacagctgactgatcacccatgggcaggcgctcagtctccttgagtctgtttcctcatttgtaacataagaagaagaatctctgtcaatttcagtatctttgagatgcttggtttagggggaaatatatatatcataagccaactctgttttctataacctcccttatttcagatgggacatcggtaagtgaactaagttaattctttttcaattaatcactccaggaaaaatgatgtacctttaacgcaaagagaaactccaaagctggtggttttattgaaaagaaaaaaaaagtttttacaatattgaaaaacctttgcaaaaaaacagtgatgatggcttaactttcttgtttgttgatttatcatctctacccaattcactgtcatctccctttttaaaggaagttstgaggctgcccaaatgtgaattgggtaaagaaccccttttctatcttttcttctcaatttacttcccgattgactcaggcataggcttcactccccagcccactcccaatgctgagacaccccttatgccaagagccttccttctctcctgcctccccttccccacctctctgtggtttaggg

SEQ ID NO: 511393 - DNA, 478 bp, Homo sapiens
ggggatctgggtggtagacaatagcatccattacaagcacccatttgtcacctgcttcctgagtcacacatgggcatggcctctgcttagagatcttatcattaaatgttaggtcacttatccaagatttccttgagcaccttttatatagcaagcactgagttttgtaatgtctgaaagaaaaatataaattttctaagagtgtcactaaaaggtttaagaaggatattaataataagagctaccaggtcaacacttttcatgtgccaggcactatagtaagtactttgcaggctcattgaatmcttgcatcagtctgagattgatattactatccccatgtcttagtccattttgtgcttctgcaacagaatactacagactgggtaacttacaatgaactttattgaataatgcttctggaggctggaaaatccaagaccaaagggccagcatctggtgaaagccttcttgctat

SEQ ID NO: 511394 - DNA, 464 bp, Homo sapiens
ggggggatctgggtggtagacaatagcatccattacaagcacccatttgtcacctgcttcctgagtcacacatgggcatggcctctgcttagagatcttatcattaaatgttaggtcacttatccaagatttccttgagcaccttttatatagcaagcactgagttttgtaatgtctgaaagaaaaatataaattttctaagagtgtcactaaaaggtttaagaaggatattaataataagagctaccaggtcaacacttttcatgtgccaggcactatagtaagtactttgcaggctcattgaatccttgcatcagtctgagattgatattactatccccatgtcttagtccattttgtgcttctgcaacagaatactacagactgggtaacttacaatgaactttattgaatmatgcttctggaggctggaaaatccaagaccaaagggccagcatctggtg

SEQ ID NO: 511395 - DNA, 527 bp, Homo sapiens
ggaacagtggttatgctgccaatttaaagaaccaaggcttcagaggaaaggaaactcatgcgtgcccccaccaccgactccccggttcctgctggttatttgtaaaagttattcacaggaggaagagaaagagccttcgtgtgtgattccctgctcacatcacggtggggtgaaccaaggttctctgtgcagcttcctccaccatctgttcgcactgccttctmtcggagacttggcagggaaacactcactgtttttcatcccaactcaaagacagtgagatttttcatacctgcacaggaaccatgcaagttgtgattgaaaagagcatcatgggatgcaaacagaaagaaaagcggtgaaggcgccaagctgcggattctaacagcttccagaacgcttggccataagtggccgtcagactgcggagttccatttccttcttttctttacaggttaaactctgtcaaatttgatccaactccaacccaaacttctgttgaatgaaatgattgttttctaagctc

SEQ ID NO: 511396 - DNA, 599 bp, Homo sapiens
gcaaaaggtagcctcactttttcatgggtagtatcccaagagacagagacagaactcggtggctgcttttcatctccactctccagtacaaagtggctggatagcctttgccaaggtatcagttttcccatggtgaggactgccaggcaattagattcttgctctctccaaatttcagcaggagcacataagttttatttttaactgtgcaggaagatgttgccatagcaacataacaaactacaagagcaatttgattgattgatgatgttgtggggaaggaggactggcatgaaagacactgaaaaaaatcatttagctttatcaccctggattgagtttatagatcttggttattagacacagtatgtgacacatgtttatcattatgcaaaaggaaacatagacctttttctgccttgkttccccaaagcaagatgatgacaaactagtgaactggccatcaagaaagtgagctggtctcatgagttaaagaggcatgataaacgtggctgaaagaacatagtatttgctaggcaggctaggcatagtggaacattcatatgccccactcatcaattaatggggaacattctgct

SEQ ID NO: 511397 - DNA, 624 bp, Homo sapiens
cctgtatgcattcaggcatgagctccaaaacatttaaagtgactaaaacatgctacaaagttaagcacaatttcatctgtgctaaaaataataataaagagttccagctaggtgcagtgcctcacaactgtaatctcaactccttgagaagcagacaagggaagattacttgagcccaggagttcaagatcagcctgggcaatgtagtgggacctcatctctacaaaaaataaaaaagcaygtggtggcacatgcctgtagtcccagctacttgggaggctgaggcaggaggattgcttgagcctaggaggtggaggctacaataagccaagattgtgccactgcattccagcctgggtgacagagagagaccctgtttcaagaaaataaaataattttttaaaaatttttttaatttaaaaaaaaatttacacccattttccaagatggcagattagaagctttcagcatacctcagccacttggaaacagcaagatagtatataaagatcaactctgtgagctttattcaagaaagaaaatgggaatgcactggaatcatgaaggacaccccagatcccagagaggagaacatcggcaaacggcccccatgatggcattcag

SEQ ID NO: 511398 - DNA, 624 bp, Homo sapiens
cctgtatgcattcaggcatgagctccaaaacatttaaagtgactaaaacatgctacaaagttaagcacaatttcatctgtgctaaaaataataataaagagttccagctaggtgcagtgcctcacaactgtaatctcaactccttgagaagcagacaagggaagattacttgagcccaggagttcaagatcagcctgggcaatgtagtgggacctcatctctacaaaaaataaaaaagcatgtggtggcacatgcctgtagtcccagctacttgggaggctgaggcaggaggattgcttgagcctaggaggtggaggctacaataagccaagattgtgccactgcattccagcctgggtgacagagagagaccctgtttcaagaaaataaaataattttttaaaaatttttttaatttaaaaaaaaatttacacccattttccaagatggcagattagaagctttcrgcatacctcagccacttggaaacagcaagatagtatataaagatcaactctgtgagctttattcaagaaagaaaatgggaatgcactggaatcatgaaggacaccccagatcccagagaggagaacatcggcaaacggcccccatgatggcattcag

SEQ ID NO: 511399 - DNA, 479 bp, Homo sapiens
tgtgtaatgaatgatctccagccccattcagatctccaagttgttgctgggagtctctgggactgcctctgtttctgttttggattcttgtcaatgtctgtggtttgacaggagcacctcgttgctgccactgtatagtctcctgatgcttcccacattgcaaaccctaacagtggccttggtcctggcccctctgcatttttttccagatcctaagccagctacgctcaatggctctcctctgcatgggtctctgagtctcccagagtcccgtctgcgtacagctcttccagcttgtctgcacccttccttctccgaaggcctcagacatgagtctatggggctggctggggtcagaatctgatgtggactctccatcaacccatccgtcatgcccagacaatggtgaattccaggagtgggtacaaattagtgggatccaagactctcakgtaatatccagattgttattccgacaa

SEQ ID NO: 511400 - DNA, 581 bp, Homo sapiens
tcattctaccctctatctccatgagttcaattgttttaatttttagctccacaaatacaggagaacatatgaaatttgtcttcctgtgcctggcttatttcacttaacatcatgacctccagttccatccatgttgtggcaaatgacaggacttctctcctttttagccattasaaaattggggcacagagggggaaagtgactgacacagattttctagttagaatcacatggagttgtctaaatgagcatttacacagatacaagaaatatgatggcaaccaacataatcacaaactctgccacacttttctattgggtggcttgctgctgacctgaaaggggctcaaaatacctccaggctgaggtaccactggcatcctcactcaatcaggctcaagggtgacattttctagtatccaaccagccaggttatattgagccacatgtgtcctgaaagaaccttctcattcctacatacatcaacaacagcagacaggccagccacgctggtgtcaaagcttgtctgcaagcaatcactgagccttttaattagtcctggtgaaagtctgggctctttg

SEQ ID NO: 511401 - DNA, 476 bp, Homo sapiens
atttgtttttctctttctactttttgcctccctacttcctgtgtgaggattttttttttctttttttcttttctttttttttttttttttttttttttttttttttgcatccttcctgcttttgttgagcacttttgctaggattcctgacatggttggtttctccgttcgcgtagctgctgatctcattcrgtttttcctcccttctctgggaaaatgggagggtgggtggtgcttcagggtcaaatcaaggacaagcaggagtgagtcaggatccaggtgagaggatgtagaaataaatgatcctgggaaagaagaagaggagggggctgagaagagagttctcgatgctccccacagcctcctccagattcacggactgcatgaggcttgcacgaccccgtggagggtccagaaagggaaggacagctctgccccgagctcaccctgcagactgggcttcagcgtgctctggg

SEQ ID NO: 511402 - DNA, 476 bp, Homo sapiens
atttgtttttctctttctactttttgcctccctacttcctgtgtgaggattttttttttctttttttcttttctttttttttttttttttttttttttttttttttgcatccttcctgcttttgttgagcacttttgctaggattcctgacatggttggtttctccgttcgcgtagctgctgatctcattcggtttttcctcccttctctgggaaaatgggagggtgggtggtgcttcagggtcaaatcaaggacaagcaggagtgagtcaggatccaggtgagaggatgtagaaataaatgatcctgggaaagaagaagaggagggggctgagaagagagttctcgatgctccccacagcctcctccagattcacggactgcatgaggcttgcacgaccccgtggagggtccagaaagggaaggmcagctctgccccgagctcaccctgcagactgggcttcagcgtgctctggg

SEQ ID NO: 511403 - DNA, 583 bp, Homo sapiens
cgaggttgagttttctgtcactggtaatccatagaggcctggctgaaacagaggggaatgggattcccaaacacctactgagaatctacaatgtcctgggcaggaatagccacaggtaccagagaaggaggtgactaaacatgagattcctatcccttagggacccctgggcactagggcaggcagatgtctgaacaaaaatccaaactagcaacagatgtccttgtgctgcaaagcaggggaggtggacagcattactccagaagccaagatggaaggccaaaggcaagactgaggagttagggcgtggaggtgccatggtgtaataaacaccagctttagagacagacagaccaagctctgagttccagctcagcctcttagtctccatttattcacttgcaaaagggaaatggtaacagtcttgtttcatagggttgtgataaaaattaaataatcrgctattaagacttatttcttgagcacctatcatgtaccacaaactgtggaaaacaagatgagcagaaacagagggagctaaatccagtggggtaaacatcaccagatggacataaactcactg

SEQ ID NO: 511404 - DNA, 496 bp, Homo sapiens
attcacaccctgtctcattccacaaagaattttcaacagcttacaggagatttgcatgtgttaaataatatatgagtaggagattataaatggaaacaggaggttgaaattggggacaaggagacccaggtacctagcccttgytgacctacattcctgcacatgatgtgacttggacttctggggaaaactaagagaaggatgatagaaattctcacaagtaagaagctaaaatctaggatctcaagggaaacagaacttttcccagcacttagctccaaaaagaactttgtcacctgggggaagtcctttattttctctcatttgttgccatatcttaaaaaaaaaaaaaaaaagttcactaaaagtatggtagcactatattttttaatcacgttagcttgtattcatctcagttttggtggttaaaatcaagggctttggattagaaggaatttggaatggaatccaaattcaaattcagaggaattggaat

SEQ ID NO: 511405 - DNA, 502 bp, Homo sapiens
gtgcagttaagtgccttgtagacacaagtgccttcaagaggaagcagaaatcaccaccattcttttgaggtgagggagcacaggctggcyattcctctaaagacttaaactagggtgcagggcctggttgagtaaggaagcctgttgagcagttgaaggcaggggacccagaggctcaggctgttttcctgaggatattgtaaggagactcctgaacttgggactaacaaggtgaccttgagacaaccacataatcattccaagtttcagacttccctggccctacacgtggtttatcacttgcccttcacagagttcttgtaaggattaaatgaaacaactcatctgaaaagacaaattcaatcccatacccatagcaagtcctcttgatacatttatttgttctttaatctattgatattaaagaactagtgaatggaaaatatgtttagctttcactggtggcaatttaaattttaaagaattcctatccacctcatgg

SEQ ID NO: 511406 - DNA, 145 bp, Homo sapiens
ctcaaaatgcttttactgaactaaataatcaaacagaaaaaaatatggattgtttttcactgagatgaaaagaagaaarttaaagttataggttaccacgtttttcttagagacttgacactgtctgggtcctctcctgatgaat

SEQ ID NO: 511407 - DNA, 397 bp, Homo sapiens
cataccttctgtgcaattccaccaaccaggcaggtccttccacatgatgggttctccatgagagaaccttgagagactctctttgaggcaataggaaatgtattataatattaatttctatragattccagatggtgtctttccatttccactgtgtgacactgaccaagggtttggtgtatatttgtgtatgtgtctgggtgctgttatcacaccaattatgaggaaaacaaatgccttattcacagcatgtgaataaaactagttttaggtgaacagcaatgcattggaaaagggaaaacttctacctttagacaccagggacagaaacgttccaagtcctctgggagagacagatcagcagcagagtccagcagccccacggctcatccacttg

SEQ ID NO: 511408 - DNA, 500 bp, Homo sapiens
tgtcatcttttgcttgatccctggatgggggcacactcacatccctgtgatgtgttttgcccctgatgctggtatcccctagcactttacctttagccagctttagcctagcagatgcattcacacctcctccatgagwtgtgtagaccttaggaaagtaagacgtggtctcaagtttcccaaggaacaacttacattgccccccaacacacacacacctagcagcataagacacatctctgatactgccatcttcagaaacttctagatggaaaacatccccctactgtaagtaactccctgccatcctatttatgtatttgtttatctctctttcattttcccttgtccctgagagtagagtaaggaaagggctcattgctttcaacactttattttctctgaattcagcagtcttcacctcagcacagtttagtctggcccaattttgataggcatgggcctgtctctttgcatctttgtctcaggctgggaggcac

SEQ ID NO: 511409 - DNA, 579 bp, Homo sapiens
ggccagtggccctcaaacttgagtgcacagtagaatcascaggagggcttgttaaaatagacacggctgggtcccatgcccagaatctccaatttggcagatttctaatgagtttcctggtggtgctgatgctgctggtctgggggccacactcacaaaccacactttgaattctaggctgtcatctccaaagaggacgtggagtcccaaagagttgatgtgacctgtctagaggcactcagctacttagctgcaaaaccaagatgagaatctgggtctgcggattccaaacccaggactctatgccacttgtgcttggagtagggcacatcctacctaaagagtgtgtgtgcatttgcacgcatgcacttccattacctgatgtgtgtctagatcccggagctgggcgctgggggaagatggttctttgcttggctcttctgagcccagtcgggctcttctccacctcctggcccgccggtctgtggtgtggggggcctcctccggctcgctgctgtccgaggtctccctgctggccaactgggggttgaagttcacgtccagctctccatgcaagcg

SEQ ID NO: 511410 - DNA, 624 bp, Homo sapiens
cctgctcaaataatgtaaccacgtgttccattcactaacactctgaagtattatagaagtagcaccaagaagaagccatggcagaaagagaacttccttcttggtactgagaaaatttacttcacctgtagtgaaacctgtagaaaggaatgaaggtcaagtaagaccaggaatgtgcatgtactttgcagtctctgaagttgatattctggccagacgtggtggctcacccctgtaatcccagcacttcgggaggccgaggcatgtggatcacttgaggccaggagttcgagaccagcctggccaacatggcaagacactattgctactaaagatacaaaacttagccaggcatggagacgtgtgcctgtaatcccagctactygggagactgaggaaggagaatcacttgaacccgggaggcagaggttgcagtgagccaagatcgcaccactgcgctccagcctgggcaactgtgtgagactctgtctctaaataaaaaataaataaataaataaagtttactcataccctctttaagcattccctacggcacccaaagtattctggtgtttatgttcatttccttagtgtctaagaagtaatttgtgcctctctgtcaga

SEQ ID NO: 511411 - DNA, 489 bp, Homo sapiens
taacttatattttcaacaacatttcagaaatttaaaaaattttaattatatccaacctcttctaagaaaacaaataaaaagggacactccaaaacatyacatttatcaaaacaatttgtattaagataatgttcacataacaaaatattcactatttcaaccattttgatttgtttaatttaaaagatgttagtatatttacaatgttgtgcagccatcaccgctatttaattccaaaacctttccatcaccccaaaaagaaactccttctctaatccccagaaactactaatttgttttctatccctatagatttgactattctggacattacataactggaattataaattatatacccatttgtgtctgccttccataacttagcataatttttcaaggtcatccaagttgtaggatatatagctatttcattccttctatcaataaataatactgtattatataaatataacacattgtgtttat

SEQ ID NO: 511412 - DNA, 489 bp, Homo sapiens
taacttatattttcaacaacatttcagaaatttaaaaaattttaattatatccaacctcttctaagaaaacaaataaaaagggacactccaaaacatcacatttatcaaaacaatttgtattaagataatgttcacataacaaaatattcactatttcaaccattttgatttgtttaatttaawagatgttagtatatttacaatgttgtgcagccatcaccgctatttaattccaaaacctttccatcaccccaaaaagaaactccttctctaatccccagaaactactaatttgttttctatccctatagatttgactattctggacattacataactggaattataaattatatacccatttgtgtctgccttccataacttagcataatttttcaaggtcatccaagttgtaggatatatagctatttcattccttctatcaataaataatactgtattatataaatataacacattgtgtttat

SEQ ID NO: 511413 - DNA, 525 bp, Homo sapiens
tcatcctcccaaagtcccaattatgagtcactgtgcccagcccattacwcctttttgcatgtaattgctttaagcgctcgttagatcactggacagtatccaagtctctcccggcaaaaggaaagatagccagtgtttgtaaacaacccactaaagaaggcaacagcaaattctgagatgattttattcttcctttgtattacccagattgaaggggtttgaagtcttgagaatttgcagtctcgtttcagactctcccctctccttttttcagcatcgagtgaacagggtatttctcctcccctatgaagagctttctgtgctattgaaggagggctgatttccatatctggaaggggcatcttgggggcagactgtacacagtgatttccttaggaccggaaggattacagcccgactttctctatagagcaccttccctttgcctaaaaggcactatgtcaaatgttaccagcaggtcgagggattccctacctcccgtgctatctgtttggagctgttgac

SEQ ID NO: 511414 - DNA, 556 bp, Homo sapiens
atgacatggctcacaattataaatcagctatggttaaagatactcttaaatagtaaaaaataatcaagaaaatgttatggatttggcctctcaaattatgaccctgttgaactatacaaaatataaacaaagaacaatatctgaaacattattgaaatttactttataactgaaagttagtataagcagttaaaactgaaagtaaatatagacaaaataattgaacatatttgacaaaatatagacatctaaaagtgaaaagcattttaaaagtgagaaaactcctagagagtttgaactattatatggtattttcacctttagattatgaatagcatgaatgagatgataacaatggtaataacaataaattcactataagttcttakaatttagaagataccattctagaagctttccatgaattatctcattaactattactgcagtcttatgaagtgagtattatgatcatttctaatcttatgcatgacaattgagatttaaagagtataactttccaaggtgacaaatttagcaggtgtcagaatccagt

SEQ ID NO: 511415 - DNA, 614 bp, Homo sapiens
ttacaatagaacatgggatttcggtggggacacagatccaagccatatcacctagtaatcatcctcaccttcagttaaagcagcctgtgtgtttactraagaaattagctacttgacaccaatcttttcagcaatactgctgtcagataagagaatcattgagtaaaatgccattaattgcaaataataaaacgtcattcattcaaatcacgtaatgagaagtttgaattctgtctccaaaaccaacccttacttttgtttatttatttttacctagtacccagggcatgattctgtctatgctgtcataggtctttagattttagttgccattagcaggcattttcattcaatttatttatttatttagagacagagtctcactctgttgctcaggctggaatgccgtggtgcagtcatggctcactgcagcctcaaactactggcctcaagcaatcctcctgcctcagcctcccaaatctgtggaactgcatgcatgtgccaccacatctggccctggaatatgattttataagaaagctgtctctctattaaagttttatgcaaagaggaaaactaaatcagtggacagagctaagagttagacgacccag

SEQ ID NO: 511416 - DNA, 614 bp, Homo sapiens
ttacaatagaacatgggatttcggtggggacacagatccaagccatatcacctagtaatcatcctcaccttcagttaaagcagcctgtgtgtttactgawgaaattagctacttgacaccaatcttttcagcaatactgctgtcagataagagaatcattgagtaaaatgccattaattgcaaataataaaacgtcattcattcaaatcacgtaatgagaagtttgaattctgtctccaaaaccaacccttacttttgtttatttatttttacctagtacccagggcatgattctgtctatgctgtcataggtctttagattttagttgccattagcaggcattttcattcaatttatttatttatttagagacagagtctcactctgttgctcaggctggaatgccgtggtgcagtcatggctcactgcagcctcaaactactggcctcaagcaatcctcctgcctcagcctcccaaatctgtggaactgcatgcatgtgccaccacatctggccctggaatatgattttataagaaagctgtctctctattaaagttttatgcaaagaggaaaactaaatcagtggacagagctaagagttagacgacccag

SEQ ID NO: 511417 - DNA, 614 bp, Homo sapiens
ttacaatagaacatgggatttcggtggggacacagatccaagccatatcacctagtaatcatcctcaccttcagttaaagcagcctgtgtgtttactgaagaaattagctacttgacaccaatcttttcagcaatactgctgtcagataagagaatcattgagtaaaatgccattaattgcaaataataaaacgtcattcattcaaatcacgtaatgagaagtttgaattctgtctccaaaaccaacccttacttttgtttatttatttttacctagtacccagggcatgattctgtctatgctgtcataggtctttagattttagttgccattagcaggcattttcattcaatttatttatttatttagagacagagtctcactctgttgctcaggctggaatgccgtggtgcagtcatggctcactgcagcctcaaactactggcctcaagcaatcctcctgcctcagcctcccaaatctgtggaactgcatgcatgtgccaccacatctggccctggaatatgattttataagaaagctgtctctctattaaagttttatgcraagaggaaaactaaatcagtggacagagctaagagttagacgacccag

SEQ ID NO: 511418 - DNA, 573 bp, Homo sapiens
gtcattcaatagccttagtattctttaaaaagtacwttcaggccaggtgcattcatgtatgtaatcccagcactttgagaagctgaggcaggaggactgtttgagctcaggagttcaagaccagcttgggcaacatagcaagaccccatctctacaaaaaaattaaaacattagctgggcatggtgtgtactcctgtagtcacagctacttgggaggctgagacaggaggatagctttgagcacaggagtttgagattatagtgggctatgattataccactgtactccaacctgggagacagggtgagcccctgtttcaaaaatttttaaagtataaaattaaagaaaaataagaagtccattgagatcatgtaatctccttgctgaaatccctcaaatggcttcccattgtatgtagaataaaatgtccactctaggccgggcacagtggctcatgcctgtaatcccagcactttgggaggctgaggcgggtggatcacctgagcacaggagtttgagaccagcctggccaacatggtgaaaccccatctctactgaaaatacaaaaacta

SEQ ID NO: 511419 - DNA, 562 bp, Homo sapiens
aatgactttccatcatgagggcagagtcttctgcaccctctctggggacaactcttggtccccggttaaaccataaaatggatgattggttttgagtcataaaagtcttactggttttgtgtcacattttggagcacgtatacctttggagatcctaaattgtcaaagaccagatgatggaactgggatttgaaaaagcttttatgtttaaaaggatatttagagagctctcaccctaaataaacatcgtattgctacctatgggaggatcaagttgaaagaaggaaacaagtgtatcatggttagactggatagctcccttaacaaaattaacaagcataaattagatttagacaagaacttaaaattcacacccatcaaaaatcatccccccaaccccacttttaaaatgcctgcttgayaaagcttagtgctaccagaagaatttactgtttgtcccagaaaataacaattgataataacaacaatgatacgcagcaaccctgtaacagacaaaaatgcccgaaaactcccttttaaagggactacttgaaagtttaca

SEQ ID NO: 511420 - DNA, 505 bp, Homo sapiens
agcttaaataaatctagatgaaaatgttggttctatcactcacaggttctgtgatgttagggaagttaagttatttgcaataaaaattattaatattgtagaacatgtattgatcctatgtatcaggcttgaattaggtgctttaagtgggttgtctcaattaattcatcactctgattttcaattttctgttctaagaaatgagatcaaatatgcctatcttgccgaagagtagtaaaaattagacaggtagctgcctctggatcctgcagggtasagaaagtattacatatctgcatgtgtggatgtgaaggacacacagatacataaggtaaatgagaatttattataaaggtgtatttgacaaaaattggggaaaaaaggaaaattggagaagatatctttctgtgagattaaagacaaataggggaaaaaagggaccaatgacaagaattagagcaaggtatgtaaagaattccagagctggctctaagagatagagcag

SEQ ID NO: 511421 - DNA, 505 bp, Homo sapiens
agcttaaataaatctagatgaaaatgttggttctatcactcacaggttctgtgatgttagggaagttaagttatttgcaataaaaattattaatattgtagaacatgtattgatcctatgtatcaggcttgaattaggtgctttaagtgggttgtctcaattaattcatcactctgattttcaattttctgttctaagaaatgagatcaaatatgcctatcttgccgaagagtagtaaaaattagacaggtagctgcctctggatcctgcagggtagagaaagtattacatatctgcatgtgtggatgtgaaggacacacagatacataaggtaaatgagaatttattataaaggtgtatttgacaaaaattggggaaaaaaggaaaattggagaagatatctttctgtgagattaaagacaaataggggaaaaaagggaccaatgacaagaattagagcaaggtatgtaawgaattccagagctggctctaagagatagagcag

SEQ ID NO: 511422 - DNA, 587 bp, Homo sapiens
gtccagtaaggtagccactagccatctttggctgttgagcacttgaaatgtggccagtgcggtagaggaactgaatttttaatttaacttaatttaaatttaaatatgcacatgtggctggtggctaccatattagacagtgtgggtctagactatagcctctcaaatgtatattttcttgacccccccctccataattcttccacagtagccagagtgatctttgaaaaatgtagatgagatcatggcacttctcactttagaagcctccagtggctttgcttctgcccagtgtgcacccagctctcccctggcgtgccaggcttccttgagctgacctttgcagccctctcctcctgtactgtcgccacctttttctcatgcttctccaggaccctgctggcttcctaccctcaaagcagtagccaagccttttctggagtkgggacctttgcacatgcttttgcatctggagagggtactcttccttctttgcttgcctgactgctcatcatctttgaagtctcagcctcctagagacaaccctgtcccccatctgtataaagaccccaatcctcaggctcctc

SEQ ID NO: 511423 - DNA, 560 bp, Homo sapiens
ggaaatggcaagatctgatttttttaaaaaatgtattctacctgccctgtggagaatgagttacagtggagttggggaacaagaggaacagtgggaggtactgaaaactggagagatttggggtacattttagaacaaagctgacagaactggctaaagaattgggtatggsggaaggcaaaaatggagaatctattattgctattttttttttctggtcaaaccactgggtgacaactggaactgtgatttcctttaggagaaaaacaagagacctcttttgaggacactaagtttgagatgcgtattagatacccagaaggaaataccaaatactgtgtattcaaggatagagcataagagaaagggaagagctgtcatccgaggctcagtgaaaggatggtgtttaagttagtgggtctgcatgggctcacttgaggagtgagattagaaagagggaaaacgtgctacatgttcattagtgagtatagggatgaaagtaagcaagaagaatgaatacctttgaacacataaaaagcaaagttaacgagcactgaagt

SEQ ID NO: 511424 - DNA, 392 bp, Homo sapiens
ttctatcaatgggactaagaaaaatatccggtggactaaggaactctaaaagcaacttgtttacagtgtttcttatcactgtttgcctacactccaacctgattcctgccttgaatttccattgtaattraaggtgccactgttataccataatctgcgttggaaacctggaagtcacctatgaccacagtccaccaggtaatcagctctgtcagttacacctcttacatttctcttgactcctcccaccccttctctactttcactgctgctattgaattcaggttttcttctcagtcacctgacctatagtagcagtctcttatctggtctatctgcttccaatttcagcatccctcccttaagatcaacctttacattgccaccagaca

SEQ ID NO: 511425 - DNA, 440 bp, Homo sapiens
tagccacagttcaggaatgagcaagcacaagtatgtgaccttaaagtgaattcagggatttatgtcagagctactaagaaaaacaacccctaaaatgtagccttggaactgctggcagccrtcttgacaccatgtggagcctgaggaggaggctaacatggagaagagctgagacataaaggctatgtatcattttagccttggattaagccatgtctgaagccagaactatctctttgatttaatatgaaggaaataaatgtcctttttaaatttctgttacttgccaataacaaatttccaaatggtctaaatgtatattacacatgatattccacactttttgaccatgagctatttttcttgtcacactttttaacctactatgtagttggtatttttaaaaagtcaatgagtatgtcattaactgcaaattaaaa

SEQ ID NO: 511426 - DNA, 655 bp, Homo sapiens
tttgtctgaattcctgacatataaaaatgtgagatgtaataaagtggttgtttattaagccattaatttttgggggagtttatacagcaataaaaagctggcagagaatttggtaatgggaagggggtatccccataaaaagaagttaaagcatggcctttgcatctaggtagtaagtaaaagcaggaaaaagcttccatgaaactgtaaaaccagaaagccctcaaagagattattgtgaggactttaaggacagtgagaaaaatatgagaagctaggggtcttattttgtaatggtggaaagttgggtaacattgttacctgccacaggatggaagtagaaggagttcccaatgatctcctagatctttctggggagatttgcatgaaaaatataaaaagtgccaacttgggkttttatttgccactgatgaagtaggagaagagggaggtaaaccaaagaatgaactgttcatattctcaagttttttgggtgtatctcatagaccctctcggataaacaataggatttttaattgtcttgacagcattgacccaagatagagagtagcatgtctcaaaaagatcatgagtgctcttttatctaataggtgaatcccaatgaaattcatagaaaatccacaaagtttttaat

SEQ ID NO: 511427 - DNA, 655 bp, Homo sapiens
tttgtctgaattcctgacatataaaaatgtgagatgtaataaagtggttgtttattaagccattaatttttgggggagtttatacagcaataaaaagctggcagagaatttggtaatgggaagggggtatccccataaaaagaagttaaagcatggcctttgcatctaggtagtaagtaaaagcaggaaaaagcttccatgaaactgtaaaaccagaaagccctcaaagagattattgtgaggactttaaggacagtgagaaaaatatgagaagctaggggtcttattttgtaatggtggaaagttgggtaacattgttacctgccacaggatggaagtagaaggagttcccaatgatctcctagatctttctggggagatttgcatgaaaaatataaaaagtgccaacttgggtttttatttgccactgatgaagtaggagaagagggaggtaaaccaaagaatgaactgttcatattctcaagttttttgggtgtatctcatagaccctctcrgataaacaataggatttttaattgtcttgacagcattgacccaagatagagagtagcatgtctcaaaaagatcatgagtgctcttttatctaataggtgaatcccaatgaaattcatagaaaatccacaaagtttttaat

SEQ ID NO: 511428 - DNA, 579 bp, Homo sapiens
tctcagtctagataaaagaaataggttttcataaaattttatctaggttaacttctctaggctatttcttgtcaccttggtgcctattcctccttgccagaacagcctatatacaataataaaacagggtggctgttatcagcaaaggagatgaagtgggatttcttctcattcactcatttattagccattgagatgcccaggtgtgtaacaaaggccaaaactttctgaaagcctcttttccattccggctctctgaatcaatggcttaaggagtgtgcacatcctcctcattataaaatctcaatagayaagcatattgagtacatagatccaacatagcaaatataaaaatttcaactttactcatagtctgatgacaaaccaacagtaaactattccaagaaaaatggagtataaagtagtgaaagccttagcagtgattatggaagtcactttcttagagaagtaagagggatgtaaaacgaaggccaaactggcaacatggttttaaagcattttatacctttgttcctttaacagtaagcccagtgtattttactcaatttctgtttgagt

SEQ ID NO: 511429 - DNA, 287 bp, Homo sapiens
cccagttttgctgtcatatgtatacctrcttttaattacatgtagattcaggggtggtttgtgcagaaattgctaggaaaagggtggtaacttttgggtcatcaggtcattgctgctgaaaggggtggtaatgcctgagtgttgccatggcaatggtaaactgacagggcacactggtgggtgtgtcttacagaaagctgcttccaccctgtccttgtttagctagccctcaattttttgtttgtaaatgagcaagagagtcatggccttggcgttttatcccagaa

SEQ ID NO: 511430 - DNA, 287 bp, Homo sapiens
cccagttttgctgtcatatgtatacctgcttttaattacatgtagattcaggggtggtttgtgcagaaattgctaggaaaagggtggtaacttttgggtcatcaggtcattgctgctgaaagkggtggtaatgcctgagtgttgccatggcaatggtaaactgacagggcacactggtgggtgtgtcttacagaaagctgcttccaccctgtccttgtttagctagccctcaattttttgtttgtaaatgagcaagagagtcatggccttggcgttttatcccagaa

SEQ ID NO: 511431 - DNA, 526 bp, Homo sapiens
cccagctgttctgggttctaagggatatagttgtggcaggcagtactgggaagtagaagtgaaagacaagcctgaatggattcttggtgtctgtaatgactgtcttcccagaaggaggaagagtcaaccaatwttagtacaggatggattatggggaatttggagatctagtcagaataattatattgtattgggccacaaggaaattattctgctgccacaagtaattcctagtaagattggcatttttttagactatgaaatgaatgaagtttccttttataatttgaatgatagatctcttctctatacttttaatgataattttacaggagcactttggccttatttttatactggaactgactcaaaacctcttaaaatttctacagtaacagattctgaatgaattattagaagactcagtttctttcacctagtagacataactgagccagtgaatctagttttggctattctgtattttgtccagtttttcccataagaaagcaatatttttttatct

SEQ ID NO: 511432 - DNA, 526 bp, Homo sapiens
cccagctgttctgggttctaagggatatagttgtggcaggcagtactgggaagtagaagtgaaagacaagcctgaatggattcttggtgtctgtaatgactgtcttcccagaaggaggaagagtcaaccaattttagtacaggatggattatggggaatttggagatctagtcagaataattatattgtattgggccacaaggaaattattctgctgccacaagtaattcctagtaagattggcatttttttagactatgaaatgaatgaagtttccttttataatttgaatgatagatctcttctctatacttttaatgataaytttacaggagcactttggccttatttttatactggaactgactcaaaacctcttaaaatttctacagtaacagattctgaatgaattattagaagactcagtttctttcacctagtagacataactgagccagtgaatctagttttggctattctgtattttgtccagtttttcccataagaaagcaatatttttttatct

SEQ ID NO: 511433 - DNA, 526 bp, Homo sapiens
cccagctgttctgggttctaagggatatagttgtggcaggcagtactgggaagtagaagtgaaagacaagcctgaatggattcttggtgtctgtaatgactgtcttcccagaaggaggaagagtcaaccaattttagtacaggatggattatggggaatttggagatctagtcagaataattatattgtattgggccacaaggaaattattctgctgccacaagtaattcctagtaagattggcatttttttagactatgaaatgaatgaagtttccttttataatttgaatgatagatctcttctctatacttttaatgataattttacaggagcactttggccttatttttatactggaactgactcaaaacctcttaaaatttctacagtaacagattctgaatgaattattagaagactcagtttctttcacctagtagacataactgagccagtgaatmtagttttggctattctgtattttgtccagtttttcccataagaaagcaatatttttttatct

SEQ ID NO: 511434 - DNA, 496 bp, Homo sapiens
ccaccttggacagtcaaaagaagtaatttaacttccacttttttcaaaaaacatgaaaactcaacactcccatcactgatgcagggaactacgtaaaaactttgtcctcttctgaattgaaagatatcatagtaaaactaatgcccaatgtccaagatgttgctccttgatatttaaagttcatgggtcattctagcaaaattgatgccatatagtcttgatttgtatattttaaaattttatcactgtgttgctttctcaacaattacttgatattcaagtttttttttcattttgcttaaataagtagatgaagtctttcccccttaaaaataggaaggcaagcgaggccaggactaggtgtccttggacaccaaatgctggaatggcgtcacacrtagatggcaaatagggttttagtatggccaagttgactatttccacttgtgttccagctgccatgccacaccacctcacctctgcccatccgccccca

SEQ ID NO: 511435 - DNA, 484 bp, Homo sapiens
aatattcagaccataacaggttctccaaaatattaagggagaaaataggacattaatgtaggatttcagggtggattacttttaggtagagataagaatcactatatacaaaagcatgatgtttgtgtcaggaaaggataaatagatttgcctggctggaataaaggattcttgtagggcagtagagaaaaataggtagaatgggaaaagtaggttggagccagaacatggggtcttcaaggccaaatcgaaagtaaacaatagggaatcttcccctggccccattttttttctttctttttttttttttttggtgaagagaggaacatgatttaaaaaaaaaaaaaattaaggcattgtatacaaaaaagccatagtagaatgaaggtgtgtaaatmctatttttcaggtttcttatttttcttatgttccactcctggataatgttgtcacctccttttgatactttgagactcgaaactaa

SEQ ID NO: 511436 - DNA, 484 bp, Homo sapiens
aatattcagaccataacaggttctccaaaatattaagggagaaaataggacattaatgtaggatttcagggtggattacttttaggtagagataagaatcactatatacaaaagcatgatgtttgtgtcaggaaaggataaatagatttgcctggctggaataaaggattcttgtagggcagtagagaaaaataggtagaatgggaaaagtaggttggagccagaacatggggtcttcaaggccaaatcgaaagtaaacaatagggaatcttcccctggccccattttttttctttctttttttttttttttggtgaagagaggaacatgatttaaaaaaaaaaaaaattaaggcattgtatacaaaaaagccatagtagaatgaaggtgtgtaaatcytatttttcaggtttcttatttttcttatgttccactcctggataatgttgtcacctccttttgatactttgagactcgaaactaa

SEQ ID NO: 511437 - DNA, 447 bp, Homo sapiens
ggcttaaggaagtcgtcagtgagaaatactaccccaagttttgaagaggaaaaaaaaaagttaaaacatgtattaaaagttaatagtggcaaaatttacaagtctgggcatgtagagattcaacactttcaatctgctaatttgccaaggcataatttacccacacagttcataaacacatttagattctcagaaagaaacacgtgatcttcttgagatttatagaaaatggacatatcaattccttccttcagggagtctgcaatccaggaggtggaaaaaaatgatgcataatttgtaagtggacattggtgaaagagagtggacaaataytgaagggcttagttaggaaggatgccttacatgtcaggagttcttgtatttagaggtgggcatccgaattattactttaactctgggaaggatttggcacctatactgaaggag

SEQ ID NO: 511438 - DNA, 635 bp, Homo sapiens
tggtgtttcttgtgaggtagtttgaaatgtggcatttttcccattttctctaaaggagaggaagtgtagcaaaatagcaaaaggggtgcaatttgaaattcaactgaccaggatgaaattgtgcccccaacacttacaagctgtgtgaccttgtgcaagttmcatagcatccccaataatgttttcccactgataaatttgggctgcttagaaaacctccctgaagatggagggaaattaaacaaaataatgaaagtaaagggtttttcatgatgcctgcctcatggtaaattctccagaaatattaactattttgctattgcccacttctaatctgaaggattagaaaaggaaattaagaaggaaacaatgaaagcaacccagcatgctaaatgtcctgtgagagaatgggcacagcaggatagtaagaggctgacagtgaaacccagaaaatgaaggggagtaggcaaataccgacttcggtgctggcaaatctttgcaacgtggctgactcaatccttatgaaagggttgctccctctgccattctttccaggcatatcaaaacctgtgtttaaaaaaggccaactatgtgtttgtgtgtagtaagtaattattaaaattcatttgcagccc

SEQ ID NO: 511439 - DNA, 571 bp, Homo sapiens
tgattggaagtttttaaagtgactcgaatcttctttcataggatccgaattattattagttactatagttttctattaactttttctattgtaaaagacagaggtaggagttgacccaggggaatctttgcattctatccatgttacatttagaaggttcaaacctatttcccccttgagagccaggatcaatcagcccagcaaacaccaacctactctcccttacctctcccaccccaacctttcatctgttgcccatggtcacaaggagcaccaaatagctgcattatgttctcactttccatttttttgtaaccactgttgtgtctctggtgaaggtgctctttcatctattctccatattatttttagataaagtttcaaaatctggcaatatttttgatatgtgggtttgattttataattggtcattgagagaatgctgaggtttttattacattttatggtctggatattacaaggggagcaagaaaaacagtaacacccttgcarggtaactacctcagacaagatcattataggattttgaagcaagatatgtctcacaatg

SEQ ID NO: 511440 - DNA, 597 bp, Homo sapiens
tttgagatcagcctggctaacatggtgaaacctgtctctactaaaaatataaaaatctagyggggcatggtggtgtgtgcctgtaatcccagctactggggaggccgaggcacgagaattgcttgaacccgggaggcagaggttgcagtgagccgagattgccactgcactccagcctgggcaacagagtgagtcactgtctcaatagatagataaataaataaataaataaataaataaaggaatgatcacactgttaacagggctattgtcggatgaaatgaatatgcctaatggaaaattcccagagatcagtaaactatggcctatggccctgcacccatttttataaatgaagttttattagccatacttgttacgtattgtctatggatgcttttgcgctaaaagggcagaagtgagtagttatgatagagaatgtgtgaactgcaaacctaaaatacttactatttgcctttcaagaaaaagtttgccagcccctggttagatatgcatcgtctaatacagtagccgctagctacatgtggcttttaaaatttcaaataatttaagtaaaatgtgcattttattttgaaa

SEQ ID NO: 511441 - DNA, 631 bp, Homo sapiens
cacaggtcagaggtccatggagctgtccccacctccattggcttccattgtcactcagagtaacagtggaaggcccaggacaccctgcaggattgggctccctctggccagtctggcctcctgtctcactgccttcccctttgctcagactacatcagtcactgtggcctttgtgttcttctgcagacacatgaggcatgctgtcttggtacctgacatttactgtagcttttatggggacattctcattctgaacccgtgctgcccattgtggtagtcacgagccacttgtagcgattaaggccttgactgaggtgtgctttaagtgtgaagtgcacatcagatctggaagacttattatgaaaaaaatggaagcgctttcgtgaatcaatttttagtttgattatatggtgaaatgaaaatattttggacatatcaggtaaatgaaaatgaatttcacttgtttctttttactttttttaatgtaattactaraaagcttaaaattacctgtgtgactcacattatgttcctattgacagaactgctcgaaatagccacatggctcatgcctttgcttctttcaggtctctgttcaaatagtgctttgttacaggccttttttgtccat

SEQ ID NO: 511442 - DNA, 607 bp, Homo sapiens
accctgatcaaagccagtcagcgaaaggagaaatctgctgtaaatgataacctcgacagctctatctgggctgcctccttgatgccggtgtacccagaggggcctggtgaagaccacgtgcatatttcagctccagtgtggtcttcaggggagcagcctcagcctcacctaggagcttattcgaaatgcagaatctctggctccacctcagacctgctaaattggaatcagcagtttaagatgccctggtgattcataagcacattaaagtttgagaagcaccraaggagcagaaagagcacaggttcaaaatcaaacagattttgtaactcctgacgcactcaccttctcactaaagatgtgtctgctgcccttgggtgattgctaagtgatcgctttgagcctcagtgtccttttctgtaaattggacctactaatacctatgccgctgagtcattgtgatgactagcaaaagcctgtgcacgtgcctccaggtagtaggtgaacaacggatgatgacataggagaaattcagcaaggcttcctgaggagtggacctggctgaatagcctttttctctgacctggctcccttttatgatgtcttt

SEQ ID NO: 511443 - DNA, 596 bp, Homo sapiens
gtctgttaactgcaccttattgaggcctggcctggtctgcaaattgtggtgccatgtataacaaggtagagaaataaacttctacctgatatttgggagtctcttgattgtatagcttaactgattctctacccaacacagagggaccagtgcctccatgtggggtcttggaggccatggcttggggctggctctttattctaacatcagtggggaaatcattggatggttttaggcagcaaagcaaagtgatctcatttattctttaaaatgttcactctggttattccctgggtttgtgctaagtctcaggtttctaatttataaaacaggagtctgagacagaattttccaccctgcttatccccacaaaagtctctcctttccaggctaaacattccagttcttttaaccaacctttatgcagtttggcctcttcatgatctttgttattctctgcaaaattgacatgtggtcatgtcctctggatttggggtacttcaaactccagcccaawgctctatccatggtatgtccaacattgggcagagcaaggctgccagccctcttgtgagatcatttttgacatgtgttaa

SEQ ID NO: 511444 - DNA, 613 bp, Homo sapiens
gaactccacgcccggtgtgagctcggactggcgactgcgacaccggtaccccgaacagcccggcgccccgcacccacctgcagccgactcacctctccgggaacccaagaccgagggacttaggacccgacaccggcgagcacgggctgggggcggggccgatgccactcgctgcggagacgcccactagctgctgaggacaactactgacagggcccgcctcctgccaagggcattctctaccgtctattggttgctgcgyctgtcaataccgtcgcagtgcatcccgggagctgcagtccggcaattcggcttgcgggcctgcgcaggggcgtgcgtaatgggcggagcgaatcgcgccgctgacttccggcccggaggctgagggagtttgtggagtcgcgagtgctggtgtccggtgagttctccgcttccttgcggccggcgggattagccgctgggccctgcgacggccgaggagcccctccccgctgggagtcttctccgaggcgttcgggtccggccccgatgggcgtctccttgggacaggcagcctccctcaggccgggcgtccccagacgcgccgcgatcaccgtgccccgctcccaccgtg

SEQ ID NO: 511445 - DNA, 613 bp, Homo sapiens
gaactccacgcccggtgtgagctcggactggcgactgcgacaccggtaccccgaacagcccggcgccccgcacccacctgcagccgactcacctctccgggaacccaagaccgagggacttaggacccgacaccggcgagcacgggctgggggcggggccgatgccactcgctgcggagacgcccactagctgctgaggacaactactgacagggcccgcctcctgccaagggcattctctaccgtctattggttgctgcgcctgtcaataccgtcgcagtgcatcccgggagctgcagtccggcaattcggcttgcgggcctgcgcaggggcgtgcgtaatgggcggagcgaatcgcgccgctgacttccggcccggaggctgagggagtttgtggagtcgcgagtgctggtgtccggtgagttctccgcttccttgcggccggcgggatyagccgctgggccctgcgacggccgaggagcccctccccgctgggagtcttctccgaggcgttcgggtccggccccgatgggcgtctccttgggacaggcagcctccctcaggccgggcgtccccagacgcgccgcgatcaccgtgccccgctcccaccgtg

SEQ ID NO: 511446 - DNA, 613 bp, Homo sapiens
gaactccacgcccggtgtgagctcggactggcgactgcgacaccggtaccccgaacagcccggcgccccgcacccacctgcagccgactcacctctccgggaacccaagaccgagggacttaggacccgacaccggcgagcacgggctgggggcggggccgatgccactcgctgcggagacgcccactagctgctgaggacaactactgacagggcccgcctcctgccaagggcattctctaccgtctattggttgctgcgcctgtcaataccgtcgcagtgcatcccgggagctgcagtccggcaattcggcttgcgggcctgcgcaggggcgtgcgtaatgggcggagcgaatcgcgccgctgacttccggcccggaggctgagggagtttgtggagtcgcgagtgctggtgtccggtgagttctccgcttccttgcggccggcgggattagcsgctgggccctgcgacggccgaggagcccctccccgctgggagtcttctccgaggcgttcgggtccggccccgatgggcgtctccttgggacaggcagcctccctcaggccgggcgtccccagacgcgccgcgatcaccgtgccccgctcccaccgtg

SEQ ID NO: 511447 - DNA, 613 bp, Homo sapiens
tcagtggtcagaaacaaattactcttgagacatctctggtattacaaagaggatgagtgtgctactggcatctaggatagatgttactaaacaccctacgatgaacaggatggtcctcccagatgctgggtaataacctttggataataacaaataattatccagcccaaaatgtcaatagtgctgagtttcagcaactctgccttaggttttgagaaaaccagcgacagtaaaaccacctgccaggtacctggtgtttatcatctcatttcacyttcatcacaaccctacaaaggctggttttcctttcttccattgctagatgcaagaaaagatggcacagagaggctaggctgcctgctccaagtcccctagcctcatagtaacagcagagaactgaacacaagcttgtcagatttgccacacacccttcccagaaggggaaattatttggcaaatgaagactggtaagtttaacttaagggaaataagatatccaaagtctgtgaactgctatcaaatgagagttcccatctctgtcaagcccagaagtaattcagacagataacagaagagaaatctcatcaccttcacaccagtaaggagccttcag

SEQ ID NO: 511448 - DNA, 613 bp, Homo sapiens
tcagtggtcagaaacaaattactcttgagacatctctggtattacaaagaggatgagtgtgctactggcatctaggatagatgttactaaacaccctacgatgaacaggatggtcctcccagatgctgggtaataacctttggataataacaaataattatccagcccaaaatgtcaatagtgctgagtttcagcaactctgccttaggttttgagaaaaccagcgacagtaaaaccacctgccaggtacctggtgtttatcatctcatttcactttcatcacaaccctacaaaggctggttttcctttcttccattgctagatgcaagaaaagatggcacagagaggctaggctgcctgctccaagtcccctagcctcatagtaacagcagagaactgaacacaagcttgtcagatttgccacacacccttcccagaaggggaaattatttggcaaatgaagactggtaagtttaacttaagggaaataagatatccaaagtctgtgaactgctrtcaaatgagagttcccatctctgtcaagcccagaagtaattcagacagataacagaagagaaatctcatcaccttcacaccagtaaggagccttcag

SEQ ID NO: 511449 - DNA, 583 bp, Homo sapiens
ggatgatttcacaagttcctcagcaatttttgtgactagtacttctttttggcttaagttttggtcctctttttcaagataaaattaaaaattcattcatttcatatcagaaagaattacatttcgtacttgttttaggaaacctgaactggctcaataaatcactgctttaaaaaaatggcatgaagctttgatggctttatgccactatttcacatggtttcattatgaagaaagcactaaggataggggcaagagaattactggccaaatgaaatctgtcagatattcatcatcatattacctgtctacattttccatttatagctgcttatgcaaaaacatcaaactgaaaaaatttgcttgtctaaggacatacagattcacattctacatttttatcagggtcttctttgctatttatgtttataattctatcctaaattatagtatagatgttactattttcatccctacttttatgcttcaatggattacttctgagctactgattcatttggggtttggggttctaatgtaatacaatggttgtaasaaaaacgcacacttaacaactgcaatt

SEQ ID NO: 511450 - DNA, 670 bp, Homo sapiens
aattctattcattaaaaaaggatggtttatgacataaataactgaaacagatttgaaataaatatgaaaactgggcatgcatgtcttccccttagtaataaaaatgaaataatatttttgtgaaccaaataatatcaragaaggcataggcgccccatcatttgctatgccataaacacaaaaaggaaaccttcttaggaaatccacatcgaattttaacagtgaaggtgaatgaagccaggaatgatagaaattactactggcctggctggaaaatcatgttgggcctgaggcgaaagaagttttttaaataggagaatgttctgaaatagaaagcatgttaaacagaattgcccgaggactgttaggaaatgaaaaattacactaactgcattgggaacagcaacctgataaaagcacaatgcacaaattacaatcttcttcatgagtagtattagacacgagaaaggttaagcggtatgtgagagaggttttgcccaccacaggccactacatgataaaagaattactcccaactgtttctagggaccctccaacaacgacagtaataaatatttctagattcctaatattacagaacaagctagaccagacccctagtcaatacacatttgcaaaacacccctgagtacaaatctctattctaaat

SEQ ID NO: 511451 - DNA, 581 bp, Homo sapiens
cattcacacaatcactcctactaacaaaaaaaaagaaggaaccccctaaagtaaggcacagttaactagcaaaacaaagagttgtggggaatttctggtcatggtatttatctgatgattgatttcagaatacagtgttaaagaagcaaacagtaaaatcttctgaaagtaatatcctagtaaatatttaacttgatatattagtttgctaataatattatcatcaaactattatttgtttactgagcatcttcacatgtattcttagtcctcaagacaccctacaaagtggattctatccaacttttatggatgaaraaataagttcacagaggttgattaattttccctaggactcaaagctatttaatagttataagagctaaaatttaattgtataataaatcaatgaatgtaagatgtataacatattttaaaactctacataatcatgtgtttaacatagagtcttaccttttgtcaaggtaccgggttcctgttgccctaaacacaaaacacaatggggattcttctggatattaaacacaaaggagccctgtattcaaaacagtggtgaacat

SEQ ID NO: 511452 - DNA, 606 bp, Homo sapiens
ggaactgacaggaggaagtgggtatgaggggaacatcctatcattttttcccttccccaactcactgacctcaggagtctggtagatttttattgactccaaggtaagagctgcacctttaattgaacacttacaaaaatcgggtaggttcctttacctagacttctaaaatctcaagttgtagaaaaaaagacataattccaaatcacactttcatgaatgataatatccactgctatggcagttgctctgtctgttagtttttaactctttgaatagccaatcccttaaaargagaaattattatagcaaattacaatagcaaattattgattggatttcttacatagaaatggcctgaaagaaaaggaattgttgatatttgtgctttgtaatgaaatgttttccttagtgggctatatagaaagatgtcactggtccactctcaaggatatttgcagtttaatagacttctcttggttgcagaaggagtaatagcgatagtgacagtggtagtaatagtagtggtaatattataggtcatatttattttgaatttccatgtcagaaatagtcctctcaatcctgccaactacagccctatga

SEQ ID NO: 511453 - DNA, 569 bp, Homo sapiens
tctgctgctgttcatctaaaaatttaagccaatattgactttcccactgaaatcacaagatagttgagaaaatcaacagaagaaaatgctaaggaaaaaatgtaaagtactttctcaatgtataaggttaaaaggattcaaacttagagttcaaggcttgagctgagcccacggtctgtccatcattctctgccttaattttagtgttgctgccttcattttgccctcctaactgtttccaacatcaattttctcctattcttttggctcagaarttccctagttactggtccatcccaacacactgccttgtacattctcagcaagatgattactgactaattgggaaaacaatccaaactcgtgaggaaatgggtcataatgtgttttctctctgggcaacaaatagcaatccctggaccaccatggaagttatgttcctgaaaattactggggttgtcaaatccgtgcttagcaatgtcaaggtcttgtaacaaagaggagattggaggaaagtggcattacagataaatgtcttaatatatacttttgaaacacgaaaagattct

SEQ ID NO: 511454 - DNA, 274 bp, Homo sapiens
agtaggggtagagacaagagcagaaccagggaaaaggggcagggctttgccrgtaagtgataaaaatgtgtatttatttccatctgtattagcccaatctgtgttagaataacaatagctccatattattcagcaagccaatgaaaaaagtgccaagggctttgcatccactattttttaaatatttaaaacaactgtacaaagtaggggctattatcgttcccattttatgggtgataaaacccgggctcattcagacatgaaggcactgctg

SEQ ID NO: 511455 - DNA, 274 bp, Homo sapiens
agtaggggtagagacaagagcagaaccagggaaaaggggcagggctttgccggtaagtgataaaaatgtgtatttatttccatctgtattagcccaatctgtgttagaataacaatagctccatattattcagcaagccaatgaaaaaagtgccaagggctttgcatccactattttttaaatatttaaaacaactgtacaaagtaggggctattatcgttcccattttatggrtgataaaacccgggctcattcagacatgaaggcactgctg

SEQ ID NO: 511456 - DNA, 673 bp, Homo sapiens
gctgggtgtgggcatatgactagcaagagataactaaaagtgtttcatggaacttcagggaatgttgcttaaagagagctggtgcagcagggaaggcctcctctttacctgggtctttacctgtgcctttcctccttaggccaacaaatgactcagacatgagagttggagccccgggagccacaccagagaatgaggggagctacaggatgaaagtcatgtgtaggagagtggaagatgacagtctggggcctctgatagccctgaactgctacctccaacttgtttctatgtgagagagaaataaaactttacatcacttttaaaaatagagattttccataaaccagcacccagttttccccattattaatatattatactggtatagtacatttgttaaaattattaaaacaattattgataataatgttatcatctaaaaaacatactttatttagattttttagttttacctgatgtcctttttctgttccagagctctgatcagaataccacataacatttygtagtcatgtctccataggctgctattggctgtgacagtttctcggaattttcttgttttggatgactttgacccttagttcatattaaggttcattgcggatgtttaacattctatagagttgaacaaatgtgcatgcactta

SEQ ID NO: 511457 - DNA, 477 bp, Homo sapiens
tgctcaaataataattagtaatggaatgatacattacagttacaaaataaaatagcatttacatacataaaacaaaaaggagattaaaaatggcttctgtgatcaatttgagaattgagaaaatgaataagttttgrtgttcaagagaggaagtagaaagctatagtaacttgctgttaggcagtgatttgaattgagagagcttgtaaaggtgggaaggaaaatgatacaaaaatatctgttgaaacaatagatgtatgagacaatatcttgttaggagaatggatggactgcaagtgtaatgcaagtcattttcccttctatgaagttgtaattatgtaaacattttcactagtgcatgcacaggattagttatagcgggtttctatttagtgaattttggacaaatattttgatctgctttattaaaacagaaaaataagagtttatgagaggaagaaatatatatatatatat

SEQ ID NO: 511458 - DNA, 615 bp, Homo sapiens
ttatgctttttcccttttctgaagtgactgtcacaacaaatctcatctcattctagtgatcacactgagattttatgttttatttttccattaagaaaacttaaaaatcttcacattgtaaacttaagctgaaatgtgaaatttactcatttagtttactcattttatccgttttgtaaactccttgataacaataagcaataaaattagataaatattttataaggaataaactccagtgtgactactaaataacattaatcagccaacaatgtttctaagaaaaatatgtgcatatttgaaataaatgcacttatggaaaaaaatgagaatttaaaaagtatttagagaaatacgtgaacttcctcagaaaacctgcttcggatcacatcagtctttgaaacttctctgtccaagtgttgtagctctttgaatataatgaacctcagaaaagaagatttggggcaagacawattttagactaatttacagatatcagaaaaacaacatagtattaaaaagttaaggaaatcaccagatattcaccagatattttgaattattagttgctggttaaacatctgtatatgtaaccaaacgtttggtatctacatg

SEQ ID NO: 511459 - DNA, 576 bp, Homo sapiens
cctgtataggctgtctgacaactcgttggagggtctcacccagttgggtggcatggggagtaggatgcatttaatgaagtattttgactgtcccttggtggagggggtatgctttggtggaggaaaaactcactcatctgtgctgcctggattcctcagaacaggaggaatgactaagtctgctggtctgtggagactgtggccacccctgcccctaggggttcaggcccagggagatcagagttctgtccctgarcctctggctggagttgttgaagttcctgcagggaggccccacccagtgagaagggatgggtcagtgtcaggcctgaagaggagctctgtctgtagtctgccacagcctgtgtgttgggctgtgagggcgataactcttgggaccaagcagtccagcgtccctggatccagcaggggaaaagcacagcctggagctataaagatggatgctgcccttctcttgccctgggagcttagtactttaggcagctatcagtcccagtgttggctgtcatcctttctgcaaggaactcaaacagcatagacagcaggcagtggcag

SEQ ID NO: 511460 - DNA, 576 bp, Homo sapiens
cctgtataggctgtctgacaactcgttggagggtctcacccagttgggtggcatggggagtaggatgcatttaatgaagtattttgactgtcccttggtggagggggtatgctttggtggaggaaaaactcactcatctgtgctgcctggattcctcagaacaggaggaatgactaagtctgctggtctgtggagactgtggccacccctgcccctaggggttcaggcccagggagatcagagttctgtccctgagcctctggctggagttgttgaagtycctgcagggaggccccacccagtgagaagggatgggtcagtgtcaggcctgaagaggagctctgtctgtagtctgccacagcctgtgtgttgggctgtgagggcgataactcttgggaccaagcagtccagcgtccctggatccagcaggggaaaagcacagcctggagctataaagatggatgctgcccttctcttgccctgggagcttagtactttaggcagctatcagtcccagtgttggctgtcatcctttctgcaaggaactcaaacagcatagacagcaggcagtggcag

SEQ ID NO: 511461 - DNA, 516 bp, Homo sapiens
atctctgcctcctcccccacaaaacccaactgtgatagatggtctgcatatagatcttgaaatattgaaataaatgttataaatgtttggctaggaaaaaaaaattccaacgacaccatccctttcctcaaactctatcttccaatgtccaggattacagatgagaaatctggtggcagtctaattattttccttttcctttgttcagcctcaatctctctctctcaagaaacttacaagtttttcttttatctttggagttgagtataatgctgaattaggtctaagtcagcattttaactggcacttgatgagcctcatatatttggaaattcaagtttggccactgagagcacttttaggttggctctggtgtttccttgacctgcccatccttttgggactgttttttkttgttgttgttgttgttgttgttgttgtttgtttgtttgtttttgcacttccttatttcttgcatgtcaagatgcttcaggctcatcttgtttgctgcagccc

SEQ ID NO: 511462 - DNA, 409 bp, Homo sapiens
ctgaaggtaaattcagttaatccttcttggcccaggttaagccccatgaagctctcaaagatctttacccaccttttcagcacatagagcatttcccttgtacgtgtatttgtatccctaatattggcacttgattatggtaatatgtgatmttttactaccttaagctgttattcttcaattatgttctatgtatttgtgctgttttcccaaccagattataaactctttggaaggaaccatgccacatgctgactgttcacacattgccgagtagtaaattccttcactgtgctcttccaaccagaataagaaagctaagatacgtgttttagtaggagccctaatacatcagctaaagcttgtatttccattagcatgcttatagttgatgtacattgtagttaat

SEQ ID NO: 511463 - DNA, 334 bp, Homo sapiens
ggtgaatgtgacatgtctatgaccctgggcaaatcctaacctttctatgtcttggttgaccaggatgccactagctccccagctcacccaaccccctggtgtctgagctaagacaccaggggtttggggagggcgagtgacacagcaccattcacggtctcagagccggccatcctccacacctgcctccccaccaccacaactcagcctccccctcaaacaagctagacatctgccccctgttttacaagattgcttgtgaattaaactagctagcaaagtgctctctgcacaccmgtcatagacgcaagggtggggccattattattaagct

SEQ ID NO: 511464 - DNA, 652 bp, Homo sapiens
accagtgggtaccccaggccacctgcctttgaacttggggatttgccatgtytgatcttgtcacatacttgcttttttacaagatgaactctttgtatttatgatttggggggcaatgaaaggtgcaatgcaggaactgctgctgccgagctcgctggtcacatgggggtgccaggcgggattctggaaaaccagtgcacttaaactgatcctgaagagagctgtcccagcactctggccaccaggagggccagattccccagaaactaccttttgcccaaagaacatgctcagtatttggggcatttcctcccacaaaccctgactgcttctgttacctcagggccttggtacctggatactgccacagaattggggcgggtgggggaggggcctatttttaaataaaataactgttcaaagttgggggttttttaaaaaattaagaaaaaggaaagctattctgtattgcaccttttcacaatttaatacattttcttacattttcctgtgattttcgaaactaaaccattgtgtgtcctgtagtgtcctggttgagctgccgctcagcagcttcctcggggggatttggaacacctgtgtctgtcgccgcactgcctgtgggaggggcccagagggctgctgggactgg

SEQ ID NO: 511465 - DNA, 251 bp, Homo sapiens
agtaaaaaactctcacagctccggatgtgagtttaggacactggatttctaccactcattttcttactacttttcttgtgcaaggaycatggcacaagttgcagtttccaccctgcccattgaagatgaggagtctgttgaagatgaggagtccttggagagcaggatggtggtgacattcctgtcagctctcgactccatggtcagaccttctgttctcacattctgtagttcagtaggactgggcggta

SEQ ID NO: 511466 - DNA, 251 bp, Homo sapiens
agtaaaaaactctcacagctccggatgtgagtttaggacactggatttctaccactcattttcttactacttttcttgtgcaaggatcatggcasaagttgcagtttccaccctgcccattgaagatgaggagtctgttgaagatgaggagtccttggagagcaggatggtggtgacattcctgtcagctctcgactccatggtcagaccttctgttctcacattctgtagttcagtaggactgggcggta

SEQ ID NO: 511467 - DNA, 251 bp, Homo sapiens
agtaaaaaactctcacagctccggatgtgagtttaggacactggatttctaccactcattttcttactacttttcttgtgcaaggatcatggcacaagttgcrgtttccaccctgcccattgaagatgaggagtctgttgaagatgaggagtccttggagagcaggatggtggtgacattcctgtcagctctcgactccatggtcagaccttctgttctcacattctgtagttcagtaggactgggcggta

SEQ ID NO: 511468 - DNA, 251 bp, Homo sapiens
agtaaaaaactctcacagctccggatgtgagtttaggacactggatttctaccactcattttcttactacttttcttgtgcaaggatcatggcacaagttgcagtttccaccctgcccattgaagatgaggagtctgttgaagatgaggagtccttggagagcaggatggtggtgacattcctgtcagctctcgactccatggtcagaccttctgttctmacattctgtagttcagtaggactgggcggta

SEQ ID NO: 511469 - DNA, 308 bp, Homo sapiens
gatttttacagtttttggtagaaatggggtgttgtcatgtagcccaggtttgtgtcaaactcctgagctcaagtgatctgcctgcttcagcttccggaagtgctgagattacaggtgtgtgccaccatgcccgactggtgtaamcactttggaaagcagccactgagcccggccttcaccagtataccaatatttgttaatatcgttttattttttacaatttttccatttttaaaaacttattcttttacctgtattattgattataataaacaacgaataattttgcagtagagtccccccaaaaa

SEQ ID NO: 511470 - DNA, 308 bp, Homo sapiens
gatttttacagtttttggtagaaatggggtgttgtcatgtagcccaggtttgtgtcaaactcctgagctcaagtgatctgcctgcttcagcttccggaagtgctgagattacaggtgtgtgccaccatgcccgactggtgtaaccacttyggaaagcagccactgagcccggccttcaccagtataccaatatttgttaatatcgttttattttttacaatttttccatttttaaaaacttattcttttacctgtattattgattataataaacaacgaataattttgcagtagagtccccccaaaaa

SEQ ID NO: 511471 - DNA, 308 bp, Homo sapiens
gatttttacagtttttggtagaaatggggtgttgtcatgtagcccaggtttgtgtcaaactcctgagctcaagtgatctgcctgcttcagcttccggaagtgctgagattacaggtgtgtgccaccatgcccgactggtgtaaccactttrgaaagcagccactgagcccggccttcaccagtataccaatatttgttaatatcgttttattttttacaatttttccatttttaaaaacttattcttttacctgtattattgattataataaacaacgaataattttgcagtagagtccccccaaaaa

SEQ ID NO: 511472 - DNA, 308 bp, Homo sapiens
gatttttacagtttttggtagaaatggggtgttgtcatgtagcccaggtttgtgtcaaactcctgagctcaagtgatctgcctgcttcagcttccggaagtgctgagattacaggtgtgtgccaccatgcccgactggtgtaaccactttggaaagcagccactgagcccggccttcaccagtataccaatatttgttaatatcgttttattttttacaatttttccatttttaaaaayttattcttttacctgtattattgattataataaacaacgaataattttgcagtagagtccccccaaaaa

SEQ ID NO: 511473 - DNA, 325 bp, Homo sapiens
gcagccatgggggctacaccctgcaaagccacaggtgcactctcctagtagaggtttcccatgagcctctgcctctgcagcaggttrctcccaccctcccaccaccctactgacaacctactcctccccacactatccctccttttccttccaccccaaccccctcccatccaagattaagtcacctcccacctggcccacctccaacattaaggatgacacgtgagttttatagggacacacagccaacccatattattctgaccctgattccccagaacctcatgtccttctcacagagcaaaacacaatcatgccttttcaa

SEQ ID NO: 511474 - DNA, 242 bp, Homo sapiens
tgtcatgaattcgttgaggagcttctggaaagtgcacattctgactcagcaggtattggagtctgcatttctcatgagcactcaggtgatgtttgtgctggtccttggacacagctctgaatagcaagggaatagcyttcctttagagaaatctggaaaaagaaccactggagagcaatttaaaaattaacagaatccagggaaagctttaatttccttttatttctgagcatgattctagc

SEQ ID NO: 511475 - DNA, 242 bp, Homo sapiens
tgtcatgaattcgttgaggagcttctggaaagtgcacattctgactcagcaggtattggagtctgcatttctcatgagcactcaggtgatgtttgtgctggtccttggacacagctctgaatagcaagggaatagccttcctttagagaaatctggaaaaagaaccactggagagcaatttaaaaawtaacagaatccagggaaagctttaatttccttttatttctgagcatgattctagc

SEQ ID NO: 511476 - DNA, 391 bp, Homo sapiens
ccctgcaaagccacaggtgcactctcctagtagaggtttcccatgagcctctgcctctgcagcaggttgctcccaccctcccaccaccctactgacaacctactcctccccacactatccctccttttccttccaccccaaccccctcccatccaagattaagtcacctcccacctggcccacctccaacattaaggatgacacgtgagttttatagggacacacagccaacccatattattctgaccctgattccccagaacctcatgtccttctcacagagcaaaacacaatcatgccttttcaaaagtttccaaaagtcttaactcattccgaatgtaaaaatttcaaartctcatctgagacaaggttacagttccttctgccaatg

SEQ ID NO: 511477 - DNA, 364 bp, Homo sapiens
cacaatggttcctactaagtgaaaaaaagccataaaatttcattcacaaatgtactamtctgtctcaaaacatctcacataatcatgcactgtactaaagccattagatcagtgcttcagtcaggttaaagaagtatccctctaataactgacttttataatgctatcaatatgcactcccaatcagtctgccattgttaatggtgtacagcattactgtatacaatggaattgatgacacccatatccacggacaaaccgtgacttatgatggtttgattcatgatttttcaacgttatgatgggtttattggaatattagatgcgtttctgagttacactgggtttatgagtatgcgaccct

SEQ ID NO: 511478 - DNA, 364 bp, Homo sapiens
cacaatggttcctactaagtgaaaaaaagccataaaatttcattcacaaatgtactactctgtctcaaaacatctcacataatcatgcactgyactaaagccattagatcagtgcttcagtcaggttaaagaagtatccctctaataactgacttttataatgctatcaatatgcactcccaatcagtctgccattgttaatggtgtacagcattactgtatacaatggaattgatgacacccatatccacggacaaaccgtgacttatgatggtttgattcatgatttttcaacgttatgatgggtttattggaatattagatgcgtttctgagttacactgggtttatgagtatgcgaccct

SEQ ID NO: 511479 - DNA, 364 bp, Homo sapiens
cacaatggttcctactaagtgaaaaaaagccataaaatttcattcacaaatgtactactctgtctcaaaacatctcacataatcatgcactgtactaaagccattagatcagtgcttcagtsaggttaaagaagtatccctctaataactgacttttataatgctatcaatatgcactcccaatcagtctgccattgttaatggtgtacagcattactgtatacaatggaattgatgacacccatatccacggacaaaccgtgacttatgatggtttgattcatgatttttcaacgttatgatgggtttattggaatattagatgcgtttctgagttacactgggtttatgagtatgcgaccct

SEQ ID NO: 511480 - DNA, 357 bp, Homo sapiens
ctgggatagcccagtgatgcccaagggcctagtcaaaagtggacaaagcacgtgtttggatggacttgggagatcctgctcagagattctgacaggacaaaggtaaaggaaagaccagagtggctggagagatggtcacagtctatgggctgcacaggatggagggggccaagggaacaggcagggtgggcagttggggttcagagagaggcaggtgcatgctgggaggtcagaccctgtgagggctttgggggcgtcaggttgggtaggctccaggcactctcactcacataggattccagaacactgctacaaggmtctgagtgtttgtccctcacataggattccagaacactg

SEQ ID NO: 511481 - DNA, 619 bp, Homo sapiens
accccaagaatatgaccagacagraatgcaagttgcaccccatttgtgagtagcatactgatggttgtttaagctttcctttctttatccctgtctttggcagttgtctggattttgaaagggctgaattttattttgcttcctctttagagacttggttaaagtcataaagtttatttgcttttgtctcatgtatgcttatttattttgatttcaagtcacttgtaggtatatttttgatataaaacgttggtttctatttagaatgcaataggaacatgctattttgtttgtttagccttctcccttaagcataatggaaccacatactctgaataaaagaaaataatttattaaaacatatcaaaagcaaacagctttcagtacagaacagagaaatcttttgatttgcatcttagctggaaatctgctccctgttataaaagagcaaattaaagatgatactgttggatgtatgggttatcatctagatatcattcaggttgccacacagtttttaggggaattaaaagcaactgtctttgtcttacaagttaaatatttcaaaaaaacagaaatgtttctttgatagaaatttaaagcccacctgttcttgcta

SEQ ID NO: 511482 - DNA, 595 bp, Homo sapiens
agcctaaactcagccatgaccaaaacacatgctatcaggggaaaacacagccgacctcttctggaggtaagacttgagaaaagggaagtatttgaattaaaacattataacacagaaggccaaattcacaagtagcaaacagcagagaaggtacagtggaatccgacttaactaaagcatggatttccatctatgaaataggtggaaataaacaccaataggtcctcacccattatatatgtacagaaacgtacaacaaagtacacctccatctcctgcatcaaatgtgatgcttcttatttgaatcacagagtaaaggttaaaaagattactcatgttcactagcgtatattaattataaaaatcatttggagttttaaattgtgtactcccagactgtcatattatattatacagagtcatatgyataggcacaatttatgggataatatactttacatatgtttgtataaatataactatattttaaaagatcaaatactagttgactgaagaatttgtttccagattatcctgaggcacttaatatgcccaaagcttagtgaaatcctgaaggtcaaatgagtcaatgaat

SEQ ID NO: 511483 - DNA, 480 bp, Homo sapiens
accaccatatcacatatgacctacaaagtcagcagaacaggggcacaaaaatacagaaaggtattgatttttctttgycattatgaggtcctataagccatacgcaccatgtaggaaagagctatctgacaaactgagcacgtttatataagacagaataactctactgtttgaattacctaattaaataaaacttaaaattgagttggacatttcattaaccttttttctctgctaatatgcaggtagaaactagagagaaagacagttagctatagacaaaattaaaaattaaatattttctgggcatccaaattatagtatgagttaaatcatatatctctgatatacatgttagttcaaacaaacaaaaacagcttatactctacctgtctgaagagattagggaagtcatctgcattgttgacttttctaattcccttccctcctcctccctctgaggccttgatcattactgga

SEQ ID NO: 511484 - DNA, 546 bp, Homo sapiens
atttcagttcccaccatcactgactttatgtaggtgttcattatctctagcctagtctattacaatggcctttaactattttctcttactttagtctctccctgtttcacatctgttcaaaaacatgtaatgttttccctctgctttcagagtaaagcccaagataacaaccccaacttttactgccatttattgagcatttactgtgagttaagcactaagtgctttcaatatttatcttatgtaaccaaacaacagtcagtcctgtaaaataggcgttaattatctccattttccagaagaggaggatacaggctcagagagattatgtaattttcctacctaatawgtggtggaggcattcagtcatggtattcagattcttccacaattaggccatagctgatttttccagtcttgtttctacccagtgttttttccctctttgcttattccagttgcagtagacaattgcctgtttcctaaaattccatatactttccatctttatgtcctttgatcattctatttgtgtctcagtctctt

SEQ ID NO: 511485 - DNA, 477 bp, Homo sapiens
gtatacaaaccagagatccgagaatcatcttggcggcctcactctgtaagcagggaaacgtctgtctgtgctcagcagcaatccctggaggcagagactggaaattacacctgcaaccgtagtaagagcttgccatggrctggcatgggtgccatacctggagctgtacatgcatcccccacgattctctcagtggccctttgaggtcgctctcttactgccaccaaggtgcagggtggtgaaggcaactcagagcagagacctggcctcgaagcctcgtctccctggagaatgaccaatcatcaagaatctgtgaacacaagcacgagaggcaatctgagcccttccccaaagcctcactgtccattcactctggctggaatcctgccctaccttcagggcccagcttagggacaaggagcaaccacatcctacctctgaggacacagccctcacgtatttctgcaatccgtctgc

SEQ ID NO: 511486 - DNA, 625 bp, Homo sapiens
tcgactgtttatgcagtcgatgcattaattttagtgcgggttggctttttacttctttgaaaagagcctcggacaaatcctctttgwgctttgcattgagctcggctttgcagccaaaagaaattagtaaagtctagaactttgttttcagagtttgtcaagttctttccagtgaaatcttttctccagttccagatgttgcggtttattgacttcagcttctattttccttccatgtgaaaatgccaacatcccatttggagatgacatggagagccagaggagggtagacatagccaatctgctcaaaggtgaccctgaggagttaaccactggtactggtatggcaatttaggttgaatcattatatagatatattaacttttcaaaattatttcttctgataacagcatttaacataaacttggtttattttatgttctgcctggacgaactgagatgaagaagtggggtaaattggaaattactgtattacaatcaaaatatccagattattgggcaaatgttaatttgaggctccaacttttcagggaatggtcattttccacttctctgtgtgtaacacaaacagaagtatgtgcaacaaccagtgagaccagaacca

SEQ ID NO: 511487 - DNA, 657 bp, Homo sapiens
tctattccctcagtatcagataactatctcgactgtttatgcagtcgatgcattaattttagtgcgggttggctttttacttctttgaaaagagcctcggacaaatcctctttgtgctttgcattgagctcggctttgcagccaaaakaaattagtaaagtctagaactttgttttcagagtttgtcaagttctttccagtgaaatcttttctccagttccagatgttgcggtttattgacttcagcttctattttccttccatgtgaaaatgccaacatcccatttggagatgacatggagagccagaggagggtagacatagccaatctgctcaaaggtgaccctgaggagttaaccactggtactggtatggcaatttaggttgaatcattatatagatatattaacttttcaaaattatttcttctgataacagcatttaacataaacttggtttattttatgttctgcctggacgaactgagatgaagaagtggggtaaattggaaattactgtattacaatcaaaatatccagattattgggcaaatgttaatttgaggctccaacttttcagggaatggtcattttccacttctctgtgtgtaacacaaacagaagtatgtgcaacaaccagtgagaccagaaccaactc

SEQ ID NO: 511488 - DNA, 447 bp, Homo sapiens
agttggtattgtggttctctgctatttctgattcatccagaggcactttttttctttctgcatcatttaaatgaaaaatttttatagtccaattttatcaggtgagtgtcgagtcatctttcaatgccttgaatcctggtcctactcataagatgmatctgaatgtataatttaaattctaccataaagaagaacaaataacccagatgagaataagcagaagagaattaaattaagaaagtatgagagatccaagcctgagtgaacagccactgattcttgttggataatttagcagaccactcacctaggaaaatacttcgattctaacaatttgtgtaactgatatgtaagccaatagcctggaccacggctgggtggtgtcaataatctcagtggcctagatctggagttgctcagctctgacatggctaagccactgcgcaa

SEQ ID NO: 511489 - DNA, 580 bp, Homo sapiens
tgggaggcaattgtgaagacaacagcttaatctaactggaaaatacaggaagaagagagtatacactaaatttcctcccatattattcaaacaatgaagaataaaaaaaggctatgggtggtctaactcaacaactgattggcagaatatactttaaattgccttagactgttgtctttaaatgttaagaatctacaaagttaaattcactgtatttgttaatcagctaaaaggcaggctcaggcaatggtacacaactacatttcaatggctataaaaattattacagatckcttgttttttatagtttgttaactagcatttggtgtatgtataaaaagatgctttgacaaagtagttatgaagcaatggttaatctcctttgaaaggtgtgtgaaagaccaagaggttcatggtaattcacatcttcatgccaggctgtatttctggtgtacagtcattagtaagttttaaatttcacactgaataacagaatttaggaagaggagagtaactagaagatttaaatctgacctggaacatcagagtagtaaactggctgtgctcttcagggtgctga

SEQ ID NO: 511490 - DNA, 587 bp, Homo sapiens
ttcacacgtgtcaatgaatgaatgagggtagaaaaatgaaagcattaaatatacagtactctaaagactttgggcagtaagtggaagaaattataaggggaaagcaagtgccagcatgtyacggagatttttttaagaacactctttgttttcctaagaacaaagcaatttcaagaactaaaatgatctgagcacattttaaggctggggatagagaatagaaaaaaaagagaatataagtgcaagaatgaaagagatctatgtcctcacatttatgttgttttgaaatgctgtatctcaaggtggtaacttctgatagaaagtactagaactcttttcagagtgacaatcacctgtctcaatctgattcatggaaacaatttcacaagtaaatgtgaatagaaaagaaaattcaggaagagagaaaagatgtgagatactttataatatcaaactatgacaaccagtacatcatttaaggagccgtgttctagtgtatgttcaatgtgtattttttgagtctttaactagtgttttaatgctagaaatttttatttaatatgtcatagttttcactccaatgccca

SEQ ID NO: 511491 - DNA, 587 bp, Homo sapiens
ttcacacgtgtcaatgaatgaatgagggtagaaaaatgaaagcattaaatatacagtactctaaagactttgggcagtaagtggaagaaattataaggggaaagcaagtgccagcatgtcacggagatttttttaagaacactctttgttttcctaagaacaaagcaatttcaagaactaaaatgatctgagcacattttaaggctggggatagagaatagaaaaaaaagagaatataagtgcaagaatgaaagagatctatgtcctcacatttatgttgttttgaaatgctgtatctcaaggtggtaacttctgatagaaagtactagaactcttttcagagtgacaatcacctgtctcaatctgattcatggaaacaatttcacaagtaaatgtgaatagaaaagaaaattcaggaagagagaaaagatgtgagataytttataatatcaaactatgacaaccagtacatcatttaaggagccgtgttctagtgtatgttcaatgtgtattttttgagtctttaactagtgttttaatgctagaaatttttatttaatatgtcatagttttcactccaatgccca

SEQ ID NO: 511492 - DNA, 659 bp, Homo sapiens
gctcttacaaagttatacctatgtactgtagaccacacaggaggagcacagttgctcaactattaaagtatcaccaaaagacggtttacttaaattgatctaattgcagcactatgggataacttctgtgtacatgtgtacatcaatagtgtctatatcagtaaatggaatttattttgaagaattgtgtttcagaatcacatgaaagaaatagtacatrgtaacattataaaataattaaaatctcatggcccaggaaataaagaggtgatgtattttaccaatcgtaactgataatatgcccatgccatcttaaacatgtttgaatataagaaagaaataagtacaagtcagcactgtcataaaaaaatattatgttctgcttgccaaagtaatttctcagtacactcaagtaaatcctacaattttctaggtattatttagctgagattatcacattttatatctatatctatctatatgtatatctatctatattatatatatgaagcacagacacacacacacttcccttataaccaaaacctgtcatttatcaatagaaaaaagtgagatagaagaaataaaaagcaacataagtattgaacctaatactctcatacaacaatcatctcttaagtcaatgtccacccctgtga

SEQ ID NO: 511493 - DNA, 624 bp, Homo sapiens
tgtataactaagattaatgtactttatacactttactttttgtacacaaatcaaaaataaatgtcaatgtccagtacttagaacaacgtcaggtacttactgagcactatggaagtatttgctattaatattggctcatatttgctagttatctacacatttaaaagagtttacaagcatgtctcaagagcttaaatgtgttatgatgatacaaacattgtcaaataaagttcccatcctgaagaatggacaagttatttgggagtcctgctaagcagttccagccacctctctggaagcatcatggctagcaagtaaacaggctctgaagtcagaaaaaccttccttaaattttgttctgtcatttactaaccttggcaatattacctaacatccagagtttctgtttctttatttttaatatatagctgataatagaagctacttcatatggtctttctgagatrttagaaaaagttagctactattactattattagattcatttgatctttaactttcagagaaaaatgatgaaggctaaagctgggaattttacagtcattaattacatttgagttagctaccttcttcccgagctcaccttcatttgactcatttcag

SEQ ID NO: 511494 - DNA, 661 bp, Homo sapiens
aaacctcagagaatagcaaaaacaactggttttgttgtctatattgaatataggtgatttcagaagcaaactcagaagagctattaggataaatatatttgttcatttgtttttataagtttataagtttttattttaataaaacaaacaaaaaactaccagactgctgcttctttcagatcatacatattataagagatgtgtctactgtgatatctgcagcaagttgctagtaaattcccaaataacgtaagcaaattgacagtttatcattactgggcataaaaaggtgaccaagagctttaacattttaagtttgctgaatacagttcataagcacattttctctcttacacacagcagaaaattactgtagttttagttttctaaatcaagaaagaacaggaaaatacaacctcgggaatgtttccmtatacactatttatacaataactacataagaatatatgtatgcagaaacttctcaagaaagaaaggtggaaagcaagacatatacagcagaccacgtatgggctagacattaagatcagcacttcatataccacatctcaatcaatttagtcctccaaactatccaataaaaatgacctgtgtacccattttatgatggagaaaaataaggctgggcaaggtttggagg

SEQ ID NO: 511495 - DNA, 577 bp, Homo sapiens
taggataaatatatttgttcatttgtttttataagtttataagtttttattttaataaaacaaacaaaaaactaccagactgctgcttctttcagatcatacatattataagagatgtgtctactgtgatatctgcagcaagttgctagtaaattcccaaataacgtaagcaaattgacagtttatcattactgggcataaaaaggtgaccaagagctttaacattttaagtttgctgaatacagttcataagcacattttctctcttacacacagcagaaaattactgtagttttagttttctaaatcaagaaagaacaggaaaatacaacctcgggaatgtttccctatacactatttatacaataactacataagaatatatgtatgcagaaacttctcaagaaagaaaggtggaaagcaagacatatacagcagaccacgtatgggctagacattaagatcagcacttcatataccacatctcaatcaatttagtcctcyaaactatccaataaaaatgacctgtgtacccattttatgatggagaaaaataaggctgggcaaggtttggagg

SEQ ID NO: 511496 - DNA, 473 bp, Homo sapiens
atgtaacctaatcacaaaagtgacatcccatcatattgacatattttgaccacactgaagaggaggggactagacaggtgggaatctcaggggccatcgtgatattctgtcgagagcaatgttgcaattctcacttgacattcccagctccttctctagcacagaaggaaacaaggaaaaatgggtggagaaggcaggcaggaatccattctgtggatagagttagtgggctgagccatatgaaattgccaatatttcatcatatttaggtcaacagaaatagatgatatacagtcataaataaatatacacagagacacatacacatatatttgtatgtatacatatacatacgtaaacatagtttagggataggaataggtatagatgakatagagatagagatagagatagaggtacaggttcctttcataaacgaggtctctaagtctttctaaatcaccctgttgctg

SEQ ID NO: 511497 - DNA, 596 bp, Homo sapiens
ttctagtgattagattctgtcaatcaaagactgttttttttttttatatcaaaagccattaggagttagattttcagtacttctgaagggcaaccaaacttgaatgcagttagagatagcagttactctatggctaacgttatcatggggtgaattataggtattggcgtttagctttgtaaactgtgcttacctagggattttaataaaccatggattgaagttttatgttttcccttcctaagaacatayagcatttttacactgagactttattagttgttcgtatggcttcatcaaatcgcaattcacagggtagatgtacaaggactgaaaatagatatatcccaaccagtggaataagatcagtttgtaagtcaatatctgccaagggggaaaaaaagctcctaaggatcttttctgtttcctttaaataaagagctctttttcttcaggcttcaaataaacttttatcttccccaagttggttgcgagatcttcagtgcatctaatgaggatcaagccaggggtacaataggttgactcagtgctggagagttcagaggacagagtccaggctggtcacatagcttccc

SEQ ID NO: 511498 - DNA, 653 bp, Homo sapiens
agtagttgatatcacagaaaacatatactcctggggccataggcttaagttccatttccctttgacacttaaaatagagataatatcgtcactagccaagagaaactaagacaggtcaataaaagcatccccttacctttaagcaaacatctgttgagctcctattctagccagagattgtcctgtatcctctggctgcatcaaagctggatcacacagggattctgtccagaggcattaataacccccaaacactggaatacaaggtagaaatactaagtggcaaaagaaaagtgaagaaaaacatgagggctgatcagagaaggtggtatccctgataattgatagctgagattgttctgttacaaaycttcaaagcagatggaaagcttctttgaggaactcattccaaagtgtagccaactaaagctgcagattttgtcctgggctgtccatactgcaaacatgggcatgattcgctagtttttgccttctgggtgtagtcaacagctaaaagtaatgggacaacccacatgtaccaggaagactagaataagagatggcaaacagcctgtgttctggtgtaactcattgatggacaccttactaagttcagggttaggcttctgatcctgccaggattagcatttaca

SEQ ID NO: 511499 - DNA, 655 bp, Homo sapiens
atgagaattagatgctcacaggaaggttggaatgaaggttgcaactgaaagtaggggaggggacctggcctgagcctcatgcgttggctcccgggcggcaagcttgatgggcccccagggttgctgctgtcattgccacagcctgggggctgggaatcagaaccaccgctasaactgctaacatcaagggtgcaccttttgggctgtgttccattgatcagagaggctgctgcaaaatgcctctccaccctaggaagctggtgactgaacattgctaccaacaacaaaaacaagaaagcaaatgttttccttagatgctctccactttccttcttacgctactcatctccctgcaagaacactgtgcccagaaccctagctgcaagggactctgggaaatgcagcttataggtttctagcctcaaaggtagagggatgcacacttgaaggagataggagtgaatgttctgtgacaatccatcatgcctaacacatatctaaaatatatttcatccgagatttggctagagtatttatttttaaaattggtagagattgactttggaaaggtaagaggatatgttgtaaaaattttttaaaggagctagttgctaaccagttaccttttcaaacagatggatgttatcgttttgca

SEQ ID NO: 511500 - DNA, 655 bp, Homo sapiens
atgagaattagatgctcacaggaaggttggaatgaaggttgcaactgaaagtaggggaggggacctggcctgagcctcatgcgttggctcccgggcggcaagcttgatgggcccccagggttgctgctgtcattgccacagcctgggggctgggaatcagaaccaccgctagaactgctaacatcaagggtgcaccttttgggctgtgttccattgatcagagaggctgctgcaaaatgcctctccaccctaggaagctggtgactgaacattgctaccaacaacaaaaacaagaaagcaaatgttttccttagatgctctccactttccttcttaygctactcatctccctgcaagaacactgtgcccagaaccctagctgcaagggactctgggaaatgcagcttataggtttctagcctcaaaggtagagggatgcacacttgaaggagataggagtgaatgttctgtgacaatccatcatgcctaacacatatctaaaatatatttcatccgagatttggctagagtatttatttttaaaattggtagagattgactttggaaaggtaagaggatatgttgtaaaaattttttaaaggagctagttgctaaccagttaccttttcaaacagatggatgttatcgttttgca

SEQ ID NO: 511501 - DNA, 655 bp, Homo sapiens
atgagaattagatgctcacaggaaggttggaatgaaggttgcaactgaaagtaggggaggggacctggcctgagcctcatgcgttggctcccgggcggcaagcttgatgggcccccagggttgctgctgtcattgccacagcctgggggctgggaatcagaaccaccgctagaactgctaacatcaagggtgcaccttttgggctgtgttccattgatcagagaggctgctgcaaaatgcctctccaccctaggaagctggtgactgaacattgctaccaacaacaaaaacaagaaagcaaatgttttccttagatgctctccactttccttcttacgctactcatctccctgcaagaacactgtgcccagaaccctagctgcaagggactctgggaaatgcagcttataggtttctagcctcaaaggtagagggatgcacacttgaaggagataggagtgaatgttctgtgacaatccatcatgcstaacacatatctaaaatatatttcatccgagatttggctagagtatttatttttaaaattggtagagattgactttggaaaggtaagaggatatgttgtaaaaattttttaaaggagctagttgctaaccagttaccttttcaaacagatggatgttatcgttttgca

SEQ ID NO: 511502 - DNA, 275 bp, Homo sapiens
actttccttcttacgctactcatctccctgcaagaacactgtgcccagaaccctagctgcaagggactctgggaaatgcagcttataggtttctagcctcaaaggtagagggatgcacacttgaaggagataggagtgaatgttctgtgacaatccatcatgcctaacacatatctaaaatatatttcatccragatttggctagagtatttatttttaaaattggtagagattgactttggaaaggtaagaggatatgttgtaaaaatttttta

SEQ ID NO: 511503 - DNA, 505 bp, Homo sapiens
cactgctctttaaaacaaacagaacagctacactcagagcaaggaggatggtagggatggcctctttctgggtatccacactgcctcttcctcccagactggctggactctgagaagagctgggaacacagrgccctgttccatggaacaagcacgtcttgcttctcaaagtgacggttcttttgttccattgcccaaacgtaaatcatcagttggcctccgggaactaagaccctggccatttcttttattgctctgattcttctttgttttgtagaaaaatgatgtatgactgaaaaagacaaaactagatctcagtgtgtatgcacacacataaacccacacacgtatacactggtgtttaccatataacaaggatgaaattttgacatctaatgaaaccttcttatttcctccatggcaacgatgatgacagaaataacacaggactgattttaggagaaacataaattttagctttggctcctgtacttttaatattaga

SEQ ID NO: 511504 - DNA, 653 bp, Homo sapiens
tgaagagtgaagcacgattttaaacttggcttctatgaaattccatcatttctgcctctggttttgtctctacagaacctggaggactaatttacccaaaggagcctgtgcccttttactaacctctgtggatcacgatcgcgcacctgtggtgggtgtgagggttaatgtgctcttgtccaggtatttgattgaaccctgtgggccaggaaaatccaaactcacctacatgtgcagagttgacttaaggtatgttctgattctgatttttttatatggtgagggtcatgaaggaaattctgactttttgtctaatgcaaagaatgccttaaacaaacacgtcattttttcttggtracttcatgaagaatggtgtttagaaagtagcatttcatgtttgttggtctttcagcgaccacttcgtaatttggttcccttagaaaatgtggttctaaagcaaagcaaatatggtagctcggccatgaattcaaaggcatgggaaatgatagattttatgcatttgaactagcaaacagatgtttctcattttatttccatgctttctaacttaaataattcatcagcttttctttcttttctctgataggggccacatgccagaatggtacacaaaatcttttggacatttgtgt

SEQ ID NO: 511505 - DNA, 634 bp, Homo sapiens
tatttatgaattatttaaaatatttattagcatttaatacattatcaacgttagtacattacaatccaacaataattctgatgcatttaatgtctatcacattgtgtgtgcattctgcaaaatatgtattgcctaatgtgaaggtatttttagtttatataaatatgttgtgaaatacgtgggttctgcttattgtttttcacaagtacaatgattttaatatctattcattggatggtgaccttttaccacatatctattcaccttcttagtgccaggtaatctggatatacattctccaatgtttccattataggtgacaatatctttgggatatagatccaagagtggaaattctgagtcacggattgaatgtctatgtaatatgactaaattatgccagatttcatccaggatgactgtactagtcttcaacatacrttgtcagggctcaaggacacttacaatccgttggcattaactggctttctcattttgttagtctactatgtgtctggctattgtcaaaaattcattgttcttgagagggagtttcatgactataaagcaaaaagccactgaaaagaaaaagcgtggcaaagtgccatagtttgtctatttgtcttagaaatat

SEQ ID NO: 511506 - DNA, 591 bp, Homo sapiens
tgaaatcaagcagctgcatcataacttcaatttttctcagtttaataaagccaactcgaagatgtaactaagaatctggcctctaaagatggactatgtttccaattcttcaaggaaatcttaataaacgtattttagaattgtttacaggctttaaaatcctttctctstctctctctctctctatatatatatatgtgtgtgtgtgtgcatgtgtgtatgtatatgtgtgtatatatatgtgtatgtgtatgtttctacatatacacacatagagactatatatgtattatatatatataatacagagaaacaatctcatttgagacaataaaaactgactgttcttttgtaactattgcttatactttatagaaattattaactgaaataaaaaaagtgaagtggattgctcaaaaaatagtggggttataaagaaatcctcatattttctggctcccaattcagaatgtgttcaagtaaacagaacacaaaataatgaaactaaatcttttaacacatactaccaaagtattacaggttacttatctcatttaatcctctttaaaacctgctaagatattattaggc

SEQ ID NO: 511507 - DNA, 557 bp, Homo sapiens
gctgccctgcactcactgctattttgcaatcattaatttccgtgcactctaataggcaatgctttcactgaaagctggattgtatctttcatagttagaggtttatacccccaggacctagcacatagtcacttgacccataataagcacttaactataaatgaattaattcagatggaagcttacttctgggtatctcttgggctcctctgcaaggcactgatgggtacaggcaaactgaataatctgaaagaattacactaaaaaaagagtattttcaaaagagtgagcagagcttatggaaggcaacaaggccggggcagcatcctggggacagggacaccagggagcactcaccacaccttgggtgtaaaggggaagagaagggagccgtgggtagtcaggatctacccagagacagaactggatggagaaggataactggccagatgcaaaccagacataagcctgcagctcaggagggagttggggaataaatactccaagttctctctcttacccactggcatytcctattggtggcatccatggcctga

SEQ ID NO: 511508 - DNA, 621 bp, Homo sapiens
tggaattctgaatgcagacttgtgaagtataactctagtcaatttataattggcaattgtagagatacaggcaactaaacagatttatgcacaggaattaaatctttattatatgaagccactgatatttaagaattgtttgttatacagcataatcttaaaaagctgactagtacagaaacaattgtccagggtaatgtactgcatgacaggaatgctaaatgggggaaatttrtttaaagcccccttaaacctctaaatgagaaagaaacttactggaaactgggaaaatgatggctcctatatgcaataataacttgctatctgtaaataacttgggaacattctgtttgacttagctgctattatttgcatttgaaaaagtactattaaacgtgtgtgtaaatagatagatagacagatagagaaatcagataagatagacagatggcccaattgaagggtgacaaaataatgcccatatctgtaacctctcaattaaggttatgcctattaaaatgtttcaggtggataaaagtgctcataaaaaagacttgaaagctgtgagtctcccatatacacataataagctcaagctacttgtaagtaaatctagagcgg

SEQ ID NO: 511509 - DNA, 555 bp, Homo sapiens
gataagcatttccttaaatgcttttctctgactaagccacaacagcagcaacaaattttgttttcagtatgagagagaagtttataaaaaatgaattaaaaatgtgcttgggaaagattagattattgtgatgcgttcacaggggaaaggactccttttctggcatgtttagacttagaccattaaatggccttgaatgtttggaaacaggaagggagcagagtccagctttctccttaggtgtggttccaccaatgtttgattatggatttaactatttgcatcatcctaaawtaataaactctcctacacaatgtcacctgatataggctgtccagcaaaaataggctcacatcagcacttgtttcaactgggaggaaataatgacataatggattctagttgctcagtgaatttgaaccatgcaaggacagacatataagtctgggtggaataaagtggataatagtgtgattacatacttgacatctttgctccgtgtaacaacttcccttgacctcttcaaacaaaattaatttgtttgaaacaaaaatt

SEQ ID NO: 511510 - DNA, 476 bp, Homo sapiens
gactctggtaagcaccgtggaggggaacactgacagatgaggatggagagatcggtgcattctgcatatggaaggccattatcccatgctgaaggtgtgaacttacagtctcagttygtcaactgcagccctgggataatgacatttgcgtaacacagcttgtacaggcattggaataagtgaatgggaaaagtgatttgaatgcactttgcagggtggaaaggagtaaaaatgttacaggaattcatgcttatgttataaatgagagaagatcatgatgaatacataggtaatccccaaacagaaccatttgaaattctatgtcccttagctacctttttctaaacagtattaatttagaaaaaaaaaaatccacatgctagctatatcagtttacttttgtcagagttctagctcctccaacttattctacttctcttaagtgaatgtaataaaacaaatgttttccacccaga

SEQ ID NO: 511511 - DNA, 552 bp, Homo sapiens
ggagtgaagacgcgtcatatttgcaatgcagatgatccttctccttcccacgtttttggttttctgtttgtctgtaatggctattgagatgaaaacacaaatacttttgttgcaggagaattggcaacagcgggaagcttgcatatttcgagtgaaatccttagggacgtgttcctctacgggtgttttgcctgtgggtgcagttggtttaagggagctgaattgtgctaatgctcactttctttcctcatctttgaatcgttgtcaaattttgatgttgctgaggtctggaaacygactgttgattttgctgactcatattgtaaatcattcgataggagatgaagtcaattcaaccttaaccacaggatgaactgaaccaccattttttttttttttttggaatgaccttcccttttttcagtggaaggagagtatatatatttggtaaaggcacaaagaactgaaatcaatctgatgaattttacatatggcttttcattttctttcaatgtatcttgtagttttctttcaacatagaaagcttaaaca

SEQ ID NO: 511512 - DNA, 433 bp, Homo sapiens
gtaaaaagtgacacattttaacatagtcacgtaaatgcccaatgaatgtctagtttgaagacatgtactgaaatatgttcgtcagatrgactcatgcctttgaagagctatcattttgagataaaatatcccctaccagtggaaatgtgtaagatgagtggcagacccagtgccagagtcagaaagtgccctgcataagcatgcaatgaacagagcaaccgttcttgtaggcctgagtactaagatcacggctttcctgtttgtaaactgttattacgttgagttcatttccctgcaatactttcagcttaaggtctacggtggaatacaaaaatcattcttaacaagtccacctatgttttgttatgatctgatacatacaaatccctaggtacatagtgcctgggtggacctggattctgcacgtgtggaa

SEQ ID NO: 511513 - DNA, 433 bp, Homo sapiens
gtaaaaagtgacacattttaacatagtcacgtaaatgcccaatgaatgtctagtttgaagacatgtactgaaatatgttcgtcagatagactcatgcctttgaagagctatcattttgagataaaatatcccctaccagtggaaatgtgtaagatgagtggcagacccagtgccagagtcagaawgtgccctgcataagcatgcaatgaacagagcaaccgttcttgtaggcctgagtactaagatcacggctttcctgtttgtaaactgttattacgttgagttcatttccctgcaatactttcagcttaaggtctacggtggaatacaaaaatcattcttaacaagtccacctatgttttgttatgatctgatacatacaaatccctaggtacatagtgcctgggtggacctggattctgcacgtgtggaa

SEQ ID NO: 511514 - DNA, 433 bp, Homo sapiens
gtaaaaagtgacacattttaacatagtcacgtaaatgcccaatgaatgtctagtttgaagacatgtactgaaatatgttcgtcagatagactcatgcctttgaagagctatcattttgagataaaatatcccctaccagtggaaatgtgtaagatgagtggcagacccagtgccagagtcagaaagtgccctgcataagcatgcaatgaacagagcraccgttcttgtaggcctgagtactaagatcacggctttcctgtttgtaaactgttattacgttgagttcatttccctgcaatactttcagcttaaggtctacggtggaatacaaaaatcattcttaacaagtccacctatgttttgttatgatctgatacatacaaatccctaggtacatagtgcctgggtggacctggattctgcacgtgtggaa

SEQ ID NO: 511515 - DNA, 433 bp, Homo sapiens
gtaaaaagtgacacattttaacatagtcacgtaaatgcccaatgaatgtctagtttgaagacatgtactgaaatatgttcgtcagatagactcatgcctttgaagagctatcattttgagataaaatatcccctaccagtggaaatgtgtaagatgagtggcagacccagtgccagagtcagaaagtgccctgcataagcatgcaatgaacagagcaaccgttcttgtaggcctgagtactaagatcacggctttcctgtttgtaaactgttattacgttgagttcatttccctgcaatactttcagcttaaggtctacggtggaatacaaaaatcattcttaacaagtccacctatgttttgttatgatctgatacatacaaatccctaggtacatastgcctgggtggacctggattctgcacgtgtggaa

SEQ ID NO: 511516 - DNA, 320 bp, Homo sapiens
tttttgcttttattccataatagtgggtacggaaatggtaagccattatcacarcatcatccctggcttaattaatagagtggggcaattttggcaccttgaaaatttagaaataaatataccaatgcacagtaattacaagttcagaatttagtatcatgagcttttaaatatcataattgttgttattttggttggttggatttgtgaactctcgtaccaaagacatacagatattagattaacacaatgttagataagaaggaattctaacagttagtgccatgtttccatttttctaaggtgagttccatgacaac

SEQ ID NO: 511517 - DNA, 320 bp, Homo sapiens
tttttgcttttattccataatagtgggtacggaaatggtaagccattatcacagcatcatcccyggcttaattaatagagtggggcaattttggcaccttgaaaatttagaaataaatataccaatgcacagtaattacaagttcagaatttagtatcatgagcttttaaatatcataattgttgttattttggttggttggatttgtgaactctcgtaccaaagacatacagatattagattaacacaatgttagataagaaggaattctaacagttagtgccatgtttccatttttctaaggtgagttccatgacaac

SEQ ID NO: 511518 - DNA, 612 bp, Homo sapiens
tttccacacactcgttgctggttttatacattttaaaccttatctttcccctactacccacatattttcattgcaagataccataagacatgttcatattaatatataaattccagccctgggtgctgggtgtttcttccttttttatggcttaaaacaacagaaatttattccctcacagttctggattgtagaaatttgatatcaaggtgttggcagggccatgctccatctgcaggctctgggggaaaatcgttctttgcctcttcccagctcctgttggctcctagtaaccgtttgwgtttcccagtttgtacacaatccctctaatctgtgctgtgttgtcatatggtcttctcctctctgtgttcacttctcttcctataaaggaaccagtcattggatttagtgtctactttagtccagtatggccttaactagctacatttgcaaaggccttatttctaaataaggtcacattctgaggtttccagggaatgggaatttgagggagaaagtattcaacccattatgaaaacctataacagcaacttatatctgttattattagttagaaagtctcatcaaacacctcagtgtatctgttagcat

SEQ ID NO: 511519 - DNA, 519 bp, Homo sapiens
ttccttttgttcctgctctaaatctttttaataaactttcactcctgttttaaaacttgcctcagtctctcactctgtcttatacccctcagttgaattatgtcttctgaggaggcaagaatcaaggttgccgcagacctttatggatttgccactgttaaacactgtgatgtgaccatctgccagactyttgtctgtgcttctgctagatcctctacattcagtcagttcataagcacagagaaagcatgtttaagtttgcaagataatttagaggtcacgcttaaaactggcatacatccattcatattctgttgaccaggcttagttacatggccccatgttgatgcaaggtgactggaaagaatagtatttctctatgactaaaagaaaaagaaagtagtttgttaaacacacagcaattcctctgctttacaaggcagaatatacataaataatgagcttaatcattcttattttcttatcagtggaagcaaagttgtatgtgaggaaaagaaa

SEQ ID NO: 511520 - DNA, 268 bp, Homo sapiens
gtgccttgaccagagcctacagacctccttactgggacaagccagctccccgcctgctctgtgctgtgctgctaacccttgcatctcaaacctgcttcagggaagtatgcagcagaaaagcctagcccyttgccttaaggcaggacaaactcagaggcataatttgtgctgcagagctcccttgggctcaggccacggcagggatggaaattgaagaaacccttgcttgtcttctccttctttttccctggctccctcgctggtttca

SEQ ID NO: 511521 - DNA, 595 bp, Homo sapiens
tgagttttcaagggaagcaggagatggaaccaggataagctaaagaccccagagcaagcttttcttattggtgtcatcagtttttcttggatatgtgctctactggttgctgcaaactttttattagtttccagagctctataaagagtgattttgaccattttttgccagtggtttcactgttttggtggaaggcaggcctttggaattcctractcagaactttcccatggatggttttaaataaattagttttcagatctttaacttctacatgggctgtttccaaaacatgaccttcctaagaactagcatgagatcaaagagtccctgtttagaatagcccttctcccacatcacaaaaggttccttttcaacaaccttgcatcttactatagaccgtagatccatatctccagggatgaacaaggggataatttaaaatactgaagtaggtatttcgggtgagactgtctttaattcctgggtatcaaatcccactacaagtcatgtaactttcaattcttttaaacaagttgaaggtggaacgaatccagttgtcagcagatgggttatttactataatttttattat

SEQ ID NO: 511522 - DNA, 479 bp, Homo sapiens
agaggcttccaggtcctggggtgagcccattttctggcatgagttcaactctcgtagtgtactgtttgtgagaatccattgcattgtacgcttaagatatttgtgctttccatctgtgtgttatactttcaaaaaaatttgttttagtgcctgagaattagaaaaaaaatcctagagatcttcagacctccaaagctgggatccaagtctgtttctctgaggggatccctgttaatgtctggatcatggacagagtgaaaaggaacttacagtaatgtaaatttggagacagaaaataggtagtggcagcagggtgatggggcctggaagctgggaggggtgctggacctgctgggatgggagcagggggagagctgattgttttgtcccctcctgagtgcgagagtaatctgtaacccttccmcagcctgtgatgcgggcctggagctctgcactgagctgcacgttctctgtgccca

SEQ ID NO: 511523 - DNA, 529 bp, Homo sapiens
aagggttcccgctgctcagaggcacacaatttagcatataattagagcatcgaacagggaatactgtgctagttcctaggaaacatttcctctgggcacagtccaccgcatatgctgcaattgcacccaatggcccayccacaggctttgatatcacagatccattttagaccctttctcacaaaggaatggaaagaaaagaaagttgaatgcaaattaagtacactctgtcacagcctcgctatcagggtttcctggatctacagcacataaacctttcaaacatcacactgactacaaagcagtcatcggaatgatccttttgccaaatattcaaagaaaagaagcgcaaagcatgtacaaaggttccagagggtgcaaagaaagcctttctattgctaggcataaagctatcacaaagcaacagggctgtgagggtccccagaacaaattagtatatacaaaaagactaagttgctcccttccactggagctaggaacaccttgaaaaaaatgaactggggttgaa

SEQ ID NO: 511524 - DNA, 529 bp, Homo sapiens
aagggttcccgctgctcagaggcacacaatttagcatataattagagcatcgaacagggaatactgtgctagttcctaggaaacatttcctctgggcacagtccaccgcatatgctgcaattgcacccaatggcccatccacaggctttgatatcacagatccattttagaccctttctcacaaaggaatggaaagaaaagaaagttgaatgcaaattaagtacactctgtcacagcctcgctatcagggtttcctggatctacagcacataaacctttcaaacatcacactgactacaaagcagtcatcggaatgatccttttgccaaatattcaaagaaaagaagmgcaaagcatgtacaaaggttccagagggtgcaaagaaagcctttctattgctaggcataaagctatcacaaagcaacagggctgtgagggtccccagaacaaattagtatatacaaaaagactaagttgctcccttccactggagctaggaacaccttgaaaaaaatgaactggggttgaa

SEQ ID NO: 511525 - DNA, 577 bp, Homo sapiens
caaatcactgaggaaaagatggacttttaaataaatggtgctgggaaaactagatggccatcctgaaaacaaygagattgggtacacatctcacatgtcacacaagatcaaactccaatcgactggagatttaaatgtggaaactgaaaccatgtaagaaccagaagtgaacatgagtaattctatgaaaacctgggtgtagagaaggcttttatcattatgcttcaaagaatctgatgcactcacagaatgaactagcaaattaatacataaatattaaatgaaacctttctacatggccaaaaacaccataaatgacagcaaaatacaagtaaaatattgggagacaatgtttgcagcagatagaaggttaatctagctaatatttaaaaagtcttgaaattgacagaaaaaaagaaaaatgtgaatacaaatggtccttaaagcatctttgaatatttgcagctcagatgcagagaccctagggaatcctgctgttggccacctgcaggaggaaacgaaaatgagactgctcaggactgcggggtgagccctacagttctccctggacgtggcc

SEQ ID NO: 511526 - DNA, 577 bp, Homo sapiens
caaatcactgaggaaaagatggacttttaaataaatggtgctgggaaaactagatggccatcctgaaaacaacgagattgggtacacatctcacatgtcacacaagatcaaactccaatcgactggagatttaaatgtggaaactgaaaccatgtaagaaccagaagtgaacatgagtaattctmtgaaaacctgggtgtagagaaggcttttatcattatgcttcaaagaatctgatgcactcacagaatgaactagcaaattaatacataaatattaaatgaaacctttctacatggccaaaaacaccataaatgacagcaaaatacaagtaaaatattgggagacaatgtttgcagcagatagaaggttaatctagctaatatttaaaaagtcttgaaattgacagaaaaaaagaaaaatgtgaatacaaatggtccttaaagcatctttgaatatttgcagctcagatgcagagaccctagggaatcctgctgttggccacctgcaggaggaaacgaaaatgagactgctcaggactgcggggtgagccctacagttctccctggacgtggcc

SEQ ID NO: 511527 - DNA, 577 bp, Homo sapiens
caaatcactgaggaaaagatggacttttaaataaatggtgctgggaaaactagatggccatcctgaaaacaacgagattgggtacacatctcacatgtcacacaagatcaaactccaatcgactggagatttaaatgtggaaactgaaaccatgtaagaaccagaagtgaacatgagtaattctatgaaaacctgggtgtagagaaggcttttatcattatgcttcaaagaatctgatgcactcacagaatgaactagcaaattaatacataaatattaaatgaaacctttctacatggccaaaaacaccataaatgacagcaaaatacaagtaaaawattgggagacaatgtttgcagcagatagaaggttaatctagctaatatttaaaaagtcttgaaattgacagaaaaaaagaaaaatgtgaatacaaatggtccttaaagcatctttgaatatttgcagctcagatgcagagaccctagggaatcctgctgttggccacctgcaggaggaaacgaaaatgagactgctcaggactgcggggtgagccctacagttctccctggacgtggcc

SEQ ID NO: 511528 - DNA, 577 bp, Homo sapiens
caaatcactgaggaaaagatggacttttaaataaatggtgctgggaaaactagatggccatcctgaaaacaacgagattgggtacacatctcacatgtcacacaagatcaaactccaatcgactggagatttaaatgtggaaactgaaaccatgtaagaaccagaagtgaacatgagtaattctatgaaaacctgggtgtagagaaggcttttatcattatgcttcaaagaatctgatgcactcacagaatgaactagcaaattaatacataaatattaaatgaaacctttctacatggccaaaaacaccataaatgacagcaaaatacaagtaaaatattgggagacaatgtttgcagcagatagaaggttaatctagctaatatttraaaagtcttgaaattgacagaaaaaaagaaaaatgtgaatacaaatggtccttaaagcatctttgaatatttgcagctcagatgcagagaccctagggaatcctgctgttggccacctgcaggaggaaacgaaaatgagactgctcaggactgcggggtgagccctacagttctccctggacgtggcc

SEQ ID NO: 511529 - DNA, 322 bp, Homo sapiens
tagacctttgttaatttgaataaaggagaggcagaagaccacagttattaaaagcaagtgggtttttgaaacagcctgcctgaatccatgtccagsctccatcattcattagtttagtcaatatatgccttagtttcaaattttcttattagagatactaattttaatagctaactcataaaattgagtattaagtgtaaagaatttagaaatgtgttattgcaaactaaggtcaaatgttagcttttacctgtggtggtagaattcagataattcaggatatgaaaaggagaaatagatattgatgtcattacactcatgt

SEQ ID NO: 511530 - DNA, 589 bp, Homo sapiens
ttcctgcttgttttcattatctgctaatccttgggccactctccctcatgttctggaaaatttagctcccactacagttatactgtattcaacacgacctttgctataaatcttggtgatttcaatgcccgcytgagttattttcctattaccatggcttctcagttctttgatgttacatcttccacttgttaggtctccaacctcatctcagacatttccatgcaaaatcgtattctagatgtcattagcaattgcagataccacattattcagccatcatataccattcttctaattttattcattgaatatactttaaagcttattggatgctgcaaagtattgattccactaatgtccctttccctccttctggccttgtttctttgcttacagttttgacccatgttcattcaatcattatactacatacaggcatttccccccctttcatgcttttctgtactcatgtttgtaaatcacaagactggacaaatcaaatctctactacatgacacctgcatccacagaaaaacatggataaaggtaaacacaagaccgttgttacaattctcaaattaaattt

SEQ ID NO: 511531 - DNA, 606 bp, Homo sapiens
cctcttatccttccataaggtgtttggggttgcctcactgggctctgcccctgataggactcctgtgttggggacttccatgggtagaagtcctaacacctttctgagggctggtgcgtctgagcaagaatatgggattgcagggtgtgcctgtttttcacaactcataaagccatcagaagaacacagatcacatttttgcctctccaraagttcttcatgaaatttttattaaatttgttggcacttagaatgcaccaaaaatcctctggaaaaaaaaatttccaaatttaacattttaaaatgtaggaagtggtgttttatgtgtacttgtttttccagatggttcatttattttcattgaaaaagatcagcacaagtcaaaaccacagaactgtgtggaatcaattgagaaaaacagaaataccttggaaatgactggctctgttaagtgtaacacgattaaatgagaagttcagtgagcaaacatgttcttccagatttagttgttatagcttaatctaatttcaaagtaaccacgacagctttttcccccaaagagcaaataacaggacagcctgtctatggtatgtgttgtgtgcagac

SEQ ID NO: 511532 - DNA, 653 bp, Homo sapiens
tcgagactagcattagacttgggggacacaaatgtcacataaaatgtgtacttttaaaccgaaggtgaagaaagatgagggcaaacagactactgtagccagtttcttcatgtaaatgtggtgttaaattacccattgttgttcctctaagtgcatacttcattaatacctgcaggggaaaaaatgacctctatttacagccaagcatctckgagccgacgcctgcctgcccaccagcctcctgtggtttacccaccaaaattttactagaggttgaatcggcttgtagaagctgtgtgatagcgctgcggctcccctgggtcacctcctgaaacgtgtagggtcgtgagtgggagggtgtctcagcaagcccagcctgaatgtgcacgatggcctcaatcgacccagccacttgaaaaagcagccgctgctctcggttcttgctgttcttgcttggtcagctcttccctggggtctctgcgccctcacagagcctccctgtgaagcctgtccttggagactttgctcaccaggtcatagacaattgttgttttccaactggaagagatcatctgatttagtctgttcatttcacacatgagaaacgaagaccaaaccccgtaccgtggcacctggggccctttgtgtctgcc

SEQ ID NO: 511533 - DNA, 653 bp, Homo sapiens
tcgagactagcattagacttgggggacacaaatgtcacataaaatgtgtacttttaaaccgaaggtgaagaaagatgagggcaaacagactactgtagccagtttcttcatgtaaatgtggtgttaaattacccattgttgttcctctaagtgcatacttcattaatacctgcaggggaaaaaatgacctctatttacagccaagcatctctgrgccgacgcctgcctgcccaccagcctcctgtggtttacccaccaaaattttactagaggttgaatcggcttgtagaagctgtgtgatagcgctgcggctcccctgggtcacctcctgaaacgtgtagggtcgtgagtgggagggtgtctcagcaagcccagcctgaatgtgcacgatggcctcaatcgacccagccacttgaaaaagcagccgctgctctcggttcttgctgttcttgcttggtcagctcttccctggggtctctgcgccctcacagagcctccctgtgaagcctgtccttggagactttgctcaccaggtcatagacaattgttgttttccaactggaagagatcatctgatttagtctgttcatttcacacatgagaaacgaagaccaaaccccgtaccgtggcacctggggccctttgtgtctgcc

SEQ ID NO: 511534 - DNA, 589 bp, Homo sapiens
ctgtggaaaagtataatgggctttgacagcatgtaacagcaggctctaattttgtctgggaggtcagtaaaggttttgctgagaaagtgtcatttaagctgagccttgaagggcaagcagagtgtagtctgatgagaaagagggttggggagactgttttagaaagaagggaacaggatgtggaatggttccactgtggcccagggccacagcatgaatcagtggctgagttgggactagcagaaatcagatctatggctccaagccctgtgttccttgcattcaaccccgctgggtgcgtttttggccctgtatcacagagctctatgcttattcatctaaagagggaagttcatgtccatggggcaggcacccttggtggataaagcagggayggcaaagacatggaggtgggaaggtggctggcatgtgtgggagggagcaggttggcccatgacttggagtgaagcactctgacagaggagaggtgggaaagttggaagaggaatctaggcaaggatgaaaggatgagatccttaaccaagaagctgcaggttgggatagcaggggaggccaggtgagatattga

SEQ ID NO: 511535 - DNA, 512 bp, Homo sapiens
ttgtgtgaactaccagaaggagactcagttactaccaaagggatggcgcttagccacttacgagggatccactcccatgatccaaaccccgcctccactccttgcccccaggcctcacctccaacactgcggattacagttcaacataagatttggaggggacaaacattcaartcatatcagtactttattggtatagtttattttctttttcattgtagttagacaaggcagattgtttttattatttgaaattcattgaggtttttcatgcatatatagtatttaagaatgtaatggaacaatcaataaaatgaaaatgaattagttatagatgccaataaatttgagaattgagtatgagacaaaggtatgagacaaatagttcaagcccatctgaaaaacaatcattgctcaatataaggtgctggcaccactgactctctatccagaagaaaataaaactggatccttcccttcctgatagaatagtcactgtgggccaaggagaa

SEQ ID NO: 511536 - DNA, 512 bp, Homo sapiens
ttgtgtgaactaccagaaggagactcagttactaccaaagggatggcgcttagccacttacgagggatccactcccatgatccaaaccccgcctccactccttgcccccaggcctcacctccaacactgcggattacagttcaacataagatttggaggggacaaacattcaaatcatatcagtactttattggtatagtttattttctttttcattgtagttagacaaggcagattgtttttattatttgaaattcattgaggtttttcatgcatatatagtatktaagaatgtaatggaacaatcaataaaatgaaaatgaattagttatagatgccaataaatttgagaattgagtatgagacaaaggtatgagacaaatagttcaagcccatctgaaaaacaatcattgctcaatataaggtgctggcaccactgactctctatccagaagaaaataaaactggatccttcccttcctgatagaatagtcactgtgggccaaggagaa

SEQ ID NO: 511537 - DNA, 512 bp, Homo sapiens
ttgtgtgaactaccagaaggagactcagttactaccaaagggatggcgcttagccacttacgagggatccactcccatgatccaaaccccgcctccactccttgcccccaggcctcacctccaacactgcggattacagttcaacataagatttggaggggacaaacattcaaatcatatcagtactttattggtatagtttattttctttttcattgtagttagacaaggcagattgtttttattatttgaaattcattgaggtttttcatgcatatatagtatttaagaaygtaatggaacaatcaataaaatgaaaatgaattagttatagatgccaataaatttgagaattgagtatgagacaaaggtatgagacaaatagttcaagcccatctgaaaaacaatcattgctcaatataaggtgctggcaccactgactctctatccagaagaaaataaaactggatccttcccttcctgatagaatagtcactgtgggccaaggagaa

SEQ ID NO: 511538 - DNA, 537 bp, Homo sapiens
ggtctagtttaacgctcactatttcaaatcttattccatccaagcaccccaggactgagcggggccagtgtgtgctgggatctggcccccaccccccctggctccttcatgcaggcaccaggctggctggtggaggtgaatgcacccagagcctccaagccctcttccagcagatcctatcactaggcaccactgctctgtcctcaccctcatcatgggcacggctgcttgtaayctgggaataaaccacctaaacatctccttattaaaaatcctaaaattccctagcttgaaactcacgactcccaattaacctagtctagtaatgggtgcctcccagatgtctattttaagagtgatctctggggcccgaaccagacaggcaggtgaggtgcccagaacacagaatctaaagatattgtatcaacgtcagtatcctgaccatgctattgtactgtagcgttgctagagtttcattgggggaactgagtaacaggtgcatagggtctcactgtatttcttagaactttttatgaa

SEQ ID NO: 511539 - DNA, 537 bp, Homo sapiens
ggtctagtttaacgctcactatttcaaatcttattccatccaagcaccccaggactgagcggggccagtgtgtgctgggatctggcccccaccccccctggctccttcatgcaggcaccaggctggctggtggaggtgaatgcacccagagcctccaagccctcttccagcagatcctatcactaggcaccactgctctgtcctcaccctcatcatgggcacggctgcttgtaacctgggaataaaccacctaaacatctccttattaaaaatcctaaaattccctagcttgaaactcacgactcccaattaacctagtctagtaatgggtgcctcccagatgtctattttaagagtgatctctggggcccgaaccagacaggcaggtgaggtgcccagaacacagaatctaaagatattgtatcaacgtcagtatcctgaccatgctattgtactgtagcgttgctagagtttcattgggggaactgagtaacaggtgcatagggtctcrctgtatttcttagaactttttatgaa

SEQ ID NO: 511540 - DNA, 523 bp, Homo sapiens
gacacttccatgaaagcaggcaaaagactcaggtkcaggcaaggaaaggggcttccactggtagacaagaccttcatgcttagcctttggtaacaaatgtccaacaaggaatggcaggtgatttggatggtggtaggagcgtaacaaagaggaatctcagagcagggcatgtgtaaagttccaggcagggagcagcagtgctatttctcaggactcagcaagtcctagcttgcaggagtggtttcaggacaggagtctcatccccggatattatgagcccctcctacccatttcaaatcacctcctaggctgggtgccagatattaactagacggcttccacgaagcaagcttggatcaatgctgggtttgcaccaaagaaggaatcctttaatccctccccttcttttttagagacagggtctcactacattgcccaggctggtcttgaactcctggccttaagtgatcctcccacctcagccttctgagtagctggcattacaggtgtgagtcgttgcacc

SEQ ID NO: 511541 - DNA, 523 bp, Homo sapiens
gacacttccatgaaagcaggcaaaagactcaggtgcaggcaaggaaaggggcttccactggtagacaagaccttcatgcttagcctttggtaacaaatgtccaacaaggaatggcaggtgatttgratggtggtaggagcgtaacaaagaggaatctcagagcagggcatgtgtaaagttccaggcagggagcagcagtgctatttctcaggactcagcaagtcctagcttgcaggagtggtttcaggacaggagtctcatccccggatattatgagcccctcctacccatttcaaatcacctcctaggctgggtgccagatattaactagacggcttccacgaagcaagcttggatcaatgctgggtttgcaccaaagaaggaatcctttaatccctccccttcttttttagagacagggtctcactacattgcccaggctggtcttgaactcctggccttaagtgatcctcccacctcagccttctgagtagctggcattacaggtgtgagtcgttgcacc

SEQ ID NO: 511542 - DNA, 523 bp, Homo sapiens
gacacttccatgaaagcaggcaaaagactcaggtgcaggcaaggaaaggggcttccactggtagacaagaccttcatgcttagcctttggtaacaaatgtccaacaaggaatggcaggtgatttggatggtggtaggagcgtaacaaagaggaatctcagagcagggcatgtgtaaagttccagrcagggagcagcagtgctatttctcaggactcagcaagtcctagcttgcaggagtggtttcaggacaggagtctcatccccggatattatgagcccctcctacccatttcaaatcacctcctaggctgggtgccagatattaactagacggcttccacgaagcaagcttggatcaatgctgggtttgcaccaaagaaggaatcctttaatccctccccttcttttttagagacagggtctcactacattgcccaggctggtcttgaactcctggccttaagtgatcctcccacctcagccttctgagtagctggcattacaggtgtgagtcgttgcacc

SEQ ID NO: 511543 - DNA, 523 bp, Homo sapiens
gacacttccatgaaagcaggcaaaagactcaggtgcaggcaaggaaaggggcttccactggtagacaagaccttcatgcttagcctttggtaacaaatgtccaacaaggaatggcaggtgatttggatggtggtaggagcgtaacaaagaggaatctcagagcagggcatgtgtaaagttccaggcagggagcagcagtgctatttctcaggactcagcaagtcctagcttgcaggagtggtttcaggacaggagtctcatccccggatattatgagcccctcctacccatttcaaatcacctcctaggctgggtgccagatattaactagacggcttccacgaagcaagcttggatcaatgctgggtttgcaccaaagaaggaatcctttaatccctccccttcttttttagagacagggtctcactacattgcccaggctggtcttgaactccyggccttaagtgatcctcccacctcagccttctgagtagctggcattacaggtgtgagtcgttgcacc

SEQ ID NO: 511544 - DNA, 386 bp, Homo sapiens
tattctccccaccaggaggctccacacatgctccctgaaacgtgctgcagcaagcactgtgaaaaatgcactttctcgtcgcttgacttggagagagtcctatgtgtttgaagacttaacagatgccacagaagcctcagaaatgctctctccgaggttaagctccctcctccagcaagtgggacattttcacatccaccgtcttagcttarggcagtagggatttcctaaagatgaacaaccctgtctggttacaggtagattgttcttgagacacaggccacacccctcccggccttcccatccttggcagggtcctagaatgctgtttccacttttccagatgcaatggtgagaaatttggtggtgattactgagaaaaccaa

SEQ ID NO: 511545 - DNA, 482 bp, Homo sapiens
tcctgagggttgtttcagcccatatttagctccctcaatcctcctcgcctcacgcgctgcccaacgttcttcttctttgtgcccacyggggcagttgaatcctcatctttgcagaagtgaataatattttgaacatgttggggagaaatagtctcctgaaaacataaggctggggatttacagtccctgataccggtgggtcttacactttattgtgagcaagaatcacctggaagccttgttaaaaaatgcagattccagggctctgtcaatcatgtttctgacccagcagctttggagtaaacccagagatgttttaacagttggtctgaatcagaggcaaagagtccaaggagcacaatggcagcggaacagttttctatctcctgttatttcttgacttatgatcacttccccagggcccgatgggcatttaagtccaacctttaggaccattcttcctctgtctttgatgcatttta

SEQ ID NO: 511546 - DNA, 654 bp, Homo sapiens
tttccccaagcctttaataaaagccttgtgtgtaacagctttgttgtattagtccattttcacactgctattaatataaagaactacccaagactaggtaatttataaatgaaagaggtgtaattgactcacagttccacatggctgggaaggcctcaggaaccttacaatcatggcaggaggtgaagaagaagcaagtaccttcttcacaaagcagcaggaaagagagaagtgcaaaggaggaacttccraacacttataaaaccattggatctcatgagaactcactcattatcatgagaacaatatgggggaaacagcccctaggatccaatcatctccctccctcaacaagcagggattacaattcgagatgagatttgggtggggacccagagccaaaccatatcacttgtgctggtggagcctgtagaaataaaggagtgattgtgtttgtgtttcagatgaaatgagagtggctcttatcctggataactatcggttggctaattggctggatccctcactggattataaggaacactgtcatgaaaccaggggccttgtcatgatcatcatgtagaatcgtactaggaaactaattcaaactcaataaacatttgttgaataaatacaagaatgaacagcacacag

SEQ ID NO: 511547 - DNA, 461 bp, Homo sapiens
agtaccttcttcacaaagcagcaggaaagagagaagtgcaaaggaggaacttccaaacacttataaaaccattggatctcatgagaactcactcattatcatgagaacaatatgggggaaacagcccctaggatccaatcatctccctccctcaacaagcagggattacaattcgagatgagatttgggtggggacccagagccaaaccatatcacttgtgctggtggagcctgtagaaataaaggagtgattgtgtttgtgtttcagatgaaatgagagtggctcttatcctggataactatcggttggctaattggctggatccctcactggattrtaaggaacactgtcatgaaaccaggggccttgtcatgatcatcatgtagaatcgtactaggaaactaattcaaactcaataaacatttgttgaataaatacaagaatgaacagcacacagcag

SEQ ID NO: 511548 - DNA, 608 bp, Homo sapiens
gggaccacaggtgcatgccactatacccgggtcatttttttttttaacttttggttgagacgaggttttgctatgttgcccagtctggtctcaaattcctggcctcaagggaccctcccacctctgcctcccaaagtgctgggattataggcgtgagccatctcaccaggcctatagttctttggcttaaaatactcaatgtgctaacatgctgtactttgaggtagtgtgccttgaatcccatcagtgtccttcttatctctcatatgcaggcttatttgtagaataaatggatcctcccaagaagggttcatggagaaaattcccccttgggtgtcaatatctgaaaaacatggccctgaagtgcatattgtgttttattttacaaacattatgaatcctgtaaactagtggtgtggatgtcttggcttcagctagcaaagagctggtgcatttgtggctcacttctagctaatatttaggatcatttgttatacatttttctgctaatcatacctttaatttatttccagtatgctgctgctatttaaaattatgttaaaaaggaattyttggtaatgtaaaaaaaaaaaaaaaaaaaacctcag

SEQ ID NO: 511549 - DNA, 615 bp, Homo sapiens
atacacataaagtgccttagatgaattaacttaggtgattactacaactacctatgagatccatactatcatccccattttatagatgaggaaactgacacacggagaggtttaacttgctcaaggatatcaaactaataagaggcagacataaaaatcaaacccaggttatctaactccagactccagaattgtgccctctaggctgtactgaatctgaggttcaggaaccataaattggcagccagggtctcactgtcagcaaagctgcaatggatcggaaacaccagactcagggcctcttggtgcctctgtttcmccagttttctctgcaaggctgattgctccccttaccccacctcccggtagcgctcaatctaattaatgcttgtgaagctgcagggcagcttatttaacaggtgttcccagagcacaaatgttttcatctttcctcctcaaatgctccagacaagtaagcacttcccagctcagaaacgtgtattaaccaccatatgttcttattttctgtattcttgatggtttaacatcttaagggtcttgcccagctggggaaagactacccttcccagggccagctaattcctagagatgagt

SEQ ID NO: 511550 - DNA, 615 bp, Homo sapiens
atacacataaagtgccttagatgaattaacttaggtgattactacaactacctatgagatccatactatcatccccattttatagatgaggaaactgacacacggagaggtttaacttgctcaaggatatcaaactaataagaggcagacataaaaatcaaacccaggttatctaactccagactccagaattgtgccctctaggctgtactgaatctgaggttcaggaaccataaattggcagccagggtctcactgtcagcaaagctgcaatggatcggaaacaccagactcagggcctcttggtgcctctgtttccccagttttctctgcaaggctgattgctccccttaccccacctcccggtagcgctcaatctaattaatgcttgtgaagctgcagggcagyttatttaacaggtgttcccagagcacaaatgttttcatctttcctcctcaaatgctccagacaagtaagcacttcccagctcagaaacgtgtattaaccaccatatgttcttattttctgtattcttgatggtttaacatcttaagggtcttgcccagctggggaaagactacccttcccagggccagctaattcctagagatgagt

SEQ ID NO: 511551 - DNA, 618 bp, Homo sapiens
aggtcacgcagctaactcctggaggaactgggcaggaactcaagtccaggggcccatcaacaagataaaatatttgagaatggctggagatctctctctcactgtctgtcttttgggatggaccaggggcagcttcagagcaggaccgatgactccagttgggcaaagcaaacctgagcattccttgcgaagctgtggttaggcctggggcccccayaggaggcctttcccaaccaggtcagctgatggatgacccggggccaaacctgactcccgccgcttcatcaaagcggagctaaaaacagctttgctttggcagtggaaaattgaaactccgagcttcctcttaaggctcttaaacaggtcagcccaccaaaagcccagtccttcaatctgggttctcttaaaaagtagggcaggccaattatgtttgactgtcctgcgctacgtggtgctgaaggcggggaaggtcaggccagggtgcccagggctgccagcagatgagagacagaggagccagccagcttctcctatcagcccctttgtcaaaacaaaattaaaatgcctggactcctgctggcaccaagatccgatccaaggtaataggtatttatctta

SEQ ID NO: 511552 - DNA, 578 bp, Homo sapiens
ctgtggaccttctctgtgttcctctaccatctccttcccctcttgcttagtgaagtcctactcatcctttacatctcatctcaaacctggcctcctctgcaaagcctgtttcaacctctgtgggcagagttacatactgcctatgttcccaccctaccgtgttcacctattcaaagccttaccgctacaatatctcatgtatgtgcctccttcatcattaaataatgaatttctcaagggcagggaccttatctcatctctagtctggcctgtagacctgggggttgcacagaataagtgctcgataaacaggagttgttacttggacatgtgtagtagtattcagggacrttgtctagcttactagttaaaggcatagtcactggcatcagaaagacctgggtttggatcccagccttattccttgttgattgcatgaagcaactgacacagagcaagggctcagcaaatgggggtttgttgaataaatagttcctcaggttctgggtagacaaaagaacactttcacttgtgtcttcagccagttcccatctgtaaaatggagtgataatagtatc

SEQ ID NO: 511553 - DNA, 522 bp, Homo sapiens
gttattcccatttttacagaagaggaaaccgaggctcagacagaagaagcaacttacccaagaccccgtgacttagggagtgaccaaatggagtgtccaagcccctctctctgaagccagagcttggcctctctgctctgggacttaaggtccagtgttggccctcaaggagtccatgaatgatgggtgagagagagaagggcacaggtttccagaattccagcagaagaaaaataaggatgatgggggaggactagggtgcaagctaagagatgaggaaggagggagtccttcctccagaggagggcatcaggaaggcttcatggaggaggtggcatggagctgggcctagcaggctggtgaagagataggacaggaggcgctgcaggcagaaggagctatataggcaacaatgaggggcasaaaagcatggcaagagggggcacccctgcatggcaggaacccaaggcatgagaaggggcagggagtaacatatcatccatcacaacagcactcaccaca

SEQ ID NO: 511554 - DNA, 534 bp, Homo sapiens
cggagggcatccctgcaagggaagaggaggagcgaaggctcattgcagggagacacaycccaccctcgttggcctgatcttcaaaatccttgttgaatgattggattttgtgctctgaggtcatctaatccgtcccactgtctcacccagagtgcagggtgccctgatggtgcaaggtgcatacactcacgactctttggctcatggcacattccactggtcatatcccctggctcagtgacgtctcaccacagccctgacaggtgggctgtagagcacagtggttaagaatgtgagatctggggccagacagccttggctggctgacctaagaaaggttactctaaacctgagtccctcacctctcagatgggaataatatgatagcaactctcagcggcctcacaggttcactgcaggtttaaaggagacctggtgaggaaagcatcttgcagagagcctggctctgagtaggtgctcaaaacatttgtgcagttactattctcccccttcatcaggtcagaaaactgagac

SEQ ID NO: 511555 - DNA, 462 bp, Homo sapiens
tgtgtctcaaaaacaaacaaacaaacaaacaaacaaaacaattaccatttgttggatgacctgctcaccatgctccatggcccaggggccccacaagtggacctggctccaatggcccatggagtgccacagcttgggcgttaacccaggcttcccactgcacgacctgcttgaccttggacaagtgaccattcctctcgttcttccatgtcagcatctgaataacaggattcaatgagtctgagatctgtgctccacaggttmaaccagatgatgggttgggaaagagttttgctaactgtttgaaatgataattccacattggaatacaacccttcagcccattgattcgacaaatctttacggaggccctgggcatctatcccaggagctgggctgagcatggaggacccagagatgaagaagggagggtcctagtcagagagatgagaaccagggagg

SEQ ID NO: 511556 - DNA, 625 bp, Homo sapiens
tctgaccagagaatcagctcccagctcctctttgtctaaaacccactgatgcctctagaaccacttcaaatgccagcatcaccctgatttccccagtctctgcatctctgattcatcattgtattatatctgaatcttctctatgacagcgatcactttattacttgaattgttagctatttatctcgtgttttatctcccctttctctcttttcattccacaaatatttattgttcctttctaaatgccaagtaggtcctggggttactgagatgaagaagatatagctgagccttggaggagcttataggccaacrggcgtgaagggagaggaacaggctgtaagctccgaagaggcaggggctgattttagccacttttgtgcaccgtagctatgtgcctcaaatgcagccaacgcttattgtgcactgttgagtgtacatgtgaaccgatgcacctcagagtaataaaggaagtggcatttcttccagcgccctgcattctcagcctctttttttcatttactccagctctcccgagtctccctcctgataaacatacatcaaaaggtgcagcccagcattggctttctctacatggcccccaggtccaccctgccccgcc

SEQ ID NO: 511557 - DNA, 418 bp, Homo sapiens
ctgtacaaagtgctctacaygcacgacctaggcaaacaatcaggaaccccatgagatgagatgtatgaccctttttttacagataagaatactgaagcacagaaaaagtcaataacttgccccaagtcacacagttagcaagtagcagagctaggcctcaaaccaagggagtctggctctagacccttgcctttaaccaaagtgctctaatgttagggtgacccaaccccattaacagggcctctatggggctggagtttatcaggacaaagccaacaggaaaagaaactacaggaggaggaggaggcggcccttctgctcactgtcagctttctgagtagccgcagctatgagccttctcacattgcccatctgctcagcgggtccctgccacttaccaactcatcctaaggatctg

SEQ ID NO: 511558 - DNA, 418 bp, Homo sapiens
ctgtacaaagtgctctacatgcacgacctaggcaaacaatcaggaaccccatgagatgagatgtatgaccctttttttacagataagaatactgaagcacagaaaaagtcaataacttgccccaagtcacacagttagcaagtagcagagctaggcctcaaaccaagggagtctggctctagacccttgcctttaaccaaagtgctctaatgttagggtgacccaaccccattaacagggcctctatggggctggagtttatcaggacaaagccaacaggaaaagaaactacaggaggaggaggaggcrgcccttctgctcactgtcagctttctgagtagccgcagctatgagccttctcacattgcccatctgctcagcgggtccctgccacttaccaactcatcctaaggatctg

SEQ ID NO: 511559 - DNA, 631 bp, Homo sapiens
tgaagaaaattttcctgtttgtctcatcaaccagtagctcccycttcatgtgcagtccataaagtccacaggcaaagtagaatttggttcctcacctctccaccttggggctgaaccaaggatgtaagagtcacatcactctctaaagctgcttcccttgttatcccaagagaaatggattatcatttcacttgggattcatgaaactattttgtcctcctcaatcttttaattctcacaagactgcagagacataggtgtccatctctcagtttgatagctaagaagaggagactcaaaaaaagtgagagacttctctgaggcagcgcctccagcaataggcaatttgggaccttgatctgagccgagtccattgttctcgtgccattgtgccagagcaatgagtggttgataagggacaccctcaagaaagagtggcctgttgtgttctaggaatgacgtgttcctcttcagtgtgtagagaatatagaaattactttttcagacagcatcttctgaaatgttatctactcatccagtggttctacaaatacaggtagaaccaccatatcatcaagttctggagctgacactgaccatttccaaccttcagtcataacttgcatggctg

SEQ ID NO: 511560 - DNA, 631 bp, Homo sapiens
tgaagaaaattttcctgtttgtctcatcaaccagtagctccctcttcatgtgcagtccataaagtccacaggcaaagtagaatttggttcctcacctctccaccttggggctgaaccaaggatgtaagagtcacatcactctctaaagctgcttcccttgttatcccaagagaaatggattatcatttcacttgggattcatgaaactattttgtcctcctcaatcttttaattctcacaagactgcagagacataggtgtccatctctcagtttgatrgctaagaagaggagactcaaaaaaagtgagagacttctctgaggcagcgcctccagcaataggcaatttgggaccttgatctgagccgagtccattgttctcgtgccattgtgccagagcaatgagtggttgataagggacaccctcaagaaagagtggcctgttgtgttctaggaatgacgtgttcctcttcagtgtgtagagaatatagaaattactttttcagacagcatcttctgaaatgttatctactcatccagtggttctacaaatacaggtagaaccaccatatcatcaagttctggagctgacactgaccatttccaaccttcagtcataacttgcatggctg

SEQ ID NO: 511561 - DNA, 576 bp, Homo sapiens
ccatggcattggaaggtggatgatctccaccaggaggcactgtgagcagaaaagactgaagaccttgagaagtcctccaatctatgacagcccaatttgcactagtgctgagactgaaagcatttgattgttttcattgagacgttattttgctgactgcaggaaaagcagtagaggcagtatagcatagcagttcagagtacagcatccagagcctgtctagatttgaacccaggctctgccatttatggttgttgacaatataacmtaagccagttcttcttccatttctccgtctgtaaaatggggatattcctcctggggttgaagtgatatggaatgaggaaatatgcccaaagctcttcaaacagtacagaaaagagagagtactcagtaaggcctctcttactgagtaagaggtaggtatgatagcgatgatgctgtgccccactattttacatagcacatccacagagaggtgccaacaccaaacaaaatgcttgaaagaagcaaagcgtctaaggaattgccttcttggggacttaccttgctaagtggttatgcaggaggccctgc

SEQ ID NO: 511562 - DNA, 507 bp, Homo sapiens
ttttatgcattgctcactctgctccactgacacttggtcgactccrcattcgccaagtcctcaggtctcaacagaggctgaccttctttctgtaagctgctccttatccccggattctgggctgtataggtgttctcctccaagctcatgcagcaccccatggctatctccattccaggaagcactaccctggtttggttgtatcttccttcctcctcgagctatggactctctgagaaaaggaatacttcattatttatcccatatttatcttacctgccatatagtagtcattcagtaaagctgaatacataaaaattaattgtatatgttagatgacattttcttctactccaaagggcccatctaacaggaatttgatattaatgggccaagttttccctgccataaatggtctcatactcttcttgactctgttaaagcttgtggtgttaatctcagatacccagtatccaaagcttccttgccctccactgaaatatcctg

SEQ ID NO: 511563 - DNA, 430 bp, Homo sapiens
acagaggctgaccttctttctgtaagctgctccttatccccggattctgggctgtataggtgttctcctccaagctcatgcagcaccccatggctatctccattccaggaagcactaccctggtttggttgtatcttccttcctcctcgagctatggactctctgagaaaaggaatacttcattatttatcccrtatttatcttacctgccatatagtagtcattcagtaaagctgaatacataaaaattaattgtatatgttagatgacattttcttctactccaaagggcccatctaacaggaatttgatattaatgggccaagttttccctgccataaatggtctcatactcttcttgactctgttaaagcttgtggtgttaatctcagatacccagtatccaaagcttccttgccctccactgaaa

SEQ ID NO: 511564 - DNA, 507 bp, Homo sapiens
ttttatgcattgctcactctgctccactgacacttggtcgactccgcattcgccaagtcctcaggtctcaacagaggctgaccttctttctgtaagctgctccttatccccggattctgggctgtataggtgttctcctccaagctcatgcagcaccccatggctatctccattccaggaagcactaccctggtttggttgtatcttccttcctcctcgagctatggactctctgagaaaaggaatacttcattatttatcccatatttatcttacctgccatatagtagtcattcagtaaagctgaatacataaaaattaattgtatatgttagatgacattttcttctactccaaagggcccatctaacaggaatttgatatkaatgggccaagttttccctgccataaatggtctcatactcttcttgactctgttaaagcttgtggtgttaatctcagatacccagtatccaaagcttccttgccctccactgaaatatcctg

SEQ ID NO: 511565 - DNA, 258 bp, Homo sapiens
ctagacaattcatttaacgctctttgggccttagaatctttacaaayagactcaatgaacccttttagagttcttataagacctagagaaactgatagctggaggttcctggcacttggtagattaccctcctactccagatggactcaaacccatgtctttgccttcttctttccatgcaaatggacttgaaagaatccctgggtacttggatttgagatgcattcaatagcaatgtgttttctttttccactaaag

SEQ ID NO: 511566 - DNA, 555 bp, Homo sapiens
ctgggaatgctctttcatacatggttaactctgtttgtccttttgttcagggcctgctagtgtatctgcctccttatcttgggacctgcctcagggtcttgttcatgcctcaggccctataggtgcctgatggcaaaraccctcccacagggattgggatagacccttggcaaagcctctcccacatgcttgggatagccatgtgtcttatagtgagaagggaaggcagacattgtgaatggtcacagggctttggcccaaactcacataggctctgccacttactagctgtatgatctcagataagtcactgaactactctgagggacagtttccttatatttaaaatgggggtaatcatagtacccactcctggtgttaatatgtagattaagtaagatactaatgcaaagtgcctagagctctctctggtagccagtagacacccaataaatcatagttgtgataatcatagcaatgataataatgagggtaatcagagtaattgaaatttgtattattatcagtaagccacaagtgtttgattcatttggg

SEQ ID NO: 511567 - DNA, 637 bp, Homo sapiens
gaaaaattaaaggtatgtattagtctgttttttcattgctataaaaaattatctgagactgggtaatttataaagaaaagtttaattggctcagggttctacaggctgtacagraagtatagtggtttctgcttctggggaggcctcaggaaacttacaataatggtggaaggtgaagaggaagcaggcacatcttacatggtcacagaaggaggaagaggagggggaaggtgctacacacttttaaacaaccagatctcacaattcgcccactcactatcatgaaaacagcatcgagagatattgctaaaccattcatgagaaacctcccctatgatccaatcacctgccaccaggcccaatctccaacattggggattacaagaacatgagatttgggtaaggacacagagacaaaccacatcagtaggcaacaagactttgtattcaacaatacttaaaagaaaattaagaggagtgacatcagcaagagagcaggatagaagatccctcagcattactcccctcaacaaaagtacacctagaaagtattcaaaggcaagaatgccaccttgagttcacaagaacttggaaaagaagcacaaaaataccctgagccacaaaaatgacagaagcc

SEQ ID NO: 511568 - DNA, 602 bp, Homo sapiens
ctggccttcatagacagacacgtctgggtctgtacacctcctaagaatagaagactttctaagccacagttttctcatctgtataatgtggatagaaatgccaaagctaaacctcatttgttatgaggattatgtagaatcatatttataaagcatcttgcagaacagataattaataaaacataaaacagagctgggcacggcggctcacgcctgtaatcccarcactttgagagatcgaggcaggcggatcacctgaggtcaggagtttgagaccagtctggccaacatggtaaaaccacgtctctactaaaaatacaaaaattagccaggcatggtggcacgtgcctgtaatcccagctactcaggaggctgaggcaggagaatcacttgaacctggtaggtggaggttgcagtaagctgagatcacacaattgcactccagtctgggtgacaagagcaaaactctgtctcaaaaaaaaaaaatacatacatacgtaaaaataaaataaaataaatacataaaacagaaaaaattgttctcatattcttaagtagagcaattgcaagacacgatcaataattacacagcctctaaaatc

SEQ ID NO: 511569 - DNA, 497 bp, Homo sapiens
atgtaatcagactgcaacaattgggcagaattggggaagggagaataaagagaagatcccaaaacctttgtaaatacagactcagacattttatttatattcataataagtaccaatcagaagaaagctgtcaatctgttgagatggtgggtccttaaaggaaacaaaataagagcagctaaycattaggacataaatcaattgtaagtgtttggatttgtgattagcatacaaataatttgttgttagacatttttgaaattaagtgtcggtgtaattagcacataaatcatttgcacatgggtgttcctgaagtgtctgatgtgtaattagacataaatcatatgtatctgggagtttctagggtgtttgttatgtcattagcacacaaatcatttttacattggtgtttttaaagtgtgtgttgtgtaattagcacatggattatttgcaaacactgtgtatgtttcagattatttgctgtgtaactagcatga

SEQ ID NO: 511570 - DNA, 560 bp, Homo sapiens
gtagggacatttgtctccctattaaatatagaatcatatccttccccagcctacaagaccctgcaaggctggccctgaagccctccccagcacccactcacaccacaactcattttgtttgctgaggaccagttacagactcttaatagctcttggagaaatctatattcctttccatcgcttgattttcaaccttcatctaaggttttcccaccacttgggaggctcttttctttccttttcatctacttagytcctattcatccctctgatccttccataaatgccattccctgatcccacctaagtcaggcccccttttctaacctctcaccacccctcattcttcttctccgtatcatttgtctccatttgaattgtatgtttatttgtatggttatctggtgaatctgtctgctctgctagactgtaagcaccttgaatgcggagaccaggtctgggtttgccgtacagcacagtgtctggcacataataggagctcaataaatatttgttggatggataggtaaatggagggatgggtggattataacataggt

SEQ ID NO: 511571 - DNA, 414 bp, Homo sapiens
gctgtgcaggttgcacactgacgaagaacccctgattgagtaaaagaccagtggctgaaacccagttcccattctgtaacagtcatgcaccctggcagagagctgcatttacccagaggaataaacaggcttctaatttttagaaaggcaacacattggcccgcagaggttctttgagaagattaagatttatggggcacctactgtgtgccagaactttgcagggatcstactcacattactttgtttaacccctcatgactaaccctgcaatagggattggtattttcatcatacagaaggggaaactgaggtgtagagtactgaaaagacttgtcacaaaggtgttggcacatggcttgctactcagcaatggtaatcgtgttcgtcagagcctcactggggactgcctct

SEQ ID NO: 511572 - DNA, 414 bp, Homo sapiens
gctgtgcaggttgcacactgacgaagaacccctgattgagtaaaagaccagtggctgaaacccagttcccattctgtaacagtcatgcaccctggcagagagctgcatttacccagaggaataaacaggcttctaatttttagaaaggcaacacattggcccgcagaggttctttgagaagattaagatttatggggcacctactgtgtgccagaactttgcagggatcctactcacattactttgtttaacccctcatgactaaccctgcaatagrgattggtattttcatcatacagaaggggaaactgaggtgtagagtactgaaaagacttgtcacaaaggtgttggcacatggcttgctactcagcaatggtaatcgtgttcgtcagagcctcactggggactgcctct

SEQ ID NO: 511573 - DNA, 565 bp, Homo sapiens
ccctgcaaagctctcctcctgctatggagtgttccagatcccacagcctgtcagccaacctgctcctgacctgtcctgggcctgtgagtttcatgagggagatggtccctccaaagccagtttgtctgagttcatcacagaataaacatgttccactgagttaaatcactgttttgttttgttagtggggaggggtcgctcctgctaagccacactcatctctcgcttggactcttgcagcagccacttccgtccttgcctgactgtggtttgcttccccctcatcagcctgctgggtcttgttataatgtggatcttgcacaaaacccttggatggtgaacacccaaggcgtttctcagtcctccagggccctacgtgctctggagacctcattgtcttcacctcctagcaccttccctctcccctcgtgcccaccctactccagctccactggcctcctgctattccttgtttgtgccaagcacctctgtcctgcctcagggcctttgcacctgctgcrcctgcagcctgggacactcttcttggttctgtacatggtttgct

SEQ ID NO: 511574 - DNA, 636 bp, Homo sapiens
gttccccactattcttttttaaaaagatttattggggcataattgatagataaaaattgcaaacattaaagtagatattttaatcagtttgaacatatgcatacacctatgatgccatcaccacagccaaggtactaaacatacccatcaccttcaaaaataaattttcttgtgtcattttgcatgtagttttgtttgttttggtaagaacatttaacatgaattctatcctcttaaaaatgtttaaagtgcacaatattgtattattaactatagatactatgttgtacaatggatctgtagaacttattcgtcttgtatggcaaaaactttatacccattgaaggaaaattcctcattcttctcttcttayagccactggcaacagtgtttcttagatttttatcctcaacctcttcttactttaaatactttgtatgagtaatgtcatctgtatccattacattgcagtgtcatctgtccacttacccagaagactccagctcaggttcatctcctggagactttggagatgtgtatatccaaccacaactagatattttattttaaagaagtacttccaggcagaaaaactgtgcagagaccataggcaactgtgaatttagaggacataag

SEQ ID NO: 511575 - DNA, 664 bp, Homo sapiens
taatgggctctttcagacaaaggaataattaactaatcagatcttatttgcaataatcctaagaaaccaatttccctgggggttctccagactgttaaaagcgtgctccaggcctataaatgagggtggtgcctacatcaaggggtatttgtcatgcccatgaagtggaggctttcacacagggatgaactttcattgaaaattttcacttcaagttcttcctctccttgtcttttccttgttgtttttaactaatacaaatygcttggtgtaaatactcaaaaatttaattttaatgtaaagttaggaaaaaggtagcattcttacaattattttgtcaatgtatgcattgagaaacatttcaaacataaagctctgtgatattttatttctagagcatgagaagagctccaattttctgacaataaaatacagaatcagaccttcaccactgtgttgagtgaccatttgtttgaaactccttcactctgctaacaacctaccaaatgcattttagagcaattacaccctttcactgactctccattcgtagaattcacatataattgatatcagccaatttcaaggatgaccaatcaaagtactgtatctctctagtgataaaaattggttaagacagtatttcccaatcttatccttagca

SEQ ID NO: 511576 - DNA, 602 bp, Homo sapiens
ttggtgcatcacggttgtacttcctttgctccatcctacttctgccaccttcctttcacagtaattgatccagagacactggaatctgaactaaacaggrtgtgtaagtgggaggagcactacataaaaatgactggacactgtcttgctgtagcagctagcagaaaatggagatatttaggttaaattcaaagatggttaagttgaaagacctaacatacaatctgatttaatagtaaaggtgagtgatactttttgccgtagtctagatctctctgaatttgatctttacaagtatagttactttgtttaactgaagaatcttacaaaatctctgctttttcaataattgttaaagttgattgcgtactgcagtgggtcagatgcaatccttggttattggactttctccattttctttagcctctgttggaaagttggtaattgttcataggaagtttttatgagccagatctggaaataacaatatcacttctattcacattatattcctaagaaatcaatcacatggccacaggcagaggaaacaaaaatataggttagctgaatatctaagagggagatgaagtgagatttgtgag

SEQ ID NO: 511577 - DNA, 562 bp, Homo sapiens
taagcatttggaaaaacaaagttaggatcctatctcaaaccaaattaaaccacaaatgggttcaatgtttaaagaaaggcagagagatgaaaatatcagaagaaaatacaggtgaatagcaaaatagctgtattatagggaaaggtttcatgactataatactaagagcagaatttatatttataatgggaaaaataatcattgactacattaaaaatgtaaaacttccctttatatatataaaaactactatggagaaaataaggagaacagaaccttaagaaaagtcactttcatgtatcaggttaamgggctactgtcctgtctgtggaaagagctcttataaatgagtgaggaaaaagatgacccgtccgttcccctctccccgccccacccccaccaatgtgggcatacccataaatataatttttttaaaaaagtcaaaagggtaataaacatgaaaaaatttcagcttcacatgtaatcagccacttctcatgtatcaagttgtcaaagatgaaaaacaacaaaactccacgttagggaaagaaatggtcggcaa

SEQ ID NO: 511578 - DNA, 562 bp, Homo sapiens
taagcatttggaaaaacaaagttaggatcctatctcaaaccaaattaaaccacaaatgggttcaatgtttaaagaaaggcagagagatgaaaatatcagaagaaaatacaggtgaatagcaaaatagctgtattatagggaaaggtttcatgactataatactaagagcagaatttatatttataatgggaaaaataatcattgactacattaaaaatgtaaaacttccctttatatatataaaaactactatggagaaaataaggagaacagaaccttaagaaaagtcactttcatgtatcaggttaaagggctactgtcctgtctgtggaaagagctcttataaatgagtgaggaaaaagatgacccgtccgttcccctctccccgccccacccccaccaatgtgggcatacccataaatataatttttttaaaaaagtcaaaagggtaataaacatgaaaaaatttcagcttcacatgtaatcagccacttctcatgtatcaagttgtcaaagatgaaaarcaacaaaactccacgttagggaaagaaatggtcggcaa

SEQ ID NO: 511579 - DNA, 621 bp, Homo sapiens
cattgcaacctccgcctcccgggttcaaacaattctccctgcctcagtctcccaagtagctgggattacaggtgcccatcatcatgcccagctaatttttgtattttttaatagagacagggtttcgccatgttggccagactggtcttgaactcctgacctcaagtgatccgcccacctcggcctcccaaagtgctgggattacaggcatgacccaccacgccggccctgactgatgtcttcataggcaaaggaaattaggacacagacacacccagagggaaggtcacataaagtcgcagggagtatacagccacctgcatatcaagaagagaggcctcagaggaaactgacaccttgctcttggactcccagcctccagaattgtgagaaaataaatttctgtcatttgaaccactcaatctttagtactttgttacagcagccctagcaaactcacgcaaaggacaatcaagtgtcctaaggaarggcagggggcaggggaaggatggttagattcatccttttgaaagattactggctggtgggcagaatggataggagaaggtagagttgggggcaggaagttcaaaagccctttaagtgctagacaatggttgc

SEQ ID NO: 511580 - DNA, 490 bp, Homo sapiens
taacaaatctcagcctgctcatgttttcccatattcacgtatacatgaacacaacacaagacccatgacagtcaccttgcatatcctggagggtctttgaacctcttcttagacaaaggtccttcaaacacttgagtaccattgatggtgaacatatcactaatgatgttcagccaatgcttacatgtaatataacttctatgacagtttttttaatagccttggatctttgacatttctcttattttaaggtggagtccatattccctcttcttgaatctggacaaacttatgactgctttgaccagtagagtatggtagaagtgacactgtatgactcccaaagctaggtcagaaaaagccacacagcttccacttggaacccttggaacaytcactttggagtaagctagccaccatgtcaaaagtctaataccataagattaccatgctagagagttcacatgtgggcactccagtcaacagcccc

SEQ ID NO: 511581 - DNA, 622 bp, Homo sapiens
ctgcaacctgaatagcccttccttgggctcccagactgcctaaaaagaccagcgtttcctctcagctttctccatctggttttgctgcatttcaagcggcatacctaatgctctgtgctttcaagtcagattcattcagaaagacttatgcctggagcacttggcatagcacgtgactaatctggatgatgcccactgtgaagatggacaaattaaggcctttcagggtgaaagagtctgggaagatacagcagcagcagcagcagcagccactgctgcctccccagcagaactgatatccaaggcagggtcttaccaataacagcatggcagactgaygccaggttcccaggagtgtagggtcataatgcttatctgagagaatcaaagcatttccaagatgattctgtttgaaatgtgttctgttcactgcctatgcacacatttacgaacccagttggactcaatgccgtcatccaattagcacatgccagcatctagctccccagggctaagatgaaacaggcagaatgagatcaaactctagccccgttactttagggtagctgtccagaggcatctggaagctgtgggaggaggctaaatacacctgctgcaggca

SEQ ID NO: 511582 - DNA, 576 bp, Homo sapiens
ttgtctagtacttataacatgtaactcaaaacccctggtttaaatgaattcctgmgtgcattatgcataacatttgtataattggcttttgtaaacaagacattgctatagttcttcacagaattatgctaatatcgatagattattcttcatttatctttatctgttctgagcgactgaaagaggaaagatttgttatgagaacacataaatacagtatcatgaaagggaaagaaaaagttctgttttgcggaaggcattagtcccctttgttagtcaaatgaagagagactattcattatactttaatcttaaggaatccaagattgctaaactaatggatgacatgtgactaaggaatgaattagttgaactttattctatgagttgccaccatgaactgtgcaattatagccaggtcctttaaatgctttgaatgtttttcatgtgcggataagattatttcagacctaccaggccttgaagaaggatcaaagtcttgtcagagcttttgcctaaaattgaaaatatcatgttacttggactatttatttatccctgcaccttgttgcaaaa

SEQ ID NO: 511583 - DNA, 576 bp, Homo sapiens
ttgtctagtacttataacatgtaactcaaaacccctggtttaaatgaattcctgagtgcattatgcataacatttgtataattggcttttgtaaacaagacattgctatagttcttcacagaattatgctaatatcgatagattattcttcatttatctttatctgttctgagcgactgaaagaggaaagatttgttatgagaacacataaatayagtatcatgaaagggaaagaaaaagttctgttttgcggaaggcattagtcccctttgttagtcaaatgaagagagactattcattatactttaatcttaaggaatccaagattgctaaactaatggatgacatgtgactaaggaatgaattagttgaactttattctatgagttgccaccatgaactgtgcaattatagccaggtcctttaaatgctttgaatgtttttcatgtgcggataagattatttcagacctaccaggccttgaagaaggatcaaagtcttgtcagagcttttgcctaaaattgaaaatatcatgttacttggactatttatttatccctgcaccttgttgcaaaa

SEQ ID NO: 511584 - DNA, 576 bp, Homo sapiens
ttgtctagtacttataacatgtaactcaaaacccctggtttaaatgaattcctgagtgcattatgcataacatttgtataattggcttttgtaaacaagacattgctatagttcttcacagaattatgctaatatcgatagattattcttcatttatctttatctgttctgagcgactgaaagaggaaagatttgttatgagaacacataaatacagtatcatgaaagggaaagaaaaagttctgttttgcggaaggcattagtcccctttgttagtcaaatgaagagagactattcattatactttaatcttaaggaatccaagattgctaaactaatggatgacatgtgactaaggaatgaattagttgaactttattctatgagttgccaccatgaactgtgcaattatagccaggtcctttaaaygctttgaatgtttttcatgtgcggataagattatttcagacctaccaggccttgaagaaggatcaaagtcttgtcagagcttttgcctaaaattgaaaatatcatgttacttggactatttatttatccctgcaccttgttgcaaaa

SEQ ID NO: 511585 - DNA, 580 bp, Homo sapiens
ctgttgtctagtacttataacatgtaactcaaaacccctggtttaaatgaattcctgagtgcattatgcataacatttgtataattggcttttgtaaacaagacattgctatagttcttcacagaattatgctaatatcgatagattattcttcatttatctttatctgttctgagcgactgaaagaggaaagatttgttatgagaacacataaatacagtatcatgaaagggaaagaaaaagttctgttttgcggaaggcattagtcccctttgttagtcaaatgaagagagactattcattatactttaatcttaaggaatccaagattgctaaactaatggatgacatgtgactaaggaatgaattagttgaactttattctatgagttgccaccatgaactgtgcaattatagccaggtcctttaaatgctttgaatgtttttcatgtgcggatragattatttcagacctaccaggccttgaagaaggatcaaagtcttgtcagagcttttgcctaaaattgaaaatatcatgttacttggactatttatttatccctgcaccttgttgcaaaaa

SEQ ID NO: 511586 - DNA, 531 bp, Homo sapiens
tcgggacactggtgagcctgctcagtggggagtcccttttcagctcagtcagcaagtggctcttctctataaagaggcaggggatgaacctcctctctagttttagcagaagaggccatgagacccatggcagaggccagagctgtgcaggctgtaggaggtaccacgtcagggatttcaaayggaggaaggtactttccagagagtactgcagggaaccaagccatatccaccgtagctgcaataaaaactctgaggctcagcttaaactcaatcctagaaatgatgtcccagcacaaactttgcaggataagcaaaatctagagaagagaaaatgcagacccaggcaatgataaacacaagtcatcgggaccaccacggagcagatacagtgccttctccacgtgcggtgaatgaggttctcacgtctgttagtgtgtggaattgaacatcaatatcagaatcattctgtgttacctacaactggttttatgttgttatgcctgtctcctgatgactgtgtatctttag

SEQ ID NO: 511587 - DNA, 515 bp, Homo sapiens
ctgcaatagcttttctgttcttttatctacattggtaggttcttcttttaattaatttttaccccaacttaagtgctggctggtttggcaatttgttgctgggatggaaagaagaaatgtgcaccttgtcttttgcaggttatgagagccttgtctgtccttgtggttgtgtgggtgtctgttagattattgtgaatactgagctttgaaaataacctaacagtcaatcaattgctgagcttctattaccagtagtgggacataatgtacatcatgtagataggcaggcttgtcactgacaagggggctgacccctggaaaaccagcacagagccagctcttctgtgtgaatccactctctccagaatataccataagtcatggaaagaaataagagtctcaggaaatgagactcttaccgcgatgagaggtgaaccttgaaatctattttagcaattaggaagagaagtcccatttygcatcccaaatcaagtagaggcctgctagtccaaaca

SEQ ID NO: 511588 - DNA, 454 bp, Homo sapiens
tggtttatctccagtatggaaactctctgcttaatcatcttgatttctctgggcttgttcctactctgcagatttaagcatgacacttgtatctctctctccaggctctgatctaggatgacagcttctatgatgtgcccatctacagaaatatgcaaattgcaaatttaggaagattaaaagagggccctgcaaaaggcatctacaggccccatgtgctgttcacctttcttatttattggtgaagtgagtcctcatccatttattgggcagttgcaagcaaaggaattaactatgacaattcaccttgatgtacaacaatttagtctgtttggagtttccactgttggaaaaaacctagttatcytaattaagaacagttacagatagtatagtgatagcttttttttttttttttttttttttttttttttttttttgagacaggggcttg

SEQ ID NO: 511589 - DNA, 635 bp, Homo sapiens
ggtttatctccagtatggaaactctctgcttaatcatcttgatttctctgggcttgttcctactctgcagatttaagcatgacacttgtatctctctctccaggctctgatctaggatgacagcttctatgatgtgcccatctacagaaatatgcaaattgcaaatttaggaagattaaaagagggccctgcaaaaggcatctacaggccccatgtgctgttcacctttcttatttattggtgaagtgagtcctcatccatttattgggcagttgcaagcaaaggaattaactatgacaattcaccttgatgtacaacaatttagtctgtttggagtttccactgttggaaaaaacctagttatcctaattaagaacagttacagatagtatagtgatagcttttttttttttttttttttttttttttttttttttttgagacagggkcttgctctgtcactcagattggagtggagtagcatgatcatggctcactgcagcctcaacctccctgggcacagggattctcccacctcagtctcctgagtaactgggaatacaagcacatgccaccatgcctgaatattttttctattttgttttggtttatttgttttgtttcgttttgaaaaa

SEQ ID NO: 511590 - DNA, 635 bp, Homo sapiens
ggtttatctccagtatggaaactctctgcttaatcatcttgatttctctgggcttgttcctactctgcagatttaagcatgacacttgtatctctctctccaggctctgatctaggatgacagcttctatgatgtgcccatctacagaaatatgcaaattgcaaatttaggaagattaaaagagggccctgcaaaaggcatctacaggccccatgtgctgttcacctttcttatttattggtgaagtgagtcctcatccatttattgggcagttgcaagcaaaggaattaactatgacaattcaccttgatgtacaacaatttagtctgtttggagtttccactgttggaaaaaacctagttatcctaattaagaacagttacagatagtatagtgatagcttttttttttttttttttttttttttttttttttttttgagacaggggcttgctctgtcactcagattggagtggagtagcatgatcatggctcactgcagcctcaacctccctgggcwcagggattctcccacctcagtctcctgagtaactgggaatacaagcacatgccaccatgcctgaatattttttctattttgttttggtttatttgttttgtttcgttttgaaaaa

SEQ ID NO: 511591 - DNA, 635 bp, Homo sapiens
ggtttatctccagtatggaaactctctgcttaatcatcttgatttctctgggcttgttcctactctgcagatttaagcatgacacttgtatctctctctccaggctctgatctaggatgacagcttctatgatgtgcccatctacagaaatatgcaaattgcaaatttaggaagattaaaagagggccctgcaaaaggcatctacaggccccatgtgctgttcacctttcttatttattggtgaagtgagtcctcatccatttattgggcagttgcaagcaaaggaattaactatgacaattcaccttgatgtacaacaatttagtctgtttggagtttccactgttggaaaaaacctagttatcctaattaagaacagttacagatagtatagtgatagcttttttttttttttttttttttttttttttttttttttgagacaggggcttgctctgtcactcagattggagtggagtagcatgatcatggctcactgcagcctcaacctccctgggcacagkgattctcccacctcagtctcctgagtaactgggaatacaagcacatgccaccatgcctgaatattttttctattttgttttggtttatttgttttgtttcgttttgaaaaa

SEQ ID NO: 511592 - DNA, 210 bp, Homo sapiens
atgccatgcctatagggatacctttaagtaaccctyttttttttttttttgggcaatttttcaaagcaacaggcactttattaaataagaaagttgatgtgctttcctaatgcctgctaataaagtaaagaaccaaggaacctctgtgatttcaatgaaatccctccagatgttataggctacttgttacagacaggtatggtaggaagt

SEQ ID NO: 511593 - DNA, 210 bp, Homo sapiens
atgccatgcctatagggatacctttaagtaaccctttttttttttyttttgggcaatttttcaaagcaacaggcactttattaaataagaaagttgatgtgctttcctaatgcctgctaataaagtaaagaaccaaggaacctctgtgatttcaatgaaatccctccagatgttataggctacttgttacagacaggtatggtaggaagt

SEQ ID NO: 511594 - DNA, 210 bp, Homo sapiens
atgccatgcctatagggatacctttaagtaacccttttttttttttttttgggcaatttttcaaarcaacaggcactttattaaataagaaagttgatgtgctttcctaatgcctgctaataaagtaaagaaccaaggaacctctgtgatttcaatgaaatccctccagatgttataggctacttgttacagacaggtatggtaggaagt

SEQ ID NO: 511595 - DNA, 372 bp, Homo sapiens
tagcaggtgggagagtcggactctgaggagtgcgttcaaagtcttcacttggtacttgtttatactgagtcttggaatatccttccatgttggaaggagayatggatcccagggatgaatgattactgcctatgtagcttctggcagtggacgtgtggctctttggaggcggcacatcttccttgatatcgtgatgaacttccttttcatatttttcttctctgcgctttttacgacagcaaaagatgataagaccaatgagcactagagcaagcaaagttcctataatggctcctgcaattagtccagctttatttgaaggagggacaacgtttacacgcaacaggcactgatcagagcccactctgtttc

SEQ ID NO: 511596 - DNA, 372 bp, Homo sapiens
tagcaggtgggagagtcggactctgaggagtgcgttcaaagtcttcacttggtacttgtttatactgagtcttggaatatccttccatgttggaaggagatatggatcccagggatgaatgattactgcctatgtagcttctggcagyggacgtgtggctctttggaggcggcacatcttccttgatatcgtgatgaacttccttttcatatttttcttctctgcgctttttacgacagcaaaagatgataagaccaatgagcactagagcaagcaaagttcctataatggctcctgcaattagtccagctttatttgaaggagggacaacgtttacacgcaacaggcactgatcagagcccactctgtttc

SEQ ID NO: 511597 - DNA, 560 bp, Homo sapiens
ctggtgatatcagccactcgatgtccagtggtccctggtcttcaggactaagcgtaaatttgcatggcagataggcagtttcccctttggctttttcaatcatctgctcaggagtagtgatactccaacctctgatgaaatccgcgrctctgcacaggagcacgaagcgcagcaggagcgccacggtggctgccgtgccgtgggcggcggctgcaggtaggcggctctcgctccaggtcctaggctccccgcgcctggcgcactcaaggtagagaaaatcttaaagactccaccacaataaacggttaaagctgataaagaaattcaataaagttaatagttacaaaatcatacagatagcattattgtttctatacattaatgacaaactattacctgaaaaataaattaatgaggcaattcaatttataatagaatcaaaacagatataaaaatatgtaaaagacttaggagtaaatttaatcaagaatgtgaaagatttgcacactgaaaactatagcacattgatgaaaaaagttaaaatggcataaataaatgga

SEQ ID NO: 511598 - DNA, 560 bp, Homo sapiens
ctggtgatatcagccactcgatgtccagtggtccctggtcttcaggactaagcgtaaatttgcatggcagataggcagtttcccctttggctttttcaatcatctgctcaggagtagtgatactccaacctctgatgaaatccgcgactctgcacaggagcacgaagcgcagcaggagcgccayggtggctgccgtgccgtgggcggcggctgcaggtaggcggctctcgctccaggtcctaggctccccgcgcctggcgcactcaaggtagagaaaatcttaaagactccaccacaataaacggttaaagctgataaagaaattcaataaagttaatagttacaaaatcatacagatagcattattgtttctatacattaatgacaaactattacctgaaaaataaattaatgaggcaattcaatttataatagaatcaaaacagatataaaaatatgtaaaagacttaggagtaaatttaatcaagaatgtgaaagatttgcacactgaaaactatagcacattgatgaaaaaagttaaaatggcataaataaatgga

SEQ ID NO: 511599 - DNA, 560 bp, Homo sapiens
ctggtgatatcagccactcgatgtccagtggtccctggtcttcaggactaagcgtaaatttgcatggcagataggcagtttcccctttggctttttcaatcatctgctcaggagtagtgatactccaacctctgatgaaatccgcgactctgcacaggagcacgaagcgcagcaggagcgccacggtggctgccgtgccgtgggcggcggctgcaggtaggcggctctcgctccaggtcctaggctccccgcgcctggcgcactcaaggtagagaaaatcttaaagactccaccacaataaacggttaaagctgataaagaaattcaataaagttaatagttacaaaatcatacagatagcattattgtttctatacattaatgacaaactattacctgaaaaataaattaatraggcaattcaatttataatagaatcaaaacagatataaaaatatgtaaaagacttaggagtaaatttaatcaagaatgtgaaagatttgcacactgaaaactatagcacattgatgaaaaaagttaaaatggcataaataaatgga

SEQ ID NO: 511600 - DNA, 528 bp, Homo sapiens
ctcctgagtagctgggattacaggcatctgccttcatccccggctaatttttgtatttttattggagacagggtttcaccatgttggccaggctggtcttgaacctctgacctcaggtgacctgcctgtcttggcctcccaaagtgctgggattataggcatgagccaccacccctggccagaatattgctacttttgcaaatagctacaattgaccctgatctggactttgagttgatcacagctttgtaaaagaggatagcattgtaaaactgcaaaattagaytaataataacatagaatgctttcagtataagaaataatactatcctaagcaaaaataaataaataaataaaactggaggaattatattatctaacttcatattatactacagaattacagtaaccaaaagagtagggtactgacataaaaagaggcccatagatcaatgaaacacaatagagaacccagtaacaaatctacatacctacagtgaactcatttttgacaaaggtgccaagaac

SEQ ID NO: 511601 - DNA, 568 bp, Homo sapiens
gctgctccacatttttcccaatatttaatactgacaactttaaaatattagacaatccagtggatatatagtgatatctcatttagattttaatttgcaattcactgatgatatactattgagcatcacatctttcataatgtactttattttgcgaagacacatacccagcatatggaagaccctcaataaatatttgttgaacttacacaaattgaatacagaaaatgcagctcatcaaaggatttgagttaatttcctggcatttatgaaataccgagcaagttatcaaatgatagcacttaarctaattctcaagtatttaaaagaaagtgtacatcctcatctgtctaccaaatatggcccccaggcagtttgctcaaggtcaaatactggtggaacaatgattagaaacattttatcatcctcaatttaattctctttatatttgactcaggataaatgtcattgatttttcatatcattttattgaatttatgttttattcaattactgttttgccatagtatctctccctgttcgttattaaaaacttcagctcttgata

SEQ ID NO: 511602 - DNA, 310 bp, Homo sapiens
tatgtgtattattagtagtattattattatgattattttgaaacagagtcctactctgtcacccaggttgtagagcagtggcacaatcttggctcacggcaacctccatctcccagtttcaagtgattctcgagcctcagcctcccgagtagctgggattacaagtgtgagccactgcacctgccttacttcattaattttaatagctgtgtagtattcrgtcatatgaatgaatagtatgcaattttagttctttattgatagttgttttcaacaaatatacaaatgtaaaatttttcctcaaattggg

SEQ ID NO: 511603 - DNA, 615 bp, Homo sapiens
aattgagcatctcttaaaatataatggatttgtgtaggtgaaacagatttgttgccaaaagttaatttgtgcacaagttatcaggaacacacttgataaaattagatgctgattaattggagatacattgtatccagagatacacaagaatccagaggaaataaacagagaaggagaggaagtaagtcagcttctggctcataaaggggtccactgaagatgctccctaacatggttgctcctaaaccatctgactcagatttctagtggagggtaggatgggtgtgttagcagtcatttgakatcagggttgtgaaccaggaagggttactacagattgtgaaaagttcttgaaatttgccgcaggccgtgaggagtggtaaagtcagtttaaaaatctgctgtagttctagttaacacgttcacaccttctttagtgaagtagaatgctgagttaccaaaggacgtattcacgttttagagggggtgtggtgaaggttattataagtttggaagaggtggaagaaaatgttgttatagttgtgtagagtagtgaaggactttggcaaatatcctgtcaaatcatgaagtagtatttttagagagttgcaccca

SEQ ID NO: 511604 - DNA, 615 bp, Homo sapiens
aattgagcatctcttaaaatataatggatttgtgtaggtgaaacagatttgttgccaaaagttaatttgtgcacaagttatcaggaacacacttgataaaattagatgctgattaattggagatacattgtatccagagatacacaagaatccagaggaaataaacagagaaggagaggaagtaagtcagcttctggctcataaaggggtccactgaagatgctccctaacatggttgctcctaaaccatctgactcagatttctagtggagggtaggatgggtgtgttagcagtcatttgatatcagggttgtgaaccaggaagggttactacagattgtgaaaagttcttgaaatttgccgcaggccrtgaggagtggtaaagtcagtttaaaaatctgctgtagttctagttaacacgttcacaccttctttagtgaagtagaatgctgagttaccaaaggacgtattcacgttttagagggggtgtggtgaaggttattataagtttggaagaggtggaagaaaatgttgttatagttgtgtagagtagtgaaggactttggcaaatatcctgtcaaatcatgaagtagtatttttagagagttgcaccca

SEQ ID NO: 511605 - DNA, 539 bp, Homo sapiens
ctgtggtattttctcaagtatcaaagaattatttcccccatgaatggtaaatggatacttgcattttctgatttcctctcacttgactaaaagtttggttgcctgcagaattttttaatctgaattcgctgatggatacctgggttgcttctactttttaactaytctgaataatgctgctgtgacagtcatttaaaaatataaaaaaaattaagcatttttttggggactgagatatgcttaagataaattaaccatcataggagaacataaaacataaatatctaagggtgaactagaacccaaaggcctagtctgggtcataggatattatggaatgaaagaataacccatactgatgaaaatgtcacttaccaagatgatgatcttacagtgtaggaacagcaattgtttagctacaaaatgtgtggtaatcatgacttgcagaaataagactggtaaagtctccaagaaactttcaggattcctaaaaccagtcctttgtccaaaagtcatcttcatagtagtggccatatcct

SEQ ID NO: 511606 - DNA, 607 bp, Homo sapiens
tgtggtgcctgtatcataacagttgttaaataatttgaatatataatgtttaaatatgtagcttgtctttgatcttttgacaacagagatagcttcatttacctaaaggggtactgattttaaaaattaattcatttgaatttaaacacagcatatgctagacaaaactcttagggaaagaatatgtatatacgtgcatgtaaaccacacagactgaaagagaagcattcagtacataaattattaggctcaagtaggaggttactatagagttagctgctacttattttcagaatttgattttatattttgaattggaagaatgccgatctgggagtcaaaaactcttaattttgagccatggatgcataaccttgggtattttaatattgggcttagtttactggtttgcaaaagagatgagtggacmagatatctttaaagtctattctaggcatgaattttcatgattctgcagtatatgttccttttaagaagtgagacattaccaggataaatataggaaaaactagtagtatccccttaccccctcaccctcctgagtaaccaatttaatatgcacagaacatccttctatcatcctttt

SEQ ID NO: 511607 - DNA, 607 bp, Homo sapiens
tgtggtgcctgtatcataacagttgttaaataatttgaatatataatgtttaaatatgtagcttgtctttgatcttttgacaacagagatagcttcatttacctaaaggggtactgattttaaaaattaattcatttgaatttaaacacagcatatgctagacaaaactcttagggaaagaatatgtatatacgtgcatgtaaaccacacagactgaaagagaagcattcagtacataaattattaggctcaagtaggaggttactatagagttagctgctacttattttcagaatttgattttatattttgaattggaagaatgccgatctgggagtcaaaaactcttaattttgagccatggatgcataaccttgggtattttaatattgggcttagtttactggtttgcaaaagagatgagtggacaagatatctttaaagtctattctaggcatgaattttcatgattctgcagtatatgttccttttaasaagtgagacattaccaggataaatataggaaaaactagtagtatccccttaccccctcaccctcctgagtaaccaatttaatatgcacagaacatccttctatcatcctttt

SEQ ID NO: 511608 - DNA, 578 bp, Homo sapiens
ttaattattttactcatttttctgaaaatcttgccttatcaataaaaaacagtcacttctctccttataattgtatcttatcatagatatagtgggaataaaataatggaaataaaaccctgctagtttccccaatgtatactacaacagcaaaattattttttattcatgatttatactactgcaggatggcaagcaggggggaagttaatgggggaaggggatggtgggaacaaaatgccagaaccaaaccaaatacttgaacaacctaytccaaagcaaaacaatgaataaaggagaaggagaggagatgaaagaagagaagagaaagggaggggaggggagaagggagggcactcaaataattaatgctacaggtctcagatctttcagaatctttaaaagaaacaaattattgctctcaacacgcacatttcattttcctttcttgtttttttacattaatagtctctacctatttgaaaacaaaacaaaagtaactcaacatctcaaatgatctataaattcatcaagaaatactctgtcgctcaagttctcatagataataccacactgat

SEQ ID NO: 511609 - DNA, 578 bp, Homo sapiens
ttaattattttactcatttttctgaaaatcttgccttatcaataaaaaacagtcacttctctccttataattgtatcttatcatagatatagtgggaataaaataatggaaataaaaccctgctagtttccccaatgtatactacaacagcaaaattattttttattcatgatttatactactgcaggatggcaagcaggggggaagttaatgggggaaggggatggtgggaacaaaatgccagaaccaaaccaaatacttgaacaacctattccaaagcaaaacaatgaataaaggagaaggagaggagatgaaagaagagaagagaaagggaggggaggggagaagggagggcactcaaataattaatgctacaggtctcagatctttcagaatctttaaaaraaacaaattattgctctcaacacgcacatttcattttcctttcttgtttttttacattaatagtctctacctatttgaaaacaaaacaaaagtaactcaacatctcaaatgatctataaattcatcaagaaatactctgtcgctcaagttctcatagataataccacactgat

SEQ ID NO: 511610 - DNA, 578 bp, Homo sapiens
ttaattattttactcatttttctgaaaatcttgccttatcaataaaaaacagtcacttctctccttataattgtatcttatcatagatatagtgggaataaaataatggaaataaaaccctgctagtttccccaatgtatactacaacagcaaaattattttttattcatgatttatactactgcaggatggcaagcaggggggaagttaatgggggaaggggatggtgggaacaaaatgccagaaccaaaccaaatacttgaacaacctattccaaagcaaaacaatgaataaaggagaaggagaggagatgaaagaagagaagagaaagggaggggaggggagaagggagggcactcaaataattaatgctacaggtctcagatctttcagaatctttaaaagaaacaaattattgctctcaacacgcacatttcattttcctttcttgtttttttamattaatagtctctacctatttgaaaacaaaacaaaagtaactcaacatctcaaatgatctataaattcatcaagaaatactctgtcgctcaagttctcatagataataccacactgat

SEQ ID NO: 511611 - DNA, 559 bp, Homo sapiens
cacatatgaagagaagtagtggaaaagttacattaaaagctaaaaggtgacaaactaagcagattatgttctttaaaattttgtgagaggcaaaagtttttaactgaggtatataatacatgtacaaagaagtgcacacttcctaagtctactattcaatgattctcataaactgaacacawccatgaaatcatgacccagatcaagacagagaacattaccagcacacctacaatctcccttgtcctcatcaccaaagataaccattattctgattccattcccatctgttagttttgtctgttttttaagctttacagaaatggagtgctcgcttcggcagcaaatatactaaaattggaacaatacagagaacattagcgtggtccctgcacaaggatgacatgcaaattggtgaggctttccatctttttattattacagtagtctgtattatttcatatccaaaaaaatgatcaatatgaagaatgggatgaactaattaatactgtgattgaagacaatagcattatttgcctgggaaactaaagacaaaaca

SEQ ID NO: 511612 - DNA, 660 bp, Homo sapiens
tgtggagaatggatggtagaaatattaaaattgccctttgcctggtgaagtggtgtgtacctgtaatcccagctactcgagagactgaggcaggaggatggattgagcccaagtttgagaccagtctaggcaacgtatcgagacccccatctctaaaaaaattttaaattgctctctaaggcataaattgtccttttacatggtagttgttcaacagatagttgattaacattagtgtttcacctatagctgtacagctttacaaccactctcaacttcacatagtggaagtggggtcagtcatttaggacatatctgtgtctttgtcattgaaactcaaattttgagactggctaaggcaaatatccagatctggatgtcatgattgtcaacaatgaatatcagtaatcagtgttgtaatactgtagaaaaattagtcccacataatactgagatctagtcgttaaaaacatagcattcaggggccaggcacagtggctcattcctgtaatcccagcagtttgggaggccaaggcagatggatcatttgaggccagtagttcaagatcagcctgggcaacatggcgaaaacccatctctgctaaaaatgcaacaattagctgggygtggtggcgcatgcctgtaatcccagcttcttgg

SEQ ID NO: 511613 - DNA, 562 bp, Homo sapiens
agcaagagtctgtctcaaaaacaaaaaaacaaaaatcrtagcattcaactacctggaaattaccctctcccttcagttgatgttaggctctacttagaccaatttagtcagtgtgcttaagaaagatgtggagagggcaggacacggtgcctcacacctgggatccctgcattttgggaagccaaggtaggcagatcacttgagttcaggagttcaaggaggcatgagaactgggcaacatggtgaaacttcgtctctacaaaaattgcaaaaattagccaggtgtagtggcgcatgcctgtagtcccagctacttaggaggctgaggtgagaggatcacttcagcccagagggttgaggctgcattgacccagtatcacaccactgcactccagcctaggtgacagagtgagacactgtaccaaaaaaaaaaaaaaaaaaaaagatgtggcaaaattaacatgcacagtgagaagaagggtaacactgattactgattaaggcagtactcctctgggtttttgtcttaagtggatgtgatagtggcatcacttacacgacc

SEQ ID NO: 511614 - DNA, 622 bp, Homo sapiens
cgatgcaagggtacgacctcctgggcccttctccttcccaggtcccggcagtcagggcccctgcctccccttcccaccacctgacttgcctgccctcctggggtctagcagcttagtgaacaggtgggcacrgcagggggagccccgcccgtgggatggggacccccctgaagcagctgctggctcctccctgcccccacccaggccgtgtgctttgggaccaactccaaggtgccttctcctcccatccctgcccactgtggccgattggtggctgatccctggacttgtaagttcctagggggagggaccagcccacctggtggtcccagggcccagcacacagtgggccttcagaaatgcttatcaaacaaatgccagtggccgcaggcagggcctgagaggagcagcttagcggccaggtccaggcccagcatggtcaagccatgccgggttcctgattctccggccctagcccaggggctgccccgagggcagagctggcccacccccacattctcttctgcttcctggtttcacgggggacgtgggagtggatgaggtgtgcagagagtgcagtggctgtgggtggacagcaccaactgctgccaccaacacgggc

SEQ ID NO: 511615 - DNA, 622 bp, Homo sapiens
cgatgcaagggtacgacctcctgggcccttctccttcccaggtcccggcagtcagggcccctgcctccccttcccaccacctgacttgcctgccctcctggggtctagcagcttagtgaacaggtgggcacggcagggggagccccgcccgtgggatggggacccccctgaagcarctgctggctcctccctgcccccacccaggccgtgtgctttgggaccaactccaaggtgccttctcctcccatccctgcccactgtggccgattggtggctgatccctggacttgtaagttcctagggggagggaccagcccacctggtggtcccagggcccagcacacagtgggccttcagaaatgcttatcaaacaaatgccagtggccgcaggcagggcctgagaggagcagcttagcggccaggtccaggcccagcatggtcaagccatgccgggttcctgattctccggccctagcccaggggctgccccgagggcagagctggcccacccccacattctcttctgcttcctggtttcacgggggacgtgggagtggatgaggtgtgcagagagtgcagtggctgtgggtggacagcaccaactgctgccaccaacacgggc

SEQ ID NO: 511616 - DNA, 497 bp, Homo sapiens
ctgcaagttgaaatgttgtggttcttcgtgtgtcaagcaattttgggctatattctagacattttgaatatgactttatgagatctgggtcatgtttgaatcctgtgggaaatgttgaagtctggttagcaggcacttggtcctgtgaaggttgggcccacattgttcctgcccgcatgagtatctttggttagcaggcacttggtcctgggatggtcaggcccacactgctcccacctgcgtgggtgtctttggttagcaggcacttggtcctgtgagggttgggcccacactgctcccacctgcgtggactcctgtcttcagagctgctggtctttggtctgggacccaaggctggtctgcagttccccacgtccatggtgtgatcattagacccatgtgtctgcatgtgagctgagcccggcatccacagccaccccatgtgggtgcttyccaagctccccacgctgggtttggttgctgggctcactcactgt

SEQ ID NO: 511617 - DNA, 613 bp, Homo sapiens
tacaggaatttcttgtggggttttggaatgttcttggaaacagtccttatcccggatatgtaggtataagcttcctctcttcatgctttcctggccctattttgtctgggcctgacaaaagtcattttccctggcacctacaactttcacccatattatacatattatacacccccccgccttttttttttwaattttgggttattgaatagatcttattaagtttttgaagtatttgtttgtcatgctatttggtccattcaacctcttgatgtgcttattttgtttgtcttttatttgtactttaatggtggacagtatctttcaagattattttattaaatccatcaatcctaaagatatgataagtagacgctattcttttttttgtgtttagttcaactatcagtgatatgctttaagtttttcagtgatttagatattcaatccaaaattgagaagaccacgcttcctctctttaatttctgccattacaacataaagtctgtttattctatttctagagcagaaatatgtaaaattatttgaacattcaagatttcccacttctattagttttctattcccacctaattaatattctaaaagacag

SEQ ID NO: 511618 - DNA, 636 bp, Homo sapiens
aactttaaatttagtatcctagtttacattaaacaaataagtatattataattatatttattrtatcattattaaaatgtgtgcatatggctattaaatggttctttgtatttagccccaacatctgaattccttcttttaaaagaaaaaagaaacgaaactataaaacctaaacataatctctttggaccacagaaatattttctttttgatcacccataaaggttcatgaaaatggaagaaatgaatgtccttaaatttggaaaatacatcaaaatgtgttcaggtagttggaatgtgtgtgaattcaagataagaatgaataaactggtgaattttaaataagtgatgatattttcacagaaaattaaatatctagtcagtcctcacacagggaaacaggaatatgattatgtagctatctaatcttcttaaagcagggttaaaattcatgtcaagtgttttggggagaaatgattccttcttaaaattgtctttactaaattaatgaaaatataccttaactatctatgcctcacaggaatgtccagaccagttaagatggcataggctcatctcttcctgctcttcatcaactatactttcctgatataaggtaatatacaggcaaaggag

SEQ ID NO: 511619 - DNA, 583 bp, Homo sapiens
gaactttaaatttagtatcctagtttacattaaacaaataagtatattataattatatttattatatcattattaaaatgtgtgcatatggctrttaaatggttctttgtatttagccccaacatctgaattccttcttttaaaagaaaaaagaaacgaaactataaaacctaaacataatctctttggaccacagaaatattttctttttgatcacccataaaggttcatgaaaatggaagaaatgaatgtccttaaatttggaaaatacatcaaaatgtgttcaggtagttggaatgtgtgtgaattcaagataagaatgaataaactggtgaattttaaataagtgatgatattttcacagaaaattaaatatctagtcagtcctcacacagggaaacaggaatatgattatgtagctatctaatcttcttaaagcagggttaaaattcatgtcaagtgttttggggagaaatgattccttcttaaaattgtctttactaaattaatgaaaatataccttaactatctatgcctcacaggaatgtccagaccagttaagatggcataggctcatctcttc

SEQ ID NO: 511620 - DNA, 636 bp, Homo sapiens
aactttaaatttagtatcctagtttacattaaacaaataagtatattataattatatttattatatcattattaaaatgtgtgcatatggctattaaatggttctttgtatttagccccaacatctgaattccttcttttaaaagaaaaaagaaacgaaactataaaacctaaacataatctcttyggaccacagaaatattttctttttgatcacccataaaggttcatgaaaatggaagaaatgaatgtccttaaatttggaaaatacatcaaaatgtgttcaggtagttggaatgtgtgtgaattcaagataagaatgaataaactggtgaattttaaataagtgatgatattttcacagaaaattaaatatctagtcagtcctcacacagggaaacaggaatatgattatgtagctatctaatcttcttaaagcagggttaaaattcatgtcaagtgttttggggagaaatgattccttcttaaaattgtctttactaaattaatgaaaatataccttaactatctatgcctcacaggaatgtccagaccagttaagatggcataggctcatctcttcctgctcttcatcaactatactttcctgatataaggtaatatacaggcaaaggag

SEQ ID NO: 511621 - DNA, 489 bp, Homo sapiens
gggtttaagctagcctcaagaagatgaactagtatttgtattgtagacagtaaagtaccaattgccacagtctgctgacaggtatatttctcagtttttttttttccattgaataccaactctaattggaatatttagcagtttacaaaaataaatttaattaaaaatactgtggtctaaataagccttttaatgtgaatatttttgagcttctgtaacataaatatggttatcaggtattcatgtcttgcaacattcaaacaaytttttctacacattataaattagtgtctggagtctctaaagacaaaatgtctgctccattactcctcaaatgagggcaaaagtacttttcttcctggctgatagaatattagacacgatgcatggaaagtctttttcaagttccttttcttttggtatcactccctagttatattcttgaccttatcctcactactcactcccttaggttaaactatcgtattt

SEQ ID NO: 511622 - DNA, 489 bp, Homo sapiens
gggtttaagctagcctcaagaagatgaactagtatttgtattgtagacagtaaagtaccaattgccacagtctgctgacaggtatatttctcagtttttttttttccattgaataccaactctaattggaatatttagcagtttacaaaaataaatttaattaaaaatactgtggtctaaataagccttttaatgtgaatatttttgagcttctgtaacataaatatggttatcaggtattcatgtcttgcaacattcaaacaactttttctacacattataaattagtgtctggagtctctaaagacaaaatgtctgctccattactcctcawatgagggcaaaagtacttttcttcctggctgatagaatattagacacgatgcatggaaagtctttttcaagttccttttcttttggtatcactccctagttatattcttgaccttatcctcactactcactcccttaggttaaactatcgtattt

SEQ ID NO: 511623 - DNA, 489 bp, Homo sapiens
gggtttaagctagcctcaagaagatgaactagtatttgtattgtagacagtaaagtaccaattgccacagtctgctgacaggtatatttctcagtttttttttttccattgaataccaactctaattggaatatttagcagtttacaaaaataaatttaattaaaaatactgtggtctaaataagccttttaatgtgaatatttttgagcttctgtaacataaatatggttatcaggtattcatgtcttgcaacattcaaacaactttttctacacattataaattagtgtctggagtctctaaagacaaaatgtctgctccattactcctcaaatgagggcaaaagtacttttcttcctggctgatagaatattagacacgatgcatggaaagtctttttcaagttccttttcttttggtatcactccctakttatattcttgaccttatcctcactactcactcccttaggttaaactatcgtattt

SEQ ID NO: 511624 - DNA, 648 bp, Homo sapiens
gtaataatttgttacagcagcaataggcaattaatacagctcctgtctctcaaatgtgtgctacagatcaggacaaggtctgggcatgaggacagagctagctcacccctactattcacatcagcatcctggcgatcctttgtatccagagatgytgctccttctcccattagcatacttgacatgatagaatgctaagactcagcaggaagtggccattagaagcttcagaaatcacttctctttcctctcgctgatcacaggtttcttaagtaaactgtatagtaattcaaagcaaagcttaggggaaaaaaggaactgacattcatttcagaaaattcctctcaataatgagtacactccatccacaaatgtcaaagagctttgctcacaaagccaataatccctatcacaaatataaggcaatgtaaacatttaagaaccatattcctcaattaggaacagcctttttgggtagctttcctagcattccagtggcagaacatacacttttaagcagttattaatcactattctatctcttggcatgctgtaatgctggttttctaacatctctgcagggatttctatttatagaactgctccttctcattgatctgccttcaggacactgaagcaattccccag

SEQ ID NO: 511625 - DNA, 648 bp, Homo sapiens
gtaataatttgttacagcagcaataggcaattaatacagctcctgtctctcaaatgtgtgctacagatcaggacaaggtctgggcatgaggacagagctagctcacccctactattcacatcagcatcctggcgatcctttgtatccagagatgctgctccttctcccattagcatacttgacakgatagaatgctaagactcagcaggaagtggccattagaagcttcagaaatcacttctctttcctctcgctgatcacaggtttcttaagtaaactgtatagtaattcaaagcaaagcttaggggaaaaaaggaactgacattcatttcagaaaattcctctcaataatgagtacactccatccacaaatgtcaaagagctttgctcacaaagccaataatccctatcacaaatataaggcaatgtaaacatttaagaaccatattcctcaattaggaacagcctttttgggtagctttcctagcattccagtggcagaacatacacttttaagcagttattaatcactattctatctcttggcatgctgtaatgctggttttctaacatctctgcagggatttctatttatagaactgctccttctcattgatctgccttcaggacactgaagcaattccccag

SEQ ID NO: 511626 - DNA, 495 bp, Homo sapiens
agaaaaagtttttattgttttaagccactaagtttgtggtgattcattacagcacccccaggaaatgaatatagtatcccaagtaggattagccctagttacctactgtggtggtgagctcaataatttaagagttactttttcttcctttcttaggttgctcttcccagttctccattcttgttccctatgatcatttcccaaaataaattccccgcatgcaagacctggtctcaggctctgacttctggggaaaatcgaggctaatatacttggttccagaagtgaccataggaagcagaacctcaagatgttatggtggaactgcttcattcactgtccaaacagtgggaagaactytgtttgtggtggtgagttggtaacaacttctggcacccaatgcatcagtgaagtgaccgaaaggtctagggcatgtgaggaacagtgcctccaaggtaaagaacaatgtattgtttcttacatctcctgttactg

SEQ ID NO: 511627 - DNA, 506 bp, Homo sapiens
tggactgaaagctgttctttgtgtcacctgtggactctcagttctctggtggaggctgaaattttagggctggctgctggctgcaactgtattttgcttgcctgctccttttttttttttcttctaaaaacagtggcctgaacctccttccactatttgttctgtgaggatggagcattaaatccctgcttaraaaacagtgatctttgccttgttctatcggctgctccaacagctctctgtcagtattccatgatttttttctctgacttttggatgacttgaatactcattttgtgggttcattctcctagttgtttagaatcatttgctttttctttgtttcctttattatttgaaccttcaactgtgggaagcttaccgaaaagtgttttgcttgggaaatgctccccctgcatatggctactatccattgttgctcatgagttctgttggagtttgagggaagcagatactgattggtgctctgtatgtggaggttgtgc

SEQ ID NO: 511628 - DNA, 525 bp, Homo sapiens
attcacaggttccagagattaggatgtagagatttttggagtgcattattcagccttccacaagccccaattcttcccttctccttggaacaattacctttgccgtgtaattttgcactgccctctcactgtggtaggagatagggagtgacttgctttggctaatagaaagacacaaaagtgatgccctccagggatctttacaatttcctcctgctctcttgaacgtttccattgttataagcrgcatggtttcttcagtctagccctgtggtcccaagagatggatttggggtatctgaaacaaagctgcccaaaccaaacccagctcagagtggggcccccaactgctccacagacaagagtaggcagatggtccctgcagctaatcctcaattgtgtgagaaataaatgcttattgttgaatgccattgacttttagggcggtttgttatgtagcaatatgattcttttatttccaaaataattttaaggcttaagggaaaactactaatgatcattcaa

SEQ ID NO: 511629 - DNA, 525 bp, Homo sapiens
attcacaggttccagagattaggatgtagagatttttggagtgcattattcagccttccacaagccccaattcttcccttctccttggaacaattacctttgccgtgtaattttgcactgccctctcactgtggtaggagatagggagtgacttgctttggctaatagaaagacacaaaagtgatgccctccagggatctttacaatttcctcctgctctcttgaacgtttccattgttataagcagcatggtttcttcagtctagccctgtggtcccaagagatggatttggggtatctgaaacaaagctgcccaaaccaaacccagctcagagtggggcccccaactgctccacagacaagagtaggcagatggtccctgcarctaatcctcaattgtgtgagaaataaatgcttattgttgaatgccattgacttttagggcggtttgttatgtagcaatatgattcttttatttccaaaataattttaaggcttaagggaaaactactaatgatcattcaa

SEQ ID NO: 511630 - DNA, 525 bp, Homo sapiens
attcacaggttccagagattaggatgtagagatttttggagtgcattattcagccttccacaagccccaattcttcccttctccttggaacaattacctttgccgtgtaattttgcactgccctctcactgtggtaggagatagggagtgacttgctttggctaatagaaagacacaaaagtgatgccctccagggatctttacaatttcctcctgctctcttgaacgtttccattgttataagcagcatggtttcttcagtctagccctgtggtcccaagagatggatttggggtatctgaaacaaagctgcccaaaccaaacccagctcagagtggggcccccaactgctccacagacaagagtaggcagatggtccctgcagctaatcctcarttgtgtgagaaataaatgcttattgttgaatgccattgacttttagggcggtttgttatgtagcaatatgattcttttatttccaaaataattttaaggcttaagggaaaactactaatgatcattcaa

SEQ ID NO: 511631 - DNA, 576 bp, Homo sapiens
tcctctaatgacctggcttgagggtgttgccttgaaactttatgccctgtgccaaatactcctcattttctctcactagaaagcccagcacacctcaaaaggccaattggaaaggcaaactctgaaggaaaagacttacccatcacaggaggtgtgagattctgctaatttataaaagcaaaaatctggggaatacatgtggagagaaattctgagaatgctagaccaaggarggaagaacatagccttagatgaggctgaatgtattgatatggaggcattagcaaagttctagactcaatgtgttcacttgggcagttgggagtagtattaatcatctgctttgttggctgctgaaatctagacttatgaggactggtgtaaacaataatgctagttggcatacacgtaacccctactaagtgccaagcacttttcaaagtgctgtcatacatcaaattatctaatcataataataaacctatgagacaggtagtatcatcctcatttataaaagggaaaactgaggcatatataggttaaacaactttccacatgcagcttgtaagtggtaca

SEQ ID NO: 511632 - DNA, 528 bp, Homo sapiens
gggattcaaatcagatacctggttccagagtctgagctttttaggtctatgctaagttatatttatgaaagtgagatgccagggataccttgctatgtggagggagaattcaagaatttaagaaaatgctctaatagatgtatcaagtgttacctacttatctacctcaatgctatgytctctaaaatgccccagaagaaacatattcacctcagcgctgaggaatccactggtgaggggaatgccagcatttttggagagctctgtagtggcttttctctggaggacagacctcttaacaaaaaatgtggcccttgctcagtttccaaatgcgttggcctcaagcccttccagtaaaagagagagtgggtatacttgtgacagacaccattggacggtcaacctaaagccactgcaagtccaatttcctttgctacatcctactttggagtctgcaaaaccagatatttgcttcctcaggctctactctagtagtgcaaggggatgaggcagcatgcgacccagttc

SEQ ID NO: 511633 - DNA, 528 bp, Homo sapiens
gggattcaaatcagatacctggttccagagtctgagctttttaggtctatgctaagttatatttatgaaagtgagatgccagggataccttgctatgtggagggagaattcaagaatttaagaaaatgctctaatagatgtatcaagtgttacctacttatctacctcaatgctatgttctctaaaatgccccagaagaaacatattcacctcagcgctgaggaatccactggtgaggggaatgccagcatttttggagagctctgtagtggcttttctctggaggacagacctcttaacaaaaaatgtggcccttgctcagtttccaaaygcgttggcctcaagcccttccagtaaaagagagagtgggtatacttgtgacagacaccattggacggtcaacctaaagccactgcaagtccaatttcctttgctacatcctactttggagtctgcaaaaccagatatttgcttcctcaggctctactctagtagtgcaaggggatgaggcagcatgcgacccagttc

SEQ ID NO: 511634 - DNA, 577 bp, Homo sapiens
gtttttttggccagagaaatgtctactagagatcttctttcatgtaaaaacatggaaagggttttgttggaaagacagtttcttccttcataaaaatggttttccattgtttgtttaaaagaatgggtctgctttagcatttataagaaagacggagtaagagtcacagaatctcatatccagggcaaacatcttcatagcctgtggctgttaagatccagaatggtagatgaattctttaatagtaaggtgtgtagatacaaatttactactcttgtttttagcactctggccgtggctgctatcaatgaggcaattttgtgtatggtataatcttactctgagatgttaaggkaaaaatcccagccctcaaatacactgctttgccacactggggcttgtgacaagcctttgtacctctgtgagcttcagacacaggcatgcaaacacacccagcggaggctcagacatgaagacagatgaagcgcagggttcttataaatgatattacagcccagccatgaaaaggaatgaaaaacctcgcacagtatcgcaggaattatttgttcgcagtgtc

SEQ ID NO: 511635 - DNA, 655 bp, Homo sapiens
ggctgggggcttttcatggggttgtcatattttatctacttgtttgcatatcgagttcaatctggatttttctctcagcacttccggctctccttttgttagaatagtttcatagatttatttttttttaaatgagtaatagtaccagtgtatttttctttctagaaggaccttgctaaacatgtgtaaaataggagtagatatgaatatttggagattggtgaagtgataagaatgagaatacacatgtttggccgggcgcagtggctcatgactgtaatccctgcactttgggaggctgaggcgggcagatcacatgaggttaggagtttgagaccagcctggccaacatggtgaaaccctggctgtcctttaaaaaaaaaattagctggtcatggtggtgcacgcctgtaactccaactgcttgggaggctgaggcaggagaattacttgaayccaggaagtggaggttgcagtgagtcgagatcacgccactgcagtgcagcctgggtgacagagcaggactccatgtcaaaaaaaaacaaaaacaaaatacacctgctctccttaaagaaatggttctccttgcagctcaccatgtaattttcttgtactcatggtgttaggaccttttgctgaagactggcgggttgtc

SEQ ID NO: 511636 - DNA, 682 bp, Homo sapiens
atgacttcaaagggtccataacttatcacaagcaaaaattaaggaatattatatatgataaaattttatgtaatagttaccttttattaacaacaatattctaggtatttatgcatgcttataagtgcttatgaatatttatttttaatcttcaatagagtcttgagaggctgaaacgattattcccattatatagaagagatccaaacctcaaagtgtttgtaaaattacacaggtagtgtcacagttagaattcagaccttgaggtgctgctgtctgttttgaartgccacatcctgtccacccagtgacactcaggaatctcaaactgaaccttcaacttccctcgtgatatattcatttcaacaaacagtgtctcaatttaacccagtcgttcagtctaatcacctttacttcataaacacattcctttactcctctctctttcacacatccacgtattttccatcatcaaatcttaacagatgatttttgcagtacacttagaattgaacctcctctcatcccctccatcatcctgtcatggggtgggtgggggggcaatgcaaccagttaacagtctccttgtttccacttttgtgcctacctccacccgcatgttctattatccatgatgtaggcagattaaacctttcaaaacataaatctaatcatgccactt

SEQ ID NO: 511637 - DNA, 525 bp, Homo sapiens
atctaccatactgctgtcataggtgcacaggttcttgctctcatagttgtccaggttctttgaccatatttctggtttggatggtatgcaggtgttatataggtctcctgagttgttaaatgagggttgttcacagaagttggttggaatgaatattgctgtacataaggcagtagtctgctgtatgctgttaattgtttgttcctaccagacgacaacaaaagtggtaactggccctacattttttgatgcttgtagtgtttgagtcaggtgctacttttgccagtgtggtcattcatcacctatttccacccattatgacccataattatgacattagaggaaagggaaagtaaggcagcattattgcctctggaagtaaatgtttgaacattgtcttayaataaagcttgctgcttatttacttcatagtgtaaatctcttcttaccttcaatttgaagttttattgtgacactctcctccagtaaaacaatagctgactcatgtctagctgttggtgccta

SEQ ID NO: 511638 - DNA, 482 bp, Homo sapiens
ctgcattttatacaaataattgtttcaagggcagataggaaatagtgaatcatcctattattttaaacactcaacgtgagtttctttagaggccaaaaaggtcaaatttataactaattaacgaatactacctgtatggggcaggttgctagcatcraccagatgacacactcactggggtaaatgaaaagagctcaacaaagggtccatttcaactagggatggtgaagtagccagaagccagtaacagcaggaagctttaaaaccccttctctgaaagggcaagcaggaggcaatgttaagaaatctgtaaaagcagccaccatgagagactggctatcagacaggagccactgtcaaaccttggcccatcagaagagagcagatgtggcagagggagatatacatcctcatctttttcccttccttccctctgatttcttgccagtgcctgctcctggcttaacataggagaaagccag

SEQ ID NO: 511639 - DNA, 496 bp, Homo sapiens
catgccatagaaaacaaaaactagttatttgataataataaagttgttcctcatggccaatgatttggagctaggctgggctgcatttgctggattctgccacctatggtgatgtcttacacgtattagaacacttaatcttggcttccccatyggtggaatgggtaatattgtacttcccaggattgttgtgaaaatcaaatgagatcatgtatgtagaattcttgactgtctatcataatgagggctcagtaaattgagcttttattaatgttgtactataaagatttcagtttgtcttagtaataccaaaactctctagaccttaattattattgttttataatcttgttttagcattctatatatttaacacctttttgagcaaataaatactaaatgtttgttcctatcttggtagcatgctgaatttgaatcataacacagtaccgaaattgtcatcatgtaggtaaattgccatagcccattgccatct

SEQ ID NO: 511640 - DNA, 509 bp, Homo sapiens
taccgagtctttctattcaggaacatgctatatttcttcattcaaaatatactatattaaattaatgtatatttttacaactcctagctaacttacagatttgaagaagaggggcttgaaagtttttttggtgtgttttctaattcgcagttgtcattgtgacttttcagcagcaacaatgaaagtaaggtgagaggaatgatattttcagagtgccaaaagtaaaaaaaaactatcactctacaacgatatactctatgwataccacatacaatttcaaactcagtgttttcaaaataagagccaaattagtaaagaaaaactaattggtatatctaccaacagatgctcataaagaaaattttgaaatgatgtaaaagaaaagtgatatcaagtggaaattatgaatttcaagaataaataagaggattgacatatgctttaaaaagataaataaatttgattatgtaggaaaactaatatgtgattaaatatagaaatatttaata

SEQ ID NO: 511641 - DNA, 419 bp, Homo sapiens
cagcccattttctgtcctctgcaaaatagacatacatagcaagtggtcagactcaatcctattctgtatgttacagaaaggatttacggcaaagaagttacaagatattcttagcaatcatgggaatgattgttgttttctaaggctcctttcagttcttggatctcttccgtctccaacgccatatctcaaagagcaaccacaacgcctgctctcttggaatcactctcaatatgaggtactttaagaccattaagccaaactgctaagctgcttgtgtctatcaagtgccttcatcacagacatgggagaagaccatgstatcaagagtcagaatgcaagtcataaattttccccaacccctttccttattcgtttttaaaattcattcttcaaactctgattaggagaaggtaacc

SEQ ID NO: 511642 - DNA, 355 bp, Homo sapiens
tggagtgcagtggcgtgatctcggctcactgcgacctctgcctcctgggttcaagcaattctcctgcctcagcctcccgagtcgctgagattacaggtgcctgccaccatgattaatttttgtatttttactagagatagggtttcaccatgttggccaggctgctctcaaactcctgacctcaagtgatctacctgcgtcggcctcccaaagtgctgggattacaggcatgagccaccaygccccacctgtcctctcaatatttgtattaacctctatatttgttgtccctggaggggtggatgtctggatattagtttatttgttggaaccactggggtgtatttcagcactg

SEQ ID NO: 511643 - DNA, 633 bp, Homo sapiens
ccagtacatgtattggacagggagctggaccccttcttttgctcctttctaattgatctttccttgcttctgggatctctccaaactctcttttcccaagacattcactgctcatttaatgcactgtaaatgatagctgtattttgaggcgtatacctatatgacacatttctgagtagatatagtaaatttttgtcatgaattccatattttctttttatttatttatttatttatttatttwtttttttttgagacagagttgtgctcttgtcacccaggctggagtgcagtggtgcaacctcagcttactgcaacctccgcctccaaggttcaagtgattctcctgcctcagcctcctgagtagctgggaatataggtgcccgccaccacacccatctaatttttgtatttttagtagagacagggcttcaccatgttggccaggctggtctcgaactcctgacctcaggtgatccacccacctcagcctcccaaaatgctgggattacaggtatgagccactgtacctggtggaatttcatattttcttatgcataacaatgatctctattagaatcctggtttggggacatccaatgatatttaggtgcccttagtacttagtacttt

SEQ ID NO: 511644 - DNA, 564 bp, Homo sapiens
tattattatactctaggaagaaatattctagttgtggaagccaagcaaaggaatcgttaccaaccacatttaagttgttgtaggaaagatcgagcatagtgagatttgtccactttagtcccaagaaagttgtattgctggtggtggacagctggctgttactcagagacagattccgaatgcttgtgtttgctaattccaaacatagcttctctgtaaggctgggacccagctggacattgttcagaaagaggccaaataatcttccaattgcgtgaaaacaccctggagaaaactaaaggtaggaaaaaaaaagaggttaacaatcaaaagaacacagactctgtaatgctgttgaaagcctttttttttttttttttttttttttttgagacggagtctcgctctgtcgcccaggctggagtacagyagtgcaatctcagctcactgcaaactccacctcctcagttcaagcaattctcctgcctcagcctcccgagtagctgggattacaggcatgcgccaccacgtccagctaagttttgtatttttagtagagtcggg

SEQ ID NO: 511645 - DNA, 529 bp, Homo sapiens
tgcctgataacatgattgttaaaagacaaagcccagagaccaagccagctaacccgactgtgaacctggggctcttgaccatcgtactctttaattaataactctgtcagagagtttgtgtgagagagcactatttccactttataagtgaggacacagactcagagatgttaaggatgttcgcaaggtcacggcacaggggttccacccagtgctgcagggcggcagagtcccgtctcccgacctctcctggggctgcctgagctctcaggaggatgacaccaatgmccccaagcagtaggtgggaaggattgctggaagacaggcagaggctagagagcattacattcctgtgtatgtgacacagatagggactatccaccttaaaggcagaatgcaaaataattttaccttacttcttacctctttaatttgattcgatgacaactctaatttttttaaagatgaattggcaaagatatccagttcttcactttttagcgcttgaattttattgtttgataataga

SEQ ID NO: 511646 - DNA, 605 bp, Homo sapiens
gtcaaattgctttctagaaaattctcagaaatctgatattttatatgaaaacaactgtcttccctasgatgaattaattattttttagatttatgtttgatttaaaaaatggaatctctatattttgaggtttttgttgttgctgttgttttcttttttgagacagaatcttgctctgttgcccaggctggagtgcagttgcacaatctcggctcactgcaacttccgcctccagggttcaagaaattgtcctccctcagcctccctagtagctgggattacaggcgtccactaccacacccagctaatttttgtatttttagtagaaacagcatttctccatgttgaccaggctggtcttgaactcctggcctcaagtgatccacctggctcggactcccaaagtgctgaagtttaggtgtaagccactgcactggccttatattttgtatttttaatgatgtttctcctatatgtatttaagaattgtgtacataataatataaaacgtttatcacattagtagcaaagttttttcttcctttttcatttttattataatataatgaaatactaggtaaaagaacatgctctggagtcagacc

SEQ ID NO: 511647 - DNA, 605 bp, Homo sapiens
gtcaaattgctttctagaaaattctcagaaatctgatattttatatgaaaacaactgtcttccctaggatgaattaattattttttagatttatgtttgatttaaaaaatggaatctctatattttgaggtttttgttgttgctgttgttttcttttttgagacagaatcttgctctgttgcccaggctggagtgcagttgcacaatctcggctcactgcaacttccgcctccagggttcaagaaattgtcctccctcagcctccctagtagctgggattacaggcgtccactaccacacccagctaatttttgtatttttagtagaaacagcatttctccatgttgaccaggctggtcttgaactcctggcctcaagtgatccacctggctcggactcccaaagtgctgaagtttaggtgtaagccactgcactggccttatattttgtatttttaatgatgtttctcctatatgtatttaagaattgtgtacataataatataaaaygtttatcacattagtagcaaagttttttcttcctttttcatttttattataatataatgaaatactaggtaaaagaacatgctctggagtcagacc

SEQ ID NO: 511648 - DNA, 516 bp, Homo sapiens
aactataaagaaggttgaagcaaagaaaagccaaataatagtgccagcaaacaactaaaggagaaaataatgggtgaaaaagacaaatattcttcagagatgagatcaattgatattaaagcaatataatacttactataaaattattcagctgggtcctgtactctttttatattttgaaaaggataaatattttttttcagtagaaataaaagtagggaatagcattcaggccatgaatatatcttactctatcttaaagagtttgaatcatctgtttttccttcaatcatttaatacaagaatttctccaacagctacaaatggtaatgtaaattataacgatttaaaaaattatattcaaaagtgmtctgatgacatgcaaaacagcacaagcctatctttaacttctaattaagtgaaagtaaaatagtaactattttcaattaacagtaatagggaggaaatagtcgaaatagttggaaatattaacctattttttctcatcctaacctt

SEQ ID NO: 511649 - DNA, 516 bp, Homo sapiens
aactataaagaaggttgaagcaaagaaaagccaaataatagtgccagcaaacaactaaaggagaaaataatgggtgaaaaagacaaatattcttcagagatgagatcaattgatattaaagcaatataatacttactataaaattattcagctgggtcctgtactctttttatattttgaaaaggataaatattttttttcagtagaaataaaagtagggaatagcattcaggccatgaatatatcttactctatcttaaagagtttgaatcatctgtttttccttcaatcatttaatacaagaatttctccaacagctacaaatggtaatgtaaattataacgatttaaaaaattatattcaaaagtgctctgatgacatgcaaaacagcacragcctatctttaacttctaattaagtgaaagtaaaatagtaactattttcaattaacagtaatagggaggaaatagtcgaaatagttggaaatattaacctattttttctcatcctaacctt

SEQ ID NO: 511650 - DNA, 621 bp, Homo sapiens
cagtgtcaaaatcatgaagctaactgcagggtgctgatatggtttggctgcgtccccacccaaatctccacttgaattgtatctcccagaattcccacgtgttgtgggaggatccagggggaggtaattgaatcatgggggctggtctttcccaygctattctcgttatagtgaataagtctcacgaggtctgatgggtttatcaggggtttccgcttttgcttcctcctcattctctcttgccactgccatatgagaagtgcctttcactctctgccatgactgtgagaacttccccagccacgtggaactgtaagcccagttaaacctctttcttttgtaaattacccagtctctggtatgtctttatcagcagcatgaaaacggactaatacacgtgcagaaccaggatttgaacataaaccttttgtcatcattcattcattcattcattcatccatcattcatctgtaaataatgcattttcccatattttaaagggccgaatgtgtatcatgctgagaactgtgtgaattatatgaaatacccaaggagatggacttggtgaagtgtcacctcccatcactgtgagcctctcttgctgcttaggctgatgagcag

SEQ ID NO: 511651 - DNA, 621 bp, Homo sapiens
cagtgtcaaaatcatgaagctaactgcagggtgctgatatggtttggctgcgtccccacccaaatctccacttgaattgtatctcccagaattcccacgtgttgtgggaggatccagggggaggtaattgaatcatgggggctggtctttcccacgctattctcgttatagtgaataagtctcacgaggtctgatgggtttatcaggggtttccgcttttgcttcctcctcattctctcttgccactgccatatragaagtgcctttcactctctgccatgactgtgagaacttccccagccacgtggaactgtaagcccagttaaacctctttcttttgtaaattacccagtctctggtatgtctttatcagcagcatgaaaacggactaatacacgtgcagaaccaggatttgaacataaaccttttgtcatcattcattcattcattcattcatccatcattcatctgtaaataatgcattttcccatattttaaagggccgaatgtgtatcatgctgagaactgtgtgaattatatgaaatacccaaggagatggacttggtgaagtgtcacctcccatcactgtgagcctctcttgctgcttaggctgatgagcag

SEQ ID NO: 511652 - DNA, 492 bp, Homo sapiens
gactgtacctctcagcactcaattctttcaagtgggctcaccttccacctgcagcagaaccagggcctggatttggcttgtatccatctcagaaccagtgtccatctgtcctatctgtaactgctcatgccaaaacaccatttctcttgaaagacacgtcatcactcatgacccctttttgaagaagatttttaaaaatctctcagggatcccctgtcatagatgactctgagagctatttacatggtggaattggcagacgttggcaattaattcggttgagggagatgagaagagtcgagagaasgggagagagggagaggttaggaagcctaggatgatggtaggtttctggcttctgtgatttgatgggcagtgggacattttcttggtgggagataacagtggagggctattgctgcttttgagtcagttccaccaaggcccaacctgggcagtggcagaggctttcccttccagacctcccccagg

SEQ ID NO: 511653 - DNA, 390 bp, Homo sapiens
ttagtacacccaatctagtctcaggaygagatcatagtctgtacctatgcagtgtcctctgtgccctttcctgatcccattcccatctctctcccccttcaggtgacatttctgacatttctcaattttgtgttattaagttccatgttttacgtttttccatatgtatatatcacataaaatggttgtttagttattttagtcaaaggaagtaagttatttgtattcttctgaggcctgttaatttttttttctgaacatgttttcttttggtgctagacatgttgatgtagtaactctaaattcactcattgctattgctgaataatattccattataagaataaaccagaatttatgagattccacagctatattcagtttcttctg

SEQ ID NO: 511654 - DNA, 516 bp, Homo sapiens
tcttaacactctttggggcagacagtaatggcaaaatcaaccactcactgcagatgcttctctacagccctggcttcactctatcttgccacagagtctcctttcatttcccctcccatgatgtccctgggtatttaccctaaccttaacccaatcccaaactcagagcactccaccctgacaagcatgtacattcagacctgttctttctgatcatagyagctgcattttttaaaaaatttaattgaatttaattttaagttccggcattttagcgtcctctttcccttccacaccacctctttttactttaatatcacagacacctccagcccccacttccctcatcctcctccagcttatcacgattcagctcttcagccagcatccgataattaccctaattcatacagtgagctctctccactccagtcctgctgtagatcctctggaatccaagccacagcccagcgacctgcccgtatctgtcatatcaagccatcagcctgtgcctga

SEQ ID NO: 511655 - DNA, 516 bp, Homo sapiens
tcttaacactctttggggcagacagtaatggcaaaatcaaccactcactgcagatgcttctctacagccctggcttcactctatcttgccacagagtctcctttcatttcccctcccatgatgtccctgggtatttaccctaaccttaacccaatcccaaactcagagcactccaccctgacaagcatgtacattcagacctgttctttctgatcatagtagctgcattttttaaaaaatttaattgaatttaattttaagttccggcattttagcgtcctctttcccttccacaccacctctttttactttaatatcacagacacctccagcccccacttccctcatcctcctccagcttatcacgattcagctcttcagccagcatccgataattaccctaattcatacagtgagctctctccactccagtcctgctrtagatcctctggaatccaagccacagcccagcgacctgcccgtatctgtcatatcaagccatcagcctgtgcctga

SEQ ID NO: 511656 - DNA, 571 bp, Homo sapiens
cattgtcctcattttctcatcaccccactcagtctgaatcctgcaaaaactcagagctggtaaaaccatgtgactcctttcttggggttgtcagctttccattatccccagttcccctcctgatctctgatcctggggaggagaatatctagaaagagagamaaagggagagcaggaacaatgcaccccaagagtgccagcctaccatctactacacactgatgggggttccatgcatgacttcacacaatcctcaaaagccctctgcatgagtagtattggccccgagccacacagacagtggtgctgttcaggcaaagagtgcctatccaggagcctgggttttccatctcctgcacttactggcagaatggctgggaccatgttttggggtagagttaatatttagaagacaatatttaacgcatggagaataccacacagaacattcttttctccttgaaagatgcaccataccatgctgttgttcaggatgaatgggatagagttttggaacttgtaaacacagacacagcttcttggtgggaaattgccttttcctttaaaatag

SEQ ID NO: 511657 - DNA, 589 bp, Homo sapiens
ttgtgggatggtttgggtttctgcaaaatgaagttggtgagcatgaaacctgcttggagaatgaaaagtgcaggtcacacacttgaggagtagaagctttgaatgggtttcccatccataagtctttttgttcctcaaaagaacccttaaaggtacgcaaggctgaggctactgtccccattgccagatgttttaactgaggacagaggttgagctattctttggcagtcaggatgccaatgartagtattcagtatcagtggggtcctggggagggaggtggggatgggggttctcatcagcacttgccctcccaggccttgcggtgcatggtctctctgagtttcatttccctcctctgtataaatgagaggcttgcacatggctagtgaagctcagggtcttgaaccttgtaaagggcatggcactgtcagttatcattggcacagccagctcctacttctgacactcccatctagtgatctttccactggcattcatggtttcctaaaagtcagcccagggtctgccgcagaaatcatttaggactttcccatcgtgcctgtgccaagattcccacatcctgctg

SEQ ID NO: 511658 - DNA, 537 bp, Homo sapiens
tcaagatgaagtttggagatacatgaatttctctaagaaggacgggggaaaaagagacacatcatgctttacacggctcagtttagattaaatcacattaatattttctaaacaaagttgtaaagtcacaaaatgtcttaatattcactaagaagtcacagaaatacaatttaatacttttctctgtattaaatcaatctcctcctctccacctctccatccttttatctctccctccatccttccttcctcttttttctgaaaagcaatgagcttatctgccaaataaataggaaacaatatagcctggccttcttttcattttttaattttttgtctccttcctgcatcacccctcttccctaacaagtgaagtgaagagagaagattttatttgattaggtcaaaggtgaggatcccaggacaacattgtccttttgtctttgrtatggcagaaaacataaaaccagaggctacatacctaacttatccacacataccatcaacatcaataagtattctaccacctagcctcag

SEQ ID NO: 511659 - DNA, 630 bp, Homo sapiens
actgttaagagaatgaaaaagaaagccacagtctggaaatatatatttgcaatatatacactggatgaggataacatatccagaatatataaattggaatcatagaattccatgttaaggatagaagcaatgtcatagtgaatctagctctggtttagcccaatcttttgagccataaggaaaaatgctggtggataatatagctgaaaatagaacataagccacagtgttcaaaacaccgggctattttattatatttgcaacaaggtctaataaggattattcaaagacttaagtagcttaaaaaaacttactttgaactattttctgacttataaaaagttgcaaaaatagaaaaaggagtttccttatatttttcaccccacttcttctaacacaaacatttcatataaccatagaatagttattgggaacarcaaattaacattagtagaatattagtaactaaaacataggacttatgtgaaatattaaaaatctgacacttggatatgcaagggtgtactaataatttctttcactattttcaacataggccaaaacccactgatctcatcctttgaggattagaattctttaaagttttaaaagaaagacacttattcttta

SEQ ID NO: 511660 - DNA, 582 bp, Homo sapiens
cttgcagctctcacttaagttagagggtccctctatgattcagaatttgaaataattgttggaaaacatggcacttttctgattatcctagcccctaggagaaagtgtcctgacaactcccagtgcagggatcaatgacttttctttccaaagatgtttcccyccagataacagagagactaaaaataatggaagagaatccagatataaaaggagaaattagcaccaagtaaagttcttacactgaggcagtctcattcttagtgggctttaccccttgataagttattgatagtaggtgcaggaagccagagagagtctcttccagttggtcattggaaatatggaggcaattagtaaaagttcttgcccctcctttgcaaaataacctgttttaacaggttagttgatgagggaatgctttaacaggttagttggtgagggaatgcattaacagattagttggtgaggaaatgcattaacaggttcgttggtaagggaatgtttgaagtttcatttgggtaacctgcagatgtaggataatatatgtaattaaaagttagaagcctccgtctgaatgct

SEQ ID NO: 511661 - DNA, 582 bp, Homo sapiens
cttgcagctctcacttaagttagagggtccctctatgattcagaatttgaaataattgttggaaaacatggcacttttctgattatcctagcccctaggagaaagtgtcctgacaactcccagtgcagggatcaatgacttttctttccaaagatgtttccctccagataacagagagactaaaaataatggaagagaatccagatataaaaggagaaattagcaccaagtaaagttcttacactgaggcagtctcattcttagtgggctttaccccttgataagttattgatagtaggtgcaggaagccagagagagtctcttccagttggtcattggaaatatggaggcaattagtaaaagttcttgcccctcctttgcaaaataacctgttttaacaggttagttgatgagggaatgctttaacaggttagttggtgagggaatgcattaacagattagttggtgaggaaatgcattaacaggttygttggtaagggaatgtttgaagtttcatttgggtaacctgcagatgtaggataatatatgtaattaaaagttagaagcctccgtctgaatgct

SEQ ID NO: 511662 - DNA, 367 bp, Homo sapiens
ctgaccactgagtcagcaggaagtcaggactggcttcccctctatgggggctggggaacacgtcttcctcaggctctcctccctgtcagctcttcccaggcctttgcctgttcacgtcacaagagtgtgtrcacagagtagcctctggtgcccagcctacgtgttctgctcctccagagtatgttcccagcagcctgggagcaccatttcaaatccctcagtgcacccagaacccaactttggaagtccagaggataaagccactagctgatccaggtgccccttggctgtggtgtgcagcttgggaatgctgagccaaaacctgaggcttgtactctagtaggaaagtccaccctctcagaggact

SEQ ID NO: 511663 - DNA, 367 bp, Homo sapiens
ctgaccactgagtcagcaggaagtcaggactggcttcccctctatgggggctggggaacacgtcttcctcaggctctcctccctgtcagctcttcccaggcctttgcctgttcacgtcacaagagtgtgtgcacagagtagcctctggtgccyagcctacgtgttctgctcctccagagtatgttcccagcagcctgggagcaccatttcaaatccctcagtgcacccagaacccaactttggaagtccagaggataaagccactagctgatccaggtgccccttggctgtggtgtgcagcttgggaatgctgagccaaaacctgaggcttgtactctagtaggaaagtccaccctctcagaggact

SEQ ID NO: 511664 - DNA, 579 bp, Homo sapiens
cagcagactttcttctactacataaatagtaggttcatgcaggaaacttatgatgtttgtttgcctttgttcctttttaatagcttttttgggggtcagtgagtagatggatcataactgcctacctggccaaataacaatttatattgccatgccagtcttaaaggccttcaggggaatctgtttctatttattgtaaagctatttaaataaaggtccttatcatcccccttgacaatcctgtcaaacaatagtaaaatatgttgtatttaatcattaggaaatagtagatacatacctagggaaccataaataaaatttattgttagcaagaattagtaaagggccatattctgggctttattatttatttttacaaaatactcaaccaatcactgtttagaaaatatctgaaggtgagtcccattattttsgctttttaaaatgaaggttaagtttacatctcttcttataccctaatgcttctaaaatcggatacaaatttattggaaatttaatatgctcagacattatgctagccaccaaaaatagggatgaataaggcagactattttaatt

SEQ ID NO: 511665 - DNA, 344 bp, Homo sapiens
agtagtgtgtccttacagttggaaccaggagttcatgggaattcttcatcatccagtggtctgtaaatgttgcccatgctgagtagtctgtccttacagtgtgaaccaggggttcatgggaattcttcaccatccagtagtctgtaaatgttgcccatgctgagtagtgtgtccttacrgtgtgaaccaggggttcatgggaattcttcaccatccagtggtctgtaaatgttgcccatgctttagttttgttacctggttgctctgtttttatgggattgtgagaaactgaaaaactgtgactgctggagccattttcccacaatccccattttttaaaaatc

SEQ ID NO: 511666 - DNA, 582 bp, Homo sapiens
aagttagtattgaaattccatgttcagtcagtctagtgaataaaaccaacccagtgcatcagtcagtcagccagccaggtcatgagcttgatgacgggttcccagcagtcagtagtgtttacagggaggtgctgtttgagatcttggggtacctcacagggccctttgagacactgatgtgatatcatttctcctcagatggagcgtctgtgtggcaccaggtgtccctctggttccaggaggctcatctctctgcctccagtccatgggcggcaggtaaatscttgccttagagaaagccacagacggtgctgcctggaatttgaggtggcttcttccccgtttctgtgtactcctgtgggtttgtgtacatgggttttatgagcgttctggggagtgtggtggtggtggtgtgacgtcagcatttccggaggtgttcctgcccgtgcagtgggcgtgggtgccatagatccaggaaggagcgactggaagggctttagtctaaagccctgtgtgcatgtgccctggcagttctggtcgtctgtttggaatcaggttcctgcctcgcagttgcattagcca

SEQ ID NO: 511667 - DNA, 525 bp, Homo sapiens
catgttttaaagctgagtctacactagcaaaaacagtaatctttaagttctacctaactgacctggtgtctgtatttttctgtcttatatctgaaatcaggttactcagaaaaggaacctatgggccaggcatggtggctcatgtctgtaatcctagcactttgggaggagcccaaggtgggtggatcatctgaggtcaggagttcgagaccagcctggccaacatggtgaaaccccgtctctactaaaaatacaaaaaaatgagctgggtgcrgtggtgtgcacctgtagtcccagctacttggaaggctgaggtaggagaattgcttgaacccggaggcgcaggttgcagtgagcggagattgcaccactgcactccagcctggatgacagagagagactctgtctcaaaataaataaaaaaataaaaataaaaaagaggaacctatgtagaaaagctttattagctgatgtgctaataaagcaaacaaataacaaacaacaaatcctggaacttttaccact

SEQ ID NO: 511668 - DNA, 618 bp, Homo sapiens
atcacggatacttaatcttttcttccaagtctatctttcacaacaaattctatatttccaacagaacatattgttttctactgaattaagataattcaagatgcaaaaccaagaaagaaaggcacttaatcaaaagggaaacctcggtgtctcacgcctgtaatcccagcactttgggaggctgagatgggtggatcatgaggtcaggagatcgagaccatcctggctaacacggtgaaaccccatctctactaaaaatacaaaaagttagccggccrtggtggcaagcgcctgtagtcccagctactcaagaggctgaggcaggagaacggtgtgaaccccggaggtggagcttgcagtgagccgagatcacgccactgcactccagcctggacaacagagcaagactccgtctcaaaaaaaaaaaaaaaaaaaaaggagaacctcttaatcataagggaaacaaatataactgcctggcagaatttatgtcctactcaaagacctaattaatgattttagagtgaagtcagccaacatgattctatttgcatgttgttttttcttttaccatttttgtgtagtgttaatcatatagataaaattacacacattata

SEQ ID NO: 511669 - DNA, 565 bp, Homo sapiens
ggtgggcagcgccttcgggggmagccggagcagaagtggagctcggctctgggtcgggggctgcatagaaattactgcaagagcaagaggacaggtgagggtgggcggggcgagggcccaccccaggccccctgccagggactggcttccttgggccaacacaggccctgagacacttaccccacggccacctcagagccagagagcccagggtggagctctgggccacctgtgccctcccgccccgggcctcagtccctgcctatcccagtagctggggaccacgctcagtagaaccttggagcccacgggaccggcgggtgcacctgggctgcacttactgtgtcgctctcgccgtcggaggccgggggggcctgggcgctatagtggagcggggagtacacccagctcctctcatcggtgggctggcaggtgggcgcgcgtgcaggagggcgcggaagagcagggtgcgaggaggtgcaagagaggcagagggaggaaggaagagacaggagaacataaaagaggcgaatcccccatggaagacgaggggtggctcagccca

SEQ ID NO: 511670 - DNA, 354 bp, Homo sapiens
tgccaagcagaaggtggggggtgccggggcaggggcaggaccgaggacccttctcccttctctgctgcccacctggcagggcatcaggacacagacacacagcacgacatggcccccaggccccccgtaccatccggagaccaggacgcgcacaaaccagtcccaggaaaaggggtgacgacgtgcggtgggtaggggcacaggcacgcggcccgtccctcccttctccagggccaggtgggtgcatggggaccccagaggcgccactggagacagagcaggggagttagttatgaagcagcsaggaggtgcccccacaacaggccctaaggcctggtgcccgtgcccagccct

SEQ ID NO: 511671 - DNA, 532 bp, Homo sapiens
gggtcctacgggcgacatcactgttctccttatgatgccatcaaggtgttaggatgggagggccygcacctggactgcttacagcaggagaatgctcccaggcacccgtctccagagtcctgcctcagtttccctcctccccccttacagagtttggcgtcaagctgggcagtcagatcttcatcaagcacattacagattcgggcctggctgcccggcaccgtgggctgcaggaaggagatctcattctacaggtgaggccgggcttcttgtcctgagagcagggagacaaggcagggttggggcgggcagtcccacggagtcatacagcaaggacagcagaactgggccccaaagcatttaccttcagtgttgttgcttgtatctcaaaggttgcagatggccaggcataaaaccccctttttccccagctactactaatccacagccaaatgtcggtttctagtatccccatggggttgtctgtttctaataccctctagctttgatgtgcatcagagactcatgtggg

SEQ ID NO: 511672 - DNA, 532 bp, Homo sapiens
gggtcctacgggcgacatcactgttctccttatgatgccatcaaggtgttaggatgggagggcccgcacctggactgcttacagcaggagaatgctcccaggcacccgtctccagagtcctgcctcagtttccctcctccccccttacagagtttggcgtcaagctgggcagtcagatcttcatcaagcacattacagattcrggcctggctgcccggcaccgtgggctgcaggaaggagatctcattctacaggtgaggccgggcttcttgtcctgagagcagggagacaaggcagggttggggcgggcagtcccacggagtcatacagcaaggacagcagaactgggccccaaagcatttaccttcagtgttgttgcttgtatctcaaaggttgcagatggccaggcataaaaccccctttttccccagctactactaatccacagccaaatgtcggtttctagtatccccatggggttgtctgtttctaataccctctagctttgatgtgcatcagagactcatgtggg

SEQ ID NO: 511673 - DNA, 532 bp, Homo sapiens
gggtcctacgggcgacatcactgttctccttatgatgccatcaaggtgttaggatgggagggcccgcacctggactgcttacagcaggagaatgctcccaggcacccgtctccagagtcctgcctcagtttccctcctccccccttacagagtttggcgtcaagctgggcagtcagatcttcatcaagcacattacagattcgggcctggctgcccggcaccgtgggctgcaggaaggagatctcattctacaggtgaggccgggcttcttgtcctgagagcagggagacaaggcagggttggggcgggcagtcccacggagtcatacagcaaggacagcagaactgggccccaaagcatttaccttcagtgttgttgcttgtatctcaaaggttgcagatggccaggcataaaaccccctttttccccagctactrctaatccacagccaaatgtcggtttctagtatccccatggggttgtctgtttctaataccctctagctttgatgtgcatcagagactcatgtggg

SEQ ID NO: 511674 - DNA, 546 bp, Homo sapiens
ctgctggcctgggcccaggctctcatgggggcagcgcttggccatgcctgggggcattcgtggtggtcccaccttggggctgctcctggcgtggagtgagtggaggccagggatgctgcccaatgtgcttcagtgcccaggatgagcctccccaaatgtcctcactgcagtaggcagaggtgcraggcagatcctgcactcccctggggcactggtcacctcccagcccccacctctaacaggatcccggaagtctgtggcacagggcttgggaactggccagggaagtgcatctgatcagcgtccgctctccacaccgcagaccctggcccaccctgaccagcctactccagaatcccaaatcgcattgcagcacacacaacactgccatccccagcccagccttcagcagacatcacaagttgatggcagatggccagagccatcttagaatcctctgggcagcctcttgcctgggttcctggccagctccaccgccgatcaggacaggctgctggggcagggctgagtccgggctggactcgg

SEQ ID NO: 511675 - DNA, 408 bp, Homo sapiens
ctcacgcatgttaccctctgtgcagccattggctccattactgcgctcwtgtctgtctttccccaccaaaatatgcgccccacgagagcaggaagcttggcctgccttgctcactgctgaatctccaaggcctggtgaccccacactcgcgcatacagtaagtgcacaataaatgcccgttcgctccctgggcgacccctccccccagcctaggcttccgctaacctcaatccattccaaagggtgtcaggttccaccctgagcaaacacagctcccctggcccctggccagccctaaagaggaagaacaagtacccatactccctgccctggactttccccaggactcagggccacgaggaagcaccaagccagggggcaggactttctcgagatgctgagcctgag

SEQ ID NO: 511676 - DNA, 549 bp, Homo sapiens
gtcccagtggcagacctggccccccggggcctgcggagagctctttgcttctctgggaaagccgactgcaccgcgcctcaggagctcacccgaagcccccgcagcctccaggaagcgtggagatcattgttccgatggagacggttcctgctgtggacgctcagtgagtgttttctccctgtgatgtttcctggctcaggtgaggtggtccaggcagcttcctgttggccgtctcatccactcccagggtttcgtctaaccctgagcgtggagtaccccctttaaacccacccgcacatcgccaaaaagtcccattccacacctgtgagggaaggccgtctgcacgctgagttcgatcttggttcctgcatcgtctctcgcrtgggcccggtgctcacccatgtgtcaacagaggactggccacgggccatgctgcaggtaccagctcacgcagggaagacccagaggtgaataaggtgcgttatgttaaaaatccaagagtctacatatgtgtgtgggggtgggtggctgaaaggcaaacaaatgcca

SEQ ID NO: 511677 - DNA, 630 bp, Homo sapiens
acacacacatatgtgggtatatgtgcatgtgtgtgtrtatatatatgtatatacctacacgtgtgtttatatatgtacccatatgtacctatatatacatacatatgtgtatcagtcattttaatcagggagaaaaaagatcattaacagaaaacatctaaagaaaggaaatagctgaatccaatcttttccacaaataatatagcagatatgagatggcagtggaagggtaaatggtgtgtaattagaggacctgagtttgaggccagcctctgcttcttctgacctgtgaggtgttgaacaaatcactgtcccattttgagtctcaaatgttgtaccagctaagtgaaaagtgtaatacctgccttgctcgtttctgttattgtcatgagaaataaattagataaggtgcgtcaatgccctttacatattaaaaaggtgagaaaaaatgtaaatattaaaagtgacaacttttctttatgaacaaaattaacttgcaaactaaagttttatgtatatgtgtttaaacttcaaagctttagaaattaaaagtataatatcctttcttgaaatgaaagagctttgccaatttgattttgttttgggtgctttgccattaaaaaaaatgtg

SEQ ID NO: 511678 - DNA, 641 bp, Homo sapiens
acccttttgaattctcaaaattctacaaataatttattttaaggctaggtgaggcagggaaaggcatcaggaaggtgcactgggtgagagagattgtattagtckgttctcacgctgctaataaacacatacccgagactgggcaatttacaaaaggaagaggtttaatggacttacagttccacatggctgcggaggtcccacaatcatggcagaaggcaaggaggagcaagttacgtcttacatgggtggcagcaggcaaagagggagcttgtgtagggaaactcctgtttttaaaaccatcagctcttctgaggctcatttactatcatgagaacagcatgggaaagaccttcccccataattcaatcacctcccaccgggttcctcccacagtgtgtgggaactgtgggagttacaattcaagatgagatttgggtggggacacagccaaactgtatcagagattcactcgcccccacttcccattcagcatccccacccctggctcagtttccctgtcagtcaagtgaggcagtcaggtgggtcaaagctaggtgtctccctcctccatagagtggaaggatcctgggcttcagaacaagatgcacctgggattgaagtgctgatccacgtctcag

SEQ ID NO: 511679 - DNA, 641 bp, Homo sapiens
acccttttgaattctcaaaattctacaaataatttattttaaggctaggtgaggcagggaaaggcatcaggaaggtgcactgggtgagagagattgtattagtctgttctcacgctgctaataaacacatacccgagactgggcaatttacaaaaggaagaggtttaatggacttacagttccacatggctgcggaggtcccacaatcatggcagaaggcaaggaggagcaagttacgtcttacatgggtggcagcaggcaaagagggagcttgtgtagggaaactcctgtttttaaaaccatcagctcttctgaggctcatttactatcatgagaacagcatgggaaagaccttcccccataattcaatcacctcccaccgggttcctcccacagtgtgtgggaactgtgggagttacaattcaagatgagatttgggtggggacacagccaaactgtatcagagattcactcgcccccacttcccattcagcatccccacccctggctcagtttccctgtcagtcaagtgaggcagtcaggtgggtcaaagctaggtgtctccctcctccatagagtggaaggatcctgrgcttcagaacaagatgcacctgggattgaagtgctgatccacgtctcag

SEQ ID NO: 511680 - DNA, 612 bp, Homo sapiens
ctgacatggctgtcattctctcaacatgctcccgcacatgctcctgcacagtcttaagagaaaacaacaatctttgtacatttatgtaattaatgtgtacgtgaagcttttttcattttgcattgaacttgggcaattgttatttttccaaagtagagttagatgatgggtggaactgtttatataaagatgactgtgaaggtttttaaaatctacatctttatctaatttactcttgttaaggcaaggagggaacatcttgcccagagctcactcaccaggctcataccttctgtattagttcattttcatgctgctgataaagacatacccaagactgtgtaatttataaaggaaaagagagttaatggactcacagttccatggggctggggaggcctcacaatcacggccaaaggtgaatggactcacagttttatgtgtctggggaggtctcacaatcatggtagaaggtgaaagacatgccttacatggcagcaggcaaggagagaatgagaaccaagtgaaaggggtttcccttgtaaaaccatgaaatctygtgagacttattcactaccacaagaatagtatgggggaaactgcccccatgat

SEQ ID NO: 511681 - DNA, 530 bp, Homo sapiens
ctgcagattctatgacactggtgactggcagggagcaggagattgagggagaagaacatctggaagcaagcccagatttccaatttgagcatcagggagccartcagtgaggggaccagatgaagagtgcaggctggaaatactgaggtaaatttgaggtacctgtaaaacagtcagaaggagagatcaaaggcagatgggcacttgagtctacagctcagaaaagaaactggagctggagatattcctggaaaagtatagaagaatagaaaacagagctttcagtggtatcagtgtttaggcaagagtcagaggagggagagaagccccatatgtcccatctctgaccttagtgtcagcttcactttcagttactacactttgtaatataagtgagcatgctacagtacttctgtattttcagttttcttcccctgatccaatagtttcctgtgacttttatggtaaagagtattgtatggtgtatttttaccttaaaaaacaaacaaacgaaaaacctggttagcttg

SEQ ID NO: 511682 - DNA, 530 bp, Homo sapiens
ctgcagattctatgacactggtgactggcagggagcaggagattgagggagaagaacatctggaagcaagcccagatttccaatttgagcatcagggagccaatcagtgaggggaccagatgaagagtgcaggctggaaatactgaggtaaatttgaggtacctgtaaaacagtcagaaggagagatcaaaggcagatgggcacttgagtctayagctcagaaaagaaactggagctggagatattcctggaaaagtatagaagaatagaaaacagagctttcagtggtatcagtgtttaggcaagagtcagaggagggagagaagccccatatgtcccatctctgaccttagtgtcagcttcactttcagttactacactttgtaatataagtgagcatgctacagtacttctgtattttcagttttcttcccctgatccaatagtttcctgtgacttttatggtaaagagtattgtatggtgtatttttaccttaaaaaacaaacaaacgaaaaacctggttagcttg

SEQ ID NO: 511683 - DNA, 580 bp, Homo sapiens
catgatgcagaaaataagaagatctggtttagccaagaaaatccagggatggtgagacacaataccctcaagggttcagtcagtgctgactggttaatagattctcgtgttattatgctgcttcatattttgaacttgcgtgcattaatacgtctttgctattgggtcataattttctttttttttgagagggagtmtcactctatgggccagtctggagtgcagtgggacaatcttggctcactgcagcctccaccccttgggttcaagtgattctcctgcctcagcctcctgggtagctgggattacaggcatgcgccaccatgcccggctaatttttgtatttttagtagagacggggtttcaccatgttggccaggctggtcttaaacccctgacctcaggtgatccacccacctctgcctcccaaaatgctaggattataagcatgagccactgggtcataagcttcttcatgagcaaaagtggtcttacctatcatgatccctgacacttaccattggcacaaagttgttgctcaataaatatttgttaaatgagtaaataaataaaaatggca

SEQ ID NO: 511684 - DNA, 618 bp, Homo sapiens
atcccacaggagggcccgggcaagcatggacgcctcagtctcagagctttcagataaaagtgtctgggtgagaacacccagtgatgactacaaactgaataactgygttttctccaggaagcagcaccgtaggcttctctgcctttggctttagttgcctaaaagccctgtcaccctggttttctttagggaacaggggtgcgtttgaaatgaagatctactcaaacggagtctggtcaacctcctccctcccctaccccaggcgattctcccccaaccacccccaccagagagatgcttggaaagagtaaatccaatctccttccctactcccccaccacacacaccccacccccaccccatgtgcttagaatgaaatagagaagaccaggcctcagtgttccttagccaaaggcccatctgttgaggcaggagaataggggcctggaggcagggaacagaaggcctacccacaatgacttcctagaactaaagcaaatggaagcacttccgcaatgatgggaatgcaaatggctttgtaacttctcttcatcctctccatttacgtagaccacacacaccaaataacatcctctccatttacataggttgtgcatt

SEQ ID NO: 511685 - DNA, 562 bp, Homo sapiens
atcccacaggagggcccgggcaagcatggacgcctcagtctcagagctttcagataaaagtgtctgggtgagaacacccagtgatgactacaaactgaataactgcgttttctccaggaagcagcaccgtaggcttctctgcctttggctttagttgcctaaaagccctgtcaccctggttttctttagggaacaggggtgcgtttgaaatgaagatctactcaaacggagtctggtcaacctcctccctcccctaccccaggcgattctcccccaaccacccccaccagagagatgcttggaaaragtaaatccaatctccttccctactcccccaccacacacaccccacccccaccccatgtgcttagaatgaaatagagaagaccaggcctcagtgttccttagccaaaggcccatctgttgaggcaggagaataggggcctggaggcagggaacagaaggcctacccacaatgacttcctagaactaaagcaaatggaagcacttccgcaatgatgggaatgcaaatggctttgtaacttctcttcatcctctccat

SEQ ID NO: 511686 - DNA, 548 bp, Homo sapiens
ctgttgaaacccaaatccgctggaatccttgtttaaagcaatgagcaggatgagtgatggcatggtaaggttttggtcacaagccagtgtgcacacagatggactgtgccaggagcgatgccagacccaatgcctgctcttcttycaagacatcccaaggaattcttttctgcacacattattatctgtgtcatttccctcttccctccttcgtgtcctctccttccttcctccttccctccctctctttcctcctcctttccttattctccatccatccattcaatagttattcatttagcacctgctatttccatgacagcatattcctttttctccctgtacttctatttgttataacaattatcacattagattgaaaatgtctccttatcgttacttccataaaatcataagttctggatagcagagattggatctttccatgtctgtattttcagctactaatacatagcctggcacagagaaagccaataaataagagctgagttgatatataagtcaatcagggtatgaagacatggatg

SEQ ID NO: 511687 - DNA, 548 bp, Homo sapiens
ctgttgaaacccaaatccgctggaatccttgtttaaagcaatgagcaggatgagtgatggcatggtaaggttttggtcacaagccagtgtgcacacagatggactgtgccaggagcgatgccagacccaatgcctgctcttcttccaagacatcccaaggaattcttttctgcacacattattatctgtgtcatttccctcttccctccttcgtgtcctctccttccttcctccttccctccctctctttcctcctcctttccttattctccatccatccattcaatagttattcatttagcacctgctatttccrtgacagcatattcctttttctccctgtacttctatttgttataacaattatcacattagattgaaaatgtctccttatcgttacttccataaaatcataagttctggatagcagagattggatctttccatgtctgtattttcagctactaatacatagcctggcacagagaaagccaataaataagagctgagttgatatataagtcaatcagggtatgaagacatggatg

SEQ ID NO: 511688 - DNA, 613 bp, Homo sapiens
atcctctcttcaagcaatcatagtgcttgaaaatttacatggtaaattcacagcatgagagaaaagttcaatgcaacattacaagtcagatgcaataggaagtggacaataaactaaagaagactttctgaaatttcaccctttgaaaagtaattataatggcaaatgtactttttttaatacaataaaatatcaaactttatgtgagatattttgaaattcatgctttatattttgagtgacacaatcaagtcaagctaggaaaataatctcataatccttgggcatgttttaccttcacttataagccatgcaatggagggctcatctattaagttctaattatagtgactatttatccatactcttatctctccgagggtatggcacctttgtctaacttgccttgatttacctttgctctgaaggagggcacatagcctcctcatgggtttaattatcttcattcgtccaattctgagtgttccctttcactacctctttttaacatttctctgctayatgcagaacattattgctcttctgtgcctttggggaggtcaacagcatactgtctctgcttcatcggcaagcacttccacattcagcagtt

SEQ ID NO: 511689 - DNA, 408 bp, Homo sapiens
taggtttacctggctatgctttccaaatctaattcgacaaatatttactgagtacctaggtggtccttgaatcaccctgagcacccaattccaggatatgacttctycaaaggacagaattggaatgtttacataatatgagggaaaaaaaataaaagaaaacacttagcttctttagcaagctatctgataaaatagctgaaattcaagaagccctttagttaggagggagagattgcgaacacaacaggaagaagccccaggctgagtggcaaaggttgagattttctatcgtaagcacacctcacccaaacgcttgctccctgaaagctgctgacggagctttggcgagggctcatcctcccgttggctgataagcgaagccctgttttatatttaactcgctgc

SEQ ID NO: 511690 - DNA, 408 bp, Homo sapiens
taggtttacctggctatgctttccaaatctaattcgacaaatatttactgagtacctaggtggtccttgaatcaccctgagcacccaattccaggatatgacttcttcaaaggacagaattggaatgtttacataatatgagggaraaaaaataaaagaaaacacttagcttctttagcaagctatctgataaaatagctgaaattcaagaagccctttagttaggagggagagattgcgaacacaacaggaagaagccccaggctgagtggcaaaggttgagattttctatcgtaagcacacctcacccaaacgcttgctccctgaaagctgctgacggagctttggcgagggctcatcctcccgttggctgataagcgaagccctgttttatatttaactcgctgc

SEQ ID NO: 511691 - DNA, 627 bp, Homo sapiens
caaaattgttatttattaattacaatttaatttagaatcaaaactatacaaactgaattttaacttaatttttgaaaatgaatcttctttatttctatgtcctgtataatttattataggctattcactcattcattcatttaacaaacattttcaggatgacgtaacatgtgtaattaaactaggccctgcagtatgggtaaagatatagaagacagagtccctgattaaagatgcttacaatgggcagggcacagtggttcatggctgtaatcccagcaytttgggaggccgaggcgggcggatctcttgagctcacaagttcaagaccagcctgggcaacgtggcgacaccccgtctctactaaaaatataaaaattagccgggtgtggtggtgcctgtaattccagctactcgggagactgagacatgagaatcgcttgaacccgggaggcagaggttgcaatgagccaagatcacgccactgcactccagccttggcgacagagcgagactctgtctcaataacaataataataataataatgcttacagtgagggaatatatgataacatttgagtttgaaacttatggaaaagttacaagatgttctcatgatgcagaag

SEQ ID NO: 511692 - DNA, 683 bp, Homo sapiens
gtgtaacaacagaacatctgtgatgcttggatttggtgattttgaaagcatcctcccttgtgctgatgccttcactcatcctcaccacacttttcccgctctctgaccccacctttaatgtatgctccatctgcatctccttctcctctctctgggctttggcagaggtgactgactctcccctatcatctgctaagcctcagcacttctgtacatgataaagttcaggcaattacccctgactcgtcatcattatttaataattgacatttttctagtttatgtgcttgctttactgagatgattttttaagcgtgtgacaacccatactgaaataacatggagtgaggagggatgcatacatgtattttctttcttctttatcttttaaaagagtcatatatgactttttaaatktaagaaccctattaacgtttaaatataaagttcgtatgtctactttatcactttatatgtaaacattatatataaacataaatatgaagtttataagtcttcaagaacctaactttcatgcatatatttactttttgaagacagtaacttccctaggcaaattaaattacctggtatactactgttggataccattagtcgtctttcaaagcactgaatctatggagctagtatcagtggaaaaactttgggctttatacagcctt

SEQ ID NO: 511693 - DNA, 529 bp, Homo sapiens
ctgttctcctcacatgcatgaccccttctcaaacatattttctgaaygaatcactctcagcaggaaagtggtctctctactaggaataacaaacaagacagtctctacaactacttgggcaaagagaagctttgccatggagaggtctgctcttacctgtgtttcgcagaatgctctgcagagaaacactcactttgttcatgatttgtctaattcctggaaaacatcagcactgcaatttagttttagagtctgttgaaaagatgtgctggcattaaaaaaaattaagaaactatgctgtgaactgcagactttctgagaaatctggaatagtttggcccacacatttcctctcaattgagaacacaaggtttggaatcaggccaggtgacctaggttatagctctggctctaactacatgaccttgtccaagttacttaatgttcataaacctccatttatctatcaataaacaggactaataatacatacatacctcatggggatgctgtgaagatgagatgaaat

SEQ ID NO: 511694 - DNA, 529 bp, Homo sapiens
ctgttctcctcacatgcatgaccccttctcaaacatattttctgaacgaatcactctcagcaggaaagtggtctctctactaggaataacaaacaagacagtctctacaactacttgggcaaagagaagctttgccatggagaggtctgctcttacctgtgtttygcagaatgctctgcagagaaacactcactttgttcatgatttgtctaattcctggaaaacatcagcactgcaatttagttttagagtctgttgaaaagatgtgctggcattaaaaaaaattaagaaactatgctgtgaactgcagactttctgagaaatctggaatagtttggcccacacatttcctctcaattgagaacacaaggtttggaatcaggccaggtgacctaggttatagctctggctctaactacatgaccttgtccaagttacttaatgttcataaacctccatttatctatcaataaacaggactaataatacatacatacctcatggggatgctgtgaagatgagatgaaat

SEQ ID NO: 511695 - DNA, 645 bp, Homo sapiens
gcaaccatgcactcaatctaagggaaaaaaaaatgcaaacaggaatgataacaagctgagggctagaatataatgcaacgcacacccaaacaaaacccacgttattctgacaagttcagcagtgcacgcctgtgcacatcaaacagcccagtctgttcaattgcacatgcctcgttctcctgtaggtggccctgtttagggcaggcagcatctgggcagctaattgcrgtttctaatccttctttgatcaagagctcaacatactgtttcaggcactgaaagaaaaacagagaagtgtctataaacatctttacctccttaatgctgaagaaaccatgatgcattaaaaaaaggaccaggcacatcattccattacagtttaatattttcactgtgtagtccacagcaaccaacacatttgaggttttgaggttttattcattcaacaactatttatggggtacccattctgtgccagggactgtatgctcaatcacaaagctaaggctatgggttagatcccggcacaaaacctcagcaaacacaagagccaagaattctaaaagcaagatgaaaggcagcaagggaggctgggaggtaatatttctcaaatgcctataagatgcaggcactgcattaaatatt

SEQ ID NO: 511696 - DNA, 551 bp, Homo sapiens
aacaactctgccagcagtaacaccatattaacattctcagtgtaaytgtcaaatgccacaagtataagacagacctaaatagctctaatatgtcccattttaagttaaaacatcttctacattttagatttcagcccataaggaatttcccaggtcactctacacacaggttgcatctctgattgacaaaacgaacacgggattggccctcatggtgggtaacggcagcctgatttcaaaatacgtgtccacaatcctttctctctggccagtgctccagcacacaacttgttggttagacttacatgtcccctattttgcacacaaatggtcagctttacatttgaccttctaaagttagacttcacactaatccaaatggaacaatttaagatatctggtagctctcatcatccccaagctcccaaggcctagcacagcacctggaacatgtgcacaggctcttgtgacctccagagaatcacgaagaatccaccaggcaccctgcaagcaaggaaagccccggagaacctgcttcaggggagtgccat

SEQ ID NO: 511697 - DNA, 575 bp, Homo sapiens
agccttgttagctatggtcctgcgaaacatgtgtacgaaacagtaaatctctaaggtaagatggtttatgtgccagagaggccyggaagagagggaaccaaaaaaggaaaaggattgtcaaggggaatcttccaatcccacagccccactccaagaaacagcaattagctcaaggaacaaaccccccggggctatttccgttccacccaatccacctgaaaaattattctaaaaaggaaaaaataagtgataaacacacgaagccatgtgcagttaaagagggtaagtgggggttagcataagaagttatataatctcccttttgtagctaggaggaaagttatctcccaaagtttgacagttgaacaaagaagtacagcagcatctcagactgtcactcaatcttgctgcagacctgcctggcaaatgactgagtgtgtgcccacaattcaaacctggaatgaggaggagggaaagaagaggaggcagaccagttaagcctagaatccactctgctgtttgctgttgctctggcttcaagggaaatgggtgggtttaggtggcttcagcttgat

SEQ ID NO: 511698 - DNA, 575 bp, Homo sapiens
agccttgttagctatggtcctgcgaaacatgtgtacgaaacagtaaatctctaaggtaagatggtttatgtgccagagaggcctggaagagagggaaccaaaaaaggaaaaggattgtcaaggggaatcttccaatcccacagccccactccaagaaacagcaattagctcaaggaacwaaccccccggggctatttccgttccacccaatccacctgaaaaattattctaaaaaggaaaaaataagtgataaacacacgaagccatgtgcagttaaagagggtaagtgggggttagcataagaagttatataatctcccttttgtagctaggaggaaagttatctcccaaagtttgacagttgaacaaagaagtacagcagcatctcagactgtcactcaatcttgctgcagacctgcctggcaaatgactgagtgtgtgcccacaattcaaacctggaatgaggaggagggaaagaagaggaggcagaccagttaagcctagaatccactctgctgtttgctgttgctctggcttcaagggaaatgggtgggtttaggtggcttcagcttgat

SEQ ID NO: 511699 - DNA, 552 bp, Homo sapiens
gagggaggttcacagttgcctgagaaattgatggtagcatgggagaagttaggttgtaagggaagcacagagggyacatcttaccatgggtgtgggatgacaggaagcaagttcagtctggcatagagagaccttcgaaggagaccaacagtgagcatgtcagaaagggtatagtaagatcagaacggccaccatgaggctttcctccacctggctagtgcattttataggcttcccaatttgtaagagaaccaagaccacagagaaataaagtcattaattctaatgctaaaatcagttttatgggtgagaaattcccagcaaaccactgggctagggctggggaaggaaataaagcctttacctagtcttctgactagttactgggcagagcagaggctccataaggaccctcactagacgtcagtaggttacagagtgtgcatgctcgcccagcatctgggtaggaaggtctaaacaatgagaggaagcaagtgacaaggtaagtcacttgctctgaggaaagtcctagagacctgcacaggacagtgc

SEQ ID NO: 511700 - DNA, 552 bp, Homo sapiens
gagggaggttcacagttgcctgagaaattgatggtagcatgggagaagttaggttgtaagggaagcacagagggcacatcttaccatgggtgtgggatgacaggaagcaagttcagtctggcatagagagaccttcgaaggagaccaacagtgagcatgtcagaaagggtatagtaagatcagaacggccaccatgaggctttcctccacctggctagtgcattttataggcttcccaatttgtaagagaaccaagaccacagagaaataaagtcattaaytctaatgctaaaatcagttttatgggtgagaaattcccagcaaaccactgggctagggctggggaaggaaataaagcctttacctagtcttctgactagttactgggcagagcagaggctccataaggaccctcactagacgtcagtaggttacagagtgtgcatgctcgcccagcatctgggtaggaaggtctaaacaatgagaggaagcaagtgacaaggtaagtcacttgctctgaggaaagtcctagagacctgcacaggacagtgc

SEQ ID NO: 511701 - DNA, 438 bp, Homo sapiens
ataatttgcatttggacattttctaaagtaaatgccctaagtaaaaggagctcagcggcttggagtaaataagcaacttstctaaagtttggtcaagctgaagggaatgttacgaatatctgggtcttgtgtcttgagtcttgtgtaccttgcctaataatacaccttcttaataaatcagatatttttcatttatttttagatattcaagaaatatataagataccagtcctctaaatgattttaataacaaagttttacttagcatgcttgtttactcccacattacatcagcataaacaagcagtcttaaaagtgttttaaaaatgaaatttctatgaaaaacaaaacaaagacatagtatacaaaagggattaaagggtaagaatgtaaactagtacaaccacaatggaaaacagtgtggaaatttcttaaaga

SEQ ID NO: 511702 - DNA, 607 bp, Homo sapiens
ctgcagtcaaccaattgagtacccgagactgaacaatctccaaagcggccttccatctctagccacttacagactcagtgaaaggatgtgtagcagggcatggtatttgcttctagtgaactgccaaatgggctcagaaccatagagcgttaactcgcttatgggacaaactttaaataatttggcattggggataagaagaaacgtgcaaatgaacaatcttttctttcctccgtatgtagagctgcttcaaggcatggttttctcatatagtctgtcttgacaaattctaatggccaagaaggtggaagagccaagtaaagcccttatctttccaaggctcagcatgaaatagccgttagcgcagtaacacattaccttgtacttctcttttcagcctagcctrcctcatgcccttttctcttctttctgctttactgggattatatttcactaatctagtagtatttctgattcctaatcccagcgtctattttctagagtagttcgtataaaataacatatagaccctgaatctgagaaatcatgaaatctgggacttcgtctaaacgatctgtgggtataaaacatttgtattatgtcatgg

SEQ ID NO: 511703 - DNA, 607 bp, Homo sapiens
ctgcagtcaaccaattgagtacccgagactgaacaatctccaaagcggccttccatctctagccacttacagactcagtgaaaggatgtgtagcagggcatggtatttgcttctagtgaactgccaaatgggctcagaaccatagagcgttaactcgcttatgggacaaactttaaataatttggcattggggataagaagaaacgtgcaaatgaacaatcttttctttcctccgtatgtagagctgcttcaaggcatggttttctcatatagtctgtcttgacaaattctaatggccaagaaggtggaagagccaagtaaagcccttatctttccaaggctcagcatgaaatagccgttagcgcagtaacacattaccttgtacttctcttttcagcctagcctgcctcatgcccttttctcttctttctgctttactgggattatayttcactaatctagtagtatttctgattcctaatcccagcgtctattttctagagtagttcgtataaaataacatatagaccctgaatctgagaaatcatgaaatctgggacttcgtctaaacgatctgtgggtataaaacatttgtattatgtcatgg

SEQ ID NO: 511704 - DNA, 503 bp, Homo sapiens
gatgtatttaatcttccaaattatttgtaaagaaacacgatcttctcaaggagtgtgagatgcatacattttacgtaacttaactattaactccatagaataagttctcatggcctggaattggcagtggtgaacaaaagagaaaggagctcaggaggtataaaaagtaaatggagcaatcaatgtatttattctgggtgctattgtaaggacacagtcactattacatttaaacacactggtagccccctcttctagagcaaggacattgccatggtttgaatgtgtcctctcaaaacattagatgttgacagagtaatgatgttgagagagagatgggacctttgggaattggttgggtcatgaaggctcctcccactatgaatggcattagagcttttatgaagtacgcttcatgcgrtgtttggttgccttgcccttctgccttctcccatgtgagaacacattattcccgcttctggaggatgcagccctcaccagac

SEQ ID NO: 511705 - DNA, 321 bp, Homo sapiens
aattttaactcaggtattctttaactcggtggactttaaggatcattaatatgayccacaggaactcaagagtaaaaatgatcatgcagaatatagcaaatatcaatttgttggatcctacaggagataataagataggggcacgggcaataaataatgaaacacacctatgtactagagtgataaagagaaaggagataacacggatgtagtaagtgtgaaaaggattcaaattaaaataattaacatttcatagaaattgagaggagagaaaaaaataaaagtcacatagtttgagcaagtatggttaaaagaatagtg

SEQ ID NO: 511706 - DNA, 321 bp, Homo sapiens
aattttaactcaggtattctttaactcggtggactttaaggatcattaatatgatccacaggractcaagagtaaaaatgatcatgcagaatatagcaaatatcaatttgttggatcctacaggagataataagataggggcacgggcaataaataatgaaacacacctatgtactagagtgataaagagaaaggagataacacggatgtagtaagtgtgaaaaggattcaaattaaaataattaacatttcatagaaattgagaggagagaaaaaaataaaagtcacatagtttgagcaagtatggttaaaagaatagtg

SEQ ID NO: 511707 - DNA, 321 bp, Homo sapiens
aattttaactcaggtattctttaactcggtggactttaaggatcattaatatgatccacaggaactcaagagtaaaaatgatcatgcagaatatagcaaatatcaatttgttggatcctacaggagataataagataggggcacgggcaataaataatgaaacacacctatgtactagagtgataaagagaaaggagataacacrgatgtagtaagtgtgaaaaggattcaaattaaaataattaacatttcatagaaattgagaggagagaaaaaaataaaagtcacatagtttgagcaagtatggttaaaagaatagtg

SEQ ID NO: 511708 - DNA, 511 bp, Homo sapiens
ctgcatgcaactgtctgttctcctcacctggcctccttggtcttgctgtctgcgcctcttctcttacctgccatccctgagcactgctgccagctctgacttagctctcctgtctgacagctttaatcctgtctgtatactaattatttccctcatttccttggtgtccacagtcatgcttctgctgcccatgagaccctattccttcctaggactgaccactcccccttggcctctgtgcagcctcagcctctggcatctatggctaggcttttcttggtatcctccacaggccccactttccctgtcttcagccctgccttatggagaatgttcggtttgatagcctttttccaagtgyttatttcttctatccccaccacccccaacctctctccaggtgaagactacccacgattttatctccaacccagaggacattttcctgagcttcagacctgaagaaccaactgaatccagtggggcaccttatccaacagactagcacaca

SEQ ID NO: 511709 - DNA, 659 bp, Homo sapiens
cacacacagaaggtaaagctagcactgacttctaaggatgtacacccaaggccagcaggggaggccgtgaccaggtgtcatccgcatcacatcaccaattgtgtgtgtgttaatgcatcctcttactctagggcccttgcaagaagtcttttcttrtttgaaatagggtttatttgattggcagatggctttgtgaaagagcaaaataagaattgaaggtgggaaatgtcaggggcccactgactcctgctttaagtatggagcccttccttgagctgggatgtctggcctttgcctagattccttgccccacccagatccctgcccctccatggtttctactgtgaaaactggagagtcacttctggtctctagatggctgcgactttaaatcagaggttcagaaggaagacttgaacataaacagaagttaaagagatgtgctggttcactaaggtgctgggtgacacagaagccctacgggcaaggaggctcccccttctctctgctgactctccctgctctccccttcttcccctgaccctgtaaaatatgcctcctgtgactctcaatatctccttatttgctctttctttttctcttttttgttttgttttcccttatttatttttcttctttccctttttcctccttttatc

SEQ ID NO: 511710 - DNA, 659 bp, Homo sapiens
cacacacagaaggtaaagctagcactgacttctaaggatgtacacccaaggccagcaggggaggccgtgaccaggtgtcatccgcatcacatcaccaattgtgtgtgtgttaatgcatcctcttactctagggcccttgcaagaagtcttttcttgtttgaaatagggtttatttgattggcagatggctttgtgaaagagcaaaataagaattgaaggtgggaaatgtcaggggcccactgactcctgctttaagtatggagcccttccttgagctgggatgtctggcctttgcctagattccttgccccacccagatccctgcccctccatggtttctactgtgaaaactggagagtcacttctggtctctagatggctgcgactttaaatcagaggttcagaaggaagacttgaacataaacagaagttaaagagatgtgctggttcactaaggtgctgggtgacacagaagccctacgggcaaggaggctcccccttctctctgctgactctccctgctctccccttcttcccctgaccctgtaaaatatgcctcctgtgactctcaatatctccttattygctctttctttttctcttttttgttttgttttcccttatttatttttcttctttccctttttcctccttttatc

SEQ ID NO: 511711 - DNA, 613 bp, Homo sapiens
ctaaggagcttcttaaatctgcaggatctgaggccccaccccaggaccgaactawaagttatattattaggaaattcctgggtgattcatatgcacattacaattggggaagcactggtttaaaagacactcatctttcatctccacttctagcacctacttaaatataccacttcattgatgattacccatagtatcgtgaattattacacaacttttcatcactgtgggctttgtaaactcatgcagaacttagtgtatttcatacactttatgctgttgtgggccattccatactgcttcatgtatgctcatcttatatcctcaagctgactgtaagttccttgaaagcagtttttattttttgtgtctctgaatcttgttggtgctatgtccattgcaatactcactaattattaatagctaatatttgagaactatgtgttagatattttatgatgtacttccatgcattatctcattggatactcaaaataactctgtacagttgttactgttctttcttcatagtataatgataaaatagtgctttagggaaggtagtatatctttgagctgggactcaaatccatgtccatttgactcaggagcc

SEQ ID NO: 511712 - DNA, 613 bp, Homo sapiens
ctaaggagcttcttaaatctgcaggatctgaggccccaccccaggaccgaactaaaagttatattattaggaaattcctgggtgattcatatgcacattacaattggggaagcactggtttaaaagacactcatctttcatctccacttctagcacctacttaaatataccacttcattgatgattacccatagtatcgtgaattattacacaacttttcatcactgtgggctttgtaaactcatgcagaacttagtgtatttcatacactttatgctgttgtgggccattccatactgcttcatgtatgctcatcttatatcctcaagctgactgtaagttccttgaaagcagtttttattttttgtgtctctgaatcttgttggtgctatgtccattgcaatactcactaattattaatagctaatatttgagaactatgtgttagatattttatgatgtacttccatgcattatctcattggatactcaraataactctgtacagttgttactgttctttcttcatagtataatgataaaatagtgctttagggaaggtagtatatctttgagctgggactcaaatccatgtccatttgactcaggagcc

SEQ ID NO: 511713 - DNA, 572 bp, Homo sapiens
ctggcaaacttatgccaaggtgattaaaaatgtatagatgtgatacttggaccatctcctggtctggccatctctcacatattgagaattctgctcacaggctttgtgtttctaatggaaacaggttaagtttcaggggcacgttgctttatgtcataacaacataaaccgtccctttccttaaaagctatgtccctagaaaacttactattaatattatyatgtcctaatgataaataatattaattatttaataatgattataataatcattagtaattattattaataatcatttaatataatcatttagtaattaatattgctaaaacaatttaaatatactgaaggggtgtaatcttaggggacccaataagtgatttatctttcctgccctgcttatgaatgaatggtggcagggggtggtgaggagataagacggaggccaaaatatcaccttatttgctgagagaggctgaataggaggacgtggttttagggctgttggccaagcaggctttatcatacgggacccagaattagggaaagtgctcactagtcagagacaattc

SEQ ID NO: 511714 - DNA, 581 bp, Homo sapiens
tgtctctttgcctaccgccatccatgtaagacatgacttgtttctccttaccttctgccatgtttgtgaggcctctatagccatgtggaactgtaagtccattaagcctcttttgcttcccagtcttgggtatgtctttatcagcagwgtgaaaatggactaatacaatgttccttttctttttcatggaaagatgaaagaatgtatagattttacggccatatgtttaccatgtcaagcatttacttgtgttctttcccaggagatacattatgtcttttcaacaagagatttaaaaatatgtaatacctgcaaaatccctttgaaaggtttttttttttaatctaaaaatttgctgttttgtagtgtttctattaaagtagtttttaaaaaacactttcccttcagagttccaaataaaaaacagagttttggctagatatccttattactaaatctcttcaaaataagttgatttaaaataatggtcaggacactcctccattctttgtggcagggactttgctgcaggtagcagtcaccactctctgttgttaacccccaaagatcaagtgaactac

SEQ ID NO: 511715 - DNA, 649 bp, Homo sapiens
tagctacatatagtttttaaatttacaaaataatactgaaatgtcagattagcagaccaaaaaaaaattttttttcaagagaatagttgctttagaccctcacagctttatyccctactaaagtcaacacgtaaactgaactttgaaaagatattttatgtgttgcaggcaattttcacagatggaaattaactgagttagtaaaattctgaattacagaagattctaaaataattgtgattgtaatactgtttcatacagtaacagcagttgtgtaaactgttgacccaagtagggtctgaattaatgagtaaaaaaaaagaagtaatgcccttacatttgtataacatttaccaacatataaagcattttcatatttgcttatttaattacaatgctgtgaagcagttaagaaaaactctaatgtcggcagatttcccagcatcacaaagaatataaatgtggtagagcaagaccttgacccttgattatcagcctccaaagccaatactcttcacatcacaaaactctgttccagttctaattaattacagatcattgacaataaacaatttattggctgaagtccatataatcatttcctctgatttattttacgtttcttcttcttaacggccttttacatggc

SEQ ID NO: 511716 - DNA, 494 bp, Homo sapiens
ccatgtgcaaaaattgtaaatgctaaccaatacctcctactatttatttaaactacctggggtagattctattgttcacaactaagaacactagcaattcctagtcaccaaatcatacacccacactcatacaactgagacattacttttggtaggccaagactccgtatggcaacataggattctgtcaccccaatgaaaagagccatgatccttcagaaagccgatgaatttcagctccaagttaattaactccacatacccaaatatccaaagctagccctctcccagatagcagcaagccagagcctgaggtggatctttggtagattcagacatcaggataagagtactcaccttgctcagtcatactctgtccctcctctaataaatgcccctgtgacctgaaagagttcatttttagatagggtatcrtatctctcaatatgagagaaattcaaactcatggtctgagaggaaagcctaagttagat

SEQ ID NO: 511717 - DNA, 564 bp, Homo sapiens
gcagtaggaaatgcaatgaacttcccytatccaaagtcgcatacatctcgtctggattgctcagtgcacacgtatcaagtgctgcctgaacttggacttactcctcagctatttatgtcatgtgtcttcactccaagttggggttcctggcggcgggatcagtgtatatgtagcccacacagtagactcacaggtagcacacaagttctccacacaccttctggaggagctggttgggacaaactggttcctgttttactttagcctcaatggggacaattccatattcctaatcagaattaacacattggggataagctgacaaggacctcagtagaactttccaactggtaagcctcagaagggttgcaagtgggctgaaccatttattctcccagtccttggagtaagtgggcaggacatggggagcctggagcttcaagcagccttgtctgcttgtcccagcatgctatacgtcactttctatgtgtgccaaggacaagaaaaagtcaggaagccctgccactagtccatacccagtccattcgcccggaactgtggctc

SEQ ID NO: 511718 - DNA, 641 bp, Homo sapiens
aattataattggttttgaagaagaaaaaactaaatgttgactgtcccaacttaataaatactttggtattytgtgtcactaagagcagcaagcaagaagctcaatggggaagaaaattgtttttttaaaattattataggaaaggcattcaagaagtgactttgcagctttgtgatttcacttgagtcatatatctataaatatttgagaaggaaaagccaattaatttcctgagattcaatttattttcataatttttgatgaaagtttacattttccaagagttttcatagccagacacaactgccacaaagaagaaatcaagaaaccaaaaaagtaaagaacatttacaggagaacagataaaatgaaaaagaaaatgaaaaaaggaattaaacatacttagaaaagaagggttaacatgtcagtcttttgtgaatgaagagaaattagtaaaaacatttaaaagaagaaataaggagaataaaaatgaaaatatctctctgaaattattaatttattaattagtttacagagaataacaattaaaggcaacctgcacaattcctgagttggcaggcactaactcattatgtttgcatttccttagctaatcaagcagccagctatagcacaatggag

SEQ ID NO: 511719 - DNA, 620 bp, Homo sapiens
aatgtggagagaaactgtggtgcagtggcaagagcgctgaaaacgtgtcaggatgtgttgtttctagtcttggcatctgcactgactgcataacctttgacaaattgcctcatctttctgagcctctataccctatttctcagataagaagtatcagcactaaggtttcctgaaagcagaacctaggaaaaaggcctacatgcatgcagtttatttcagaaatgatcccagtgagcagaactgaagaacaagaggaataaagcagggcaaaaggagaagccaatagaagtatatggatggcattgagctgacaacagctctgggctcctggtactcagagtctttggggagtcccatgaagtgtgtctcagagtagtctgtccagaagaagaaaggggcaagcatcgatttagtgcttcatcagtcaatggcggcccttaagggtgctgaagcccccaaacttaatggtttgcacttgcgtgagtgtggarcaggatctcacagggtccactcagaaatgtcagagaagccctggatcaggaagtgacaggtacggaaagaagactaaaacaaagtgctcttaggttgccctgcagagaagcagggaaaagcctgcacag

SEQ ID NO: 511720 - DNA, 607 bp, Homo sapiens
ttctcccacttcatgctcccagacttaaaacatgagtaaatttgcattttccaaaatgtgtcaatagtttatcaggcctctgtcagcatagtacgcacttgtcgaatggccaaatgaatgaacaaatgagtcaaaagagatttaataaagaaatttcttaaagatattggttactttgctaattaatcctcyctagtcataatctcctctgaggatgagtactatgtctgtcctgtaggcttttatatgtccagtatttaacagttgaatagatgaatgaatggatgatgaatgaataaaacattgcagcagagattcatgtggctattatggaaggacagagaagacaatcaaacacatttgtgggaattgagagaagcttcacatgagaagcaacctttgcagtggatgaatagggactgccaggcaggaatgatagatacaaagagatgtgaaagagcatgttatgttcagagattaagtagtaagagaataccactggaaagcctgaggtgggcaggataacctgagggaaagggtgagacagagttagatttaaatcccagccttaattctcactacctgtatgactccaatcaagctatag

SEQ ID NO: 511721 - DNA, 526 bp, Homo sapiens
cttcctaaatgaactccagtatttatgacactaatatagtacagaaagtgttgaaactctgtaacacattgtacattaaaatcttgaccctcctctttccttaaccagtatcatactgtaccactgtatctttcccccactttttcttcattctgttttcaactgattgtaaagggaatttgagctacattttagagaaaataagaatgccaataactggtagagtgtgagcatcataaagccagtagccaggtctgtctttttcactgctctaaccatagcagwgtctagttcatagtcaatctctactcatttattcactcactcattcattcattcatcagtcactctgcaagcatttatggggtaccaactagacacaagatacgttccaagagattaatacataacagggaacaaaatagatgaagtccctgccttcacagggcttgtagtctgatagagtgattcaaacaataaacaaagatacaaaatgtcaatcattgataaatactttagaagaaaa

SEQ ID NO: 511722 - DNA, 492 bp, Homo sapiens
actggtgataagaaagcacaagtcagaaactaggatcattgaggcagttcaatttctccaactgggagaagcagggaagcaacaggctacagtgtcaagtgcaaatagcttttgcctcgtaatatggtctctctccgtcagtaactagctgcacaataataagcaagtccctgagtcactttatgcctccattttctctcctataaaaggagtctggtaatactcattctcttggtttgaaacatgatttctaagaagccggcaagsgtaagcaggagaaagtagtttaaagtagtgttctgcaaatgagagttgttttcaggaagaggtgtttcaaatagcagagaagtggggattccaaagactccctagggtgaggaaaaacaaatactgtactgtatacaataggtccttgagtcagaagggaggggagggcgagaaggcagagtggtattcagggatcaggagtcaaacagcaattaagggaacaaa

SEQ ID NO: 511723 - DNA, 492 bp, Homo sapiens
actggtgataagaaagcacaagtcagaaactaggatcattgaggcagttcaatttctccaactgggagaagcagggaagcaacaggctacagtgtcaagtgcaaatagcttttgcctcgtaatatggtctctctccgtcagtaactagctgcacaataataagcaagtccctgagtcactttatgcctccattttctctcctataaaaggagtctggtaatactcattctcttggtttgaaacatgatttctaagaagccggcaagcstaagcaggagaaagtagtttaaagtagtgttctgcaaatgagagttgttttcaggaagaggtgtttcaaatagcagagaagtggggattccaaagactccctagggtgaggaaaaacaaatactgtactgtatacaataggtccttgagtcagaagggaggggagggcgagaaggcagagtggtattcagggatcaggagtcaaacagcaattaagggaacaaa

SEQ ID NO: 511724 - DNA, 523 bp, Homo sapiens
cctctgtttgacctaggcaacattatagatgaaagacttaatggtcaaatcattaactgattttcccagatcacagggccagcaactggtagaattagaactcaacccagtttttctttttcaaattcctwttactatgttgcactgccttcctggtaaataataccaacaaccatcctttctggagcaattaacctgtcctagtcagtatttgaagtcttttacttggcttcttccacttaaccttcatcacagaactaagtgaggcaaacaccattattattctaattttgtagacgagaaatttagagtcttgtccaaggttatacagctagtaagtggtaagactgggatttcatcccagatactctttgacttcaggatccaaatcttcagcataatactacactgtctctcaacttgccaacccctgcatgcctcctccaatgtgctataaaatgtattaggggtgcagagttttatgggaggatagaagaaggaaatgttgattccagctaaagag

SEQ ID NO: 511725 - DNA, 550 bp, Homo sapiens
cccctctcacctcactcctattttaagtcagtgacacacagtcatgctttccttttctgcacctgaaggagtgatgtcactccagactgagtccttattagaggtgatgatggagttatttttagacctgggaatggtctaaaacattttgcctcagcctaatcattggatccttcaaggaaatggatattctgatgcacatcccacccggtgtcctatcaaatggaaccttagctctcaggcaacttgttagtttgaaggcagtgacaatgaggccaagaatgactcctggctcctccactctgccatcacaggctgcacccagagcctcccacatcagattgtacccaccgtgccagtggaagtgatctctaagtcaagctattcctgccctctctagcctactttctctgggaggcattagaacacagtcagatcccgagagtccagacctggattctattgctttgtaagctaggtctttgggcaaattacttctctaggcttttgtttccyggtctacataaatgagacgaattcatggttatgt

SEQ ID NO: 511726 - DNA, 622 bp, Homo sapiens
attgcccacagcgatcttgggcccctgcccactcagcaggcagacggctttccctgccagcaacaggcttttaataaaacaggatgctgtcccactactaaggcccagcctgagaatggatcccagtccgtgtgaactccctctccaagaaacagcagttctgtgttccttatcaggaaaccccactttggcgttcctggcctgggagaaaggcccctctcccagggacttgctcagcaagtgtttgcaggcagccgctggcccctggagctgtctgctctgcaaggttctcaccacagtgarcttgctcccgcagggacttctcattctgtgcgtgtgtttcagcttttaggaaggctctgtctgactttgatagtcaagcaggatgggatttaaaataaggagctggcttctacaggcaggatgaggacatttcgcccctatcttcctgcagcaaaccccagtgagtcacgccaggactgcacttgaactgacttctcatcttaagtgtgaagagttttatcattttggggaggctcacccgtctatttgtttacttctcatttggaatgaaatggagtatgttccatttggagcagcaatttctaatttttttccagct

SEQ ID NO: 511727 - DNA, 622 bp, Homo sapiens
attgcccacagcgatcttgggcccctgcccactcagcaggcagacggctttccctgccagcaacaggcttttaataaaacaggatgctgtcccactactaaggcccagcctgagaatggatcccagtccgtgtgaactccctctccaagaaacagcagttctgtgttccttatcaggaaaccccactttggcgttcctggcctgggagaaaggcccctctcccagggacttgctcagcaagtgtttgcaggcagccgctggcccctggagctgtctgctctgcaaggttctcaccacagtgagcttgctcccgcagggacttctcattctgtgcgtgtgtttcagcttttaggaaggctctgtctgactttgatagtcaagcaggatgggatttaaaataaggagctggcttctayaggcaggatgaggacatttcgcccctatcttcctgcagcaaaccccagtgagtcacgccaggactgcacttgaactgacttctcatcttaagtgtgaagagttttatcattttggggaggctcacccgtctatttgtttacttctcatttggaatgaaatggagtatgttccatttggagcagcaatttctaatttttttccagct

SEQ ID NO: 511728 - DNA, 301 bp, Homo sapiens
atctatggggaatctggcatagcttttataatgtgacccttggctcatgcctgagaartaaccccaggtagccttctggtccctcctgcaagcaggcacagcctaccactgagtaggtcacccacggggttcctggggcacttgctactgggagtaagggaagcataaccaggtgcaaagcaggtgagggacaggccagaggtgccttgccccgggctgctgtgtgttccactcctgcggaacgtgagctccgtggggcagggtggactcttgcttacccatgtccccacttccaccatgg

SEQ ID NO: 511729 - DNA, 301 bp, Homo sapiens
atctatggggaatctggcatagcttttataatgtgacccttggctcatgcctgagaaataaccccaggtagccttctggtccctcctgcaagcaggcacagcctaccactgagtaggtcacccacggggttcctggggcacttgctactgggagtaagggaagcataaccaggtgcaaagcaggtgagggacaggccagaggtgccttgcccmgggctgctgtgtgttccactcctgcggaacgtgagctccgtggggcagggtggactcttgcttacccatgtccccacttccaccatgg

SEQ ID NO: 511730 - DNA, 546 bp, Homo sapiens
atgaattcaggaacatgagtttttttgtttagtttctggtcagtgggcatcctggtggggtaaaacatagtaacaagaaaaggaagaacatgtagatggtcattgcttttcaggtgcattgcagaggcttctctctgaagggtgactacagttctatacggccatgtcagtccaccggcattcattcattcatttattcattcattcattcaacacatatacattgcttggcaaagtgcttctgagatgcaaccaaaataaaaaccctgccaggattcattatggctgtggtctccctgtactaaacctcacatccatttttgtatttgatgtgtcctgcaaactgctgtgtaaatgggagttttatgagcaaatagaaggacctggcaataatgctgccgtcttaaggaatagaagagcctgttgttgcacaatagagagccaggracagaaatcggtgaaatcggctccaacactgcccctcccccaatacaccccaggcacacttctgcttgacagatgccaaggccttgatgccaggactgg

SEQ ID NO: 511731 - DNA, 525 bp, Homo sapiens
aatgattgagcttctaattctctccctacctcctatctatgtgtctagttttcacttcttcacagtacggcattctcaggaaagtcagacttcttagtagtggcttaccctagaatgrcttttccaaaagcacatgtttcaagagacccaggcagaagctgcaaagtttcctgtgacctagcttacacatcctatagtttcttttgccatattctgtaaggaaagcaagttgctatggccagaccaggttgaaggagaagggtatgagactctacctctcgatttcaggagcattattacggagagggaaggattgttggttgcttctgtataagcaatgccaataatagaaggctccactgtcctgattaatgtagctttataacaagtctcaaaatcaagcaatgttagtccttcaactttgttcttcctttacaaagttgttttgactgtgctaggtcccttccatttacatttgaattttagaatcagtttgtcaatttctaccaaaaagaaagcccttat

SEQ ID NO: 511732 - DNA, 632 bp, Homo sapiens
tgcctgtggagaggaagcacctgttcccttccttgccactctccctggctggcctgcagttttctcctgtgtgtcacagttatggactgactgctwgtgtcctgccaaattcatatgttgaaatcctaacccccaaggtgatcatattaggagatgaggcctttgggaagtgatgaggtcacgagggtggagccctcatgaatgggattagcgcccttatgaaagagaccccagagagctctctcactctctttccaccatgcaagaaaatgagatgttaaagtcttcaacctggaagagggtccctgccagaatccggccatgctgggacctgatcttggacttttgagaactgtgagaagtaattttcagttgtttacaagtcatcccatcaatggtattccactatggcagtccaaactgactaggtgactcaccttcttggcccagtgggcatttgatccagaataactcattactgtctgaggaaattcccactgtctcttttcccagaagtttttgtttctggtggcttcttgggggattccaggcacagtagggcaagcaatgggtatagagtgaccctacacctttgacttggcctcctgtggacttagatggatgggtgtgtt

SEQ ID NO: 511733 - DNA, 601 bp, Homo sapiens
ctgtggagaggaagcacctgttcccttccttgccactctccctggctggcctgcagttttctcctgtgtgtcacagttatggactgactgcttgtgtcctgccaaattcatatgttgaaatcctaacccccaaggtgatcatattaggagatgaggcctttgggaagtgatgaggtcacgagggtggagccctcatgaatgggattarcgcccttatgaaagagaccccagagagctctctcactctctttccaccatgcaagaaaatgagatgttaaagtcttcaacctggaagagggtccctgccagaatccggccatgctgggacctgatcttggacttttgagaactgtgagaagtaattttcagttgtttacaagtcatcccatcaatggtattccactatggcagtccaaactgactaggtgactcaccttcttggcccagtgggcatttgatccagaataactcattactgtctgaggaaattcccactgtctcttttcccagaagtttttgtttctggtggcttcttgggggattccaggcacagtagggcaagcaatgggtatagagtgaccctacacctttgacttggcct

SEQ ID NO: 511734 - DNA, 632 bp, Homo sapiens
tgcctgtggagaggaagcacctgttcccttccttgccactctccctggctggcctgcagttttctcctgtgtgtcacagttatggactgactgcttgtgtcctgccaaattcatatgttgaaatcctaacccccaaggtgatcatattaggagatgaggcctttgggaagtgatgaggtcacgagggtggagccctcatgaatgggattagcgcccttatgaaagagaccccagagagctctctcactstctttccaccatgcaagaaaatgagatgttaaagtcttcaacctggaagagggtccctgccagaatccggccatgctgggacctgatcttggacttttgagaactgtgagaagtaattttcagttgtttacaagtcatcccatcaatggtattccactatggcagtccaaactgactaggtgactcaccttcttggcccagtgggcatttgatccagaataactcattactgtctgaggaaattcccactgtctcttttcccagaagtttttgtttctggtggcttcttgggggattccaggcacagtagggcaagcaatgggtatagagtgaccctacacctttgacttggcctcctgtggacttagatggatgggtgtgtt

SEQ ID NO: 511735 - DNA, 632 bp, Homo sapiens
tgcctgtggagaggaagcacctgttcccttccttgccactctccctggctggcctgcagttttctcctgtgtgtcacagttatggactgactgcttgtgtcctgccaaattcatatgttgaaatcctaacccccaaggtgatcatattaggagatgaggcctttgggaagtgatgaggtcacgagggtggagccctcatgaatgggattagcgcccttatgaaagagaccccagagagctctctcactctctttccaccatgcawgaaaatgagatgttaaagtcttcaacctggaagagggtccctgccagaatccggccatgctgggacctgatcttggacttttgagaactgtgagaagtaattttcagttgtttacaagtcatcccatcaatggtattccactatggcagtccaaactgactaggtgactcaccttcttggcccagtgggcatttgatccagaataactcattactgtctgaggaaattcccactgtctcttttcccagaagtttttgtttctggtggcttcttgggggattccaggcacagtagggcaagcaatgggtatagagtgaccctacacctttgacttggcctcctgtggacttagatggatgggtgtgtt

SEQ ID NO: 511736 - DNA, 617 bp, Homo sapiens
tgcaaaaatgttatccttggggctaacattctgtattagttcattttctcgctgctgataaagacatacctgaaactgggaacaaaaagaggtttaattggacttacaggttcacatggctgtggaggcctcagaatcatggcaggagatgaagggcacttcttacatggcagyggcaagaatataatgaggaaaaagcaaaagtggaaacccctgataaacccatcagatctcgtgagacttataaactatcacgagaataacacaggaaagactggcccccgtgattcaattgcctcacccctgggtccctcccacaacacgtgggaattctgggagatacaattcaagttgagatttggatggggacacagccaaaccatatcacatcctaagtgactgtctggggtcactggaccctggcatgcttccccctgtgccagctaccagctatgtggtctgggaatggcttgggatccacagatagctctccaggggggtcacggaccagagttgctgttgcagggtgtgagtccccttgccagggagggaagggacagtcattcacttataaacagatgttgggactcacccaaattgagtgctgggcctagatc

SEQ ID NO: 511737 - DNA, 617 bp, Homo sapiens
tgcaaaaatgttatccttggggctaacattctgtattagttcattttctcgctgctgataaagacatacctgaaactgggaacaaaaagaggtttaattggacttacaggttcacatggctgtggaggcctcagaatcatggcaggagatgaagggcacttcttacatggcagtggcaagartataatgaggaaaaagcaaaagtggaaacccctgataaacccatcagatctcgtgagacttataaactatcacgagaataacacaggaaagactggcccccgtgattcaattgcctcacccctgggtccctcccacaacacgtgggaattctgggagatacaattcaagttgagatttggatggggacacagccaaaccatatcacatcctaagtgactgtctggggtcactggaccctggcatgcttccccctgtgccagctaccagctatgtggtctgggaatggcttgggatccacagatagctctccaggggggtcacggaccagagttgctgttgcagggtgtgagtccccttgccagggagggaagggacagtcattcacttataaacagatgttgggactcacccaaattgagtgctgggcctagatc

SEQ ID NO: 511738 - DNA, 617 bp, Homo sapiens
tgcaaaaatgttatccttggggctaacattctgtattagttcattttctcgctgctgataaagacatacctgaaactgggaacaaaaagaggtttaattggacttacaggttcacatggctgtggaggcctcagaatcatggcaggagatgaagggcacttcttacatggcagtggcaagaawataatgaggaaaaagcaaaagtggaaacccctgataaacccatcagatctcgtgagacttataaactatcacgagaataacacaggaaagactggcccccgtgattcaattgcctcacccctgggtccctcccacaacacgtgggaattctgggagatacaattcaagttgagatttggatggggacacagccaaaccatatcacatcctaagtgactgtctggggtcactggaccctggcatgcttccccctgtgccagctaccagctatgtggtctgggaatggcttgggatccacagatagctctccaggggggtcacggaccagagttgctgttgcagggtgtgagtccccttgccagggagggaagggacagtcattcacttataaacagatgttgggactcacccaaattgagtgctgggcctagatc

SEQ ID NO: 511739 - DNA, 394 bp, Homo sapiens
gctgagctccgagaacatgagcatgtggtagaatgcatttcctgggctccagaaagctcatattcytccatctctgaagcaacaggctctgagactaaaaaaaagtggtaaatctgggccattcttgctgtctggatccagggacaagactattaagatgtgggatgtcagtaccggcatgtgcctcatgaccctcgtgggtcatggtaactgggtatgtgaagttctgttcagttctggggggaaatttattctgagttgtgctgatgacaagaccctacacgtatgggattacaagaacaggcaatgcatgaagaccctcaatgcgtatgaacactttgttacctcattggatttccacaagacagcaccctatgtggtcactggcagcgtg

SEQ ID NO: 511740 - DNA, 394 bp, Homo sapiens
gctgagctccgagaacatgagcatgtggtagaatgcatttcctgggctccagaaagctcatattcttccatctctgaagcaacaggctctgagactaaaaaaaagtggtaaatctgggccattcttgctgtctggatccagggacaagactattaagatgtgggatgtcagtaccggcatgtgcctcatgaccctcgtgggtcatggtaactgggtaygtgaagttctgttcagttctggggggaaatttattctgagttgtgctgatgacaagaccctacacgtatgggattacaagaacaggcaatgcatgaagaccctcaatgcgtatgaacactttgttacctcattggatttccacaagacagcaccctatgtggtcactggcagcgtg

SEQ ID NO: 511741 - DNA, 394 bp, Homo sapiens
gctgagctccgagaacatgagcatgtggtagaatgcatttcctgggctccagaaagctcatattcttccatctctgaagcaacaggctctgagactaaaaaaaagtggtaaatctgggccattcttgctgtctggatccagggacaagactattaagatgtgggatgtcagtaccggcatgtgcctcatgaccctcgtgggtcatggtaactgggtatgtgaagttctgttcagttctggggggaaatttattytgagttgtgctgatgacaagaccctacacgtatgggattacaagaacaggcaatgcatgaagaccctcaatgcgtatgaacactttgttacctcattggatttccacaagacagcaccctatgtggtcactggcagcgtg

SEQ ID NO: 511742 - DNA, 555 bp, Homo sapiens
accatctgtgaacaggactcctcaaaatgttttctrttaataaattgccttcaagtaaactgaaaaaaaaaaaagagggagagaattcacacaaaatgatgcccagtcttggtctgcatggtgaagggcccaggactgatgggcgggggctcatttgcataccacaacaccagggagagtcctgtcacctgccctcctgagtcctgaagaaaacccttcaccccaattccctgtacactacttctaaaggcaggaaatgtgtacagttctagaattacagtcacataaaatgctagaagaataacgtgatttatttaagtgcttagaggtacccccttgaagtttgtgttacctggaagttggcctcggggaaacacctcattgaccttctctcaaggataaatgagatgcagggacagggaagggagaaaggttattttaacatttcattcacagtccctgggattctttggagagcaccttaggaatgttcttaacctgagtcctcttactaagtattatcacatagtctgccaggctggcattattaaccct

SEQ ID NO: 511743 - DNA, 558 bp, Homo sapiens
ttcttctagcctcagcacatttgtgtcccacagaatatgccgtgcgtggctgtttcctttgtgatgcttctctaggctgtgctttgtgtccattttttatcatttgccttaaagatggccatcagatttcccaggtctccargtgactccctgccctcagccacatggtctcagggtcatgacctcacagatctcatctcttcttacctcacagcccacctcaccacatgcccacatatcacatgtttgttcactttaaaaatctttgcggaccaccctttttgtgcctggcactgctttagtttctgcttccatggggcttacaacctagtgaggaaaaaagatcatcaagaaataaaaacatagataatgtgtgctggacagtccctctttgctaccgcagatccactcccacccttttccatgctgcttcgtgcccctggaggctgatctctgtcgtatcacttgggcttccttgacctctggcttctggctgggtttggccaacaggggacacctgtaggagacaggaggtcagaaggaggaagatgagggtat

SEQ ID NO: 511744 - DNA, 606 bp, Homo sapiens
tggttgatttgtgtgtgagtgtgtgtatctgtgtgtgtgtgatgaaaagctgtactctgtccctaaattggcttcatgttagctaggcagaaagcttaggaacagaccttttcccagtggtggatggcaggaggttagagaaaggaggaggtgccaggaggaggtggatggcaggaggcattaaaggccttcagaatacacagggtcttctggttccttcgctggcccctctcctgtctctaaaaaaattgatcgcttttgtttctgaaagakgaaaaaagtgcaaacttccttgacagtagtaagggatacttagagaaagttaatgttttcctaagtgattaaaaaaaaaaaacaaaaacggagactatttctcaaggcgcaagtaattctaacacagggttacaaatctcaaagagacaatggtatcaaatgtcaactatttccaagctggtgttaggtggaacaaattgtcccttgcctaaccacaccccgccctctcctccttccctaaatccttctgtctccaacacctacagatgaaaagtgactttgaaaacaaacccaaaccttccatcctacagttctttaccaatttaggaaatt

SEQ ID NO: 511745 - DNA, 580 bp, Homo sapiens
caaggggttcaacagttaggaagacagtttgcacacgatctgcacatgtttaccgtcaaatcaaagcttgaygataaacatcactcagctttggcacatctactgatggcatttgttggtggattatgctttcttccccttatttatttcacaatggttatcatggcacagctttccaaatgatgtttttaagtgttcagttgtaagaatgcaagttcaagtatgctttcttcctcactacaagagaatatgatttcaaatattcaacaaattggtttacctaatggtctctttggaggggtctcccactattctactacccactatcaccccaataaatactctagtgatataaccccttcaacagttatcatcattgaactttaaaaacataacaccatatacctttaaccatgtacatgttccccaccagtttccacaaagagctaaatttaagcctgctataagagagaatcgaaatttggtttgctttcttttagactctgctacatagactttaaacatgcagaagagctgactttgccaacaaagctcatccttcttttttccaaagcagcca

SEQ ID NO: 511746 - DNA, 642 bp, Homo sapiens
ctgaatacagaaaatgaacatgcacacacagagacacagaagcacacacacagacacacactctcagaagcaaacatcactccatcggaggcaaacacaatccattaagaaataagctacgactgccctataggctacttttgtgcaagtcaggttaagtgcatattcaaagygttgagggttttccttgtttttttgtcctgattttattcacacacaaacatagcaatgatcacagaaaagactggaatgtttccaacttagaaggaatgaggttacagtttgaaaacacttactcggtggaggctatttctcatgtttaaaaaaaaaatcacatgcctgtggacgtggacaaggtagacagcatgaatgggtctaaaaaagtcagtttttagtgaatgaaaccacacattattatagtgcaattttccctaaagtctatgtaaacattatttgcaactttattcaacttctttgaagagataggtagacagacagacacataagcagatacagtagcaatttacagtagtcttgcattgaggcattgtaactaagcctctcatcctgagtattaactctctcattccagcattccctttctaatatcgaccctattgccattttcttctcccagcttca

SEQ ID NO: 511747 - DNA, 600 bp, Homo sapiens
gataaattttagaactgcctgtctagttccagaagtcacttagttggggttttggttggaattacattacatttatagattaactcaggagaactgccaactttaagacattgattccccctttcaggaacacagtaggattcrtcatattttacgttttctcttaggtccttctattatatcagtcaagatttagagctttcttcatgtaggttgttcacatttcctggtaggtttatttttatgattttagtcggtattgtgaatagagttttttgttacgccttgttaatttaaaaagttgaaaaatttaaacacaatattatagaactattaacgaaaaatacagttttttctcagccttcttcgcctctttccaaataaataacttttaactctttaactttccattttgtagggttttagtgttacgtttatatctccaactgatgcacttacactgccacttattgatttctcaacttttgatattaattattgattttcttctatgatagatgagaaatagctcacttatattgccccatgtcctctttggttactgtattggttatccctgtagttttaacaattcactta

SEQ ID NO: 511748 - DNA, 600 bp, Homo sapiens
gataaattttagaactgcctgtctagttccagaagtcacttagttggggttttggttggaattacattacatttatagattaactcaggagaactgccaactttaagacattgattccccctttcaggaacacagtaggattcatcatattttacgttttctcttaggtccttctattatatcagtcaagatttagagctttcttcatgtaggttgttcacatttcctggtaggtttatttttatgattttagtcggtattgtgaatagagttttttgttacgccttgttaatttaaaaagttgaaaaatttaaacayaatattatagaactattaacgaaaaatacagttttttctcagccttcttcgcctctttccaaataaataacttttaactctttaactttccattttgtagggttttagtgttacgtttatatctccaactgatgcacttacactgccacttattgatttctcaacttttgatattaattattgattttcttctatgatagatgagaaatagctcacttatattgccccatgtcctctttggttactgtattggttatccctgtagttttaacaattcactta

SEQ ID NO: 511749 - DNA, 466 bp, Homo sapiens
ttcatcatattttacgttttctcttaggtccttctattatatcagtcaagatttagagctttcttcatgtaggttgttcacatttcctggtaggtttatttttatgattttagtcggtattgtgaatagagttttttgttacgccttgttaatttaaaaagttgaaaaatttaaacacaatattatagaactattaacgaaaaatacagttttttctcagccttcttcgcctctttccaaataaataacttttaactctttaactttccattttgtagggttttagtgttacgtttatatctccaactgatgcacttacactgccacttattgatttctcaactwttgatattaattattgattttcttctatgatagatgagaaatagctcacttatattgccccatgtcctctttggttactgtattggttatccctgtagttttaacaattcacttacatttt

SEQ ID NO: 511750 - DNA, 528 bp, Homo sapiens
aattacttacactaaaaataaaaatsatgcatttttagtagaaaggtatggaaattatagtttcttctaagagaaagtaattctgtctaatttagagggtttaagcattgttttaagatagaaaagaataaaactgaaagtttaagcaaggtgtaggaggtttgtaaaagattaatcttacaaagaaaaatttgtgtgtgagcaagacgactaaaattaaaatggcatcatttagtttttccataaattaaacattagcactgatgcagggccagaacctgagcccatgtgtcagaataacagagttctcttggagcattgatctgctctttaacagaaaattgtaaaaggttataaaaggtttattaaagtcttcttttatgattaaacttgtttaaattagatttacatataaaattttattaaaattagctttagcattactatattactgcaaagaaaaaagtttggtttacctttgatcaagatttctgcttgcctacaggaaaaggggacagagaagagaca

SEQ ID NO: 511751 - DNA, 515 bp, Homo sapiens
tgctgtacccactagttctttccagactttgccttccgtggctccacaaggacgtggttgagkccttttgactccgagacacctttccctggttttaaaaatggagctactgaagcccatccctgcagactagagtctcctgaggactggaggcactacaggccatgctcactgcctggctgtctgcattaattaattaatgtgtaacttcttaaaaaaaataaatgttcagttgagaaaacaacttatcctatttatttactacttctatgggttcctccaagacctagtgctatgctaggcatatagaatatctagtgtatgtttataatgtcctgttaaatcagcaaatgagcccatgatgtccacagaaacaaaacctgttgacactcttagctcctcttacgtagagatggaagctctagagccccactcaacaactggagacccctgcctcatctcactccaagtcacattaacccctttctgggaaatggttctaggcttctctgggg

SEQ ID NO: 511752 - DNA, 397 bp, Homo sapiens
aggggccatccacgtttgtgggaactcagtgtccatccctcttgagtccaaggagcccttcccttctctgccagccaggctcctcctcggcctcctctcagccccttcttctccctgctccctctccgttccaaggtagctccaggggkgctcaggggagcaacaaagccctcagatcagtccccaagtcccctcgtacctttttttttaagacaggttctccctctgtcacccaaactggagtgcaatggcacgatcttggctcactatagcctcaacctcccaggctcaagcgatcctcacacctcagcctcctgagtagctgggattacaggcatgtgtcaccatgcctggctaatttttaaattttgtgtggagacgattttgccatgtcgtc

SEQ ID NO: 511753 - DNA, 575 bp, Homo sapiens
gtggctgaagtgatatttacagagaaatttatagttctaaatatttttatcaggaagaaaaacattaatctaagtaataattcaatccaagaattttctttttttctctcttttttgagagagtctcgttctgttgcccaggctrgagtgcagtggcgtgatcttggctcactgcaacctccgcctcctgggttcacgcgattctcctgcctcagcctcccaagtagctgggattacaggcacacaccaacacgcctggcttattttttgtgtatttttagtagagatggggttttactatgttagccagactggtcttgaactcttgacctcgtgatctgcctgccttggcctcccaaagttttgggattacaggtgtgagccaccgcgcccggctaagaattttcttaaaaagagcaaaattcccaaaccaagaaagaaacaataaaaataaataacaatgaacaacaacaacaacaataacaacaataaaaatagagaagattaacaaaatcaaaaattgttacattggaagaattaataagtaaatggatatggtacgttttatcaaagaa

SEQ ID NO: 511754 - DNA, 575 bp, Homo sapiens
gtggctgaagtgatatttacagagaaatttatagttctaaatatttttatcaggaagaaaaacattaatctaagtaataattcaatccaagaattttctttttttctctcttttttgagagagtctcgttctgttgcccaggctagagtgcagtggcgtgatcttggctcactgcaacctccgcctcctgggttcacgcgattctcctgcctcagcctcccaagtagctgggattacaggcacacaccaacacgcctggcttattttttgtgtatttttagtagagatggggttttactatgttagccagactggtcttgaactcttgacctcgtgatctgcctgccttggcctcccaaagttttgggattacaggtgtgagccaccgcgcccggctaagaattttcttaaaaagagcaaaattcccaaaccaagaaagaaacaataaaaataaataacaatgaacaacaacaacaacaataacaacaataaaaatagagaagattaacaaaatcaaaaattgttacattgraagaattaataagtaaatggatatggtacgttttatcaaagaa

SEQ ID NO: 511755 - DNA, 632 bp, Homo sapiens
aggcatggtggctcagcagagctgtctgggaaaaaatgcacgtgattgccaacttttgcagagttaagtgattggaaagatagtcctcgccagctgatgcacttggaggaagccgagtgtgccgtgataccattcagtctgcatcattgactctgcagtctctgctgcccttataacttaatgttctgggcagcccaggttcccatttatcagcaagcacgataaattgctaatgactgctggcctatccctattcttaagttatctgctaacacaaagagacagattcattcaatttggaaaatgttaataagatgccaaaaacgtgttcagggagattaaagaaaaagctttttcaaatggcttgtatcattgtttccaaaattgaattccaactgtccctgtttgcgcaggtgaattaaaagactrtcaaaaccttaaatgtttctattaacctaattaaacagtgtctgagtagagacttggaaaagatgaaaggtgttcatggttcatgctctatcgaatgaacttccatgacaaaagataatgaacacttgctccccccacctagaaaatcagttctaacactttgattccattatttggataatattgattttctagaattagga

SEQ ID NO: 511756 - DNA, 632 bp, Homo sapiens
aggcatggtggctcagcagagctgtctgggaaaaaatgcacgtgattgccaacttttgcagagttaagtgattggaaagatagtcctcgccagctgatgcacttggaggaagccgagtgtgccgtgataccattcagtctgcatcattgactctgcagtctctgctgcccttataacttaatgttctgggcagcccaggttcccatttatcagcaagcacgataaattgctaatgactgctggcctatccctattcttaagttatctgctaacacaaagagacagattcattcaatttggaaaatgttaataagatgccaaaaacgtgttcagggagattaaagaaaaagctttttcaaatggcttgtatcattgtttccaaaattgaattccaactgtccctgtttgcgcaggtgaattaaaagactgtcaaaaccttaaatgtttctattaacctaattaaacagtgtctgagtagagacttggwaaagatgaaaggtgttcatggttcatgctctatcgaatgaacttccatgacaaaagataatgaacacttgctccccccacctagaaaatcagttctaacactttgattccattatttggataatattgattttctagaattagga

SEQ ID NO: 511757 - DNA, 632 bp, Homo sapiens
aggcatggtggctcagcagagctgtctgggaaaaaatgcacgtgattgccaacttttgcagagttaagtgattggaaagatagtcctcgccagctgatgcacttggaggaagccgagtgtgccgtgataccattcagtctgcatcattgactctgcagtctctgctgcccttataacttaatgttctgggcagcccaggttcccatttatcagcaagcacgataaattgctaatgactgctggcctatccctattcttaagttatctgctaacacaaagagacagattcattcaatttggaaaatgttaataagatgccaaaaacgtgttcagggagattaaagaaaaagctttttcaaatggcttgtatcattgtttccaaaattgaattccaactgtccctgtttgcgcaggtgaattaaaagactgtcaaaaccttaaatgtttctattaacctaattaaacagtgtctgagtagagacttggaaaagatgaaaggtgttcatggttcatgctctatcgaatgaamttccatgacaaaagataatgaacacttgctccccccacctagaaaatcagttctaacactttgattccattatttggataatattgattttctagaattagga

SEQ ID NO: 511758 - DNA, 613 bp, Homo sapiens
cccaggttgctagtgggtctctttgagggatgacaccatatggagagctcagttggtctttgttgctgacaggtaggacattcagtggcagcattagctagatcagcctggcaaggagtacctggtctgttggactaatgcatagccttcgtccctgcctccatggctactccatttatgagcttattgtataagcactgggggactgaagtcagaagctggctgaccttcactggaaaagccactctgttcacctggttgttcagagcctccttaattgtgagtgcttgctggtaggcattgacaggagttacaaagatatacactttgttgggctgactcccatatgtctacccacatgctkcttcttagaactctttgtctcggatctttttccctccaggtccatgaccaatcagcaatgccatttgccaccgctaggagttcacatctattttaaccttatgcctcttcacactaagttaaagactagttgtactgttaacattttccccatctgtctttcagggtcacctgaaaggcagggctgtagtgtgagagcagcactaacaatggaaccatcccatttgtgaaccacatctagatttttttt

SEQ ID NO: 511759 - DNA, 515 bp, Homo sapiens
aatatttgctaccaactactgatttgcrctacaaaagggaatgagctctgggaagctgtcaacattattgatggtggagcagaaaaattaaaataataatagaggtctttgatggcactgctgaatcaacagcccctgaagtctgcctaaaatctggactactagatacatgactcaatacattattcactgtttataccatgtttgagtttttttttttttgtaaattacagccaaaagcatgctgtctatcaaagtattctgttaaatggtgttaataaatggtattactaacaccatttaacagaagaagaaactggatcccgaaggggttaaaggaatctgctgaaagttggcatggatagtaaatgactaaaactggcacttaagaccaagtgtgtctgactctagagccctaattacttaatcaccatgttctttgtagcaaggtgtgaatctcagagaaagataaagccttcctgaaaggagtttcctcagttttccctttaatttat

SEQ ID NO: 511760 - DNA, 590 bp, Homo sapiens
aatatacagaaaaaacaatgtggcagtagtaagtctaaacataccagtaatcattcactcatgcaagcaaagatgtaaataaactatatttccttactaagagatggatactaacattagttaaaaagtagacacagagataaattttaaaatgagtttataagaaatgaaacaaaaataaaatgatacgaaatgcttaaaaattacaaaaaaaagatatgccaagtaaatatgactgtagtaacaagaatagagaaaaagtagaactcaartgagaagtactaaacaatataatggataatgcacatggataaaagttaaaactctctgagaatgtccattaacactggctcttgaacacctcccacccctaagacctaagattatacagctcaatggtttcttgataccagacccactaatagagggtatcctgccccaggggccaataactgtctccattgctgaggccctgcagtaattccacattaacagtagactgaattttttaaaatgtggtatatatacaccttggaatactatgcagtcataaaaagaaggaaatcatatcctttgcagcagcttggatg

SEQ ID NO: 511761 - DNA, 539 bp, Homo sapiens
actccattcttccatgcatctcctcaggttgagagtaggaagagcttcctgttgttgctggtccctacctgtctcagcattccttgttgattcccttaaccttgccgtacttctgcaaatggttccctcatgcaattaccttcataatcccagttgaggatccttctgtttcctgctgggacctgaccaagcctcctaatgttcatctgaggccgctccttttggagctacttggaaggaaggccaatggcttctttgctgatcaaacaggttcaggtctttcccaaactaattagcagatagacaggacagtggccagggactggaggctggctcttgatgctgtccctgcctccgtccatctggaattacagtttgkagcagctcagcctctccaagtccaatgccctatctttttttttttgtttttttccaattgatgcaactcagtaatttttattgcaactggaagacaatgcatcacagaaactttatggtgggtctgtggaagagtgttatttacaagaaatgatgaaata

SEQ ID NO: 511762 - DNA, 556 bp, Homo sapiens
ataactttttaaaaaaacagactaaaacatttttcttttyttttttctttgagacagggaattgctctgtcacgcaagctggagtgcagtggtgccatctcggctcactgtgacctctgcctcctgggctcaagccatcctcccacctcagcccttcaagtagctgggattacaggtacacgccaccatgcccatctaatttttgtatattttgtagagacagggtttctccatgttgcacaggctgactaaaaccttttatctttgacttttctctctctgaaaataatctgctacaaagtcctatttttccttcttcctttatgttggttccacatcccactttcctaattctggagtgggcccctaactgaagtccatttatctaaatttctaatattgggttccctgggaagtgaactctgaggcagagcttagcatgcagggtttttcttaaggggttactttgagatggacacctgtggcagggaagagaaggaactagaattgggaaggataaaaaatggagctgcaatacaggcccaacacagcctca

SEQ ID NO: 511763 - DNA, 460 bp, Homo sapiens
aggcctgcttcacccaaactccctaaaccataggagaactcattggctgatccctagctccttgattgacttggggctaattagaattgttgcctatcttactcattaaaaatatgcattgcatacttgctgtgtgcaaaatgctgttctaggcactgtgtccattggtgaacacaaacagaccctccgtcgtcatgggacttatgtcctggggggacacaaacaatgagatcatagatgcataagttacgtggcttctgggtggttataagcacatgggaaaagtggagtaatgagggaacacgctttgctttgaaawgaggtaggaagggcaggctcagtgagaaggtgacatttgagcaaagacatgaaagatgggtcagccatgcagatataggggcagggatggtgtgtaaagactaaacacatcagcatttaataaagagaagctacaggtgga

SEQ ID NO: 511764 - DNA, 460 bp, Homo sapiens
aggcctgcttcacccaaactccctaaaccataggagaactcattggctgatccctagctccttgattgacttggggctaattagaattgttgcctatcttactcattaaaaatatgcattgcatacttgctgtgtgcaaaatgctgttctaggcactgtgtccattggtgaacacaaacagaccctccgtcgtcatgggacttatgtcctggggggacacaaacaatgagatcatagatgcataagttacgtggcttctgggtggttataagcacatgggaaaagtggagtaatgagggaacacgctttgctttgaaatgaggkaggaagggcaggctcagtgagaaggtgacatttgagcaaagacatgaaagatgggtcagccatgcagatataggggcagggatggtgtgtaaagactaaacacatcagcatttaataaagagaagctacaggtgga

SEQ ID NO: 511765 - DNA, 629 bp, Homo sapiens
aatgtcttgatttttaaaaccattcaacactaattttgaacatgattacctcaagagccaaaaataaactctttattacaagtttgtaattgcactatgaaaagtacttaatatatggaagctatattttattgaaagtctactatgcactaagaatattacaaarataatccccttcaatcttgaagagaacattatgagatagttatttttactctctattttacacataagtaaatcaaggcagagagagattacatggtcccacaaggaacaacacccatgcctatctccaaaaccccagccaactcaatgcagttgtgaacttcccattgttagaaacccacatccactgtaaaatcattgccaagtgaggtttccttctggcagcaatgtagtctttcatggaattctcatcgttgaagaacctcattggaatttcagtacttgagggctcctctgagctagcaagtttaaataaagcatatcagagagagttataggtctttcctcaaaatggaaaatgtataaatagattggctaaatacttgggaaaaaatagaaaatatttgcttattgccaacttttaaaaagaacttacgttgaaattttaggctgaaacttacctg

SEQ ID NO: 511766 - DNA, 440 bp, Homo sapiens
aaaaagatgaaatagatacattacttgacctgttttaattaagaggaaattaaagtttctgagggataaattaggaaaaagagataagtaaatagaaaacaaagcaaattcaaaatgagataattattacccccaacaaaagaaaattttaaagctgtgcaaggaaagaaaagtatcgcagggtctaacctagcaaatrgctaacctaggcccacttctagcatttacagaatgggggcaagataaatgaaggcccacttatcgtatgactatatattttgaaaatataaattaaattagcaaagtgttaaataaaatatattctatcctcctaccttagtaaatgacctggaagtccaggacagaatttaaaattctcaagtttttccaagttccacaccagaactttgcagtggaaggggagaaccagccactggccc

SEQ ID NO: 511767 - DNA, 440 bp, Homo sapiens
aaaaagatgaaatagatacattacttgacctgttttaattaagaggaaattaaagtttctgagggataaattaggaaaaagagataagtaaatagaaaacaaagcaaattcaaaatgagataattattacccccaacaaaagaaaattttaaagctgtgcaaggaaagaaaagtatcgcagggtctaacctagcaaatagctaacctaggcccacttctagcatttacagaatgggggcaagataaatgaaggcccacttatcgtatgactatatattttgaaaatataaattaaattagcaaagtgttaaataaaatatattctatcctcctaccttagtaaatgacctggaagtccaggacagmatttaaaattctcaagtttttccaagttccacaccagaactttgcagtggaaggggagaaccagccactggccc

SEQ ID NO: 511768 - DNA, 466 bp, Homo sapiens
ttggtgcaggtaacctcttttgctttatgtctctttatgatcttttatgaatattgatattaacggatcaaaactgcaggttcatgaattcagaactgtgaacttctgctttctattatctgccagccaccagctaccttactggctagtcactttacctctagaactgctcctaccattgtaaatgagtaggctgcactggattatgcttacattttcttccagctctagatttctcaaaatcaaagaaatatcttcactctatctttagttccttcattttataactctaaaggggaaaacratctttcagctttctaagtacatctaaatgcattacctcacttgccccctcaccacactcctgcaaggtaaaacatctcttctgaagtatctctctgcaggtgtaatagacagaacacagaagactggccaggtattgggctatgtaccgtgcattcaagaa

SEQ ID NO: 511769 - DNA, 466 bp, Homo sapiens
ttggtgcaggtaacctcttttgctttatgtctctttatgatcttttatgaatattgatattaacggatcaaaactgcaggttcatgaattcagaactgtgaacttctgctttctattatctgccagccaccagctaccttactggctagtcactttacctctagaactgctcctaccattgtaaatgagtaggctgcactggattatgcttacattttcttccagctctagatttctcaaaatcaaagaaatatcttcactctatctttagttccttcattttataactctaaaggggaaaacgatctttcagctttctaagtacatctaaatgcattaccycacttgccccctcaccacactcctgcaaggtaaaacatctcttctgaagtatctctctgcaggtgtaatagacagaacacagaagactggccaggtattgggctatgtaccgtgcattcaagaa

SEQ ID NO: 511770 - DNA, 608 bp, Homo sapiens
acttccaaactataattgtcatcatagcattacttcagcttctcacatctaaatgcatttctaattccctctctttgtctctcatcccacctccctttctcccaaaggattgccttcctctaatagcagtcttggaattatcatctgctattctctcgtgacatgcacagaatacacaaaatttataatttatgaatggaaacatctccaaagactgaatggaacaccaagggtaatccaggtttcacatctgtaaagcgggttaraaaatctcatccccttctgttcctctggttggtgtgagtgcagcagccagccctgccactctaccaagtgacaactgactttactgatcatttgagtttactgccaaggcaggaaaatccagtcaaagctttcaaaaggtctgagcatccacgaaggatttttggaggagcaagggtatttattatatgacctcacctgtctttaaagtgattgacagtccataaaattgagttgtctccacaagctcattcataatccatgccacatcttttggtaccgtcagataaagttgtcagcacatagtaattcacaagtggctgtctcaaattctttgttggaga

SEQ ID NO: 511771 - DNA, 451 bp, Homo sapiens
ctgaaagcaaactgcttctggtgggctgtattgacaggtatggagaaaaaggcatttgccaggttaatagctgcattccagatactagggagtgtgttaattttctcaagtaatgaacatatgcatttgcattttgatcctacaatcctgcttcgaggtatctattaagatttgtaggcaaaaaacataaaattactgatgcagaaggtaatttactgctgtaccaattgaaacagaaaaatcctctacccagtgttcatgagtagaagactggtgaataaattttgaggtagccacataatgccctactatgtaggtgtagatagaagtgagggggcctctatacactgatatggaaagatcccyaggacacagtaaggtacagaacagtgtgcacagcaggccacctttgatttgaggagtgagggagaaatgagaagtactgatatat

SEQ ID NO: 511772 - DNA, 308 bp, Homo sapiens
tctcagtgagaaaactctgatgttacaaaatgacatgcagtctataacctcccttcttcccagggacttagggtttgacactggaccagtcttaagcagaaaagggctttgccaggagagggatcctgccactgctgtgattgggagagttacttattgtcacgcccaagctcctcttaagtcagaagcttctagttggtcagcrgcttcccctgattccaaatttcccccgtgactaggctacaggaagggtttttattgcaaagctgccaaagtgaaggctttccacacagatgagtttctaacca

SEQ ID NO: 511773 - DNA, 635 bp, Homo sapiens
ttaatgagaacagctcttttattaatgccttatatactgggtttctttgttaaatgcagtagcacaaagagttgtgctcctacaaaattaaacctaaacacagtgactacaaaatgtcagtgagggagatgtttattagattagatgrtcacatccagagtggacatggatctcttttgcctaaattctattctggaactacaatattttaacattaacaacctatatgaaaataattaatatgttttgaaacaaagtagaaggggtgatagttattaagagaaaagctaacataattcagaaatattctacaaatatcaaaaagaataaggctgcatatggaaacttaaatgggaacattacaagggcaggagacattctcaaattaaagatgggtaatgataaagtatggtcaagtgtcatcacaacctaaccatcaaaaagaatcttctgtaaagaatgccttacatttaagcatgatattatgtaatcaaaatataaacactaaaaataaaccaaaattcactaggcatctattatgaattatattaatgataggtaacttggttttttaactttggaaattaaatataagcattaagagattatctaattgggtgataacacactatatt

SEQ ID NO: 511774 - DNA, 635 bp, Homo sapiens
ttaatgagaacagctcttttattaatgccttatatactgggtttctttgttaaatgcagtagcacaaagagttgtgctcctacaaaattaaacctaaacacagtgactacaaaatgtcagtgagggagatgtttattagattagatgatcacatccagagtggacatggatctcttttgcctaaattctattctggaactacaatattttaacattaacaacctatatgaaaataattaatatgttttgaaacaaagtagaaggggtgatagttattaagagaaaagctaacataattcagaaatattctacaaatatcaaaaagaataaggctgcatatggaaacttaaatgggaacattacaagggcaggagacattctcaaattaaagatgggtaatgataaagtatggycaagtgtcatcacaacctaaccatcaaaaagaatcttctgtaaagaatgccttacatttaagcatgatattatgtaatcaaaatataaacactaaaaataaaccaaaattcactaggcatctattatgaattatattaatgataggtaacttggttttttaactttggaaattaaatataagcattaagagattatctaattgggtgataacacactatatt

SEQ ID NO: 511775 - DNA, 567 bp, Homo sapiens
cttttcagttttcatcaaatacaaatgggatttttttttagaaacaggaataatcaatcaacaaatcactaaatgactaacagatatatctggatcatgtgactaagcaaaatgagactggttaaaatcactcatttcacctgtgggtattcattatagttcccattttaaaatgtgaacatgtaagtaaatttcaaaggtcatacatctagtaacgaaacaggaaaagttcccttgtcccctcgccaggcatgcaatgcgggtgtggcttgctacttcagtgccccgctcctcaaacctctaggggagcatacagatgggcaggctgtggggctccgcccccagggctgagtctaggggtgaaagtttacagctcctgaagccccagtggggtgtgttacagagtgctcttttagtttgyggtctataggcgacttatgtcagctcaattagaccctctaccttgtcacaaggacagagggctttctgtatcccagggtttcttgccttggtgtactggaagaattggttcacatgtgggcttgaagaatgagtgcaaggttttac

SEQ ID NO: 511776 - DNA, 643 bp, Homo sapiens
agttccctgtccataaatcagttggattaacagttgttgagttcctatgatgaatttttcatttaaaatatttatacctaagaataagtctaaaaaagacatatgacacccttatgaagactactacaaaatgtttctgaaggatatgctcccagaatctgaataagtaaagaaatacattgtgttcaaaagagagaagagtcagtattcaatgtgtttctatcattgtcctaaaaaatttcatgcagtgtagatcctaaatttcacatggtagaaaaaaggtcaagattgtttacgataatttttaagaaaggtaaagtggagggaattgccctacagatatcaagacctatcaggaatcatagtaaattaggcaatataatacaaatttttttatrgataataaaccaatggaattaaagggacaaaacagagatgcacatatatatttatgttacatatacacacatatgtatgtatatatgagatacatgcctaagaactgtgtgtgtttatactaaaatacatgcccaaggagttcgctgagacatcttttgtaatagagaaacattggaaataagttaaatgttcattcgctagagaatggaatggatacattgtactatgctcacagagtactata

SEQ ID NO: 511777 - DNA, 475 bp, Homo sapiens
attcaatagataacagctatttttttttttttttcctgagactgagtcttgctctgtcgcccaggctggagtgcagtagtgcaatctctactcaccgcaacctccccgtcctgggttcaagcaattctcctgcctcagtctcccgagttgctaggactacaggcgcgtggcaccacacccggctaattttttgtattttttagtggagactgggtttcaccgtgttagccaggatggtctccatctcctgacctcgtgatccgcccgcctcggcctcccaaagtgctgtgattacaggcatgagccactgggcccagccaatatcagctattataatgagccaacaaacattaatygcaaatctagccaacatctcgcctttccaaattttgggactttttgttgaactctgattttgaaggaaatttttaaagtctttgctaaattaaaatctatttttagaaacactatatgg

SEQ ID NO: 511778 - DNA, 595 bp, Homo sapiens
tttacattaggtatttctcctaatgctatccctccccctgccccccaccccatgacaggcccgagtgtgtgatgttccctgccctgtgtccaagtgttctcactgttcaattcccatctgtgagtragaacatgcagtgtttggttttctgtccttgcaacagtttgctcagaatgatggtttccagcttcatccatgtccctgcaaaggacatgaactcatccttttttatggctgcatagtattggtacatgtatacatatgcaacaaacctgcacgttgtgcacatgtaccctagaacttaaagtataattaaaaaaaaaaaaaaaaagaatcttcatcttgaacaccgtctttttaaactataccttaccgctattgttcaatccattcgtcttagggaatgaaagaaaagtgtatttttttcttactctttaaatacctttcaaagcagttaaacaaagatctagaacgtatagaggatttttttctcagatggaatcaatcatttttcactcaaaaagttacacttgctagagtgagaaaattatgcaaaagacctatagtgtagacaagggtgtcaggaaaacctcac

SEQ ID NO: 511779 - DNA, 506 bp, Homo sapiens
cgactgcaaggcaggcactgcgtctgttgcaggccagtggattctcctgagagtctgaggacttcccactcactccccaccccacatccttcccttcagcagaacagaccccagaaagagaagagcatctgagaaaccccattcacgagagggcaaccccgggaaccaccagaccaccagggyttcagaccattcacgagacgtcaaccccgggaaccaccagaccaccagggcttcagaaaggccaggaggttcacagaagtgttctcttgcgtggccgtgtctcaatttgaactcacttctttgagccaggtagaaacttactcattgaacccgtattttcctgtgctgggctgaacggtgaaagaaaaatatggtctccattttatccccaagagagctcagtatacagtagatactaaaaacatttactaaacgacaggtgaccagcgtgaggcaggccccacctttgttcatctgaggagtggtttcaaggcctctgagca

SEQ ID NO: 511780 - DNA, 506 bp, Homo sapiens
cgactgcaaggcaggcactgcgtctgttgcaggccagtggattctcctgagagtctgaggacttcccactcactccccaccccacatccttcccttcagcagaacagaccccagaaagagaagagcatctgagaaaccccattcacgagagggcaaccccgggaaccaccagaccaccagggctycagaccattcacgagacgtcaaccccgggaaccaccagaccaccagggcttcagaaaggccaggaggttcacagaagtgttctcttgcgtggccgtgtctcaatttgaactcacttctttgagccaggtagaaacttactcattgaacccgtattttcctgtgctgggctgaacggtgaaagaaaaatatggtctccattttatccccaagagagctcagtatacagtagatactaaaaacatttactaaacgacaggtgaccagcgtgaggcaggccccacctttgttcatctgaggagtggtttcaaggcctctgagca

SEQ ID NO: 511781 - DNA, 506 bp, Homo sapiens
cgactgcaaggcaggcactgcgtctgttgcaggccagtggattctcctgagagtctgaggacttcccactcactccccaccccacatccttcccttcagcagaacagaccccagaaagagaagagcatctgagaaaccccattcacgagagggcaaccccgggaaccaccagaccaccagggcttcagaccattcacgagasgtcaaccccgggaaccaccagaccaccagggcttcagaaaggccaggaggttcacagaagtgttctcttgcgtggccgtgtctcaatttgaactcacttctttgagccaggtagaaacttactcattgaacccgtattttcctgtgctgggctgaacggtgaaagaaaaatatggtctccattttatccccaagagagctcagtatacagtagatactaaaaacatttactaaacgacaggtgaccagcgtgaggcaggccccacctttgttcatctgaggagtggtttcaaggcctctgagca

SEQ ID NO: 511782 - DNA, 506 bp, Homo sapiens
cgactgcaaggcaggcactgcgtctgttgcaggccagtggattctcctgagagtctgaggacttcccactcactccccaccccacatccttcccttcagcagaacagaccccagaaagagaagagcatctgagaaaccccattcacgagagggcaaccccgggaaccaccagaccaccagggcttcagaccattcacgagacgkcaaccccgggaaccaccagaccaccagggcttcagaaaggccaggaggttcacagaagtgttctcttgcgtggccgtgtctcaatttgaactcacttctttgagccaggtagaaacttactcattgaacccgtattttcctgtgctgggctgaacggtgaaagaaaaatatggtctccattttatccccaagagagctcagtatacagtagatactaaaaacatttactaaacgacaggtgaccagcgtgaggcaggccccacctttgttcatctgaggagtggtttcaaggcctctgagca

SEQ ID NO: 511783 - DNA, 490 bp, Homo sapiens
cacatgatgaggaggtttgtccagaacatactgaatcagggcccaggcagtcaggcaggccaaaaggattttggatttttgttttagacagaaaaagactttyataccttctagagtcattcatgctctgatttgtttaaacgtatggtaaatttagatagacctcttaggtatcaagaaaattttatgtttgtaatatcttttaacctggaaggtaagacataatcgtgttaatggtgatgagttatccttcagtatagaagttgaataatgaaaataggtttatattgccagagccctgtgactccagaaatatcattcatatacagttttggtttctgaattagagaaggaggactgaggacttttgtagtttggggtcagggtggagacaggcatgtgagggaaggcaagttctaccctgttcggagtgcctgccctctgtcctccttacccagccaacactgttgggtccattttaactggaaaa

SEQ ID NO: 511784 - DNA, 490 bp, Homo sapiens
cacatgatgaggaggtttgtccagaacatactgaatcagggcccaggcagtcaggcaggccaaaaggattttggatttttgttttagacagaaaaagactttcataccttctagagtcattcatgctctgatttgtttaaacgtatggtaaatttagatagacctcttaggtatcaagaaaattttatgtttgtaatatcttttaacctggaaggtaagacatratcgtgttaatggtgatgagttatccttcagtatagaagttgaataatgaaaataggtttatattgccagagccctgtgactccagaaatatcattcatatacagttttggtttctgaattagagaaggaggactgaggacttttgtagtttggggtcagggtggagacaggcatgtgagggaaggcaagttctaccctgttcggagtgcctgccctctgtcctccttacccagccaacactgttgggtccattttaactggaaaa

SEQ ID NO: 511785 - DNA, 274 bp, Homo sapiens
ccgccatgaagacgactgggcaccccaggcgtctgaccaggctggtaggtaggtgtgggcagagggcgtgtctcgggaccgtggctacctccaccccggygcaagctctcaggcatgcacagccaccttcctgagtgaccggagcgtgaaggcgacgccttcctgtttctctcccttccccagagtgcagttggacaggctccatccgagagaaggaccctggaaacctttggaagaggcaccttcagcagttcccacccttcctcgccagaga

SEQ ID NO: 511786 - DNA, 661 bp, Homo sapiens
gcatctggatatttgaatagaccaattaaaaatacaagtatcttggcaacttcattgctacatcttagtgtttaaattacagcagtattagagatataaaccaaacataccttatctaacatcccccaaaactcatcaattctaattctagttagaaagtcttcaagactcctgtctaaagctttgatttgtaataaataggattaactaagtttgtgcatttatgaatagaatctttaacagtttttaagaactctgcaaaggatagcattggttattaacttgataatttcattaaatttttttcttgagacagggtctcactctgtcgcccaggctggagtgcagtggtgtgtgtgatctcggctcaccgtagcctccgcctctggggctcaagcgctyctccgggctcggcctttcaaagtgctgggactacacgcgtgtgaggcactgtgcctggccaacttgataatttcaatagcaaaacggtatcctatagaaggcttgtttcttagttggtataagttgctaagtaatcattaattcaactcgataaacctggtgggttttgtgtttcgttcgtgtcatttgtgaagcccgacaggaagagtggagccctgcgctgtgtgcgtgcgttttaaagcgtgctggaaacgtctac

SEQ ID NO: 511787 - DNA, 612 bp, Homo sapiens
agtctctcttgcccaaaactttgttctctgggacctggtgagagggtgactccgtgagtgcagaatgcagtgcagacgttattgaagaggcctcacatttttcatttccagactacacctagctcgtaagaagccagggaatataataaattctcccctgcaggacatggttttaattaattattgggttattcaaggtgactcatgtgtgaaatgcaatgtgcactcgtaaactgaatctcacataatccattctaagtaactggctgcgagctatcctctccagagacttacacaaaacttatatttatcctttgagggtcttggggcaaaatgtaagggtgacttcagtttaaagagagctcacttggctggctaggggtactaagaaactgggtcttgttttctcaactgctgatttgatgaggtttatttcttagaacatctggtgtttttatatgtatagtatatatataagayatatgtatacgtgtatacacacatatacatttatatattttagtcatttgttttgcagtatctgcaaaggatatgtgaagccagctcattgcagaatagaaattgatgctgagtttttctacagctaacctg

SEQ ID NO: 511788 - DNA, 595 bp, Homo sapiens
gcaaaagctctgggccttaaaaaaataaaaacgggccaggcatagtggctcatggctgtaatcccagcactttgggaggctgaagtgggcagataacttgaggccaagagtttgagatcagcctggccaacatagtgaaaactgtctctactaaaaatacaacaattagctgggcatggtggctcacacctgtaattccagctactcaagaggctgaagcacaagaattgctcgaacctgggaggtggaggttgcagtgagctgagattatgccattgcastccagcctatgtgacagagtgagactctgtgacaaataataataataataataattgcacctttttctctgggcccctggcttccttattccctttcctgcaccctctcagaagctctgccttgccaagtgtgggatcaatgccacagcaggcatgtgtgcgcacaggggctctgggtccagtacagaagcaggctggggaccacatgctcacatcttcagccaaccactgatattgccaagtcattggtcttggggtgggcacagtaatccacaaaaacactcaggactcacctaactctcttctccccacag

SEQ ID NO: 511789 - DNA, 520 bp, Homo sapiens
gcccaggctggtctcgaactcctgggttcaagtgatccaccaacctcagccttctaaagtgctaggattacaggcatgagccactgcacccggcccccttattgccttttgtctccaaatcttttctgtgcagctttgagagcagctctgagaaatttggatgggtgggagaggaggcgtgggggagactgttcctggagctctctcagggatgagccagtttttctgcctccttagagcttctctacccatgkggtcttccaggggacattcctggctgaattattcaaactgtcagtgaactttctgtgtcatacagggctgggtgtgcttaggcacagtaaaggggagatctaagcaaatgatatgaacggtcaggtcaagaattggccacacaattgaacgaagtacatttttagcatgttggtagatatcccattgaaaatgcttggcatggaagcatgggaattgaggaaactggttagagatccccctacggagtgaagttgaaggataattt

SEQ ID NO: 511790 - DNA, 520 bp, Homo sapiens
gcccaggctggtctcgaactcctgggttcaagtgatccaccaacctcagccttctaaagtgctaggattacaggcatgagccactgcacccggcccccttattgccttttgtctccaaatcttttctgtgcagctttgagagcagctctgagaaatttggatgggtgggagaggaggcgtgggggagactgttcctggagctctctcagggatgagccagtttttctgcctccttagagcttctctacccatgtggtcttccaggggacattcctggctgaattattcaaactgtcagtgaactttctgtgtcatacagggctgggtgtgcttaggcacagtaaaggggagatctaagcaaatgatatgaacggtcaggtcaagaattggccacacaattgaacgaagtacatttttagcatgttggtagatatcccattgaaaatgcttggcatgkaagcatgggaattgaggaaactggttagagatccccctacggagtgaagttgaaggataattt

SEQ ID NO: 511791 - DNA, 284 bp, Homo sapiens
ccttgggtgggggatgcagatagagattgtgggggcaggggtgctctctgccctggaattggaatcccccacacsagtctaccggtagattctgcttcctttgcccctttatcctccacccccatctgcatggtttttctagcctcgggaatcacctgccctgggagtgcaggccaagctttggacgagggaaagcacagactgacgccgaccagcccatcctccccggccttgcactgcccgagatccgtgcaggtcaagcgggcaaggtgggacgctctcag

SEQ ID NO: 511792 - DNA, 388 bp, Homo sapiens
tgccaggaggaggagcctgatttggagggataatgggaaaggagggttgtggggagacagttatcctgagtacccctcactaagaaagctccaggctgggcgcagtggctcatgcatgtaatcccagcactttgggaggttgaggcaggcagatcacccaaggtcaggagwtcaagaccagcttggcaaacatggcgaaaccccgtctctactaaaaatacaaaaattagccaggcatggtggcgggcatggtagctagtagtcctagctactcaggaagctgagacaggagaatcgcttgaacctgggaggcagaggttgcagtgagctgagatcgcgccactgcactccagcctgggcaacagagtgagactccgtctaaaaaaaa

SEQ ID NO: 511793 - DNA, 542 bp, Homo sapiens
agggttgatatgggtggatagagaatttttsttgtagctgaaattacattgtaaaacaaagcaaaccaaacacaaaaccacagattttgtgcttatttgtggtggattttgcaggggtgaggaagacaaaaaagacaaaaggcattcctaggcattgcataccttccattaacagccatcatctttgggaatggtttcttaagaaactatggaacttgacatgtatcattcaaggaagaatctagggagcaataatatgttttcttctttttaatacactatcttagtttttgttgttgttgcttataacagaaagcctgtaactgggtactttatcaagaaaaagaatctatttattacactttggaggctgagaagtccagggtcaaggggttgcatctagtgagagccttcttgctcgtgggggctccgtagggtcctgaggtgacacaggccatcacatggcaaggaggctgagcatgctaatgtgctagctcagatctctctttctcttcatttaatgccagcagttccactcccat

SEQ ID NO: 511794 - DNA, 510 bp, Homo sapiens
tggcctttacttagagactttttgtttggttgccttgtcagttttggttatcaattggttgtgataatgtataatagcacttcttccaaaagtttccaggtcagtgttcaatgtcaatgtatgttactgatttaacaacatatagaatcctgttacagtcaattaaaaagtactctccaagaatatttttgggtctttaccgcaaatacaaactgtgatgattaattttatgggtcaacttgactgaaccacaggctgtccagatatttggtcaaacattattctgggtatttccatgaagtygtttttgaatgtggttaacatttaaattgatagactgagtaaagcagattgtcctccctagggtgcgtgggccccatccaatcagatcaaggcctaaggagagcaaaaaagctgattctccaccatgcaagagagaattcctcctgcctgttgcctttgtactggttcttcagcttttttctaccttttgaattgaactgaaacatc

SEQ ID NO: 511795 - DNA, 510 bp, Homo sapiens
tggcctttacttagagactttttgtttggttgccttgtcagttttggttatcaattggttgtgataatgtataatagcacttcttccaaaagtttccaggtcagtgttcaatgtcaatgtatgttactgatttaacaacatatagaatcctgttacagtcaattaaaaagtactctccaagaatatttttgggtctttaccgcaaatacaaactgtgatgattaattttatgggtcaacttgactgaaccacaggctgtccagatatttggtcaaacattattctgggtatttccatgaagttgtttttgaatgtggttaacatttaaattgatagaytgagtaaagcagattgtcctccctagggtgcgtgggccccatccaatcagatcaaggcctaaggagagcaaaaaagctgattctccaccatgcaagagagaattcctcctgcctgttgcctttgtactggttcttcagcttttttctaccttttgaattgaactgaaacatc

SEQ ID NO: 511796 - DNA, 618 bp, Homo sapiens
aacctgacaccacttttgattatggtcagacatttttttccctgggaattcatccagagctctcatccagaattctacaggaaatccattttctccacttatagtactgaggcagaagcagtggcatcacatttgactcatccacatggctgaatatcattttaaattggtctgtctgtttggtgacaattcataaaccccggggatgtkgtcctttaaaatgaacttctttggtcagggacctcaggatcctctagtctgaagcaatactcttcctctccaaggaggaaatgtgccaccccaataagagaattctatttacccgattataatgtatacatgtttggaacccacgtggttgtactcaatagacataggtggacctctggagtcaggagacaacttacacaaacattactgggtcaagccctttgcttactggaaggcatggacacttccagttacattatcatgcaccttcttcaacacttactttatctttttgcttgacagagactcagaagtgtgaagagatccccgaggctctgtttttttctttatataaattgaatagaggcattgaaaaaagaaacctatgagaacagaggtgaagaggca

SEQ ID NO: 511797 - DNA, 568 bp, Homo sapiens
agtaggtatataaatagaacacacaaacatacaaacttagaattttcrttcatattcgttttaaatagtcacccggttttaagttatgtttctttctatacaatgttttgtggaatatttgtcttttcatactacttattttctatttttcacaatttttttcttttctcagtgatgatataaaatttataaactaactcagaatctgggatcatgtaaagtcaagcctaaggaggttagcaatggaggtcggaaggttactttgtatgtaaataataacagctatttggggggtattttcttgtggtaatgtttccaacttaaagaatccttgaaacttttcactttcttagtgtttacttcaacattcaaagttttttttcctttggatttgtaagacgtaacaaacatacttacatgcaggtggagttcaatataaaaaccaagaaacaatgtgacccctatcttcagaaaactaggaagaaacactagtatgtggttggttctagtgactggatataagtgctttactaaaatctgtcatctccagggtagatttcacctgcag

SEQ ID NO: 511798 - DNA, 631 bp, Homo sapiens
atatggtgaaaccccgtccctactaaaaatacaaaattagccaggtctggtggcacatgcctgtaatctcagctacttggggggctgaggcttgaacccaggaggcagaggttgyagtgagctgagatcgtgccactgcactccagcctgggcaacaagagtgaaactccgcctcaaaaagataaaagtgagagtatattagagatcatattgttcaatattctcattagataaattgagaaatatgaaaatgttacggatatgtttattctagacttatttaagaaagacacattaaaatataatttagaaaacactaaccttcatattcctcttcattctcaagataatcatcatccagcacattcagcagtcttagcactggagtgggaagcatgaccagatcttcaatatgaggggctgttaaaattcatcataatatggttaaatgtaaatccccccaaataagttgaacaccagataaaggaacttgtgaatataaattagtgctgatgtcttgtatgactgtcaaatgaccaagaaaaaaataaaagaatacacaacttaccaaaaggaatgctaaagaatgggctgcacaatgccatttcagcaggaattcttctgcttggat

SEQ ID NO: 511799 - DNA, 581 bp, Homo sapiens
ctccagaagtgagaaaccaattttctctttaagccacccagtctggggctctttgttatggcagccctcacaaactaatgcagaaggcatgagatttaaattagttgggcaagaatttaaaccagactgaactccaataactcagcatgtctagaaaacttacgagatctgcccagtaaaagagaggaaaggggagttagagaaagcacattcaaaatcaataattgccataaaggagtttgaattttcaatcttatgctgcgtttagactgctcacccccacaccaagcccagctccctcctccaacttgaagcaaatgctgctttctttaaggctgatgggaaagctggatctgctattttctaccagcacttttgtgagaaggcacagatgcccacctggsgtggcttcaggtgttggaaggtacaaggctaggggcagcagactgtcaatactgccccaatattcagagtgtttgggagtttccctgcttttccttttggctgctttgagagttgtcacctggtactggggcacttgagtctttggactagtggtctgcaggcatgtgaggaagcag

SEQ ID NO: 511800 - DNA, 581 bp, Homo sapiens
ctccagaagtgagaaaccaattttctctttaagccacccagtctggggctctttgttatggcagccctcacaaactaatgcagaaggcatgagatttaaattagttgggcaagaatttaaaccagactgaactccaataactcagcatgtctagaaaacttacgagatctgcccagtaaaagagaggaaaggggagttagagaaagcacattcaaaatcaataattgccataaaggagtttgaattttcaatcttatgctgcgtttagactgctcacccccacaccaagcccagctccctcctccaacttgaagcaaatgctgctttctttaaggctgatgggaaagctggatctgctattttctaccagcacttttgtgagaaggcacagatgcccacctggcstggcttcaggtgttggaaggtacaaggctaggggcagcagactgtcaatactgccccaatattcagagtgtttgggagtttccctgcttttccttttggctgctttgagagttgtcacctggtactggggcacttgagtctttggactagtggtctgcaggcatgtgaggaagcag

SEQ ID NO: 511801 - DNA, 626 bp, Homo sapiens
gctgacaccttgctctgccagtcattagctttagcaattatataacactgagcagggactttgcactctgagataaacaccccgcaccccaatcactttgtgtagtaccagtcctggaacaagattaaacctgaattccttcttgtaaattacactttctccttgactttcatggtgctgatgactacagatgtgggatagcctttgtggatacaatcctggggggaraaacactgtgtttactttttgtttcatcgtcacctaggctggagtgctgtggtgtgatcttggctcactacatcctcgacctcctgggctcaagtgatcttcctgcctcagcctcccaagtagctgggactataggcctgagacactgtgcttggccaaaaccactgtttttcaccatgatcagacctttgtaaccttgtgtgtgtgtgtttctttccatatattatttcatgagccaaactttctgaagtcttaattcctttgcaagcgatctcattttctcagtgttttgaactcagttttcctttgtcacgttttgctttattttgactctaaagtcaaaatgtaacatagctttgcaagtcaatttgtatcaatgaagattcctctttgctaca

SEQ ID NO: 511802 - DNA, 626 bp, Homo sapiens
gctgacaccttgctctgccagtcattagctttagcaattatataacactgagcagggactttgcactctgagataaacaccccgcaccccaatcactttgtgtagtaccagtcctggaacaagattaaacctgaattccttcttgtaaattacactttctccttgactttcatggtgctgatgactacagatgtgggatagcctttgtggatacaatcctggggggaaaaacactgtgtttactttttgtttcatcgtcacctaggctggagtgctgtggtgtgatcttggctcactacatcctcgacctcctgggctcaagtgatcttcctgcctcagcctcccaagtagctgggactataggcctgagacactgtgcttggccaaaaccactgtttttcaccatgatcagacctttgtaacmttgtgtgtgtgtgtttctttccatatattatttcatgagccaaactttctgaagtcttaattcctttgcaagcgatctcattttctcagtgttttgaactcagttttcctttgtcacgttttgctttattttgactctaaagtcaaaatgtaacatagctttgcaagtcaatttgtatcaatgaagattcctctttgctaca

SEQ ID NO: 511803 - DNA, 486 bp, Homo sapiens
ctgggtggatggtaaagttggactttggaatcaggactttttacttcaaactaagattgtcagataaaatatagaattcccagccaggtttwttattattattattattattattattattattattattattattattattctttgagatggagtttcactcttgtcatccaggctggagtgcaatggagtaatttcagctaactgcaacctccacctcctgggttcaagtgattcttctgcttcagcctcccaagtagctgagattacaggtacccacaaccatgtctggataatttttggatttttattttattattttattttattttgtgacggagtctcagagtctcgctctgttgcccaggctggagtgcagtggcgtgatctcagctcactgcaacctctgcctccccgattcaagtgattctcctgcctcagcctcctgagtagctgggattgcaggtgcagaccaccatgcctagc

SEQ ID NO: 511804 - DNA, 571 bp, Homo sapiens
  misc_feature (1)...(571): n = A,T,C or G
agccgctgcactccagcctgggcgacagagctagactctgtctcaaaaaaaaaaaaaaaaatcttccaggctgggtggagctgcacgcctgtaattccagctctttgggaggccaaggcaggtggagcatctgaggtcaggagttaaaagaccagactggccagtatagtgaaaccccatctccactaaaaacacaaaaattagccaggtgcacgcccgtaatcaagaaaataatcttccaggcagagcctgcggcatcatactgcccaagagcaaagagactgtgacattttgaggatctcaggctgcagatgaggcttggctgacagaattctctaatggccaaacctgagaggaaaagctgagacgtctcagagtagctcataaaatacagggcactctaagccctttttcttgtaccttgtccctgaatcctcacaagcctaggagaggcacggcatttatgagcactgccatgctagaacgsgtggccaaatcagccagcatcaaaatcacaaaggatcatgtcacagggnnnnnnnnnnnnnnnnnnnnnnnnnnnnnnnnnnnn

SEQ ID NO: 511805 - DNA, 484 bp, Homo sapiens
ctgaagaaccagccatggccatggggtctgcccaaacratggctgggagcttgctaggccacaattggggtttccctgactttgtcagtttttatttcccatcatgccaactatgtttcaaatttcacaaaaagaagaaaaaaaatcaatgtttttttttcttgcaaagaacttatattttcaacttgaagatggaaaaatcaaagtcagagtccacaagtttctgaggagctcttgacctacttttggggaaaccagttcttgttggaaccacaaaccagggcacggctttcaatggcttcatgcaatgtgctgtcagaagcatatgggaagctgggcactggggggccccatcagaaaacccatgcatgagcgatgatgacctgatgcttggctgggttttatccccacaaagtgtccagattgacactgtagatctcatgtggaacctgccaggtcaccttccctttagccctgtccccgt

SEQ ID NO: 511806 - DNA, 344 bp, Homo sapiens
gctgaaacatctaggagcgactgcaattaaataatattgtgaattttagcaaactgatcttagatttttgccataagaccaataaataaacctgggcttttacaaggattgccttctagacgatgtgtgtgtacacgtgtttgtgacgtaagatgtttctctccttgttttgtgcagacggcggagactggctgagtggaaagcaactaaactgaagaataaattyggagaagttttggagatctcagggaaggattatgttcaagaagttaccaaagctggcgagggcttgtgggtcatcttgcacctttacaaacaagggtgagctgatcttccactccatc

SEQ ID NO: 511807 - DNA, 592 bp, Homo sapiens
cccactccatgcaggcacagagttccccatacgggttaccaggttgtgagaaagaaactcacccatccaatcccaaagaatggactcagagacccagagaacagctaaagtgaaacttttaatgatggtcttgcaagacagsttgtctgatgggcaggcacacctagcacagttacaacaagcaatttatcccctagtgcacaggtccctctcccggactcttcataggctaagtactatggggtcacaatcttcccagacatcacctatcacttgttgggttggggctttaggtgttgtcttgcagcattttgttgcagcctacaatgcattgcaatcctagtcagctcaggggctctttaagtatttgacttatgacctaagtagttgggcaggctgataagaacagacaaagtgagctattttgcaggctagtaaactttcatcttagactaaacttctttggtttgggtgagggcaactaaacagggggcaggggctacaagcagatgttggctatccaagcaggggcctagtatatcctgtgttttctgtagtttgctgacctaagacaatttaaggcactttatct

SEQ ID NO: 511808 - DNA, 623 bp, Homo sapiens
ccaagcaggggcctagtatatcctgtgttttctgtagtttgctgacctaagacaatttaaggcactttatcttggaaatggaccactgtatacattatttccttcgtatctccagctccagtcagagctaaagtgagcttgggtgagccaggaggatcagtgggctggccaggccatgggaacagaatacaagttaactggccacaaatttcatcagtggaccctagaccaagaacttggtcagttcagtcccccttacagtagggggcagcaaaaatccaaaatccagcagaggaatcccaggctttcytttgcgtgtgacccctagggcctggggttcctgtcctgaacccagatgccatcagtacaggacaaggggaaaggggataaaaaatgctaagcaggaggtaaaagttatgttgattgagttatttcctaaaatgagattttcttaaaccagaagagacagaaatatagacatctaatcagaaattttatctccacctcaggtgggtcagttgctcaagaaacaacattatatccattcagactaaagaagttgcttgttctttatacatttccatttagcgcatgaattttgctatcctaaaaagcctgatctc

SEQ ID NO: 511809 - DNA, 511 bp, Homo sapiens
atatccccagtcacattttcagtgcctgggatagaatgattagaagagayaggtgccagttggtcacctctccctccacctggccttttcatatagctagcatggatttgctaacagcctggggatctccagacagaggcttctttcatagaagggagaagctgcagtgactcctcttatttagtcacataagtcacacagcattaattttataatattttactgatcttaacagtctttggcccctccacattcagggagttttgagaaataaactccatctctgagtggcagaatggctagcttcgggaggggtggagaggattgacagtggttatcttggaaacaatctagcacatccctctgatcatcatctggtttgaatgaaaaacaatagttttttcatatctcagcctccagtcaggggtgctgaccagatggaataattagtgggctgctaaccagaacacatgttctaaggaagaatgtataaggctgattctctcatcca

SEQ ID NO: 511810 - DNA, 594 bp, Homo sapiens
ggactccatcctgtgtcctgggtttttggaaagaggcttgtccacataaaaaagatacggtgatgggagctgggagtttaaagtgattaaaaagcctcatcaaatgacaaagagaaggaaagctgatagaacttcttttcacaggcaatgtacagggcttatctgcacgaagacctgaggttccgtaggagaagaacagttccactgactccctgatgctggttactgacgcgcctgccaagcggggctcagcggtctgtccttatcaagctcattttagttaatgtggaccactgcctcattctttcacctgctctgtagatcctttgtgtagtttcagttgggagataacaagctggatcatagattatttatttatttatttggatcaagatctccatggatttcatcattagaacttaagagcaaagcatttcattttgttgtttctcagttctccatggagtgcttctccaaggaaattggcatatgaaatctaactgggtacacagagtgggtgtgaggacccaggaggaggggtagcagaggcagayggttaatacaaaatatcttaccacactgatgtacatggtt

SEQ ID NO: 511811 - DNA, 610 bp, Homo sapiens
atgagaattcctatgtctttgcatcttcactaatacttggtattttcaactgttctaagaagtcagccattgtagtttgcatattatgatatctcatgggattttaatttttatcacactgataaccaaaaaagtcaaatcccttttaatatatttatttccaattttaatactttcttacatgcaatgcctggtccagtgttcagatctctctttatttttcttctttttttgttatagcctttttgctgctggtttattaaattttaaaaaatatattctgtatataaactayttgacaattgaagaaaaatgttaacggtttgttctgtggctttttttttttagcctgagggatgcctgaagatgggatctttggtcaaatgctccttgcaacacaaatactcaagaaattggctagagcatatttatttcagatccaagatagcagggcaccccactgaggacaatgtttgaagataagccattaagcaactagaaatgacctcccccgcaaagccctacattgcttagctttatgggattttaaaattgtctcttgtaaattatttctatagtctaagttgctgatcttttggtagcagatcag

SEQ ID NO: 511812 - DNA, 654 bp, Homo sapiens
cctatactcaaaactccaattgtatatccagccccatcttctttttggagtgggactcccatgtctytcaatgatcactagacatttccaactaaatgagattttgacggttcatactcaatgaccttgggaaagtgccctaaaatccagcaccatttcctcttccatattttgagaaatagtgtgcctttgtttctcaagttaccaagacttaaatatttttccaccgttttacttctcgatctgaactcttggtttactttattatcataaatatgaagagtgatttctagctagagtaatagctactgatgacagatacatttatcactgtggaaaaaacacctacgtcagctctttctgaattctgacgcacagatcaaagcttggtaagtcttggtagtctgaacaagcgccttctggagaagtttaaatgtaaaacaaagatttccaagtgccatcatgggttaataattttgaatcagaaattgtgagaatgatgcccaagaatcagcatttttaataaataagccttgggccaaatttgcaagccactgacttagatcatcatacaataagatattttaatgccacttggttaagtctggaataatttaatccttcttttatacttaagggactaaatcaaaaggc

SEQ ID NO: 511813 - DNA, 613 bp, Homo sapiens
aggatggcccgagtttataaaacagaacatagatgaatctggccaacaagtagaagatgacaaagaagcttgtcatctacctcactgtttgtgaagaagcaatttctcatgagaaactttaactccctgtctgccgttgtgcatggaagtgagatctggatttgctctataccagccaaagctaagaatataatatagatatgagtccaagattcacaaaaccctgggactctagcaaaagcaacttaaaactactctacagggacatttacacaatccagggcacatggcactcaaagagtaaacaactccaaccaaaaatgacttctaacaaaaattacattcccctcgaggaagtaagtcacaataagagagagtcagaagatgcaaaagatgagaaaaatggtgccccaaggacaataaacaataaaactgatatttcacatttttgagattcaacgacattgaatcacatagatacgactaggactttcattgaagaaaaacttgctgtgaagttgaagatgaagttactgtgatacataacatgccycagtgatttcacaaggcttggcttatcagaggtttgtttgattcaagggaaattgagaag

SEQ ID NO: 511814 - DNA, 574 bp, Homo sapiens
ggtaagacaaaacttgttataaayaaactaaatgaaaagaatcaaatgcgtaaaataataaactattcattactaaaaataattatattatgctcagagaaaaacaatattttctttaaaagagttaaggcaaagtgaaaagaaattcattattgtgaggtttctttaatgctcattagtttcatttcttgaatgatgtttaaacaaagtccctctggcatggcaaccgttgccagatagggcttagcttcctaaggagttcattgagataagaggctgcttttaatcaacaagctaaaggaaccagatgtagccagtaggctgagcacacaatatttggtcccacaagtcaacagccagacaaaataaacaaaaaccaaagcggccatggtgcagatctctgtccatatgcaaagctgagaaaaatgctggctttcaaatggggagctgctggcaccgtggtagtttcttagatgtccctcaggcctgatttgatgattttcctccaatagtgtgacccccttagcttattttggtataaagtcagctaaataagactacaggaaaatagtat

SEQ ID NO: 511815 - DNA, 565 bp, Homo sapiens
aggagttcaaaacctggtgctgatcctggtaaatgacttatcctttctgtgcttcaatttcctcacaattaagttagaataatagtgcaactaattcctcaaaagagaaattatatagtgaacttactgagttcaataccctttgccaataatgcgagtgtaatattttaaaaatacctcctgatttagtttccctcattgtttagcagacctctttccccatctttacctccatggaggcttagcagtgtggctgsgtttgggagggaacacatgccataaaggcactgggaagcccagaggctctgcttctgaccagaggaagtcgtaggtaaacaggaaggggcggtgaaagcaaagacatctcttccaggtctcgcaggtcatgggataaggcagacaggagaggcccaccgtgtggcagatgtattcctcaaaatatatgccctttctgggtattggcccagaagagtggatatgttagggcagggacgcttgcttcagcttatatttaagggttaggaaggagactgccttacaggatgccctgttgccaacctgagag

SEQ ID NO: 511816 - DNA, 608 bp, Homo sapiens
attatccttagcaaactaacactggaacagaaaaccaaatgttgcatgttctcttataagtgggagctaaatgatgagaatatatggatacacagaggagaacaacaagtactgggtgtgtcagagggtggagggtgggtggagggagagatcaggaaaaataataatatctgggtgatgaaataatctgcataacaaatccccgtaacacacatttacctatgtaacaaacctgcacatgtacactgaacttaaaagttaaaaaaaaaaacctaggtgtgaccactgaggtttgtgtaagtactctctattgcacgacaacaaaactgcccagagatgcatttctgagaatgtatctccatcaagtgacaacctaactgtattagaagattcaatattgctgagatgttaactctaatttcagttgaaatccccacaaaacatcattaaggtcattctaaaacatacatgaaaaagcaaaygaactaaaatagctaaaacactttaggaaaataacaccgttggaggactctacctaatttcacgatttattataaagctacaataatcatagtctgtggaaaggctactgtgttgttgaacttgcc

SEQ ID NO: 511817 - DNA, 583 bp, Homo sapiens
ccaggccaatgcaaacttcgctcctaaatggctttcaccggcagccaacgccaaagcgccttaaatcagggccctgaggtccagggagtgagactggactccgtcaggacagggagagggcgccagggagtggtgactgtccttatctgagccgaagcctcgcgascctccgaccacccctcaccaagccaggggcccggcagcctcaccttacagtccatctggtgccctgaggctccgtactgcagcaggcgagcgggtttccgtggaactaacacagcattttaaaccaacccgctccccggcgcagtagctccggtacgcaggcgcacccgtggcagggcatgtcgggaactgtagttttcccggcccaggaggccctcagcctgggcgggacccaggccggcatccggcggcgctcagggaatgcgtagcgccgtgaaccgaatggcggcaggctccactgtgctcgcgagcggggcacgccgggatatgtagtttccggcgcctgcctccggggggtcctgtgctgcccacttcacagtgacttgtctccgcctggtgaactcgcggtgttctgcta

SEQ ID NO: 511818 - DNA, 600 bp, Homo sapiens
tttaaaataaccattttaattaaatacaaggtgcaggcagctaatcattaaaagtggaattggtaacttgagatttatcatcctgaaaccacttgtaccacatttctaatgagttctttcctctacttaaatgaaggactaaatttatttccccaacgtggcagctagtaaaagataactctttctcaggtcatggttgtcagtttgatgttgaatcagagtaaagaaatctgttttggtatactcgctttgatccgaaacagtatttactatttgctaatccatttccaactgacagtactgtagttctacagacacctaaraaaagccctagtaactgaaacagcatttactactgcaacagaaaatagttacattttgtaaaggaaattgatcctttttatagaggagactccaaggaataaaatctaaataattttgtgattaaatttttaaaaaattacattacaacttcaagattgaggaataacactcaaaaaatcattttataaattatggatatatatactctatatttacatttgtaacaatatacatatgtacatacatatataaatttgtattttttaaaaaaaatca

SEQ ID NO: 511819 - DNA, 525 bp, Homo sapiens
tgtctggctgcagcacagcactccttcccttcctctctggccatgtcttgcttcctgggtaatggatatccctggaccctcatcgctctcctttctgggaggacctggtccatggctgctgttcatgagaggtgtagataatacaccatgttaccacagtgtgtgctacctttgcagtcttagagcgtactgactgccytccctttctcactccccagtcttctttatgtcaaatagcaattctgccttaatttaatatttatttatttattgcctactatatgcaagcattgtgttagctatgaaggctacaacaagggacagtgcagacatagtctttgccttcatggtgcttaccttttaggagaaactgcagaaaacataaacaaaaatcccaacttagctggacttatataatggtcaaatggacataatataatgatttctctctcaacatgccatgtcattcttcaaaccagaattactgtaagctcctcaagggcagggacccagaaacgatggact

SEQ ID NO: 511820 - DNA, 644 bp, Homo sapiens
gctgctagaaactgaatgctgtcaacaaccacatgcagggaagcacatctccttcccttagtttagtctccagatgagaaccaagccgtaggtgacaccttgatggcagtcttgtgagactctgaagcagggaactcagctaagccatgcccaaactcatgccccataggattgatgaggtaataaatgcatgttgttttaagctgctaacttcgtgagaatttgtaacacagcatagaaagcaaatacacttcacttttggccctcctctttcattggctgtataaacagtgattagtgcttccatcttcccagttgcaatgacaragaccctggagccattctggccttcttcctgtcccttatgcccaacatctagcatctaaccactctgcatgttccaaaatcctacctttcaaccagttattcttttctttgcttcatacccgtcaaactagtgaagttcaaactacacaacccatgcctttcttcagggctgatggctacaagatgctcacatgaatatgggagagggagggaggcagcagaattaccaaggataaggggcaaataaccaaagaagacaacactgataggcgatttaactgaagcagggtggtgctaaggcctttgctgagactcca

SEQ ID NO: 511821 - DNA, 577 bp, Homo sapiens
ctaaatgatgtgcagcaaagaccataacctctctttacctggtcttttcttgcttggattttactaacagcctgaagtgtttttgagtcagctgacaaacttactaggtctccaaatccatttaccccacagacctttctatttttataagtttcagcagtatctccaagagcattaagaataaagttaaatttcttagcaggccatagatatctttcaaggtttaacccttgcttaccttttactttgcccttcgccttccacttcccacctccttccccatcctcttgccatccagaactaatggaacttctgccctaacagctagatctccattttcccccaccactgacctaactcttacttaatgagtttaagtaatggcttacttcaycttaattgctgcccttccttttgggtttggtgccatcctttgttacattttagcacttactgtattataataatctgtttacttatttgttctccccctcccttcatccattagactaacgcttcttggcaaagggtagtaactgaataatgaatgcatgaaaatcaactctccttattccta

SEQ ID NO: 511822 - DNA, 500 bp, Homo sapiens
aatatttgaaggctgacttggagaatatggaatttagacataggataaaagagggaggaaagtgtggaatggtatgtaaatcttgtctcaatttacgtagaaattttataactatgaccaagatgtctggcaagtagcagttgtccctgaattgggcaaaggccaatcactgctcattgcaaatgctgagcgagctatatctaaatgcagttggtctgagggaacagagcgccttgtccttggtaccttctaaacctagatgtgaatgacacagaagtgtcccagaccttaactgggtatagtacatgctcttatggactataatgctgttatggtccatttgtctcttggaattgtaacaaaatatcagtttygcgttcatagtaagccatttaatgcagcccctgttaatccagttcatattagttgatgttcacattgccgctgcttaagctggagaattgctaacagttttcttgtccatttttttcagaaaccag

SEQ ID NO: 511823 - DNA, 600 bp, Homo sapiens
tgtgtgggtgaccgtatgcactaaaatgggaaaaaaagttacaaagcagaaagaatagggtcatcacaaagacagtgcaaaatgggaagccaggcaggaagtgggagagaggccaagagagagaagtaaaatgactgacttcttgatgactgaagacttcccattccatccttgggtttattgcaattaaataattcttttatgctaaagmaaattgtgtctgacttattttgaagtatagaatttatgaaatgtatctctagtaagacatggtgtttccccaaggtctggttatttttatgctaaattctaatgtactatatggcatgagcaggattctccaacagaggctaaaggataaagcaaggcactttggaaattttaagtggtaagaagagattgcatttagcaccacctaccagagagcatttgtgttattccaaggcaggagtgttaaatcttcataacttcctagtggggccatggatagaattcaggtagttcaggaactccgacaggaaaaaaaagatacccttagttttatcaacctctacctaaaaaatagcaatttccttcaattatggatgtaggaaaataatc

SEQ ID NO: 511824 - DNA, 600 bp, Homo sapiens
tgtgtgggtgaccgtatgcactaaaatgggaaaaaaagttacaaagcagaaagaatagggtcatcacaaagacagtgcaaaatgggaagccaggcaggaagtgggagagaggccaagagagagaagtaaaatgactgacttcttgatgactgaagacttcccattccatccttgggtttattgcaattaaataattcttttatgctaaagaaaattgtgtctgacttattttgaagtatagaatttatgaaatgtatctctagtaagacatggtgtttccccaaggtctggttatttttatgctaaattctaatgtactatatggcatgagcaggattctccaacagaggctaaaggataaagcaaggcactttggaaattttaagtggtaagaagagattgcatttagcaccacctaccagaragcatttgtgttattccaaggcaggagtgttaaatcttcataacttcctagtggggccatggatagaattcaggtagttcaggaactccgacaggaaaaaaaagatacccttagttttatcaacctctacctaaaaaatagcaatttccttcaattatggatgtaggaaaataatc

SEQ ID NO: 511825 - DNA, 601 bp, Homo sapiens
tttttatacagaggataacaatcttctgaaactcttaacccccaagaggtaggcaatgtcagcaaatttaagtggattttaaaggggattggctggatttatataccacaatgccatcagtggagattacaaggagctgacgcatgctctacctataaggttgatgtcaggatgaaaaattacatccactgatggttcattccctatggccatagtttgcacagatctgggggctggatgaaacattaattcaaactagtcatggttatttccaagttttttggtttttttttttttttttttgagacagagtctcgctctgtcacccaggctggagtccagtggtgtgatctcrgctcactgcagcctccgcctcctgggttcaaaaaattctccttcttcagcctcctgagtagctgggactataggtgcacatcaccacacccagctaatttttgtattttttttagaaatggtgtttcaccatattggccaggctggtctcaaaccacttgagtcccagagtcacactgacaaacctcaggtcacctagttgattgatagaagaataagaaagacaatcagttcttctaactcccag

SEQ ID NO: 511826 - DNA, 559 bp, Homo sapiens
ctgcgtcacgaagatctctgcctctgtcattacatggtgttcttcctttgtttgtgtcctcacatggcactttctgtgtctcatctcctcttcttataaaaacaccagccattggattgagctcccacactccaaaaggaccttattttattacaactgcaaagaccttatttccaaacaaggtcacattccaaagtactagagttaaggaattcagcatatccttttgaggaacacaagtcaactcataagaacctcattaggcaggattagttgcacggctgcaacaatctgcaatcaagaggggaaatgtcatctttagctagatacattgccatcccaaattaaccyggtgctattactaagggagaagagaatagatattgattccctgtcttaacaaatagcatttgtcattgagtaagcacatagaaacacccagcacagtgcatagcatataatagaccctcactaaatacctttttaatggacaagtgaatgagtgttctagagttacgttgataagaacagagcacaaggtaatgggataaatttataa

SEQ ID NO: 511827 - DNA, 271 bp, Homo sapiens
aggggcaaggtttagcaatcccaccctakaggcaagggcatcagggctttaggccagaacccaggcggagaatgatgagaactaccatagcagccctgtgcttgcttgtggagcacagttggtgccaggtacccatccgaacgttttattagaccaaggcttttaatttgcacaatcttcttgatagaatcctcattttgtaagtgaggaaatggaggcacaggaaggtagagtagcttactgagcgttaccctgctgggaagtggcacag

SEQ ID NO: 511828 - DNA, 615 bp, Homo sapiens
tatttactgctcatattgtgtggccatctgctgatagcagataatcattttaaaaaaagatcaaaaaaagaaaaatggcactttatatcttatgttcccccttctggctgaaagtgttgttaattttatttattttatttttttagagatgttttcagacgcgtttgaaccagagcaactccatcttgaataggagctgcgtaaaataaggccgagacctactgggctgcattcccaggagattaaggcattcttagttacagggtaagayaggaggtcggcacaagatacaggtcacaaagaccttgctgataaaacagcatgcagtaacgaagccggctaaaacccaccaaaaccaagatggagaggagcgtgacctctgctcggtctcacagctcattatatgctaattacaatgcattagcgtgctaaaagacacacccaccagcaccacaacagtttacagatgccatggcaacgtcaggaagttaccctgtatggtctaaaaaaaggaggaaccttcagttcaagggaattgcccactcctttcccagaaaactcatgaataatccaccccttgttcagcatgtaatcaagaagtaacaataagtataa

SEQ ID NO: 511829 - DNA, 557 bp, Homo sapiens
gagataataacacgcttgccatgtctagaacatagtacaaagaagaaatgctagctgtaaaactttattatgactacctgttttagtgcagattgattttaatggtgcttacttccctaacatctacattttgatatcaacaaagtgtgtcatattcaacgaagaagcttattggagaaatttagagagaaagaagtcacccctgttagaatgagcttagttaaaggttagcgcaacatctggaggaaggtagtggcctcccaataaaacttagctccctatggtccttgactttggttgtgactcagtattaatgttttcttttaagaacagatataacttaaatgttaatctcaagaaagtacatttcaacacagggaaggcagagaagagagtgctggaagatttctcactgttgctgtgtccccagccccagtttcttgacgcctttttagcaggtggctccctcctctagggaaaaaggtgaggagccagttagaaagcagaggcctgtccccrcagagggaggccaaactgacctcagattcagagacagc

SEQ ID NO: 511830 - DNA, 579 bp, Homo sapiens
ttggcataaggaatcagtaggaacagggtgtcttttaattaattatccagacaatcaatcactcactccatggcctactcatgacctccactagatggcgcaggtggtgyttcttcccagctccagcccagaacggtgctccccttggacagttcatgtccgccccctctgggttttttgctctatcttttaaaatccagtccccagtcccatctgctggtaccttcgggacaatcctcagaatttctttccagttgatggtaccttattctgtctgcccgccctgttatggttttttttttttcttcttataccctttgggggaatcatttcagtgagattctgggatgaaaaggaaataaatacttatgtcattccagcatcttgacaaaggagcacctatttttaaaatgcacaacaacagccccagtccactcctttacctctaacccaatttacccaacggaaatttgcagaggtggggcctaagaatgcagtttcttaaagccccttgggtgattctgacgcacagccagagccgagagccaatgtgttaatcctcttcttggtataattaag

SEQ ID NO: 511831 - DNA, 527 bp, Homo sapiens
ctgcttggcataaggaatcagtaggaacagggtgtcttttaattaattatccagacaatcaatcactcactccatggcctactcatgacctccactagatggcgcaggtggtgcttcttcccagctccagcccagaacggtgctccccttggacagttcatgtccgccccctctgggttttttgctctatcttttaaaatccagtccccagtcccatctgctggtaccttcgggacaatcctcagaatttctttccagttgatggtaccttattctgtctgcccgccctgttatggttttttttttttcttcttataccctttgggggaatcatttcagtgagattctgggatgaaaaggaaataaatayttatgtcattccagcatcttgacaaaggagcacctatttttaaaatgcacaacaacagccccagtccactcctttacctctaacccaatttacccaacggaaatttgcagaggtggggcctaagaatgcagtttcttaaagccccttgggtgattct

SEQ ID NO: 511832 - DNA, 611 bp, Homo sapiens
ctgcttggcataaggaatcagtaggaacagggtgtcttttaattaattatccagacaatcaatcactcactccatggcctactcatgacctccactagatggcgcaggtggtgcttcttcccagctccagcccagaacggtgctccccttggacagttcatgtccgccccctctgggttttttgctctatcttttaaaatccagtccccagtcccatctgctggtaccttcgggacaatcctcagaatttctttccagttgatggtaccttattctgtctgcccgccctgttatggttttttttttttcttcttataccctttgggggaatcatttcagtgagattctgggatgaaaaggaaataaatacttatgtcattccagcatcttgacaaaggagcacctatttttaaaatgcacaacaacagccccagtccactcctttacctctaacccaatttacccaayggaaatttgcagaggtggggcctaagaatgcagtttcttaaagccccttgggtgattctgacgcacagccagagccgagagccaatgtgttaatcctcttcttggtataattaaggcagcttgtagagtaaaaataaatcatt

SEQ ID NO: 511833 - DNA, 518 bp, Homo sapiens
agtttttttaatgtgttgtgcctcagtttacatgtgtaaaacaggtagataatagtagtgtgtacctcatagtactgtggtaaggattaaggaatacagtgcctgcagagagattagcaagtgattgaaacatcatgcttaagtgtcagccatagttagcattattattattatacatctcctactactagcattattattagttgtattattccataatggtaatattattggttacagtctctactattaacattattattatttccaaagaatattctacaagatactatgataaatattccaagtacaaaaatttaaagtggagaaaaaatcaaatttactgagaactactattacctaggcrctgtgcaatgctcagagttggaacgatcaggaattatagtttatgtttatacgtggatttgtttaatgttattcttccatactagatataagggccctgagtttagcttcctttaagttgtgatgttcactgctatatcccagttattggt

SEQ ID NO: 511834 - DNA, 604 bp, Homo sapiens
gtgttagaccccttggaagaactttatattaacccctatgaaattccatcctttcagttttggtttctggttacagtccatggagataatgaaatgagaggcttggttctaacattcagtgaaggagcaatttctctcagctcttcattacttccagcagcagctcccaaataggcgactacaactggatccaggatgctggtgattggcagcattctctcagctagttttctgcctgcttcagtcaaaatgagctgggtttttacctgagcactcaggtgagagcagccctctaagtaacagcgccccctatcatacttccygcacatcttactgccgggtaccacagcttcttccctcccctgcagggaaaaggagggagcagaaacggctgatgatgagtcaggccagatatgtacatgtatgtggcttggggttggggaagttgtttctcaaccactctctgtataatgcgaaatatttgaattgaataaaacagcattaagagtgtggttcttctatttttgtcagcagagctatatggacctgaacttttcactaagtctaaaagacaatcaaatccacaggctaacattaaggctcc

SEQ ID NO: 511835 - DNA, 519 bp, Homo sapiens
gggataataaaaatatttttatttagagggtgatggttttatgggtgtataaaattataaaaactcatcaataacagttaatatctactcattttattgtatgctaattacaccttaattttatgttattttatttagttatttttgagaaagggtctttctctgtcacccaagctgaagcgtggtggcatgaacacagcttactgcagcctcaacctcctaggctcaagcattcctcctacctcagcctcccaagtagcttggtccacaagcacatrccactatgcctggataattttttttaatgttttgtagagatgaggtctcattgtgttacccaggcttgtcttgaactcctgggctcaagcatccaccgaccttgacctcccaaagtgctgggattacagacgtgagacacagtacacaacctataccttaatttttaaaagagaaaaaatatgaaaacattgaacttttttgctcttttacaaaacgtgctagtaatttctcgcccgccat

SEQ ID NO: 511836 - DNA, 519 bp, Homo sapiens
gggataataaaaatatttttatttagagggtgatggttttatgggtgtataaaattataaaaactcatcaataacagttaatatctactcattttattgtatgctaattacaccttaattttatgttattttatttagttatttttgagaaagggtctttctctgtcacccaagctgaagcgtggtggcatgaacacagcttactgcagcctcaacctcctaggctcaagcattcctcctacctcagcctcccaagtagcttggtccacaagcacataccactatgcctggataattttttttaatgttttgtagagatgaggtctcattgtgttacccaggcttgtcttgaactcctgggctcaagcatccaccgaccttgacctcccaaagtgctgggattacagacgtgagacacagtacacaacctataccttaatwtttaaaagagaaaaaatatgaaaacattgaacttttttgctcttttacaaaacgtgctagtaatttctcgcccgccat

SEQ ID NO: 511837 - DNA, 636 bp, Homo sapiens
agaggcaatgatttgtgaagaaatcccagtgctgtctaatggaattttcccaaaataaattcatgtaaacaacttcccacaaagaggcagtcagcggagctgggtgtgtaaacagcgtgaacagtcacaagtactatgggctccaggggtgctgtgtcgtctggagtgggggctgtggggagactccctttagcaaaacacctttggctccagtccttctgacatcataatgtcagccaattcattaactttaaaaaaaaaagtccttattttactatcatctccaaaacatagcaataccactttgtagctaaaatgtctgcaggatggagtctgtttaaaatttttattccacttcaaacccaatcaggcaggagaccatcttcatgtctagagaaagtgggagggggcaggaatggggtgggtggagagcaagggcggctggagaaaaggccctggagaaatggaaaacaacgccgctttgggcctagtgatggacgtgaataaactcatacagttcctagaattcagatgcaaatcggctcttcttaagacactcagaaggacactgaattcttgtrgcccagatgcttctggccacgtcccagtggaggactttgagagctggactatgtt

SEQ ID NO: 511838 - DNA, 544 bp, Homo sapiens
tcctccagctggtagggcagaaggacactggagcctcaggtagtttgggggttgagggaggacagtggtgtagacacttggggaagctgtcccaggccattggtgagaagktcaccttggagagaggattcacaaccgaggtggttggggatggaggtgtcgcccgtgccagggcaacataagtagggagtgggcttgcctgggcatgttctgggtgatgtgattcaggccttgcacatctgcaaccccagggaaaagggaccagagtggaggataagcaggcttaaaaatggcattgaattttaaaaattgcatttcctgaatcccaaagcggaggaagcacctcagaagacacaaaggatgagtgtggagaaggcacttggtggacactgctccgtctctactctaagtctttctttgctcaggctgttcactttgcctcaagctcccctaaccaacacccctgcagtcccagaccacacatcatgttctctctgcatctttcccttacccgggttgaccacaacctctttgggcaagggat

SEQ ID NO: 511839 - DNA, 544 bp, Homo sapiens
tcctccagctggtagggcagaaggacactggagcctcaggtagtttgggggttgagggaggacagtggtgtagacacttggggaagctgtcccaggccattggtgagaaggtcaccttggagagaggattcacaaccgaggkggttggggatggaggtgtcgcccgtgccagggcaacataagtagggagtgggcttgcctgggcatgttctgggtgatgtgattcaggccttgcacatctgcaaccccagggaaaagggaccagagtggaggataagcaggcttaaaaatggcattgaattttaaaaattgcatttcctgaatcccaaagcggaggaagcacctcagaagacacaaaggatgagtgtggagaaggcacttggtggacactgctccgtctctactctaagtctttctttgctcaggctgttcactttgcctcaagctcccctaaccaacacccctgcagtcccagaccacacatcatgttctctctgcatctttcccttacccgggttgaccacaacctctttgggcaagggat

SEQ ID NO: 511840 - DNA, 544 bp, Homo sapiens
tcctccagctggtagggcagaaggacactggagcctcaggtagtttgggggttgagggaggacagtggtgtagacacttggggaagctgtcccaggccattggtgagaaggtcaccttggagagaggattcacaaccgaggtggttggggatggaggtgtcgcccgtgccagggcaacataagtagggagtgggcttgcctgggcatgttctgggtgatgtgattcaggccttgcacatctgcaaccccagggaaaagggaccagagtggaggataagcaggcttaaaaatggcattgaattttaaaaattgcatttcctgaatcccaaagcrgaggaagcacctcagaagacacaaaggatgagtgtggagaaggcacttggtggacactgctccgtctctactctaagtctttctttgctcaggctgttcactttgcctcaagctcccctaaccaacacccctgcagtcccagaccacacatcatgttctctctgcatctttcccttacccgggttgaccacaacctctttgggcaagggat

SEQ ID NO: 511841 - DNA, 596 bp, Homo sapiens
tacccgggttgaccacaacctctttgggcaagggattgggttttactcatccttgaatctccaggtcctcccattgtgctccrcgcttggtaggttctttcctgtgtttgttgaactgttcgatccatcagactctcccaggatgaattggctactttctcctctgtgctatctttctaaacagtacacatttctgtcagagtacctggcctgtcgcaattcaatatttctctctctctctctctctttctttctttctttctttttttttttttgagacagagtttcactcttgttgcccaggctggagtgcaatggcgcaatctctgctcaccacaacctcggtctcccgggttcaagcgattctcctacctcagcctcccgagtagctgggattacaggcatgcgccaccatgcccagctaattttttgtatttttattagagacggggtttctccatggtgatcaggctggtctcaactcccaacctcaggtgatccgcccaccttggcctctcaaagtactggaattacaggtgcgagccactgcgcctggacagcaattaagtatttctttattattctgctgtctcggt

SEQ ID NO: 511842 - DNA, 596 bp, Homo sapiens
tacccgggttgaccacaacctctttgggcaagggattgggttttactcatccttgaatctccaggtcctcccattgtgctccgcgcttggtaggttctttcctgtgtttgttgaamtgttcgatccatcagactctcccaggatgaattggctactttctcctctgtgctatctttctaaacagtacacatttctgtcagagtacctggcctgtcgcaattcaatatttctctctctctctctctctttctttctttctttctttttttttttttgagacagagtttcactcttgttgcccaggctggagtgcaatggcgcaatctctgctcaccacaacctcggtctcccgggttcaagcgattctcctacctcagcctcccgagtagctgggattacaggcatgcgccaccatgcccagctaattttttgtatttttattagagacggggtttctccatggtgatcaggctggtctcaactcccaacctcaggtgatccgcccaccttggcctctcaaagtactggaattacaggtgcgagccactgcgcctggacagcaattaagtatttctttattattctgctgtctcggt

SEQ ID NO: 511843 - DNA, 596 bp, Homo sapiens
tacccgggttgaccacaacctctttgggcaagggattgggttttactcatccttgaatctccaggtcctcccattgtgctccgcgcttggtaggttctttcctgtgtttgttgaactgttcgatccatcagactcycccaggatgaattggctactttctcctctgtgctatctttctaaacagtacacatttctgtcagagtacctggcctgtcgcaattcaatatttctctctctctctctctctttctttctttctttctttttttttttttgagacagagtttcactcttgttgcccaggctggagtgcaatggcgcaatctctgctcaccacaacctcggtctcccgggttcaagcgattctcctacctcagcctcccgagtagctgggattacaggcatgcgccaccatgcccagctaattttttgtatttttattagagacggggtttctccatggtgatcaggctggtctcaactcccaacctcaggtgatccgcccaccttggcctctcaaagtactggaattacaggtgcgagccactgcgcctggacagcaattaagtatttctttattattctgctgtctcggt

SEQ ID NO: 511844 - DNA, 450 bp, Homo sapiens
gcactgtaccatttttttttcttgagagatgatgttattcattggccttttcccacctcagcgactctcttggtgcaaacaacatgttcaccttatacttacgggataattcatgtgacccttctggaaaatatcacttgcattttcttgtttctggacttataagtcatctttccttttaattttccttctttttcaaggagatacatgttggcctagattgtcagttgtaattacataaatggaaataaaaaattcaatacttttttatcccttgtaggacaatttactcagatactcactggcagagtcagattcagagcctactttgaagcrcttgttctttctacagctccacaaggcaggagcctggggcaggagcactgtggaatggacgatatatttgtttcctagggctgttgtgacaaataactgcagatcgagtggctt

SEQ ID NO: 511845 - DNA, 630 bp, Homo sapiens
tgttgagtattgaatggatgtcacagaccaggtgctgagccccatcagggtggtagggagagaagtcacacattggcctgggcaagggcttggctgggagcgaaagtctgacactctgggtgaaatagtctagaaatgggcaggactagtgccagcaaaccccagacctgtcacccagggaccaagggttaagcagcgtggatcaggtggacacaggatgggggtagaagtgagaaagatcatggagaagacctagagaggaggatgcagacaaagacatggatttcaggagggaggaagaggaaggcgggatcagagggaagtcaaaggaagtcataggagtgggtgtgcatagagtcctgctccaggttcctgctcctygcttcttgaaggtgcatgggtccaactcatgacaatggatatcaaccttcaaggaggtttcttacaaagtgccagcagctctaaccttgatcctgtctgatttatcattagatgaaaattcaggaggcaaactgatcaaaggtgtagatgtcacacatctgagagggagagttaataccagaggtgacagaatgagggcccagagtggtcctgacaggttggaatgttgggtcaaaaacaataagacac

SEQ ID NO: 511846 - DNA, 630 bp, Homo sapiens
tgttgagtattgaatggatgtcacagaccaggtgctgagccccatcagggtggtagggagagaagtcacacattggcctgggcaagggcttggctgggagcgaaagtctgacactctgggtgaaatagtctagaaatgggcaggactagtgccagcaaaccccagacctgtcacccagggaccaagggttaagcagcgtggatcaggtggacacaggatgggggtagaagtgagaaagatcatggagaagacctagagaggaggatgcagacaaagacatggatttcaggagggaggaagaggaaggcgggatcagagggaagtcaaaggaagtcataggagtgggtgtgcatagagtcctgctccaggttcctgctccttgcttcttgaaggtgcatgggtccaactcatgacaatggatatcaaccttcaaggaggtttcttacaaagtgccagcagctctaaccttgatcctgtcygatttatcattagatgaaaattcaggaggcaaactgatcaaaggtgtagatgtcacacatctgagagggagagttaataccagaggtgacagaatgagggcccagagtggtcctgacaggttggaatgttgggtcaaaaacaataagacac

SEQ ID NO: 511847 - DNA, 464 bp, Homo sapiens
actcttgtgcagtgtacaatctgcagaagcaaacatggcagccctgcttcctcagaagagctggcaacgctagatgccactcccacatagcaacaattagagggagcccagtcatagctgcccttctgggacagggcgcacactcscacatcaccacactccccaccatgcctacctcacttgtttgtgtcacctgccagtcccctaaggcatttgagtttatgacctgtctgaaacaatattttttttttacattggcttatccaggtaattagtttcatggtctatttctgaatggcatttttctttcccacccaacccccttttccagcagtcctagttaatctatttatttttactctacctctttctaaaaatacatacaatacaacacgattttttaaaagtcagactcctggtaatctctggaatgtgggaaaagcactcttaccacaaagttatat

SEQ ID NO: 511848 - DNA, 661 bp, Homo sapiens
aggtttatctgatgccaaagtttgtgatgctcttcaaccatttagggtaccgcagagtgtggattttgaatcacctgcatcagcatcattttaaaatatagattctgtggtcctgaccaggtctctgaagtcagaatatgaagtggagctaggaatctaacttcttaacaagttccctaggtaattctttattcaaactttttttgtttatattttgaaatgtgtcacacatgcagaagagtttataaaacacatatacggttttaaaaataatagtaaaaacctggttaacatattgaagatttgagagctcttgtgtgctcacttgtttgatacaccttctcccccatcagaaggaactactatcgtaacttttgtggccttcatttctttgcttttctttatagatgcctaagggtatccctgaatgatacagttttgtttgaaagactgaaaagcccaaagctggcccttttgggaaatagcagtaaatcattgatatgtgaaggttcccagcaggaggtaagttgagcaatgtctttgggacagagtctggattcagtttcyttgagaagattccacctggggaagtcagtgggcaaggtcttgggaagattgttaatcacagtgagggcatctgagcagggctgtggtttgaaca

SEQ ID NO: 511849 - DNA, 527 bp, Homo sapiens
cataacaatttatcagagaagcccagataggagggcaaagaaatatcccttccttaattatgagcatgtgtatgcctgtgcaaacctgcatttgtatgaccgagcgttctgggataataagttaatgctattaagactcattacatattcctaatatgcataccaatgcctcttactrggaatatgttacatcccaagcttgaagtctatggtgacaaagtccagtgagaatggaaagaggttcagccacgaatgccagtagatgtactaataaggttttgtgacattttagaaaagatagcacttttgattattgcacatattaattcagtgttaatgtcaggtgatcttgattaattatcatttttaaaaagtttctgttttggatgtagacatctaaatttcttgtgctcatctaagaaagaaaaaaataaatacaaagtgaagagcaaattagtgagggcctactttggcctcagacctgttttatttgcctaaaattctaaatttaaatgccatttggtagc

SEQ ID NO: 511850 - DNA, 620 bp, Homo sapiens
catgtattccttgtatctaaaataaaagctgaaacaaaaaaagaagaagaaaaaagaaagaaagaaagaaaaaatgcctcctactaagtcttcttgcatttctaattaatgagrtctaaaacaagaggttttacactacatatttcaataaccatgaatctcggttctcctaagcaatttctttttattatgatatattttattttcaagacagtttgttaaacaggatttaatttttaacctttgatagacacatataaatgtgtctattaaattccaatcatataatagtatttttattttgaaaaatattttcactatgtctatataatattcatgctcaggttagggctcaatctcaagacatttagcagggtttaggatttattcaagaataaatcagcagttgagcatcattattttcattaaagtagtcaaaatttttctgattaattatactctttttatacttataataaacactataaagagagagtagaatttagttaatcagataatgccatatgactgcaatctgcaaccttgatatctaggtgtaccttttgggtaatagagagtgaaatcatctcttagtgacaacagctaaattatcagaattc

SEQ ID NO: 511851 - DNA, 580 bp, Homo sapiens
tcatttcataatgataaaggggtcaatcaagcaaacataagaatcttaaacatatatacatttaatagaagagcttcaaaacacataaaacaaaaaatgatagaactgcaaggagaaataaacaaatccaacattttagtcagacatttccactctttcartaattgacagaataagcataatgaaagacaatgagaacacacaggacttgaacaacactgtcaaacttgatcccactgacatttgtaaagcactgtgcccaacattggcagaatacacattcttttcaagtgtacacagaacatgtattaagagagaccatattctaggttgaagagagttacatttctctgcctattaaagcgagtcaattatttgtgtatattggtggggacagaaaaagaggacaaaaggacatggaaggaagtcagaggtcagagcctgatttgtaaaatatagccaagggactttctaagggcagaaaaatgtaatatgcaattttaagttatctgtgtcgtaaatgctgttccccttttacatttggtgtgtaaccccaaatctcagtgaatgtcttctgttc

SEQ ID NO: 511852 - DNA, 580 bp, Homo sapiens
tcatttcataatgataaaggggtcaatcaagcaaacataagaatcttaaacatatatacatttaatagaagagcttcaaaacacataaaacaaaaaatgatagaactgcaaggagaaataaacaaatccaacattttagtcagacatttccactctttcaataattgacagaataagcataatgaaagacaatgagaacayacaggacttgaacaacactgtcaaacttgatcccactgacatttgtaaagcactgtgcccaacattggcagaatacacattcttttcaagtgtacacagaacatgtattaagagagaccatattctaggttgaagagagttacatttctctgcctattaaagcgagtcaattatttgtgtatattggtggggacagaaaaagaggacaaaaggacatggaaggaagtcagaggtcagagcctgatttgtaaaatatagccaagggactttctaagggcagaaaaatgtaatatgcaattttaagttatctgtgtcgtaaatgctgttccccttttacatttggtgtgtaaccccaaatctcagtgaatgtcttctgttc

SEQ ID NO: 511853 - DNA, 492 bp, Homo sapiens
ctgctgaaattgcatcagaccatttcctcttccagccctaagagaacaaacattactgggtgcagggtgttaacaatacctgcaaaatcactgtccatctgataagaaatgtagaaattgtttttcaaaaatagcttgcagagaactgtggcagattgtgggactcagggaacaaaggggagattgaaaccacatattctcattttaaaacagcgtcataaatctcagccaaagtaaacagtttaacaaacacagcaagccaaatagtggggctgacagtgtgagcctgtgatttgggcaacagtactgacatagatatgctttaaactacagctctcctcctttccagatgttctgcaacagccaatatctgtccttggggatctgagaacccagggaaagtcactctttatcacacaccsttgaaagactctgagtctaaaagaaaaaaacaaaatggaaatataatacactgcatttccttttaatatc

SEQ ID NO: 511854 - DNA, 518 bp, Homo sapiens
gtagctgggattacaggcatgcgccaccacacccatacctggctaattttgtatttttagtagagacggggtttctccatgttggccaggctggtttcaaactcccaacctcaggtgatctgcccacctcgacctcccaaagtgctgggattacagacacgagccwccgtgcccggcctattttatttcttcttcttctttttttttttttttcctatttttgatgagggaactgaagtccaaaggtattaggaagtcacccaaagaagacatagtaaatggcagaggtagaaatataatacagtatctgattccagagtccaagttccaaaccactgctcttactgcttctgtgagaaacaattccttctccagatcatcataaaaatcaaaaccatgtcccataaaactgctcatgtatgactattagtctggacgtacatccaattctataccatttatatcttagaaatccattgagatttatttattgcctcaattttatactttgagttcat

SEQ ID NO: 511855 - DNA, 519 bp, Homo sapiens
gctggcactgtcagctacaaggacaaatgtctttttcattaaataactaagcaaacttccttatgaaacatacgcttttaaggaacagctttcttcctgtgtcaacacaaatagctctaagctagatttaaaagcagatgggtatacmgatgttaatgtctcagtttcaacaaatgtaccatagttatgttaacatttgggggtgctggatgaagggcataagggagctatctgtactatctttgcagcttttcttttttttctttctttttctttttattttttttttgagatggagtctttctgtgtctcccaggctggagtgcagtggtgcaatcttggcttactgcaaccgagtagctgggattacaggtgtgtagcaccacgcccagctaatttttgtatttatttacttatttttttgagacagagtctcacactgttacccaggctggagtggagtggcgccatctcggctcactgcaacctctgccttccaggttcaagcgattctcctgc

SEQ ID NO: 511856 - DNA, 379 bp, Homo sapiens
taaaacctggaggcatttcagttttccaaytgagattgatattttgtaaatctaatgcccatttgccatttaatggcatttcaatgaaagaataattcttcctttgtgatttgataacccagtttgtcaaaataagatgatgatatataccttccagggtatgcagaagttttccagttgcaatatcaaaaatattgatgattccatctatggctccactggctaggtatttcccatcaggactctgttcagagaacatatggagaaattagcactttcagactccgtgttgttaagctgtccctaccaaacacaagcaaacctcctgctatctacaggtctaactggctacttggcaaaccacaccagtgagacagca

SEQ ID NO: 511857 - DNA, 379 bp, Homo sapiens
taaaacctggaggcatttcagttttccaattgagattgatattttgtaaatctaatgcccatttgccatttaatggcatttyaatgaaagaataattcttcctttgtgatttgataacccagtttgtcaaaataagatgatgatatataccttccagggtatgcagaagttttccagttgcaatatcaaaaatattgatgattccatctatggctccactggctaggtatttcccatcaggactctgttcagagaacatatggagaaattagcactttcagactccgtgttgttaagctgtccctaccaaacacaagcaaacctcctgctatctacaggtctaactggctacttggcaaaccacaccagtgagacagca

SEQ ID NO: 511858 - DNA, 667 bp, Homo sapiens
cccacttttctgtccctctccccaccatccttcactcatttcttttctccagagccaccactgttaaaaatttcttttttgcatcattctaraaatatcttggatatatacaaatgctaacatatggcatacacagtttcgtgtcttcttatacttgacaacatttgctggagaacttttcatatttttgcctggagaacttcctggttctctttttgtggggtaggtacagcattccatggaagggctggcccgagatgcatttcaacagctctgtaggatgaacatttaggttgttttcagtcttttgctgttacagatgaagctgtgatgaataatcttatccttgcgtggttcgtacttgagctagtctatctctaggataaattcctagaaatgggacgctaggacttgactaagtttaaacttgaaaatgaccgagtttttgcgaaactcttattgggtcggggggtccttgctcccagagctcccaagatggtggcgggccgcttccaagatggtggcaagccttgtgttctctgacctggggttcttggcctcatggattccaaggaatggaatcttgggccatgtggtgagtgttatcgctctattagaagccgtggatcacggaagagaaccgtggaacccagtgactagcgttcag

SEQ ID NO: 511859 - DNA, 667 bp, Homo sapiens
cccacttttctgtccctctccccaccatccttcactcatttcttttctccagagccaccactgttaaaaatttcttttttgcatcattctagaaatatcttggatatatacaaatgctaacatatggcatacacagtttcgtrtcttcttatacttgacaacatttgctggagaacttttcatatttttgcctggagaacttcctggttctctttttgtggggtaggtacagcattccatggaagggctggcccgagatgcatttcaacagctctgtaggatgaacatttaggttgttttcagtcttttgctgttacagatgaagctgtgatgaataatcttatccttgcgtggttcgtacttgagctagtctatctctaggataaattcctagaaatgggacgctaggacttgactaagtttaaacttgaaaatgaccgagtttttgcgaaactcttattgggtcggggggtccttgctcccagagctcccaagatggtggcgggccgcttccaagatggtggcaagccttgtgttctctgacctggggttcttggcctcatggattccaaggaatggaatcttgggccatgtggtgagtgttatcgctctattagaagccgtggatcacggaagagaaccgtggaacccagtgactagcgttcag

SEQ ID NO: 511860 - DNA, 599 bp, Homo sapiens
agctggagtcagccttgatcagccctctctgaggactcaggagggtccttggcaagaagagtcgtcccatccccaggaaccatcagcatctctgaygtccttcagagcctgaacatctcggtaaagaacattcacactgcagggccatgaaggcaaagagagtgacacaaagagacacaaagccctttagttgctacttgagggctgggcccaggtagagattgcagacaccccaccgcctcctcccactccagcttcccacatttatctcctctgggaagcctttctagacacccccacattccccaacttcctcatatagtccatggagactcccccaccgcctgctactctcagctaaactgccacttctgctcagcttggagccacaggagcctggcttctctgctggcctcgtggtctgaccacactcagacagatgcgcatgaataaatgtgaccatgtatccatccctccaacacaaattaacaagcacctatcatttgcagggaacacttcgggggcacagggatgaataatactggcgtacctatgtgtcccgaattggtgggttcttggtctcactgacttcaagactg

SEQ ID NO: 511861 - DNA, 599 bp, Homo sapiens
agctggagtcagccttgatcagccctctctgaggactcaggagggtccttggcaagaagagtcgtcccatccccaggaaccatcagcatctctgatrtccttcagagcctgaacatctcggtaaagaacattcacactgcagggccatgaaggcaaagagagtgacacaaagagacacaaagccctttagttgctacttgagggctgggcccaggtagagattgcagacaccccaccgcctcctcccactccagcttcccacatttatctcctctgggaagcctttctagacacccccacattccccaacttcctcatatagtccatggagactcccccaccgcctgctactctcagctaaactgccacttctgctcagcttggagccacaggagcctggcttctctgctggcctcgtggtctgaccacactcagacagatgcgcatgaataaatgtgaccatgtatccatccctccaacacaaattaacaagcacctatcatttgcagggaacacttcgggggcacagggatgaataatactggcgtacctatgtgtcccgaattggtgggttcttggtctcactgacttcaagactg

SEQ ID NO: 511862 - DNA, 507 bp, Homo sapiens
gccagggcgtttaccacggctggccagaggatggcagtcactgcctacgcatgcccacttggctggcgccgctgatggagtagcaagtacctgccctcctgggctcctccagactccggaggcagtgaattcctgctcttgaatcattatgggacccctcgtaaaggcatcttagacctcaacttcckcatcttgaaaacaaaattgttaacaccatggtctcaatccctagtggttttcaaaagtgtggttcccagaccacagttgtagattctggaagtgagatccccaagggagttacagcagaaggaagaagccagggagagagcatcctgcccagaagcagctgaggcctcccatcctctgcacatacctgactgaggggctgcatcctgcgagcatggcctgggggactaagttctttgcacccagcaactgttcagggtggggtttcaattcgcttcaccagctgctgaccagcggttggtggtcaccttcagtacttgg

SEQ ID NO: 511863 - DNA, 619 bp, Homo sapiens
catgaacaaaaacattctattgggcatccagaggtgttactaatatttgctctgcttgggtcttgtgcatttataattctatcacttcaaacacttcatctcctacttgaagctgattaaatcaaggctctgctaaaagtgaatgtgttgattgtagccaaggatcacattttcagtgactttctctcagcctactttccaatattaaatctttttgacccttagcaatatattcctttttcagaaacttaagatttctgtttgcttattacaacaggcgtctctgaaaaggaattcaaaatgtcacatttttatatattcctaaactaggttctatctgtaagaattaayaccatagttttatataataaaaccatgataaatgtttcccatattctatttctcatcttatattgctattaacatttctaatatacgtatttttcattcttatggtttcctcatatgctggttcactggtttttattacatgctctataaaaaatattatcaaaaaactgcttgtgtttctaatattttagtttttatggaaaatgaattaattctttttgtttttagaatgatctccaagagctcctactgctttctaacctattta

SEQ ID NO: 511864 - DNA, 480 bp, Homo sapiens
ctgacgccagccatggtagtcagcactggcaggaagagatgagttcaccagtgatctcctggagcacaatctcagtggaatgatttggaagatcagcaaagaacgtggatagaagaatcaagtggttctgggaggtgaattcatgaggtgcaggcaattcttttcagaarttttagcatttatttaattattattatttttgcaaagtgtagcatgctaagtagaagttgtgtccaatcgaaaaccaatcaaataatttatatgcatacatctaaaagttattttggggttttgtttgttttaagatggagtttctcgctctgtcgcccaggttggagtgcagtggcgtgatcttggctcactgcaacctctgcctcccgggttcaagcgattctgctgcctcagccttccaagtagtacacgccacaacgcccggctaattttattttatttatttatttatgtttttttagtagagac

SEQ ID NO: 511865 - DNA, 492 bp, Homo sapiens
ggcttttttatgcaaaaaaaagtttataaaacagcaaaaatccactaaatgtcaactgttactattgctattactgttaaaaaaattaaataaagtcaattttagatactttaaataaattgacttttaatactgctttaattaaaaatatttgtccattttgtactatgcattactatacctaatctgattactttattccttgttacatttctgtctgaccttcacccattaccctaacctgttatttaaaaacaaataaatgacacataaacaaacaaaatactttttttagcatttgctgctttagtcagttactcctgggatgaataaattatatttgatgtttttaaaaaacatcttcakgtcttgccaacttgaaatcacaatttactctttggttatatctctttgttagaaatttcctttcaaaatggggaaaatttttttctttaataactcatatgttacattccattgaatgaaaccagc

SEQ ID NO: 511866 - DNA, 626 bp, Homo sapiens
aaggttttcagggtagaattaatttttttaaatggccccatgttaacaaaatgccattgatttattcttagtaaacttacaaattctagattctatactacttttagccagcactgtccagttaatgaatactgggttttaaaaaaatttatagtaatatttcaggctatattttgcacattctaatgtgttctgtttttaagaagcagatgatgtcactcacttagcagaaagtcagtttgtttggctgcaaacttaacttactgcttgagtgattgtatgttagatatttattttccatatgaaatgaaaaaggaatgtgtgaccttcataaacatttacttgttaatatttgtaagtttctaattatgtgccagactgcactcagcctgagcagaaaggacacagagatgaatgttatggggccctgccatgagagaagggtaactgctgcagcaaagatgcagcctacttgtgctgaggcagagaggacatagcagcagttacctcgggggtcagggcagcttygctagaggaggtgctatttttcatgaagaaagaagatttcatcagattcagaaagaaggtagggggatcccagaaacaaaatcagctaaatcatttca

SEQ ID NO: 511867 - DNA, 608 bp, Homo sapiens
cccttacgaatatagcaggagggacaaaaacacttccatcatacctcacacctttagcagggtgtgaggcagagggtggctctgaatgtagtttaaagttatgaccacgtttagttagatatatttgttactgcatggagggcctttcagtatttctaaggaacaagaaataatagggttcattatttattgcgattattgcatatcagtccacagtgttttccccttagaatctgatgctctagtcataaaaattgatgacatatttaaggactgagagaaagacaacaggtgagatataggagggtcacattaggcactgagagagtcttctgtaaccctagtccccatttgcaactctgtaaagtattatctcagggcacccacacactgacttagctcttatacaccaaacctacaacatgggggctagctacatagaaytgatagctcaatccagtcatgcagagacattacttaccctaaaatgtacatgccctgaattttatccagggtcaagagaagagctctttaaagagaatatattggatgtgagggtgatctggctgcaacatctgtcaccccattgatcgccagggttgtttcag

SEQ ID NO: 511868 - DNA, 524 bp, Homo sapiens
cagctgtccagactggtcatgctgatcacaacacatgaaataagtcaatggtgcagctctgcctgtcaatgacactgcaatgcctatccagacatcttttcaaaaaataagcagaagaaaaaaaatgttcagattttggactttatttattttttaaaaaaggagttagatatgacagttttaatggactttaaagtctccctattcctataagttttaataacatgaatagaaactcaattaatagtatttttaatgcacaaagatttatgaattttatgccagttttaactgtaccttccctattattactagatatttgtaattcagtcattgtcaataggcttccctcggttcacctttggataccattactgggaggtggacgtggggacaagcaaatcrtgggatctgggtgtttgcaaagaatctattaatcgacaagaggaagttctgctgtcttcagaacttggctgtggactgtggttttgagaaataaaaagctcctctgagccagtaatgtg

SEQ ID NO: 511869 - DNA, 524 bp, Homo sapiens
cagctgtccagactggtcatgctgatcacaacacatgaaataagtcaatggtgcagctctgcctgtcaatgacactgcaatgcctatccagacatcttttcaaaaaataagcagaagaaaaaaaatgttcagattttggactttatttattttttaaaaaaggagttagatatgacagttttaatggactttaaagtctccctattcctataagttttaataacatgaatagaaactcaattaatagtatttttaatgcacaaagatttatgaattttatgccagttttaactgtaccttccctattattactagatatttgtaattcagtcattgtcaataggcttccctcggttcacctttggataccattactgggaggtggacgtggggacaagcaaatcgtgggatctgggtgtttgcaaakaatctattaatcgacaagaggaagttctgctgtcttcagaacttggctgtggactgtggttttgagaaataaaaagctcctctgagccagtaatgtg

SEQ ID NO: 511870 - DNA, 524 bp, Homo sapiens
cagctgtccagactggtcatgctgatcacaacacatgaaataagtcaatggtgcagctctgcctgtcaatgacactgcaatgcctatccagacatcttttcaaaaaataagcagaagaaaaaaaatgttcagattttggactttatttattttttaaaaaaggagttagatatgacagttttaatggactttaaagtctccctattcctataagttttaataacatgaatagaaactcaattaatagtatttttaatgcacaaagatttatgaattttatgccagttttaactgtaccttccctattattactagatatttgtaattcagtcattgtcaataggcttccctcggttcacctttggataccattactgggaggtggacgtggggacaagcaaatcgtgggatctgggtgtttgcaaagaatctattaatygacaagaggaagttctgctgtcttcagaacttggctgtggactgtggttttgagaaataaaaagctcctctgagccagtaatgtg

SEQ ID NO: 511871 - DNA, 671 bp, Homo sapiens
tacaatatttgcatttttatataaattagtgacattaatcaaactaatcattacctttacttcagtctcaaaggacctctgaaaactcttgatatttactcaaaagaacaaaatgtgatgaaatttaatacagtaagattcttgcaatttggggatcttttaaagaaactaccagaaagcaaattattttcatatttattcagtctttcatttcattctttattattttttggtttgctattaactttcttttcaccaactgccagtttgaaaaatgtctacattatttacaacatcattcctgaattatcagatttcatgttgtacaaatgaaaacctctcattcaatcttctttatattatcataccctaaggtttaggagtaaaacaacatctagaattaatcagattgaaattgttattctatgcccttgtgctggctaaggatatataccaagttcaagaagagtccatagattcctctgtagaagcccttctgatgctgggacctgtggctgctctgcttccctgcttccagagcagtggcacagatgacaatgtccaacctccrgcaaagcttgagacagcagggctggcacgtggggcctggcatgtgatgagagctaagcattccaaagaaagagagatgtaaagagaaaaaattcctttca

SEQ ID NO: 511872 - DNA, 456 bp, Homo sapiens
aatctcaatatttaaaatggaaacaagtgaatggaattcttaggcaatttacattttcacagttaggctgaaaatacaccattgtttgtggaatccatgaagcatcttctctgrggctctaagggcctcctaagcaaatccgcaaaccatttttggaagaggacccttacaggaggacagtaggatagcgataaggagcattaactcggccctgagacggccgttcggtttcatgtttttaggaataaattagataacccagtaaacatgattagcacagtgtgaacagatggcaacccacagttttttttaaccctcagggaaggactccagattgggctcttccacttggcagctggataacttaaagcaagtcatttaaccctgagcatcagctctatcttctgcaagcagatatcataacagaatctacctcatggattgttgtgaggatta

SEQ ID NO: 511873 - DNA, 571 bp, Homo sapiens
ctgagaaagcggagggcagatggaaactgcaaggtcaccyggctggacaagggcaaggaggcctcaactagcggcactttcagtatctacacgtgtccctcttcctttgtgctgttttatacggtagtcactagatccttgtggccatttagatttaaacttcagttaacataaattaaattttttagaacttcaattcttcagtcagactagccacatctcaagagctcagtagccacatttggctagtggttaccgtaggggacgtttcgctcctcccagaacattctaccagagagtgttgctttggatggcctcaagcagtcagatgttaaaccacacatcccatctctctacttgtatattcggagacaaatcagcaagtacagaaccgtccttagacagcagcctgccctctgctttactccaaattgtttttagtgatttcgggaaatcttttgtttgaatccaggccagaaggagggctctaccaaggcttgctcattttttctttttctctctcttttcttgtctctctctctgacacatgcacacacacacacacacacac

SEQ ID NO: 511874 - DNA, 614 bp, Homo sapiens
ctccatctgactcaggatttcctggggcccttattaaaatgatagcatcctgtgcctcaccccaaacttattgaatccaaaatctgtggatgttttccagaagtctgcatttaagcaagctctcaggtgatttgtagggagctaaaacaggaaatcacagatttgagggcatgtgtttctagtgaaaccaagcgcctcatccacaaactggtattctttaagattccatggaagcctctactgggcatttactcgactagaatgtcaaagagcatgtgcatcaacacagaaaaccagagtaagactaaaagtatgaatacagtcaaaattgtgttgagaccaggtgcttatgtattctaggaagctcaggctgaacttcctctctctggtcctgagatctctcactcaaaaaatgaggacatgccccaacccacatgtttgccagtggcagagctggsgctagaaaccacatcttctgactctcagtccagtttagttggttttccaagaaggtggcccaggagaaggaggcaaagaaagcaatagcaaaagcagatggatttggggccagctgtgagtcagtccaaggcaagattgagtgtataacattaagg

SEQ ID NO: 511875 - DNA, 447 bp, Homo sapiens
tgaaatagagcagttatcctctctagggtttttggcttgctatattgcacctttcctgcttttaaaagagcacaagcttttgttgaggctattttttctgtgtccattggcattttcaggtttccagccttttcagctccaaatatgggctatgtaaggcaaaaaggatacccagggactcctcaccactctgccgttcttttggtactgatatccctcactgtctcagaaacttctgggttttttggctgtaaaattctagttgtacttagcagaaaaaaaaatacagaaaacacatcacctccatcttctttttaaaaattgatttctacttttccagaaaataggagaggtaggaacacatcccaaatcattctacgagaccagtattaccytgatagcaaaaccaaagacatcgcaagaaaagaaagagaccaatattcatta

SEQ ID NO: 511876 - DNA, 580 bp, Homo sapiens
aaatacgaagaagaataaatcagcattgaaaatgatttaaagaaaaacaaacctttgggcagaatttttaggaaaaagagaaaacaaggctaggttaaaactgtaatagaagaagatatgaaggcatcgtgtattccaggaaagttgctttccttaatgttgggagacattaatgyattccttaatgctgagggacttaaaaatcatttatttccttgtaaatgtgtatgatttcaaatgcttacattgcaacctgcagagaagatgtaataaaaatgaactcataaatattcttaagtgttggtgatagagaatatatgcctacagaatatatgataaagattctatgaaactacaatattatacaaaggctgtcataaccttacacacacacaaatgtttttgcaaggactgcccaggaactgcctgcccagcctcagaacggtgtcatccttgttattgatctttgtagccaaggataattacttcaaaacagttatgtaatcctcttcattttttcctgtaaaaaccttcatcttcttttacctccctgaatatgcacatagtttactatggcatc

SEQ ID NO: 511877 - DNA, 580 bp, Homo sapiens
aaatacgaagaagaataaatcagcattgaaaatgatttaaagaaaaacaaacctttgggcagaatttttaggaaaaagagaaaacaaggctaggttaaaactgtaatagaagaagatatgaaggcatcgtgtattccaggaaagttgctttccttaatgttgggagacattaatgtattccttaatgctgagggacttaaaaatcatttatttccttgtaaatgtgtatgatttcaaatgcttacattgcaacctgcagagaagatgtaataaaaatgaactcataaatattcttaagtgttggtgatagagaatatatgcctacagaatatatgataaagattctatgaaactacaatattatacaaaggctgtcrtaaccttacacacacacaaatgtttttgcaaggactgcccaggaactgcctgcccagcctcagaacggtgtcatccttgttattgatctttgtagccaaggataattacttcaaaacagttatgtaatcctcttcattttttcctgtaaaaaccttcatcttcttttacctccctgaatatgcacatagtttactatggcatc

SEQ ID NO: 511878 - DNA, 577 bp, Homo sapiens
gctgtccaagatggtgaaaccccatctctactaataatacaaaagttagccaggcgttgtggcgagcacctataatcccagctactcaggaggctgaggcagagaattgcttgaacctgggaggtgggggttgcagtgagccactgaactccagcctgggtgacagagtgagactccgtctcaaaaaacaaacaaaaaaacaaaataacaacaacaaaaaaacagatgtgaaggarttctacccactgaatatttttaatggtcagatattactaaaaataataatatcattattgatttcagatttgaacagaaaaattgacatatttatacctggaattcatgtttatgattccaaaatcatcagatgagtccaaagtttctcaaacattgttaacaacattcacatattcatatccatctacatattgaaattttctcttcttttcataaatacattatggtatcctgatagacattctcctattcatttggttagatgttattctgggtggtgtcattagttatagcctcttgcatacaatttcactactttctatagatatcccatctgtat

SEQ ID NO: 511879 - DNA, 600 bp, Homo sapiens
ccaaaatactgatacacagaattgtgagtgaaataaacagtttttatttaagctactaaatctgagttattttgttatgcatcaaaatctaactggtaataaaggatgttagggggacctaatttagcttacagaaacctggaaggctcctccgaggaaagtatctgatggagaatgagaaagtcaactaagaaatggcaggaggaatatatttagacagaagaaaaagcacatttgaaagctttgcatgaggaagagcttaatatatctgaggaaataggagaatgtcagttttctttgttagagttcttccttgttcctgaatctgaatgtctttcttccccactctgctttgcatacagcctcagatttgaattttgataattgggtttctacccaattttctatgtttaataaacacacacacacacacacacagagacatacacacacacacaactctcttgatcatctaccactgagctgctcttattcttaccatactctcttcactggaccacagtgtacccccaaccttgagcttgctggttcgggtcttgctatmtgatgacaaactttcctgatgcccgtttcttgtct

SEQ ID NO: 511880 - DNA, 582 bp, Homo sapiens
attatcctaagcaaattaacacagaaacagaaaatcaaatacagcatgttctcacttagaagtaggagctaattctcgggtacacatgtacgtaamgatgggaatagtagacactagagacttcaaaggcagagaaaggtctgaaaaacgttctattggatagtatttttactatctagatgatgggattgatagaagcccaaaccttagcatcatgaaatccacccttacaacaagtagtcccaaatctaaaataaaaatgaaaattaaaaccaaaacataatcactacctgtataattgataaaatcacaatgcagtaaacgtttttggtgtccatttaagtaatttactgaaagtttatatgaaaatttgcaaaagtctgtagcattattaaagtgaagcatatttatacatggaagaaaaatggaaaagaaaagaagagctatcaaaaaagaatgtcacaattaaccaagtaactttaaaagtgatattacgttacaatgttaataaatgactgcactctataaatgtactttttatgataggatatttaattacctattaagctgtattggccactt

SEQ ID NO: 511881 - DNA, 594 bp, Homo sapiens
atggctcaggatgctttacaacactctaagtaagttcttcctcaaaagaaaaagatggaagacaaatatttttgaacttgaaggaagaagggacaaatgagaccgtggggtcaacatttagtagcaatgtggacctgaacgaattacttaacctctttgagcctgtattgttttctacaaaacgatgatgatgataagcaacaggattttgaagattgaatgaacttgtgtgtacaaagtggctaacataatacttcaaatatatctgatattcaataaaagttagttgcatttttctrgcaatactgaaagcttaggtatttctcaggatatgaacagttggcactttggattcattctcaccatcttctaagggtatcagcctatgctgctgaacatagaaggctggaatctacctttccaacattctcgtcaaactcaggttcgcatggaagttaattctcacttattcaatgcacttatgcaagttttgaaggcaaaattgtagtagagggcatattcctagagcctttggaatatttcttgctgggaagcaaggctgtggaggaatcggtgtccattctccagcttcat

SEQ ID NO: 511882 - DNA, 602 bp, Homo sapiens
agtttaacaagagaaatggataacaaatttatttgattagacttttattcaacaatggctttcagattgaagacccaaagatacaggagaagctgtatgattttatgcttaggttcaatgaagccaggacagtcatgtagaaatgcgattggacaaaaaggttatgagctaatggtagttgagtgaggaaacccaccaaggcctgtctgtccagattcttcttggcctctctgttgtagctttttattttttttcctcccaggtatgggataggacttctctggaataaaggtctcaatttcttaatggcctgctgttacacagaaagatgagggaaggttagagtaatattttcaggctttctaactggctttgggggaaaggggttctggtttctctgacccatcctggggaagaggtattctaattactattcctcaggagagaakaagaggcgagagacaggagggcagaagttccaagagaaattttgcttatgagactttcattttggagtattggcttttctgagcctcaacagcagattgtctgagtctgtagcttttagtactctactcgtttgtaaaagaaaacacattcac

SEQ ID NO: 511883 - DNA, 602 bp, Homo sapiens
agtttaacaagagaaatggataacaaatttatttgattagacttttattcaacaatggctttcagattgaagacccaaagatacaggagaagctgtatgattttatgcttaggttcaatgaagccaggacagtcatgtagaaatgcgattggacaaaaaggttatgagctaatggtagttgagtgaggaaacccaccaaggcctgtctgtccagattcttcttggcctctctgttgtagctttttattttttttcctcccaggtatgggataggacttctctggaataaaggtctcaatttcttaatggcctgctgttacacagaaagatgagggaaggttagagtaatattttcaggctttctaactggctttgggggaaaggggttctggtttctctgacccatcctggggaagaggtattctaattactattcctcaggagagaataagaggcgagagacmggagggcagaagttccaagagaaattttgcttatgagactttcattttggagtattggcttttctgagcctcaacagcagattgtctgagtctgtagcttttagtactctactcgtttgtaaaagaaaacacattcac

SEQ ID NO: 511884 - DNA, 438 bp, Homo sapiens
agttacttggaattcaggctccaattcaggctccagtctgttaagaactaatccctataagcttgtaggaattgccaccctgggctgcactgagagaactgcccggtgtagctggagaggtcaactggtggtcccaggactgatttcttgcagaaagtaggtttggtttggcggagtttttgaaaaggatttaagttgacatgcttttagccaggggtatgcactcttttcacctctgatcctagctgtccctagtacaattaccattggccttagaatcatgtgaaattacctgttcagttcccagaggcatttgaatttgggaccctgraactggaaggggcacccacaagatctaataaggtgtaaattcttataaaaaagttcaccaaatcctgacagtgatcaaagtgaagtcacttacctcaaagctcaaag

SEQ ID NO: 511885 - DNA, 655 bp, Homo sapiens
gagccatggtgactgctttggaagtaggtggagactgcagggaactttagcttttccagaaactcagagctcacaaaaaaacatctgtagaagttgtaccaagtagctaatttaccaactctatttttctcaaattcccagcccagctttaaatctcgcaatttggattgccagtggattcagcggtttaccatttatttaccttttctggtaattgcaaatgcagttaagatcccccacctttaggagagttcaagactaaaggagtcagtagcttaaactagtgtctgcaaatgtgtaggttgtggaggtcttaactgccttctgacttcccaggcatcttcccaccctgagtcccagctgctagtgtgatctcactgccttgtgccaccccctctcaacaactgtttattttatcagtgactctaacaaccttggctgcaatttgatttcaacaactgttaactgattagtgtgaatttgaaagtacagctttgccaattccggtactgccagtgggcaaaataacctgatatagtatatgattttgaaatcataaaastttctcagggaccgttgcatcaaacatatactgagttttctgatttagaagccttcaaggtcatttggctctcattgcacacttattatccaa

SEQ ID NO: 511886 - DNA, 621 bp, Homo sapiens
ctaaggttggaaacttagacctgatttcccacatgtgcataaagtggtagctcatctaactggcctctacagcataactactcaaagtgtgaccagtgggtggaccaggaacatttaacgtctgggagcttgttagaaaggcagaatctcaggccacatctcagacccactgagtcaggatctatattataatataatcttcaggtaatttgtacaaacactaagttttgggaagcaagatttcaaaatcctttccagaactatattactgtgawcctgaatcaactactgtaatatggacttcttttgggtaccagctctataaaggatcccaagtagaaaggaagggttcccagccattagggatgttcactgtggaaaccagggatgggcagcacaggcaatgtgtaatcaggcccacacgtcatgccatacactgatttccgtgagaggagacaatgtgtcgtggggaaagaacccagctttgaactcagactgacttgggctggaatcctgacccatccaactgctgcctaggtgacctggggcaatgtggaacttcccagggcctcatgatgcttactgtaaaatggttaaaatttcccatctcagtggttctta

SEQ ID NO: 511887 - DNA, 643 bp, Homo sapiens
ccttgcttttatttctggataaattattaatggctattcatctttggcacatgtaatttttaactatctaaaacattgatgggggtgggagggtaaatttataagtatttattattttcccttgcttttacagtaaatcccactcaggttgctgactgagattttccctgcttccttctcccatgtgaaccttatatttaactccaaatggtgaatgcaagatccargattgatagaataagtaacaaaagtgtccacggtgactgaacagcaaactctgaaatcacagcacaggaagtacaaatgaacgattattgaaaacactgcactaaaatctcaataggagataagagtgaggcttaagtcattagaaagctctattattctggcaagtctgagacagcacactacaaacatgagctgttcttgagatctgaaaatattacatcttccaccaacttgcacacacacacaactgactccaactaagcaagggcagggtccagttgtccagtcccaaggggaaggaggaatgaattgaagcagataggctgagccaggctattcaggtagtgattcttcagctatatttgaaggggtgggggtggggggcaacactgacaaatcagatgatttataaagg

SEQ ID NO: 511888 - DNA, 643 bp, Homo sapiens
ccttgcttttatttctggataaattattaatggctattcatctttggcacatgtaatttttaactatctaaaacattgatgggggtgggagggtaaatttataagtatttattattttcccttgcttttacagtaaatcccactcaggttgctgactgagattttccctgcttccttctcccatgtgaaccttatatttaactccaaatggtgaatgcaagatccaagattgatagaataagtaacaaaagygtccacggtgactgaacagcaaactctgaaatcacagcacaggaagtacaaatgaacgattattgaaaacactgcactaaaatctcaataggagataagagtgaggcttaagtcattagaaagctctattattctggcaagtctgagacagcacactacaaacatgagctgttcttgagatctgaaaatattacatcttccaccaacttgcacacacacacaactgactccaactaagcaagggcagggtccagttgtccagtcccaaggggaaggaggaatgaattgaagcagataggctgagccaggctattcaggtagtgattcttcagctatatttgaaggggtgggggtggggggcaacactgacaaatcagatgatttataaagg

SEQ ID NO: 511889 - DNA, 532 bp, Homo sapiens
ctgccaagattatatctttaaaaaacagctaaataaggatgccgaagtttgtaattattgaatcttattgatgagtatatactattttctttaacattatgtaaagttgaaatttttcaccataaaaataaatacataacagatactaatatccarttattatattatgaatttaataatatacaataaagaaagtttctgacctgaagataagtggttgtaaataaaactaatacatcttgtaattatttctttttttaacctggttttaaggtggtattatcttctaaggaatatgacatatttttacagcttcaccagaaacattattttgcatggattcagtattttcttgattaaatataatataaattatatgtggtttttatttccaaggaaaaagtcagacacattaaaaaaataaaaatactatccttctctatgcccccactcaccaccactctgccattgttcgtgatcaaaaatcaaatcagctttatcaggcataaactaagtgcaagacattgccctg

SEQ ID NO: 511890 - DNA, 532 bp, Homo sapiens
ctgccaagattatatctttaaaaaacagctaaataaggatgccgaagtttgtaattattgaatcttattgatgagtatatactattttctttaacattatgtaaagttgaaatttttcaccataaaaataaatacataacagatactaatatccaattattatattatgaatttaataatatacaataargaaagtttctgacctgaagataagtggttgtaaataaaactaatacatcttgtaattatttctttttttaacctggttttaaggtggtattatcttctaaggaatatgacatatttttacagcttcaccagaaacattattttgcatggattcagtattttcttgattaaatataatataaattatatgtggtttttatttccaaggaaaaagtcagacacattaaaaaaataaaaatactatccttctctatgcccccactcaccaccactctgccattgttcgtgatcaaaaatcaaatcagctttatcaggcataaactaagtgcaagacattgccctg

SEQ ID NO: 511891 - DNA, 583 bp, Homo sapiens
tccatttcatgggttttatcatcttcttttaaatcttcaaacaatttgtcaaattctgttttaagctacaataaacagcaacaagaaacaatgtaaaacaaactaattaaaataatacttgcatttaagtcagatttgaaatcatttaattaactggcgttaatgtcaaacgggccaggagtggtggctcatgccaataatctcagcactttgggagaccaaggtgggaggatcacttgagctcaggagtttgagaccagcctggataacatagtgagagatcccatctctacaaaaaaatttttaaaaaattagccaggcatgggggtgcatgcctgtagttctggctcctagggatgctgagatgggaggatcacttcagcctagtaggtagaggatagagtgaaccatgattatgccactgcactccagcctgggcaagaaagtgagaccctgtcccaaaaaattaagawattgaaattaaattaaatttaaaaaccacaaactagtcaaacgccaaaaaggcacataaatcaactctaggattacactactcactgaagagcgaatgaacaggtgcttt

SEQ ID NO: 511892 - DNA, 606 bp, Homo sapiens
gttgggtgatgatgatgctgtcagggaaagcgtcggtgcctatgtggggagagtaggggagtgagaaacaaagcaaagcgtggtggctctgtggctccrgtgccccggaggccacggctcactttttcacaatgaacatgggctattttcattttttaaagtctactaatgtttctaaggagaccatacagaaccgaaaattctgaataaccttgtcttccataaggcagacttttcatttctgtcacctttccggaagggctggacacagagtctgtgggtctgtgatggaggcgccaccatctcaccctgagtccacggccctcagtctctgtgctccccgagccgaaggtgaggaatccatgccttatggttggcgagggctgctggggcacctgccatctcatctgcatcctgggaagcaggaaggagcacagaggaaaacacaagcctgctctggccagctcagtgtgctccttccagaaacaggtaaacacaaaattaccctgcgaagccgccattccattcctaggtctatccccaaaagaaatcaaagcagggactcaaatacttgcacagcccttgccacgacctggatgtagtcag

SEQ ID NO: 511893 - DNA, 606 bp, Homo sapiens
gttgggtgatgatgatgctgtcagggaaagcgtcggtgcctatgtggggagagtaggggagtgagaaacaaagcaaagcgtggtggctctgtggctccagtgccccggaggccacggctcactttttcacaatgaacatgggctattttcattttttaaagtctactaatgtttctaaggagaccatacagaaccgaaaattctgaataaccttgtcttccataaggcagacttttcatttctgtcacctttccggaagggctggacacagagtctgtgggtctgtgatggaggcgccaccatctcacccygagtccacggccctcagtctctgtgctccccgagccgaaggtgaggaatccatgccttatggttggcgagggctgctggggcacctgccatctcatctgcatcctgggaagcaggaaggagcacagaggaaaacacaagcctgctctggccagctcagtgtgctccttccagaaacaggtaaacacaaaattaccctgcgaagccgccattccattcctaggtctatccccaaaagaaatcaaagcagggactcaaatacttgcacagcccttgccacgacctggatgtagtcag

SEQ ID NO: 511894 - DNA, 579 bp, Homo sapiens
acagccctgtcacactccccaaggccttgtcmcactccccacggccctgtcgcactccccacatcccgtggcatctggctgtacatggaagtgaggaagctgctgtctcccccaaagaacattgctcccagccagggctcagctgtggggcaggactcagaggctcctggttcagagaccaaggcccttgtcacttgcagcgtgaacagcagggaactttgcccccgagtcccacaacagaggtggggaccttgtcacggtgggcccaggtgacaacacagggccagcgattcttcacccggcagcaaacactgcggcagacgacaaacattgcagcccttggcaaacaaaaagcacgcagcaaacagcgtggtcagcgaaaagaccctcccctccccggggatcagacagtgcaaggccatccccgggatgacctgcacccacccggctgcctgtgtgaccagccacagaacccactctgcattagcacccacggccgggacaggcagggagctgcgcccgtggcttcctgcatctgccgacaccacccgaggctgccaggccacaacatgaagtcag

SEQ ID NO: 511895 - DNA, 579 bp, Homo sapiens
acagccctgtcacactccccaaggccttgtcacactcccyacggccctgtcgcactccccacatcccgtggcatctggctgtacatggaagtgaggaagctgctgtctcccccaaagaacattgctcccagccagggctcagctgtggggcaggactcagaggctcctggttcagagaccaaggcccttgtcacttgcagcgtgaacagcagggaactttgcccccgagtcccacaacagaggtggggaccttgtcacggtgggcccaggtgacaacacagggccagcgattcttcacccggcagcaaacactgcggcagacgacaaacattgcagcccttggcaaacaaaaagcacgcagcaaacagcgtggtcagcgaaaagaccctcccctccccggggatcagacagtgcaaggccatccccgggatgacctgcacccacccggctgcctgtgtgaccagccacagaacccactctgcattagcacccacggccgggacaggcagggagctgcgcccgtggcttcctgcatctgccgacaccacccgaggctgccaggccacaacatgaagtcag

SEQ ID NO: 511896 - DNA, 579 bp, Homo sapiens
acagccctgtcacactccccaaggccttgtcacactccccacrgccctgtcgcactccccacatcccgtggcatctggctgtacatggaagtgaggaagctgctgtctcccccaaagaacattgctcccagccagggctcagctgtggggcaggactcagaggctcctggttcagagaccaaggcccttgtcacttgcagcgtgaacagcagggaactttgcccccgagtcccacaacagaggtggggaccttgtcacggtgggcccaggtgacaacacagggccagcgattcttcacccggcagcaaacactgcggcagacgacaaacattgcagcccttggcaaacaaaaagcacgcagcaaacagcgtggtcagcgaaaagaccctcccctccccggggatcagacagtgcaaggccatccccgggatgacctgcacccacccggctgcctgtgtgaccagccacagaacccactctgcattagcacccacggccgggacaggcagggagctgcgcccgtggcttcctgcatctgccgacaccacccgaggctgccaggccacaacatgaagtcag

SEQ ID NO: 511897 - DNA, 579 bp, Homo sapiens
acagccctgtcacactccccaaggccttgtcacactccccacggccctgtcgcactccccacatcccgtggcatctggctgtacatggaagtgaggaagctgctgtctcccccaaagaacattgctcccagccagggctcagctgtggggcaggactcagaggctcctggttcagagaccarggcccttgtcacttgcagcgtgaacagcagggaactttgcccccgagtcccacaacagaggtggggaccttgtcacggtgggcccaggtgacaacacagggccagcgattcttcacccggcagcaaacactgcggcagacgacaaacattgcagcccttggcaaacaaaaagcacgcagcaaacagcgtggtcagcgaaaagaccctcccctccccggggatcagacagtgcaaggccatccccgggatgacctgcacccacccggctgcctgtgtgaccagccacagaacccactctgcattagcacccacggccgggacaggcagggagctgcgcccgtggcttcctgcatctgccgacaccacccgaggctgccaggccacaacatgaagtcag

SEQ ID NO: 511898 - DNA, 515 bp, Homo sapiens
actccccacatcccgtggcatctggctgtacatggaagtgaggaagctgctgtctcccccaaagaacattgctcccagccagggctcagctgtggggcaggactcagaggctcctggttcagagaccaaggcccttgtcacttgcagcgtgaacagcagggaactttgcccccgagtcccacaacagaggtggggaccttgtcacggtgggcccaggtgacaacacagggccagcgattcttcacccggcagcaaacactgcggcagacgacaaacattgcagcccttggcaaacaaaaagcacgcagcaaacagcgtggtcagcgaaaagaccctcccctccccggggatcagacagtgcaaggccatccccgggatgacctgcacccacccggctgcctgtgtgaccagccacagaacccactctgcattagcacccacggccrggacaggcagggagctgcgcccgtggcttcctgcatctgccgacaccacccgaggctgccaggccacaa

SEQ ID NO: 511899 - DNA, 515 bp, Homo sapiens
actccccacatcccgtggcatctggctgtacatggaagtgaggaagctgctgtctcccccaaagaacattgctcccagccagggctcagctgtggggcaggactcagaggctcctggttcagagaccaaggcccttgtcacttgcagcgtgaacagcagggaactttgcccccgagtcccacaacagaggtggggaccttgtcacggtgggcccaggtgacaacacagggccagcgattcttcacccggcagcaaacactgcggcagacgacaaacattgcagcccttggcaaacaaaaagcacgcagcaaacagcgtggtcagcgaaaagaccctcccctccccggggatcagacagtgcaaggccatccccgggatgacctgcacccacccggctgcctgtgtgaccagccacagaacccactctgcattagcacccacggccgggacaggcagggwgctgcgcccgtggcttcctgcatctgccgacaccacccgaggctgccaggccacaa

SEQ ID NO: 511900 - DNA, 621 bp, Homo sapiens
gttgggtgatgatgatgctgtcagggaaagcgtcggtgcctatgtggggagagtaggggagtgagaaacaaaagcaaagcgtggtggctctgtggctccggtgccccggaggccayggctcactttttcacaatgaacatgggctattttcattttttaaagtctgctaatgtttctaaggagaccatacagaaccgaaaattctgaataaccttgtcttccataaggcagacttttcatttctgtcacctttccggaagggctggacacagagtctgtgggtctgtgatggaggtgccaccatctcaccccgagtccacggccctcagtctctgtgctccccgagccgaaggtgaggaatccatgccttatggttggcgagggctgctggggcacctgccatctcatctgcatcctgggaagcaggaaggagcacagaggaaaacacaagcctgctctggccagctcagtgtgctccttccagaaacaggtaaacacaaaattaccctgcgaagccgccattccattcctaggtctatccccaaaagaaatcaaagcagggactcaaatacttgcacagcccttaccacgacctggatgtagtcagtgcatctgttccca

SEQ ID NO: 511901 - DNA, 621 bp, Homo sapiens
gttgggtgatgatgatgctgtcagggaaagcgtcggtgcctatgtggggagagtaggggagtgagaaacaaaagcaaagcgtggtggctctgtggctccggtgccccggaggccatggctcactttttcacaatgaacatgggctattttcattttttaaagtctrctaatgtttctaaggagaccatacagaaccgaaaattctgaataaccttgtcttccataaggcagacttttcatttctgtcacctttccggaagggctggacacagagtctgtgggtctgtgatggaggtgccaccatctcaccccgagtccacggccctcagtctctgtgctccccgagccgaaggtgaggaatccatgccttatggttggcgagggctgctggggcacctgccatctcatctgcatcctgggaagcaggaaggagcacagaggaaaacacaagcctgctctggccagctcagtgtgctccttccagaaacaggtaaacacaaaattaccctgcgaagccgccattccattcctaggtctatccccaaaagaaatcaaagcagggactcaaatacttgcacagcccttaccacgacctggatgtagtcagtgcatctgttccca

SEQ ID NO: 511902 - DNA, 547 bp, Homo sapiens
tcttaatccaacactaacatgttgatttttcaaaataaccagttgaaaaggccagacttgttctaatttgcttggaatctctttcatagtaactgttacacaactgttccatcttccttccttaccttcttatgtaagctctgtaatcaccatcagtgtttacataggtttgtgaaaccacccaatttctccagtaaatatttaattctctttgctactgatcaaaccataagcaacacaacatttttatacaacatgtttggtaatgagaaaatgagacattgacgtcaacagcacaaagtctataaaccaaaaacaccaggatttcccgatacataggcctcttggaaatcaggcaccaataaaatagaaaattctcttcactgctccaagygtttgatccagtttataactgagttccgcagcatctgtggtggttctagcaaatgctaaaatacccttcaaccagaaccatgcacccagtctgcaggcttcaggcaccaagcagaatgggtgttctcagctatgaaagccaggcactcaacaa

SEQ ID NO: 511903 - DNA, 547 bp, Homo sapiens
tcttaatccaacactaacatgttgatttttcaaaataaccagttgaaaaggccagacttgttctaatttgcttggaatctctttcatagtaactgttacacaactgttccatcttccttccttaccttcttatgtaagctctgtaatcaccatcagtgtttacataggtttgtgaaaccacccaatttctccagtaaatatttaattctctttgctactgatcaaaccataagcaacacaacatttttatacaacatgtttggtaatgagaaaatgagacattgacgtcaacagcacaaagtctataaaccaaaaacaccaggatttcccgatacataggcctcttggaaatcaggcaccaataaaatagaaaattctcttcactgctccaagtgtttgatccagtttataactgagttccgcagcatctgtggtggttytagcaaatgctaaaatacccttcaaccagaaccatgcacccagtctgcaggcttcaggcaccaagcagaatgggtgttctcagctatgaaagccaggcactcaacaa

SEQ ID NO: 511904 - DNA, 623 bp, Homo sapiens
gcacagcggtggaacttgtcgtcttatcattgacttgttatgttcatgaaggacttggaaaaccaacgctgatcctcagagtaacagcatagatcctcacaagacagtctatgaagctggagccccctgggttgtaaaatgcctccgcaccccgtctctgtttctgaagaaggaagctctgctgagcagctaaacatgacgtgcttgttaagtgtgcattggttaaagaacagatgaaggtacaggctcagtctccaaaacttcattatacaatctcacagatgagtagcaccgttcagcattgagtgacacctactttcccatctccaggtggttagatatcatcatctccaatttaaggcccatctaagaggtgcaccttttctcgatcctgaggctcaagtgtctaaacagcaactgtaaattttctccaatcagtgtttctcccctgtgtggaaataaattcgcatccttgaagatcaactctctccttcattttacaaaaaaacaaaaaacaaaaaaacttgttttaagcaagattaaaagtgaattttctattatcagtaattttatatyactccctgtcttgcttcttttgcactcactgaattgaagagaacgat

SEQ ID NO: 511905 - DNA, 490 bp, Homo sapiens
gataaatggatggatgggtgggtggatagatggttagatgagtaaacgggtggatagatgcatgggtgagtggatggatagagggtggtggtggatgggtaggtggatgatagctgggtgtataagagastgggttggatggatagattggtgggtgggtagatagatgggtgggtggttggatgtatgcatgtctggatggatggatggatggacggatggaaggaaggaagggtggatggatggatggacagatgaacagatagacttgggcatttattcggggtcctccaaagaattgagttatttccctagggtgtctcatcacctgcaggtaggtgggcaagggggcttgcctctgtaatactcatgattatgggtagtcctcagccttagtcaccactctcagaacactttattgactaggaaagtcaaaactggcattgataactaacggaaattgcagctaaaactaacagaagatgttgag

SEQ ID NO: 511906 - DNA, 490 bp, Homo sapiens
gataaatggatggatgggtgggtggatagatggttagatgagtaaacgggtggatagatgcatgggtgagtggatggatagagggtggtggtggatgggtaggtggatgatagctgggtgtataagagagtgggttggatggatagattggtgggtgggtagatagatgggtgggtggttggatgtatgcatgtstggatggatggatggatggacggatggaaggaaggaagggtggatggatggatggacagatgaacagatagacttgggcatttattcggggtcctccaaagaattgagttatttccctagggtgtctcatcacctgcaggtaggtgggcaagggggcttgcctctgtaatactcatgattatgggtagtcctcagccttagtcaccactctcagaacactttattgactaggaaagtcaaaactggcattgataactaacggaaattgcagctaaaactaacagaagatgttgag

SEQ ID NO: 511907 - DNA, 490 bp, Homo sapiens
gataaatggatggatgggtgggtggatagatggttagatgagtaaacgggtggatagatgcatgggtgagtggatggatagagggtggtggtggatgggtaggtggatgatagctgggtgtataagagagtgggttggatggatagattggtgggtgggtagatagatgggtgggtggttggatgtatgcatgtctggatggatggatggatggacggatggaaggaaggaagggtggatggatggatggacagatgaacagatagacttgggcatttattcggggtcctccaaagaattgagttatttccctagggtgtctcatcacctgcaggtaggtgggcaagggggcttgcctctgtaatactcatgattatgggtagtsctcagccttagtcaccactctcagaacactttattgactaggaaagtcaaaactggcattgataactaacggaaattgcagctaaaactaacagaagatgttgag

SEQ ID NO: 511908 - DNA, 571 bp, Homo sapiens
gacacacatacaccctcaggctcaggatacccaggacagagtcctggatgcttgaagtcatgataagtatgcagaatgacacagaattccagccaggcrtggtggctcatgcctgtaatcccagcactttgggaggccgaggtggatcacctgaggtcaggagttcaagaccaacctgaccaacatggtgaaactccctctctactaaaaatacaaaaaaaaatttagctgggtgtggttgtgggtgcctgtagtcccagctactcaggaggctgaggcaggagaatcgtttgaaccaaggaggcagagactgcagtgaactgagattgcaccattgcactccagcctgcgcaacaaaagtgaaactccgtctcaaaaaagaaaaaaaaatgacaccgaatttgctaaagggggagaaagggctttcttccaaagctgggcctggtttctacagagagtctttcacatgaaaattaagcagctctttgcaagcacctcagaggagaacccctcaccctgatgaatcaggcacaggggcggatccaagacaactggctgcgtgcatgtgaac

SEQ ID NO: 511909 - DNA, 616 bp, Homo sapiens
ctggacacacatacaccctcaggctcaggatacccaggacagagtcctggatgcttgaagtcatgataagtatgcagaatgacacagaattccagccaggcgtggtggctcatgcctgtaatcccagcactttgggaggccgaggtggatcacctgaggtcaggagttcaagaccaacctgaccaacatggtgaaactccctctctactaaaaatacaaaaaaaaatttagctgggtgtggttgtgggtgcctgtagtcccagctactcaggaggctgaggcaggagaatcgtttgaaccaaggaggcagagactgcagtgaactgagattgcaccattgcactccagcctgcgcaacaaaagtgaaactccgtctcaaaaaagaaaaaaaaatgacaccgaatttgctaaagggggagaaagggctttcytccaaagctgggcctggtttctacagagagtctttcacatgaaaattaagcagctctttgcaagcacctcagaggagaacccctcaccctgatgaatcaggcacaggggcggatccaagacaactggctgcgtgcatgtgaacaagcctatggtggaaaggcagtgctttattgtttggggtggt

SEQ ID NO: 511910 - DNA, 595 bp, Homo sapiens
cacatacaccctcaggctcaggatacccaggacagagtcctggatgcttgaagtcatgataagtatgcagaatgacacagaattccagccaggcgtggtggctcatgcctgtaatcccagcactttgggaggccgaggtggatcacctgaggtcaggagttcaagaccaacctgaccaacatggtgaaactccctctctactaaaaatacaaaaaaaaatttagctgggtgtggttgtgggtgcctgtagtcccagctactcaggaggctgaggcaggagaatcgtttgaaccaaggaggcagagactgcagtgaactgagattgcaccattgcactccagcctgcgcaacaaaagtgaaactccgtctcaaaaaagaaaaaaaaatgacaccgaatttgctaaagggggagaaagggctttcttccaaagctgggcctggtttctacagagagtctttcayatgaaaattaagcagctctttgcaagcacctcagaggagaacccctcaccctgatgaatcaggcacaggggcggatccaagacaactggctgcgtgcatgtgaacaagcctatggtggaaaggcagtgcttta

SEQ ID NO: 511911 - DNA, 588 bp, Homo sapiens
tgccctttctatacatgacacagtgattstggcacccactggtctagctgtggtctccaaggaacccccaaagggaagggctcagggagcaggggcatcagcctgagtgacaaggatttgagagggcaggttggatgcagggagaggactggccaaatgccatgtgtctggacttagactgcctggttcaaattggacttcgccctttttgacttcgtgatctggtacaagctacatgaaaatccgttgcgccttttctagtctgtaaaatcatcctgaaatgtgcactaataacgtggagactatgcagatgaaatgaaacaagctgcatagagcacagagctcagagtctggcctttatgaagccctcagtaagggttcatgatgccatggtgtctgtcgtcatcctctttatcctcatcatcaccttcataatctctttgttgttcttagggaatagtttagagggactgatcccctgctatcatgggtgagatgtctatgaaaaggacaaccagtgggggaggaaagcaaaattttgaataagatttctgagacccccaccacaaccaagaacagaaacgccac

SEQ ID NO: 511912 - DNA, 588 bp, Homo sapiens
tgccctttctatacatgacacagtgattgtggcacccactggtctagctgtggtctccaaggaacccccaaagggaagggctcagggagcaggggcatcagcctgagtgacaaggatttgagagggcaggttggatgcagggagaggactggccaaatgccatgtgtctggacttagactgcctggttcaaattggacttcgccctttttgacttcgtgatctggtacaagctacatgaaaatccgttgcgccttttctagtctgtaaaatcatcctgaaatgtgcactaataacgtggagactatgcagatgaaatgaaacaagctgcatagagcacagagctcagagtctggcctttatgaagccctcagtaagggttcatgatgccatggtgtctgtcgtcatcctctttatcctcatcatcaccttcataatctctttgttgttcttagggaatagtttagagggactgatyccctgctatcatgggtgagatgtctatgaaaaggacaaccagtgggggaggaaagcaaaattttgaataagatttctgagacccccaccacaaccaagaacagaaacgccac

SEQ ID NO: 511913 - DNA, 453 bp, Homo sapiens
acatgcagacctgcaggacatcgagtccctgctatggtccctccccagtcagrcccccattgcctgggctgcagccagaagcattcaggcacaagtgcattcaacaaatacttatttaattgtattggtggttagagggttgcgattgattaaggcacattaatggatccgtgtcctccctgtatccaagattctgccatttgtctctgcagttcctcccactgaagaatcggagtatatttctccagtccctaatgttgggtttagtcatgtgtctagctttggccactggaatattaatctgtatgaccaaaaacttggaaagtgtgaattcatttctgctcactcactcctgctatcaccatgagaacaagcccaggccagactgctgcttccagcagaagagacagcaagagcaacgtcgagcttcccagacatgctcatgctagattg

SEQ ID NO: 511914 - DNA, 619 bp, Homo sapiens
gcaggggcagaggagatagggaatccttgcaggcccccagccggggctcaggcacagagacartgcaggtgggcaaagggaggagacgtggagaaatattttggaggcatgccctgatgaatgagcccaggatgcacccttagtgtcagtgtggagctctttccttgactgtgtgatgagctgaactcgggggtattttctggacattgaggtgctacaccaagagcccaggacaggctaagtgagcactagcagctcctggcccacctcaaaagcaggagagacaggggagactggggaggccggggcagaaggggaagccaggaaggtaggagaggccagggaagcagaggaggccagggaggcaatggaggcaggagaggctggggaggttatgtcctttccatgattctgccctggatcctaagcccctgaactccctgagcttccccacccccaagggctggaatcatgttgcacaatggtctccccactaagctcctgatggcagcccctaccctgctgtgctccctatttcaaccctaacagctctcacagtgggcagcacatagtaggtgctcaggaaacactggtgggagagcactcgggtctgctcagc

SEQ ID NO: 511915 - DNA, 619 bp, Homo sapiens
gcaggggcagaggagatagggaatccttgcaggcccccagccggggctcaggcacagagacagtgcaggtgggcaaagggaggagacgtggagaaatattttggaggcatgccctgatgaatgagcccaggatgcacccttagtgtcagtgtggagctcyttccttgactgtgtgatgagctgaactcgggggtattttctggacattgaggtgctacaccaagagcccaggacaggctaagtgagcactagcagctcctggcccacctcaaaagcaggagagacaggggagactggggaggccggggcagaaggggaagccaggaaggtaggagaggccagggaagcagaggaggccagggaggcaatggaggcaggagaggctggggaggttatgtcctttccatgattctgccctggatcctaagcccctgaactccctgagcttccccacccccaagggctggaatcatgttgcacaatggtctccccactaagctcctgatggcagcccctaccctgctgtgctccctatttcaaccctaacagctctcacagtgggcagcacatagtaggtgctcaggaaacactggtgggagagcactcgggtctgctcagc

SEQ ID NO: 511916 - DNA, 619 bp, Homo sapiens
gcaggggcagaggagatagggaatccttgcaggcccccagccggggctcaggcacagagacagtgcaggtgggcaaagggaggagacgtggagaaatattttggaggcatgccctgatgaatgagcccaggatgcacccttagtgtcagtgtggagctctttccttgactgtgtgatgagctgaactcgggggtattttctggacattgaggtgctacaccaagagcccaggacaggctaagtgagcactagcagctcctggcccacctcaaaagcaggagagacaggggagactggggaggccggggyagaaggggaagccaggaaggtaggagaggccagggaagcagaggaggccagggaggcaatggaggcaggagaggctggggaggttatgtcctttccatgattctgccctggatcctaagcccctgaactccctgagcttccccacccccaagggctggaatcatgttgcacaatggtctccccactaagctcctgatggcagcccctaccctgctgtgctccctatttcaaccctaacagctctcacagtgggcagcacatagtaggtgctcaggaaacactggtgggagagcactcgggtctgctcagc

SEQ ID NO: 511917 - DNA, 619 bp, Homo sapiens
gcaggggcagaggagatagggaatccttgcaggcccccagccggggctcaggcacagagacagtgcaggtgggcaaagggaggagacgtggagaaatattttggaggcatgccctgatgaatgagcccaggatgcacccttagtgtcagtgtggagctctttccttgactgtgtgatgagctgaactcgggggtattttctggacattgaggtgctacaccaagagcccaggacaggctaagtgagcactagcagctcctggcccacctcaaaagcaggagagacaggggagactggggaggccggggcrgaaggggaagccaggaaggtaggagaggccagggaagcagaggaggccagggaggcaatggaggcaggagaggctggggaggttatgtcctttccatgattctgccctggatcctaagcccctgaactccctgagcttccccacccccaagggctggaatcatgttgcacaatggtctccccactaagctcctgatggcagcccctaccctgctgtgctccctatttcaaccctaacagctctcacagtgggcagcacatagtaggtgctcaggaaacactggtgggagagcactcgggtctgctcagc

SEQ ID NO: 511918 - DNA, 265 bp, Homo sapiens
tccctgcctcgcggcttgccagtggcttcggagctgctggaagggctggccatggctccgcgggctctgcctgaacttggggaagaagaaggacccggctcaagcggcttctcggcggagctggggcgtctgagcrcgggctcggtgggtccgcgcggcgcggagctgggtatcggggccggcccgggctcctccgcgggccgcgcctggctctctggcgccctcttctggccgctctcgcgcacctctgccacgccgggcccag

SEQ ID NO: 511919 - DNA, 559 bp, Homo sapiens
tgcagcctgagcagtacagccaggggtaggggtggggagagggcgtcgtgcaaagtggcaagggaaggtgactccccttggccttcyccctggaagacccacatgaccaacagcaaggcaggggaggtacatggcaggcaggggcggaagacgcaggcaggtggcccccaccctccgtcactctgcaggtgggtgggccagattggccagaaccttggcctggtccacagcgtcgagcaggttcttggcgtccacagccagggtgtgtgaagccgtcagcatctgcctcttgcactcctcacttagggaggtcacggcgttctgctgtgccagccgcatcttgttgatgagctctgccaggtctttgttgagcagtttctgggtgccctcgatctgtaggaagatcacacaggacaggttgagaggccacaaagtctgtgcttggaggatagggaagccacagaggtgtccacctgcatgctggccaaagcaatcagaagttccctggaagcaaatcagacctaggagagggctgaatgcaacaccccgtgcagggtcg

SEQ ID NO: 511920 - DNA, 559 bp, Homo sapiens
tgcagcctgagcagtacagccaggggtaggggtggggagagggcgtcgtgcaaagtggcaagggaaggtgactccccttggccttccccctggaagacccacatgaccaacagcaaggcaggggaggtacatggcaggcaggggcggaagacgcaggcaggtggcccccaccctccgtcactctgcaggtgggtgggccagattggccagaaccttggcctggtccacagcgtcgagcaggttcttggcgtccacagccagggtgtgtgaagccgtcagcatctgcctcttgcactcctcactyagggaggtcacggcgttctgctgtgccagccgcatcttgttgatgagctctgccaggtctttgttgagcagtttctgggtgccctcgatctgtaggaagatcacacaggacaggttgagaggccacaaagtctgtgcttggaggatagggaagccacagaggtgtccacctgcatgctggccaaagcaatcagaagttccctggaagcaaatcagacctaggagagggctgaatgcaacaccccgtgcagggtcg

SEQ ID NO: 511921 - DNA, 559 bp, Homo sapiens
tgcagcctgagcagtacagccaggggtaggggtggggagagggcgtcgtgcaaagtggcaagggaaggtgactccccttggccttccccctggaagacccacatgaccaacagcaaggcaggggaggtacatggcaggcaggggcggaagacgcaggcaggtggcccccaccctccgtcactctgcaggtgggtgggccagattggccagaaccttggcctggtccacagcgtcgagcaggttcttggcgtccacagccagggtgtgtgaagccgtcagcatctgcctcttgcactcctcacttagggaggtcacggcgttctgctgygccagccgcatcttgttgatgagctctgccaggtctttgttgagcagtttctgggtgccctcgatctgtaggaagatcacacaggacaggttgagaggccacaaagtctgtgcttggaggatagggaagccacagaggtgtccacctgcatgctggccaaagcaatcagaagttccctggaagcaaatcagacctaggagagggctgaatgcaacaccccgtgcagggtcg

SEQ ID NO: 511922 - DNA, 559 bp, Homo sapiens
tgcagcctgagcagtacagccaggggtaggggtggggagagggcgtcgtgcaaagtggcaagggaaggtgactccccttggccttccccctggaagacccacatgaccaacagcaaggcaggggaggtacatggcaggcaggggcggaagacgcaggcaggtggcccccaccctccgtcactctgcaggtgggtgggccagattggccagaaccttggcctggtccacagcgtcgagcaggttcttggcgtccacagccagggtgtgtgaagccgtcagcatctgcctcttgcactcctcacttagggaggtcacggcgttctgctgtgccagccgcatcttgttgatgagctctgccaggtctttgttgagcagtttctgggtgccctcgatctgtaggaagatcacacaggacaggttgagaggccacaaagtctgtgcttggaggatagggaagccacagaggtgtccacctgcrtgctggccaaagcaatcagaagttccctggaagcaaatcagacctaggagagggctgaatgcaacaccccgtgcagggtcg

SEQ ID NO: 511923 - DNA, 500 bp, Homo sapiens
cattcttgagctccagcacggcccgcaccagctccatgacattgaggtacaccaggtcatcrgtccggtccaggttagctgtgggctggatggactgaggggaagacgcaggtggccagtgagttggggagagccaggggcacggaatgattctttcctgggcaggcaccactgtggccaactccaccaccagcccgattggaaaggactcttctttagaataattgtgccctgtcccggggtgcattgcctctgtccacttctggggcagtttccagccagggagccttaacggaatactagtggtagcctcacaacagactattagaaccaccacctggacatagggtgcaggcaggctttttttctttgaagagacaggatctcattctgttgcccaggctggagtataatggcacagtcatagctcactaatgccttgacctcctgggctcaagcaatcctcctgcctcagtctcctgagtagcaggcgtgccacc

SEQ ID NO: 511924 - DNA, 500 bp, Homo sapiens
cattcttgagctccagcacggcccgcaccagctccatgacattgaggtacaccaggtcatcagtccggtccaggttagctgtgggctggatggactgaggggaagacgcaggtggccagtgagttggggagagccaggggcacggaatgattctttcctgggcaggcaccactgtggccaactccaccaccagcccgattggaaaggactcttctttagaataattgtgccctgtcccggggtgcattgcctctgtccacttctggggcagtttccagccagggagccttaacggaatactagtggtagcctcacaacagactattagaaccaccacctggacatagggtgcaggcaggctttttttctttgaagagacaggatctcaytctgttgcccaggctggagtataatggcacagtcatagctcactaatgccttgacctcctgggctcaagcaatcctcctgcctcagtctcctgagtagcaggcgtgccacc

SEQ ID NO: 511925 - DNA, 500 bp, Homo sapiens
cattcttgagctccagcacggcccgcaccagctccatgacattgaggtacaccaggtcatcagtccggtccaggttagctgtgggctggatggactgaggggaagacgcaggtggccagtgagttggggagagccaggggcacggaatgattctttcctgggcaggcaccactgtggccaactccaccaccagcccgattggaaaggactcttctttagaataattgtgccctgtcccggggtgcattgcctctgtccacttctggggcagtttccagccagggagccttaacggaatactagtggtagcctcacaacagactattagaaccaccacctggacatagggtgcaggcaggctttttttctttgaagagacaggatctcattctgttgcccaggctggagtataatggcacagtcatagctcactratgccttgacctcctgggctcaagcaatcctcctgcctcagtctcctgagtagcaggcgtgccacc

SEQ ID NO: 511926 - DNA, 627 bp, Homo sapiens
gtggggactttttagcaaagctttcttcaaagcagatcttaggcaagagcccaatataaaccaggcaaaaatattcctatccagggttgaagtgagaaggcgaggtacctaccaggcccttgagtcccctccatggatctcctggggtgcaggtcatctggaattctttccgggtctcaggctcgtgaggtgctcattgtgtatgtgtcatggragctggagaatggctgtaggtgcaaatggacttggaaaagaacaatgtcaaagtcgtaagtccagcctggggcatggcaggtttatgtatgtgtgagtggcgggaggggctgtagatttgaactccctgaaagaagatatgtgtaattcttaccaaagagtaaatgcatatgtttatgaaagaaagttcattgctatcatctggctctccaaggcacctgtgaccccaaaagattaagaacatctctcataagatattatcatccgttctacaaacctttcataaaaatgacctcaaacttgagctcctttttaattcagacaaactaggccataagccctgttgaggaaagaaccgtatctgtatggagagtcactgttacatcccaaggacacagcctggtacctgacaca

SEQ ID NO: 511927 - DNA, 627 bp, Homo sapiens
gtggggactttttagcaaagctttcttcaaagcagatcttaggcaagagcccaatataaaccaggcaaaaatattcctatccagggttgaagtgagaaggcgaggtacctaccaggcccttgagtcccctccatggatctcctggggtgcaggtcatctggaattctttccgggtctcaggctcgtgaggtgctcattgtgtatgtgtcatgggagctggagaatggctgtaggtgcaaatggacttggaaaagaacaatgtcaaagtcgtaagtccagcctggggcatggcaggtttatgtatgtgtgagtggcgggaggggctgtagatttgaactccctgaaagaagatatgtgtaattcttaccaaagagtaaatgcatatgtttatgaaagaaagttcattgctatcatctggctctccaaggcacctgtgaccccaaaagattaagaacatctctcataagatattatcatccgttctacaaacctttcataaaaatgacctcaaacttgagctcctttttaattcagacaaactaggccataagccctgttgaggaaagaaccktatctgtatggagagtcactgttacatcccaaggacacagcctggtacctgacaca

SEQ ID NO: 511928 - DNA, 572 bp, Homo sapiens
tgcagtgggagagacggatgaaggggatacctacctggagagcaagggggtggcctggcagctatttttgccccaacaattgggctcagctattccatcgggatgatgacacacagaggatgttcaggagtagaaggcgctgtggtggagggaagggcatcctcatgttctacctccccgggtgcccctcctcccagagctcttggctgtaccatccatttgtgcctggcacatgttttcttgagataaaattatttttcacaagtacatgcattgctaaatgggatgaaggaaaggcgggcccccgtctcgtgcccctttgtctcccaatcataatctagcaaatgtcaggatacggagctcacactccggaaacatttgttcagatgcrgagaagttttagggaaaagattatcaaggaaaaagtgcttgttttgggatggtctctgatacctgtggaaatgaggggcatcagagagattcagataagaacaagatgcacaaaagctcatccactcccaaaagagctgagtgagtggaggactccctggccccaggatgcggccacttca

SEQ ID NO: 511929 - DNA, 607 bp, Homo sapiens
tgaggccagaatcattctcaccatggtcatgtaggtggcctctgatttttcacttggttcttcttcctcgatcacctcccgtacaattattggggagtaaatgtgtttctagagggggaaaatggtacaaaaattcctaaaaattagatgaatcttatacaccagagaaaaggccacccactcctatttgctrggcatcgaccacccaaactgctggttcagagggttactgagacctagagaattctcaacaatgataattcagtcttcagtcttcttgaaaattaactgtcaaagaacacagtcttaagaaccaaactctttgcttcaaaagccaaacatctttgtttagatggatgtttaggtagcagcaggggttccttatcttgctaaattccttgtattctggggttatttccttctaattacagtaaaggcagaatggcattaatcagcagtgaattgtcatcatctccctcagaggatttatgtggcagggccagccctcattgaacctcacaactgtgaggttcatggtcctgtcactcgttggtaaagcagtatcatccagtggcccattcttggaccactgcactctactgggaaa

SEQ ID NO: 511930 - DNA, 563 bp, Homo sapiens
tctcactgttttgagttgattcaccaaaggcaaattttggaatgttcttgcgctttgtgcacttggaggggaaaacccaactacatatgcactttcttggttgtgtgtgctatagagaggttggaaggggtggttggaaggggagagaaactgagatggccctctgtgactcgactgctgggatgtatctgcttttgggagcagactgagtttcttttgcaatttgtcttattgtttgggtctactggcracaataaactatctcccctgaaaatccctcgagtgtggctttattcaggggttcagggcagggtaggctgatgcttcaccaggatcttaactggaaccctaggtgctcctttcctggtaatcccattggcgctgccagatctccagcatctgagggcctcaatgcccctgcctcacaaggggaaggttgtctaccccacacttgtgcccccacagatgtttcatccctttgccttccccaaccccctggggactccgctcaccctggaacagagtggctgaacacctacttcttggagggctctcgattattt

SEQ ID NO: 511931 - DNA, 482 bp, Homo sapiens
ctggccctctgctttcttactcagttgtggtcttccccaggtcccctctatacccctgtacygctttacctggttcttctgtatctgatctatcagtggtggggacgtggggggtgtgggtgaacctctatgtacagtgagaaatacgctgggagagggtgggaaatttgaagacaggtgaccttggggagcttctttccaaagatgaggccaagtctagcttgccttcctaggcccaccagccaggtcagaaactcctgtctttccagtcaagactgtagatggaagatacaagtcctccctgcctccctatccctgagtgctcccagctttgccaaatctgtcaacatctccctcaactccccccatagcttgctcatacccgtgcaggctgtccactggagctgagcctgctggaagggctaaggggtggatttcatggccatcttgaacttgaagggcattgaaggaggaaggtatgg

SEQ ID NO: 511932 - DNA, 520 bp, Homo sapiens
gcccatgcccagggtggggtcagggagataaagcagagagaaactgggctgggagcagagagtgccatgctctaccctggagacccaaggccaggccaccctgcagagctggtgcccagagcctccagcgtacaggagaggaggcaaacagaacctgacactcagcagcgcccggcagacgcttctggaatgaatgaccaaatccacatggagagttgaaatgggctaggaacctcagggagacgggcagctcacagctcagcagggccgctccagtagagcaggccaatgccaggcctcctggcaaatttcccggggcccaggcacaactgtcacatcaggaaaggggcaggggtgaccagcccatcggccacgggggcacttcactgctcccacagaagctcggcacccacaggcctgggtgacacacgatccccatgcctggcatcacgatggctgcccrccaagtccctccacccaccaggactgactccctttggtcagcgattccagatcacca

SEQ ID NO: 511933 - DNA, 604 bp, Homo sapiens
aaatgccagtactttcacctcgaagtgacttctccattttattgtcttttaagaaattctcctcatctccaatagtctattttggtactgaaaatgaagttaggaaaaaaaatcattttcgattttaagctctccgagagaactttgcctaccttttttctccacaatatccctaaaacgtattctaatgctggggataytatcagtatttaataaattattgttgaataaataataaatacattactgaatgaagttaacataagtatcattttctcatatcaaccttccccaatcccttataataggtcatgtcccctattaatcacctttaagtccccattcttctccttcatggcaccactcaccattgtaattaagttataaactgggtaattggttgtttaatttatattttctagcatactttgagctccatgagagcaggtaccactctgcccctattcactgatatctgctctgtgcttaaaactgactgaaacacagaaatcgtgaaatgaatatttgttgtaaattaatacatagtaaacaatgtaattaaggaatatgaaaaatcttagatgagagaagcaatttgcagctt

SEQ ID NO: 511934 - DNA, 269 bp, Homo sapiens
ctaaagcttcctttcttcatacatgtaatcctaagaacaatattttgttttaatttaarcctaaaattacaaaactaagccatgcctgatgctggaaaaggcaactattttcacaaatgcagttacaccatcttggcttgagagttttgcaaatattcatttggaagctgaggttattagcctttactcctggtaccagaatgacagcataaatcctcggaccaatgtacactgtagtacattcattaagatacccccagatttttgga

SEQ ID NO: 511935 - DNA, 470 bp, Homo sapiens
caatggtaacagacaaataaaggagaaaatgtttcttgggatctttttatttctttcttttagatgctaaccctaaggaatccattcaaactcttgattactctccatgctgaacaggttagtctgaagtattcttgacccatgaaacggaattaatcaaatcctagtggctcagcgaagctcaccttagacctttcatctgaaattaatatgttatgattgattaatacaactaatggataccgtatttctgagcataccgacatatgacaacacaattcttttcaaacaaagaggattcaaaattctatgtgtatagatagccaataaacaaaagctttwaagtcaatataatctaatacctgaaaacttgaaattttttttgtagttgtttaaacagttctaatttatagttagggactttgattttcaatcttcattaacaagcacagtgcaataaagatggatca

SEQ ID NO: 511936 - DNA, 452 bp, Homo sapiens
ccttctgattatggagaggctgttttgcaatggtggccttctggtgcatattcacataggacacacatattttcagactctgagccagcacttttgaagacatctgttgtgaaagatttgcggggttttttgtttgtttaaatatctaatctgtcacaaaccaacaattttctagaactgctctaagtccattcctagctctttagccacatattttttcaccaaaactttttgccacaaagccctctcatattactattcctttattagacatatgaccagaccattggtcactgagaatcagtatatatcttgacccgagaccatctactcrtttgaggcaaagtgaaaaaaaaggtatagtttttgaacatctgccagtgagaagatttcttttctttgttgcctgataatccctgagaaaagttttaacactgctgcaaaatggatct

SEQ ID NO: 511937 - DNA, 452 bp, Homo sapiens
ccttctgattatggagaggctgttttgcaatggtggccttctggtgcatattcacataggacacacatattttcagactctgagccagcacttttgaagacatctgttgtgaaagatttgcggggttttttgtttgtttaaatatctaatctgtcacaaaccaacaattttctagaactgctctaagtccattcctagctctttagccacatattttttcaccaaaactttttgccacaaagccctctcatattactattcctttattagacatatgaccagaccattggtcactgagaatcagtatatatcttgacccgagaccatctactcgtttgaggcaaagtgaaaaaaaaggtatagtttttgaacatctgccagtgagaagatttcttttctttgttrcctgataatccctgagaaaagttttaacactgctgcaaaatggatct

SEQ ID NO: 511938 - DNA, 526 bp, Homo sapiens
cattttctgaaaggagggattaaattttattgaagaccactttttttaaataaactacttaatgtgaagataaaactctgaatatctacattattagtaaccatgatgattttcttaaaaagacaattaaacaggtttttcaatcagaaatacaaaataatagaggaggaaaaatctgataagagaacaggagaggcatcattttgggaacrggaattgccaatgcctacgttgtttgcatatgaaatgtagattcttccatcttcctaaactttccagtgaagtccacataaatgcctatgtgagtaggttttgtcttatttttgtgttgtgcaaattagaaaagggtacatattttctgccagtgacaataacagcaagaaaatgagagaattcctcaattgaactaattcagcaaaagcaagagctccaagtcagagaaggatatgataatactggttcgtttagagttctcaggaatctcataaaaggccttgggctttccaatattttaaaaagttgaatc

SEQ ID NO: 511939 - DNA, 516 bp, Homo sapiens
gatgtgtagtcaagccattaccatggcttctcagcataaatagaaaatactaacactttatggtctcaaaattttgtagactctgaactttcttgtatgtgattatgcagaatttcttaaatgtttcttaatcagccagtaaaatagtcacctttcttccaaagttaagaaaagttaccaaaacttggcaataagaaataaggcaattaagtaagtggcatgtcttttcaatgtcatatggggaaaaaagcccacttaaggactgtctaagataatgcactttcttctactcattgtttactcttcttcagaattcctgaacttaaagaagttacatgtaagtagttggatttttgttcattttgtaaaaacacaaaaacagtctgtctggcagaaagaaagataacaacaaagtttacaatttagtgaactggaagatattagttactctcttcaatcttgttgaattggtctaaacatctktttgtttttttcattaattaatgaattaaataa

SEQ ID NO: 511940 - DNA, 485 bp, Homo sapiens
tctacttattgactcttattttaagtagggtatgtctcttattttttgaggtatacctagattaataaacattctgtagtcttgagcagatagaaactacagrttttgtttggtttatatctacatatttatttttggggaggggctactgtacttgttttaaatttcactttgtaactgttcattgttagtatatacatttttaagaattgaccttatagtctatgctcttacaaaatttatttattaagtataattgttcttatatatttctttggattggctatgtccaaaatcatgtcatctgtgaatagggattattttatctcttcttttctaatctgtgtactttttaatggctttgttttcgttgccttattgcactggctaagacttccaatattgtgttcagtacttgtggtgagacacccttcccttattctcaattttaggagtgaagcattaactctttcactattaaatgt

SEQ ID NO: 511941 - DNA, 626 bp, Homo sapiens
cccaacatgatttactcacataggtgttaccaggagaccttagacccytaccaagtgggactctctataagggtgcatgagtgtccttatagtatgtcacctcatttgcccagagtaaggaattcaagaaagagccaggaggaattcacaatgttttttatatcctaatttcagatgttgctcacagtcacttcgaccgcattctattccttggaagtgagtcactaaggacagttcacatgaagaatataagataatttatggccatattttaaaaccaccaaagcctttttaaaaccagtcaataactcatactttcttaaaaaataaggtccaagcagcttcatatcgttaaataataatctagcccctgctttcttccccacaatttcattcctgtaatgcccccctaaaccctgcactccaataatcttaaactgcatagaattccctaaatagatccaactattgacaactttgtccatttacaggggctacctaaaccttctttgcccttccttccctgtctatctgacaatatccattcattgcatctcaattgaaagttcattttaaatacaaagcccttcctgactcctggaaggaaagagacagaaatttaaata

SEQ ID NO: 511942 - DNA, 306 bp, Homo sapiens
ggatagatgacaaagtatttgtctaacatttgttttggggaacggagaggtttaatttcaaaactgagctgttcttactccaaaaatatasctttgaaactatcagttgatgcctcaatctattatcccattaaacactctccctattcaagaaaaccgtggcaggtttataatgagttaacatctatattttataaatccatggatatcatcttgcattaattgaatgtctgagagcaacagacctctgtctagatatggaggttatagtcatacacgcatcatttggactgatgggacaaatat

SEQ ID NO: 511943 - DNA, 446 bp, Homo sapiens
agctgccacatcaatctgagaatttagtgtctgactgacactttctatttccagagcagaagcctgcctataggaacagttagaaacrctttcttcttggcgatgaagattggaaagctggggctgggatcgaggtaggggtgagccggcttctaggaaagccaagcatctacaagtgcatccaccccgaggcatcaaaacagtgcagtctgtgtggttagctgttcacggaaagcagattcagaaaagggcatttctgttgcttttaaattcatatgattagaaaaaggatactgacttttttaaaaaagtgattatttggattatttacaagataaaaaagtgcagtggtttactttcacaggagcaatgtagaaatctgttaaagaaagaatctccaaagcatgcaaagcgctaatgcaagccctggattcagcgggaggagg

SEQ ID NO: 511944 - DNA, 446 bp, Homo sapiens
agctgccacatcaatctgagaatttagtgtctgactgacactttctatttccagagcagaagcctgcctataggaacagttagaaacactttcttcttggcgatgaagattggaaagctggggctgggatcgaggtwggggtgagccggcttctaggaaagccaagcatctacaagtgcatccaccccgaggcatcaaaacagtgcagtctgtgtggttagctgttcacggaaagcagattcagaaaagggcatttctgttgcttttaaattcatatgattagaaaaaggatactgacttttttaaaaaagtgattatttggattatttacaagataaaaaagtgcagtggtttactttcacaggagcaatgtagaaatctgttaaagaaagaatctccaaagcatgcaaagcgctaatgcaagccctggattcagcgggaggagg

SEQ ID NO: 511945 - DNA, 446 bp, Homo sapiens
agctgccacatcaatctgagaatttagtgtctgactgacactttctatttccagagcagaagcctgcctataggaacagttagaaacactttcttcttggcgatgaagattggaaagctggggctgggatcgaggtaggggtgagccggcttctaggaaagccaagcatctacaagtgcatccaccccgaggcatcaaaacagtgcagtctgtgtggttagctgttcayggaaagcagattcagaaaagggcatttctgttgcttttaaattcatatgattagaaaaaggatactgacttttttaaaaaagtgattatttggattatttacaagataaaaaagtgcagtggtttactttcacaggagcaatgtagaaatctgttaaagaaagaatctccaaagcatgcaaagcgctaatgcaagccctggattcagcgggaggagg

SEQ ID NO: 511946 - DNA, 446 bp, Homo sapiens
agctgccacatcaatctgagaatttagtgtctgactgacactttctatttccagagcagaagcctgcctataggaacagttagaaacactttcttcttggcgatgaagattggaaagctggggctgggatcgaggtaggggtgagccggcttctaggaaagccaagcatctacaagtgcatccaccccgaggcatcaaaacagtgcagtctgtgtggttagctgttcacggaaagcagattcagaaaagggcatttctgttgcttttaaattcatatgattagaaaaaggatactgacttttttwaaaaagtgattatttggattatttacaagataaaaaagtgcagtggtttactttcacaggagcaatgtagaaatctgttaaagaaagaatctccaaagcatgcaaagcgctaatgcaagccctggattcagcgggaggagg

SEQ ID NO: 511947 - DNA, 656 bp, Homo sapiens
tgaaagccttagcatcttctaatgcccacactagatatccaggtataaccctccactactctttcctcacatccagtcaatcacagtctagtctcttctaccctcaaaatgtctcttgtatctctcactctcaacacttccttcattttcactactaacaatactaacaatacattttcccaaagcaaaagtgtgttctctgcatgttctgagcatgaaatgcctttgtagaaagaatctgatttatgtctacctagtgagggtgtcccctgtcctccttctcaaaatccaattgagttcctacagaaccaaacctcttcctgcccttatatgcaatgacctctgtctggaatacttttcactccttgttcaccctgagaatcctaattattctttaatattcaactcacatagatacagtttaccaccccaatgcagcatgtcttataatgtgtatcctgatttgtatgtgtctgtctctatctaccactgacctgtgagtgagggtagagagccaagcatgaggtcagtgcctagtgaagtcgccaataaggaacatgaagcaaatgractaagtctatatgtcattttgcatatactgatcatttcgacaatcctatatatttcttgaggacttcataactttttccagctct

SEQ ID NO: 511948 - DNA, 634 bp, Homo sapiens
gaatctcaccagtgtacaggtgggccattttgctggaagaacaaaataaaattcaaacaacaaacaagtgatactttagaggtagacagccacaaggttgtaagttataaaatatgttgtagttattattattrccattgtaatcccatttaatttttggtgcatacagatttgggggcagaatgctagatcctaggatacaaaagtaaaaagtaaggtatttgttatcaaggagttcatagtttaaccatcagagacacaagcaggtgttgtgataggggtttgtatgagtatacaagtgtacaatgataaagctccaaacttcatggggcagagcactaggagaatggaaatggaatcttaaacacaacttgaaaagcctttcacaaaatgttaaatccctgagtttataaaaaagttcctctgcctccttttcatcttcaaggtaaccttcctagaccaggctctcttttacttatacttgaatattgcaacactttcctaattgcctaattcatttccgtggctctatattctttcaattttgacctaccctactaagtatggaaagattaagtatcccaaaatatcatttcctttatttaacttccctgctcaaaacactatgattgct

SEQ ID NO: 511949 - DNA, 587 bp, Homo sapiens
tcttccttcccatccctcaaaaaccatattccaaatgtttggaaatgatctacctattctaatctctcttcacttagagaactcatcttctcctgagggtactactagtaattcaacctctctgattctaacaagcgcctaacagactgtagtttttccatatatgaaagctggtaataacaacaatggcaataacaacaaaagcaacaacaacaataatgtctccaatacataaacgtgatgactcctccatgtatagctcaagatgaactctctccagaactccagaaacatctatcacgttttccagcaaacatttacatccacgtctccatgggcctctcacattcatcaggcaaaaacctgaaccttttatcacttttcatctggctccaaatgcaggcaaaacatagcccagtcttctgttatttatataggtaaatgaaaccattccaatccatcaaattccaaatctgaaaattatctaaaatacatttctttttcttaactttctcaacttatcaatcagtctacacayccaactgcttgtgtacagtgaatacaaccaagactcatctctatctcac

SEQ ID NO: 511950 - DNA, 533 bp, Homo sapiens
ttaaatagataatggtatttagaaaccaagatccaggcaaaaagtgtatttattattatgtggttgtcactaatcccagttctctcaatgtataaactgtgggaatacaygcatgtatgcatatacatgtttctatctgcctgtatacagacatactcacatatacatgtgcccatttatatttactactatggtaacaaatacatatatttaaatctatattcattcccatatctatatctatacatttaaaaccatgacttaataagaatatctgtaatattaatccaccacagggttcaatacagttttcttcctttctgcacttcttacacccttctctgccaatgtggaactggcttcatcatcttaaacctactcagttatatgatcaatcctttatattaccaatctcttatctgtgtcagcaccaattcccctgcctctgcatgccacagacagttgaagatgttctcatctggagacattttctttaaaattagaaaaaatttgatccttactatcactatttc

SEQ ID NO: 511951 - DNA, 624 bp, Homo sapiens
atatatagaaattcttaaaaataaccacaatatcattatcacacctaaagaattcaccataatttcttaatatcttcaatatctaggcagtttccatatttcctcaattattttatagtttatttttatagcttgctttcactagaatccaaacattgtgtgtgttttgttatgacttttaagttttgtattttagtttaaaagaaagtttatctttccttttatttcttccattttttgttgttgaaggaaccagactgttctatagaaatccctttgtctgtatgtctagattctgctgattacatctccacagtatcactgaccatgttccccagttccctttgtgtcctgtaaattggcagatctggagaactgttcacattcagattgtatgtgtgcatgacttttttttttttagtctgaacataggtagtgtcrtacaccatcagcatgtatctcatcaagccattgataatcattgcctaggcacatttattcattaggagttgcaaagtccttatttcttagagacataattatctgtgaggatgaaagaaaagtgttatcaacaaaaggaagaagattcacttcagtgaagtcaacgtgaggtggatgctgcag

SEQ ID NO: 511952 - DNA, 542 bp, Homo sapiens
gtgtcacatgactatatacattttgaaataaataatagtaatagtatgggagataatatcgaaaaaaggccataaaacaatttcaatagagaaataagctcagaacaggttcatactgaaccctcatattttacaccttaatagatctcatatcctgcaacatgggtaaaatattttaaattataggcatactcattttattcccttgttgaaaagcatttagtagattccaatgggccctaagagaaatacaacctcattagcaygtcactaactaacttcaacaaatgggataaaagcaatcttcttagtcttcatgttattactactattcactcttaattaccttgtcttctagaccagtgattctcaactgaggatgattttacctcctaggggacagttagaaaagactgaagatattttgttgttgtaattcagaaatgctaccagtatctatggatagaggccaggaatattgctaaacatcaagcctgtaatgtataggaacatctctcttcctaccccaacaatgaattatc

SEQ ID NO: 511953 - DNA, 542 bp, Homo sapiens
gtgtcacatgactatatacattttgaaataaataatagtaatagtatgggagataatatcgaaaaaaggccataaaacaatttcaatagagaaataagctcagaacaggttcatactgaaccctcatattttacaccttaatagatctcatatcctgcaacatgggtaaaatattttaaattataggcatactcattttattcccttgttgaaaagcatttagtagattccaatgggccctaagagaaatacaacctcattagcatgtcactaactaacttcaacaaatgggataaaagcaatcttcttagtcttcatgttattactactattcactcttaattaccttgtcttctagaccagtgattctcaactgaggatgattttacctcctaggggacagttagaaaagactgaagatatttkgttgttgtaattcagaaatgctaccagtatctatggatagaggccaggaatattgctaaacatcaagcctgtaatgtataggaacatctctcttcctaccccaacaatgaattatc

SEQ ID NO: 511954 - DNA, 644 bp, Homo sapiens
gtttttttatctttcccaccattttatctttagacaacaaaactcaaagaagctcctccatgaaaagttcttcactttcaaagtatcacactcactataaaagatgagctatttcttcttcctggggaaaatcccttgaatcatgttagataccatgccccttcttgccttactgaagagataaaacttttgatgatcttgtctctatttatatatttcacccctccycctcaactgaatccttccaatgactttttttcctttttaaaaattaatgttgcagtaaaatatatacatcatttaccattttaaattgtacaattcagtggcatcaagtatatttacactattgcacaaccaacacattatccatctccagaagttttactaacggcttttaaacaaattcaggcattcctcaaataaaacgttttgccatcttatttgtcacctgttatgtcatctcatcctcctcctgcaacactccttctcttcaaagccagcttcatatcccatggtactttctcactaacctcttactcctaacccactccatttgggttgagtgtatcattcttccaaatgatttcaaaaagtcagtaacaggtctccatagggatgcattcaaggagctctttttagtt

SEQ ID NO: 511955 - DNA, 644 bp, Homo sapiens
gtttttttatctttcccaccattttatctttagacaacaaaactcaaagaagctcctccatgaaaagttcttcactttcaaagtatcacactcactataaaagatgagctatttcttcttcctggggaaaatcccttgaatcatgttagataccatgccccttcttgccttactgaagagataaaacttttgatgatcttgtctctatttatatatttcacccctccccctcaactgaatccttccaatgactttttttcctttttaaaaattaatgttgcagtaaaatatatacatcatttaccattttaaattgtacaattcagtggcatcaagtatatttacactattgcacaaccaacacattatccatctccagaagttttactaacggcttttaaacaaattcaggcattcctcaaataaaacgttttgccatcttatttgtcacctgttatgtcatctcatcctcctcctgcaacactccttctcttcaaagccagcttcatatcccatggtaytttctcactaacctcttactcctaacccactccatttgggttgagtgtatcattcttccaaatgatttcaaaaagtcagtaacaggtctccatagggatgcattcaaggagctctttttagtt

SEQ ID NO: 511956 - DNA, 672 bp, Homo sapiens
taaattatacacagattccttagtgatgactaaaagtgtcaaatgatgttgttagcaactaatagtttcccagagacttcccgtcatctcaaacaaacatccttatcacaaaatttggtaatgtaatattaaagcagcaagacaatactcaaacaaaaggcatctaaagatgctgaggtaaacatctgtattttaagcaagcttgagatttccaaataataattgacagagaaagtaatttttctgtttaataatttaatttagagtgcatttctgtttttaggtttttctattttgtcaaacagttctgtactcttttaacgacttccatgaaaactatttctgtgcacacaataggcagagggtttttcaaaatgtgcaaagtaaagcgcccctctacctgttatttaagccagtatgttctaaagcacctctcattctctttgatgctacactgcagtgtatctcatagaacaccttttttaaaaaccttcaattcctttggtcagagattagagcatttgatgtcatatataaacaataaaatcctttttatctcagtggtatttcattatactttgtracttagaaacaaaacgggcttgaagtcaagccaagacacatctttaagattgctatgataatgctaatatgccctttaaaattgaggcc

SEQ ID NO: 511957 - DNA, 593 bp, Homo sapiens
ttgttgctaataaggcaccaatgaaagaggtgagcaaaatggttcttcagtgtcaagaacaaaaatatagcatgaaaattattgtatggagtaggaggtgggggcatctcagcaatctaaaactactcaaagcatatctgaatggccttgggtgacttgcaaatgcccttggaccagggcaaggctactttgtaagaggaaataaaacttttctcatgagagaacgttgcccttgtggttgggggaaagggtgctgtggaaagggaaaaagttcaagttctagagttgaaagggagtttatacagtagttgttscaagtcccacagggttgatcgctccttgttgtcattcttactgctccccagtctcactgatatagggcaagaggagcacaatgtagaatcttgaaaagactctgacattgcttgcctcagctctctcacatgtgtcttggggagaaggaaacctcaaagctcaaaggacacatcagaaaagctgtgcctcatcttcttgctctaagaggatttgggtttaatttccttttccattctgccaaaggcagtaaagaaaagaaagatctcaaccttgctgag

SEQ ID NO: 511958 - DNA, 436 bp, Homo sapiens
tttccaaatttccttaatatccagatttctccaaccacagtagagttgtgtttaagactatatccattacaccatggtttggagagtattacaagttcccccaaatattggtgcctatctggaatctcttgaattaaaaaagaaaatgtatgggaaacacatacccggcacaagaagaataytgaatggaagttaacagactctgaagaaaaccaaacaacatgtaaaacttgtatattaagaacaagcaatataacataaataaaagaatgcaggatgttaaagaaaggagtagggaaggaagtagaaaggtggttcttggcctatgccatgcattttccagctttgcttaaagcaccctctacagggaacataggtttttggaggaatcccagattttgttcaattagtgccttttatccaggagttccatggt

SEQ ID NO: 511959 - DNA, 436 bp, Homo sapiens
tttccaaatttccttaatatccagatttctccaaccacagtagagttgtgtttaagactatatccattacaccatggtttggagagtattacaagttcccccaaatattggtgcctatctggaatctcttgaattaaaaaagaaaatgtatgggaaacacatacccggcacaagaagaatattgaatggaagttaacagactctgaagaaaaccaaacaacatgtaaaacttgtatattaagaacaagcaatataacataaataaaagaatgcaggatgttaaagaaaggagtrgggaaggaagtagaaaggtggttcttggcctatgccatgcattttccagctttgcttaaagcaccctctacagggaacataggtttttggaggaatcccagattttgttcaattagtgccttttatccaggagttccatggt

SEQ ID NO: 511960 - DNA, 579 bp, Homo sapiens
atctgaaaaatgttttcatctgactaattaggttagaaatctcaggagaacagtcctatttgctatatttctaatggaaatgtttctgtttctggttgagaatcttgccagaacagatttctccttcaacacttcctcttcaagtaggaaaaaaagaaagcaaccttttctttcttatcatttgggaactataaacttgagttgtaagcaacttacgtacaggggctatgacttcttaatatttttatgtgcctattgtatagcatgaagctgtgcagaatgccagaaaataaaagyttattggtgattattgacatgtcttttttccctccctaattatgctatttcagtgcagcattcataaagtcctgtttttagtatagacaggtaagatggtagaacccagaatatttttttctttatctagagcacttttttcaatttatggtccatgaatgtaagtacttagtgaattgttctattctctcattgccttataatcagtcttactttcttaattggtagagttctctaaaggaagaagctatttttcctttgtgttctccagggcatttaaac

SEQ ID NO: 511961 - DNA, 331 bp, Homo sapiens
gatagaaagtcagccgtatgcagtaccttgtgaacattttggctcaagaaawcctctagcaaagtaagcatgaaagaatcttggaaaccagaatctctgtaccctttactttctttgcatttagtgtccccctaagagggcttaggaggtccatggaaaatgtgcttgccattggtcaaatcactgaacaagaatgttcaggtgattgggctgacactaggaggcatgtgattaacaaatttggaagatgccataggcaatgtaaaagagagaatattcatgggcactggagaggattgtgaattgtgaatagacactatactatggagat

SEQ ID NO: 511962 - DNA, 331 bp, Homo sapiens
gatagaaagtcagccgtatgcagtaccttgtgaacattttggctcaagaaaacctctagcaaagtaagcatgaaagaatcttggaaaccagaatctctgtaccctttactttctttgcatttagtgtccccctaagagggcttaggaggtccatggaaaatgtgcttgccattggtcaaatcactgaacaagaatgttcaggtgattgggctgacactaggaggcatgtgattaacaaatttggaagatgccatakgcaatgtaaaagagagaatattcatgggcactggagaggattgtgaattgtgaatagacactatactatggagat

SEQ ID NO: 511963 - DNA, 576 bp, Homo sapiens
ctggcgtgatggcagcagccactccagatggaccaccactgttatcactactaaagaatttctattttgtctgatattaatatgttacatgaactctatttccagtatttgtctgttgcatctttttccatatctttattgtcatacattctctaagatgcaagacattcagcaggtacatccagttgtttacaacattcacttgttttgattgctcagtgaccatgctgtacctttatttctaacagtttgatgattacagttaaatttatttccatttttctttaatggggacttatgcttctgattatgatgaagaagaatatgaattacctctcttctcaagataagatcaaaatagataaactaaaaattatactttttaaagagtctattgaagagcagaggattctaagccttgacaaactgaattccagagaaaggcaagacattaatatgtgagccaggagatgaagaggcttcagtacatggggccaaaattctggaaaggatcagcccacaaatgggttsagccttttgattacagtgagaggtaatgggatagattaggatttg

SEQ ID NO: 511964 - DNA, 526 bp, Homo sapiens
tgcttcctcaaaggaacctcaggcaccatgcatgtctcttccacaacactgacacagtttcaatattgcattttggtgtcagtatttttttttttaaattatttccataggttttgggggaacaggtggtatttggttacatgagtaagttctttagtggtgatttgtgagattttagtgcacctatctccagagaagtatatactgaagccaatttgtagtcttttagctctcacctccttcccaccctttccttctgagtccccaaagtccattgtgtcactcttatgcctctgcatcctcacagcttagctcctgctataagtgagaatatacgatgtttggttttccattcctgarttgtcttacttagataataatctccaatcccatccaggttgctgcaaatgccatttattcattcctttttatggctgagtagtattccatcatacatatataccacagtttctttctattttcttttatgcttcatattttatttcccctctgccttcccatccca

SEQ ID NO: 511965 - DNA, 584 bp, Homo sapiens
tgcctgagcctttggctccaactaagcagcctgctccttcccacacgggctctgggctgtacctgtgagccatccttcacaccctctcacttccygcctccttagctttggcgaggactttgtacaaaggaatttgatctcagcccttgtgatgtgcgctacagtggaagtgagagcggcacgctgggccgctgttggggctggtaccccggctctggctttgccctgggaccaccctgctgggcctcagttttcttatctgtaaagtggagatatgaatagcacctacctctcagggttcatagcacagtcctagctcctgactggagcctgcaaacatcagccatttgtatggtttgaaaatgtgcccctgtgtacttgcaacccccactcccccgcgaagccccaggccccttggtgacgctgaccagagcctgctccaagtctggacctggcatcgtaatggtctcccttgcatccctgcctcttccctgctgtttaacccaggcaagtcctgaaccctccaagcctctgtagaaggcggcagaaaaaacccttttcttcccccaggcaatgctctgtgt

SEQ ID NO: 511966 - DNA, 586 bp, Homo sapiens
ttgctggcttcggcattcagttctactcttttacttctacagacaaaaagaaatgcgctcaaggacgttcccaaggtgaattgggacattggtgtggcaccactggccctcaccagtgcagaatgcaaagatgtttgggagaagagtctgtgctacacaggaaacgcttgatgtgcactggcttcctcctcacggagagggtaagtgaagagaagaatgagggctccattgaaaccacaagtcggatccatcctcgggcgatttcctcatctgcaaaatggggtgatggggctgactgtagacatcccttcctggccaaggcaggactcagcacaccttcgccctgcctttgatcaggtgacaatcccagccacatggttccaggcacagggctaagaatgccgcatgagggattccttaatcctcacaactgtccaagaggcagaggctcttgtccctgtgtctctaagccaaggcatggggaggctcctgagacagaggctcttgtccctgtgtccctaaaccaaggcacrgggaggctcctgtggctggagagtggctgggagggtgctagaaggtgagcccg

SEQ ID NO: 511967 - DNA, 586 bp, Homo sapiens
ttgctggcttcggcattcagttctactcttttacttctacagacaaaaagaaatgcgctcaaggacgttcccaaggtgaattgggacattggtgtggcaccactggccctcaccagtgcagaatgcaaagatgtttgggagaagagtctgtgctacacaggaaacgcttgatgtgcactggcttcctcctcacggagagggtaagtgaagagaagaatgagggctccattgaaaccacaagtcggatccatcctcgggcgatttcctcatctgcaaaatggggtgatggggctgactgtagacatcccttcctggccaaggcaggactcagcacaccttcgccctgcctttgatcaggtgacaatcccagccacatggttccaggcacagggctaagaatgccgcatgagggattccttaatcctcacaactgtccaagaggcagaggctcttgtccctgtgtctctaagccaaggcatggggaggctcctgagacagaggctcttgtccctgtgtccctaaaccaaggcacggggaggctcctgtggstggagagtggctgggagggtgctagaaggtgagcccg

SEQ ID NO: 511968 - DNA, 505 bp, Homo sapiens
ggtccaggggaggagggagcgccagcagggctgagagctgacatttaaaaattgagggtgcaactgtcatcctaagtgtacagtgtccatgtatttttacatgcagatacacccatatagccccctcccagatcaaaagacaaaacatttccatctcctcaggaaattctcattccagtcaatatctccccttctccgcctgtgacaaccactgatcgccttgctgtcacagtcaatccgtgaaaggacctgctcctgaacatgcaatcgagccgtgcaggaggtcatcttctgtgcctggtttggagatttctgcaacatggttgcatccctccatgaggctttcttgctgctgagtgggattccaatgtcccagtgtccacatagactccagctggttgacccattcactacgatggacactgggttatttccakggtggggtaactattgataaagccactgcagatgtgtttacacaactcccttgccttcatttatcttg

SEQ ID NO: 511969 - DNA, 518 bp, Homo sapiens
gggggagaggaagccctggataaacattagccaccactgtaactgatagtgggttttgtagaagggtcatcctattacagagactcttagagagttcaaggaaacaacctgtgactatgtgacctttcatggcacgaaggacattacagatgtgactttgagttggggagagcagcctggattatccgggttggccctgtcaatcgagaaaaatgacacgtgtccgtcactttakgaggtttattcgacaaagttaaggatgcgcatccgtgacacgacctcgggaagtcctgacgacatgtgcccaaggtggtcggggcacagcctggttttatacattttagggagacatgagacatcaatcaatacatgtaagaagtacactggttccatccagaaagacggggacagctccaagcaggaaaggggtttccaggtcacaggtaggtgagacaactggttgcattcttttgagtttagagacaaccggttgcattcttttgagtttctggtaagcg

SEQ ID NO: 511970 - DNA, 518 bp, Homo sapiens
gggggagaggaagccctggataaacattagccaccactgtaactgatagtgggttttgtagaagggtcatcctattacagagactcttagagagttcaaggaaacaacctgtgactatgtgacctttcatggcacgaaggacattacagatgtgactttgagttggggagagcagcctggattatccgggttggccctgtcaatcgagaaaaatgacacgtgtccgtcactttatgaggtttattcgacaaagttaaggatgcgcatccgtgacacgrcctcgggaagtcctgacgacatgtgcccaaggtggtcggggcacagcctggttttatacattttagggagacatgagacatcaatcaatacatgtaagaagtacactggttccatccagaaagacggggacagctccaagcaggaaaggggtttccaggtcacaggtaggtgagacaactggttgcattcttttgagtttagagacaaccggttgcattcttttgagtttctggtaagcg

SEQ ID NO: 511971 - DNA, 518 bp, Homo sapiens
gggggagaggaagccctggataaacattagccaccactgtaactgatagtgggttttgtagaagggtcatcctattacagagactcttagagagttcaaggaaacaacctgtgactatgtgacctttcatggcacgaaggacattacagatgtgactttgagttggggagagcagcctggattatccgggttggccctgtcaatcgagaaaaatgacacgtgtccgtcactttatgaggtttattcgacaaagttaaggatgcgcatccgtgacacgacctcgggaagtcctgacgacatgtgcccaaggtggtcggggcacagcctggttttatacattttagggagacakgagacatcaatcaatacatgtaagaagtacactggttccatccagaaagacggggacagctccaagcaggaaaggggtttccaggtcacaggtaggtgagacaactggttgcattcttttgagtttagagacaaccggttgcattcttttgagtttctggtaagcg

SEQ ID NO: 511972 - DNA, 585 bp, Homo sapiens
gagtttatcctggattatgtgggtggacccactgtcatcacagcgtccttataagtggagaagaggcagaagagagagaggtgggatgtgggagggactcacctggcatcgctggctttggaagtagggggagggcccacaagccaaggagtgaaggtggcttgtagaaggcggaagaagcaaggaaacagattctcccccaragcctccaggaagaacaaagcccccatgttcatctgagcccactaggactgacattgcacttctggcctccagcggtgaaagagactaaatttgtattattcataaatctgcgcttatttattacagcagctatgggaggccaatacaatgagtgtgcaagagcctacagcgagggccagagacatctgctcagccagtgacagggacgaaaggtgacaagggctctaagcatttttttggacatagggagagactgttaaactgtagtcatcgctcaacgctcttctcgctgatttatttgctattattttcaggcttttaatctttcagatgattggccacaaatttcagtgtttaaaagcaggttaccaagagaaaaat

SEQ ID NO: 511973 - DNA, 624 bp, Homo sapiens
tagaaatatcaaatcaatagaaatatcgaataaatagaaatatagaataaatagacacaaaaatgtagagtaaatataaatctagaataactatcaatatcaatacagagtgccgggggatgcagagccttgggcagccgggggtcccctgaggagcacccgcaagaagcctaaggcagcggtgggttatccaggctgggaggggcagagggagggccaggctgggaactgcctgagcaaaggcctggaggctgaaggtgcaagcgagttgaggaggagcaaggggccctgtctggtgcagtacaaacaaggcagatggctgcctgggagacggtgggtctcagggatcattgccttctggggctgcgatattagtttcaagagaggctgcctcctggctcccagccagcagaccccaaggctgaggcccaaaggaccttgttctgacttggtttctgccagctggtrttggctggtgtcttccctgcctgtctgcctgtctgtctgcaaagaccaccctctgactgcatatcaactcccgtggcattgtgagtgagacacttcgtgggggaggggtgcctgtactgtgctctgatcagatcccgagctttttccgggtcatgg

SEQ ID NO: 511974 - DNA, 693 bp, Homo sapiens
ctgcctgggtggcttccttgcttgctagctgaaagtaacagtatgtgttcattctttacacctggtctcttttctgtgaaatggcaataataataacaacgacaataatattatggacctaatagtgatacagagaattttaacactgtctgcaacattggaagccagagtagatgatacatgttacctagaatttaccaaagttttactttatcagcacatatagtaatgacaattatttctgggcctaatatgatattgttgcaatacattaaattaaaaacaaataacaaaaaacttgaaattacacaagggaaattgacaaatccacygttataatgggatcttttaaattcacttatctctgaaactaaaaacatattttaaaacaaattatagaggaattgtaataaagcaattaaccaacatgtagtcatagatagatattataaacataatttgtatcaagaaatacagaaataagtttgtattcaaacaaatctagaccatttgataaatcagattacatagtgagcatgaaagtaacattcaataattttcccaaggcaaaaaacatgtaggctatgtttctgacaattatggaataaattcaaactttgcaacaaagaatgtgactctaccccacatacacacacacacacacacacacacacacacacacacacacacacg

SEQ ID NO: 511975 - DNA, 626 bp, Homo sapiens
tttgtgcttgtgtgtatgcctttcaaagcccacaaccggacaagtaaaattaaaatcaacactcttgactcaaaacatgtagaagtgataaaataagaatgacagcataataaattaagaagacaaagaaaaattaagaaaagagaaagacacaacaaggaagaaaggaagggataattctgggctagagaaagtaagagcagagatagggtgaataaaaagtaagtgtgaatggattacatggaggaaaaatcatccaggatgaataaatcagcaaatggaaaattgggataacatgtyttatttgttcaaataaaaatttccaaacaagttcttaggtaaagacttaacaaaaaatactctacgggcccggttgcagtggctcacgcctgtaatcccagaactttgggaggccgaggcgggcggatcacgaggtcaagagatcgagactatcctctatcctggccaacatagtgaaaccccgtgtgtactaaaaatataaaaattagctgggcgtggtggcacgcgcctgtagtcccagctacttaggaggctgaggcacgagaatcgtttgaacctgggaggcagaggttgcagtgagctgagatcacgccactgcactccag

SEQ ID NO: 511976 - DNA, 626 bp, Homo sapiens
tttgtgcttgtgtgtatgcctttcaaagcccacaaccggacaagtaaaattaaaatcaacactcttgactcaaaacatgtagaagtgataaaataagaatgacagcataataaattaagaagacaaagaaaaattaagaaaagagaaagacacaacaaggaagaaaggaagggataattctgggctagagaaagtaagagcagagatagggtgaataaaaagtaagtgtgaatggattacatggaggaaaaatcatccaggatgaataaatcagcaaatggaaaattgggataacatgtcttatttgttcaaataaaaatttccaaacaagttcttaggtaaagacttaacaaaaaatactctacgggcccggttgcagtggctcacgcctgtaatcccagaactttgggaggccsaggcgggcggatcacgaggtcaagagatcgagactatcctctatcctggccaacatagtgaaaccccgtgtgtactaaaaatataaaaattagctgggcgtggtggcacgcgcctgtagtcccagctacttaggaggctgaggcacgagaatcgtttgaacctgggaggcagaggttgcagtgagctgagatcacgccactgcactccag

SEQ ID NO: 511977 - DNA, 626 bp, Homo sapiens
tttgtgcttgtgtgtatgcctttcaaagcccacaaccggacaagtaaaattaaaatcaacactcttgactcaaaacatgtagaagtgataaaataagaatgacagcataataaattaagaagacaaagaaaaattaagaaaagagaaagacacaacaaggaagaaaggaagggataattctgggctagagaaagtaagagcagagatagggtgaataaaaagtaagtgtgaatggattacatggaggaaaaatcatccaggatgaataaatcagcaaatggaaaattgggataacatgtcttatttgttcaaataaaaatttccaaacaagttcttaggtaaagacttaacaaaaaatactctacgggcccggttgcagtggctcacgcctgtaatcccagaactttgggaggccgaggcgggcggatcacgaggtcaagagatcgagactatcctctaycctggccaacatagtgaaaccccgtgtgtactaaaaatataaaaattagctgggcgtggtggcacgcgcctgtagtcccagctacttaggaggctgaggcacgagaatcgtttgaacctgggaggcagaggttgcagtgagctgagatcacgccactgcactccag

SEQ ID NO: 511978 - DNA, 626 bp, Homo sapiens
tttgtgcttgtgtgtatgcctttcaaagcccacaaccggacaagtaaaattaaaatcaacactcttgactcaaaacatgtagaagtgataaaataagaatgacagcataataaattaagaagacaaagaaaaattaagaaaagagaaagacacaacaaggaagaaaggaagggataattctgggctagagaaagtaagagcagagatagggtgaataaaaagtaagtgtgaatggattacatggaggaaaaatcatccaggatgaataaatcagcaaatggaaaattgggataacatgtcttatttgttcaaataaaaatttccaaacaagttcttaggtaaagacttaacaaaaaatactctacgggcccggttgcagtggctcacgcctgtaatcccagaactttgggaggccgaggcgggcggatcacgaggtcaagagatcgagactatcctctatcctggccaacatagtgaaaccccgtgtgtactaaaaatayaaaaattagctgggcgtggtggcacgcgcctgtagtcccagctacttaggaggctgaggcacgagaatcgtttgaacctgggaggcagaggttgcagtgagctgagatcacgccactgcactccag

SEQ ID NO: 511979 - DNA, 551 bp, Homo sapiens
gtatgtattatatatagatatatagagatagagatgtattttgtatgtatctaaaaatatacattcatatcagaatatacttagaaattatttatccttttcatggtttgctccaattttctactgcctttttgtctgtgccagcctctaagtttcatgttagaggttgtcctcttaggcttgcaaatactcggtcgttttgtttctgtttagaaagctcattgcagctttatagataygggttgggatgtgagtttctttgaaagatcatctctttcggctgtttaattaaggcctctctgatatcaatttccttaggtctttcttctggagccagtcagattccacagagaggacattttcaatattccaccagaagggtgtagacctggctcagaatatcacggaagtggtagtacaagagggctggttgtctcaccatgtggcatatgctcatttaattccctgctttgatgtacctatacctgtatcaattgtactttctaaatcattctctagtgtgctctgcctgggataggaaggggcagtcc

SEQ ID NO: 511980 - DNA, 566 bp, Homo sapiens
gtttgtggcagaggcagaagtcgagccaggccctgttstaagcactttatgtatatgaactcatttaactctcacaaaaacctttgcacgaggactataattatcccaattttacagtggaggaaactgaggctcggagaggtgacatggcttgctcaaggtcacctacttggctagtggcagatctgggatttgaacccaggctgtctggccccagagcccaagcaaagggagaggggtttgtagcaatggggtgaaggtgagaggaaggatgcgggaaacatgccccagaggaggaaggacttttgagaacaggggtgtctaacgttcacttgtgtgtgtgatgaaatcccctttgtcatctccttcctgccagcatcacagagctattcctctttggtcttcagagcatgtgtgtcccagcctgaccccagatcagcatcttgccgatagagacagcccacctgggatggcgtcatgacccttacactgaagcagcagcaggaagtcagagccagggggccaggaggggagctgccctgggcacagtggagggtgtctgggcc

SEQ ID NO: 511981 - DNA, 637 bp, Homo sapiens
aaaggaagagtaggattgggggaatctcgttttttgtttttgttttagatatatgtttcatacggctatgtggaaatgtcacatagacagtcgatgttaagagtctggcttatggatgatgattagaaccacgtgactgagctgaacgaattcaaagmggctaaagcatggatagatggagaagaaataaaccaaccaaaaaaaaaaaaaagcccaggaccaaacggattcacagccgagttctaccagaggtacaaagaggagctggtaacattccttctaaaactattctaaaaaatagtaaaacaggaattccttcctaactcattttgtgaggccagcatcatcctgataccaaaacatggcagagacacaacaaaaaaagaaaatttcaggccaatatccctcatgaacttcagtgcaaaaatcctcaataaaatactggcaaaccgaatcaagctgcacatcagaaagcttatccaccatgatcaaatcagcttcatccttggcacgcaaggctggttcaacatacacaaatcaataaacataatccatcacataaacagaaccaatcacaaaaaccacatgatttctcaatagaggcagaaaacgcctttgacaaaattcggcacccctt

SEQ ID NO: 511982 - DNA, 637 bp, Homo sapiens
aaaggaagagtaggattgggggaatctcgttttttgtttttgttttagatatatgtttcatacggctatgtggaaatgtcacatagacagtcgatgttaagagtctggcttatggatgatgattagaaccacgtgactgagctgaacgaattcaaagcggctaaagcatggatagatrgagaagaaataaaccaaccaaaaaaaaaaaaaagcccaggaccaaacggattcacagccgagttctaccagaggtacaaagaggagctggtaacattccttctaaaactattctaaaaaatagtaaaacaggaattccttcctaactcattttgtgaggccagcatcatcctgataccaaaacatggcagagacacaacaaaaaaagaaaatttcaggccaatatccctcatgaacttcagtgcaaaaatcctcaataaaatactggcaaaccgaatcaagctgcacatcagaaagcttatccaccatgatcaaatcagcttcatccttggcacgcaaggctggttcaacatacacaaatcaataaacataatccatcacataaacagaaccaatcacaaaaaccacatgatttctcaatagaggcagaaaacgcctttgacaaaattcggcacccctt

SEQ ID NO: 511983 - DNA, 626 bp, Homo sapiens
ccacaaaagctctagagcctggaattcctcaaagcaagtccaatttatagattcctacattcatatacagaaaacaggtaaggccttgaattgagatatacatttccccaaccaatagccaaaagcccctctgggatcaattggagcagcaataaatgaactgcttttccttctaagttctaagatctaggccaaaagtgggaggttcataactccaggaaaaatccagaggaaattacaatgacccctagtttgtgcgaattgacgctatcactgtttttctattttgagtgtaatcgaggtcattctttgtcccccacagtttctcatgtgtgaatgagaaaaataccaaggaaaagctttaaattactcaacaacataaraactattcactacaaactccacaacaaacaagcattttctcttggaattttgagaaaatgagaaaacgattaaggaatgcaagcctctattaaatttaaggaatgaaataaattcctaagtattgtgaagacatatgtaacatgaatctcagaaaagagtcacaaggatggttaaagaaacaggaaattttacatattataaaaggtggccagacaggccggagaaatagaaagtagcttgat

SEQ ID NO: 511984 - DNA, 535 bp, Homo sapiens
aatctgcaactgatggattcaagttaggattttgttgttgttgttgtgcttggtcttataattacctaagatatatctctggaagttttcagtataaaatccacaaggtttgaagaactcattctattttgcctattattgaaaaataccctgggtaccaaacatgctcaagtgaatgaatggtgtccaggacaaaacccagcaggtgtccaggcaatggcctcccaccagagatcttgtcagcatgccrctctgagcactgtgctgccttagtgtctttctgtcctggtttcaatgaagtctttctccgtaatgtcagtttttatactttttgacctagtaggacatcatgtgatgaattttcatgtgatatgaattcagcctaggtgtgtcttaggattggtttagagggaagactgaagcaggtgaaatggcaaccccttgcatacacacccataataaattgaaaaatattctgcatgacttaatgatatcttttaaaatgggaaacaaaatctttcttgttcattagaat

SEQ ID NO: 511985 - DNA, 535 bp, Homo sapiens
aatctgcaactgatggattcaagttaggattttgttgttgttgttgtgcttggtcttataattacctaagatatatctctggaagttttcagtataaaatccacaaggtttgaagaactcattctattttgcctattattgaaaaataccctgggtaccaaacatgctcaagtgaatgaatggtgtccaggacaaaacccagcaggtgtccaggcaatggcctcccaccagagatcttgtcagcatgccgctctgagcactgtgctgccttagtgtctttctgtcctggtttcaatgaagtctttctccgtaatgtcagtttttatactttttgaccyagtaggacatcatgtgatgaattttcatgtgatatgaattcagcctaggtgtgtcttaggattggtttagagggaagactgaagcaggtgaaatggcaaccccttgcatacacacccataataaattgaaaaatattctgcatgacttaatgatatcttttaaaatgggaaacaaaatctttcttgttcattagaat

SEQ ID NO: 511986 - DNA, 535 bp, Homo sapiens
aatctgcaactgatggattcaagttaggattttgttgttgttgttgtgcttggtcttataattacctaagatatatctctggaagttttcagtataaaatccacaaggtttgaagaactcattctattttgcctattattgaaaaataccctgggtaccaaacatgctcaagtgaatgaatggtgtccaggacaaaacccagcaggtgtccaggcaatggcctcccaccagagatcttgtcagcatgccgctctgagcactgtgctgccttagtgtctttctgtcctggtttcaatgaagtctttctccgtaatgtcagtttttatactttttgacctagtaggacatcatgtgatgaattttcatgtgataygaattcagcctaggtgtgtcttaggattggtttagagggaagactgaagcaggtgaaatggcaaccccttgcatacacacccataataaattgaaaaatattctgcatgacttaatgatatcttttaaaatgggaaacaaaatctttcttgttcattagaat

SEQ ID NO: 511987 - DNA, 568 bp, Homo sapiens
tgtatttttacttaaataaatattcatatagtttacctttcaggatcataacaaacactttaattatataagaaggtttttgtatatacatcagactaccaagaagtcatatctgattttgtgcttttctactactcttcccccaaacacttgttcaaaaagtttacttttaaagggtctgaactgtgtgtcaagcactgacatcagcatgttacctgaattaactcattaaactcttgtgatactcatgtggtattagcagtgaagaaactgaagcacagaagcttcaagtaaaatgtccggttttagagcaactgaacagtagagtatggaagcccagttactgaccttgtaccattgcccagtattgtgaactgacctaaaaaggcctatgagatatcaacccattaagatccatgacataaagaaaattgtttgtcctacaatatcccaatctggatgaaggcacataaagagaatatgcttaagcatgatgacaaaaaaataagaaagaactgtgaatgmactttacaaaacagaaaagaacacaagggactttggaaccaag

SEQ ID NO: 511988 - DNA, 604 bp, Homo sapiens
aggcctatgagatatcaacccattaagatccatgacataaagaaaattgtttgtcctacaatatcccaatctggatgaaggcacataaagagaatatgcttaagcatgatgacaaaaaaataagaaagaactgtgaatgaactttacaaaacagaaargaacacaagggactttggaaccaagttgaaaattaaatatgttcatgtgcacataacaaaagagtgatcataaataaactgtgtcaacactgtactatgaaggtgaaactttctttttaggattagttaaaccttgtataagttgtaaaaaaatgcaaccacatatattgatgtactaaacccaatgtttcttttggcttatatactaaaaacaggaattccttcctgtaatgaagaaaaaacacaggcatcaaggagtaacaaaattaatgtcttagaatctaaaatatagaaacaccaattaaggctttttttacataatacatgcaaaaactgcatcagaatttacaaaaaatctacagcgtaattggttctggcaataagcagtcacattctgctggaggtaactttagtaacgtcaagcaaaggtcttaaaattatgacag

SEQ ID NO: 511989 - DNA, 604 bp, Homo sapiens
aggcctatgagatatcaacccattaagatccatgacataaagaaaattgtttgtcctacaatatcccaatctggatgaaggcacataaagagaatatgcttaagcatgatgacaaaaaaataagaaagaactgtgaatgaactttacaaaacagaaaagaacacaagggactttggaaccaagttgaaaattaaatatgttcatgtgcacataacaaaagagtgatcataaataaactgtgtcaacactgtactatgaaggtgaaacttyctttttaggattagttaaaccttgtataagttgtaaaaaaatgcaaccacatatattgatgtactaaacccaatgtttcttttggcttatatactaaaaacaggaattccttcctgtaatgaagaaaaaacacaggcatcaaggagtaacaaaattaatgtcttagaatctaaaatatagaaacaccaattaaggctttttttacataatacatgcaaaaactgcatcagaatttacaaaaaatctacagcgtaattggttctggcaataagcagtcacattctgctggaggtaactttagtaacgtcaagcaaaggtcttaaaattatgacag

SEQ ID NO: 511990 - DNA, 604 bp, Homo sapiens
aggcctatgagatatcaacccattaagatccatgacataaagaaaattgtttgtcctacaatatcccaatctggatgaaggcacataaagagaatatgcttaagcatgatgacaaaaaaataagaaagaactgtgaatgaactttacaaaacagaaaagaacacaagggactttggaaccaagttgaaaattaaatatgttcatgtgcacataacaaaagagtgatcataaataaactgtgtcaacactgtactatgaaggtgaaactttctttttaggattagytaaaccttgtataagttgtaaaaaaatgcaaccacatatattgatgtactaaacccaatgtttcttttggcttatatactaaaaacaggaattccttcctgtaatgaagaaaaaacacaggcatcaaggagtaacaaaattaatgtcttagaatctaaaatatagaaacaccaattaaggctttttttacataatacatgcaaaaactgcatcagaatttacaaaaaatctacagcgtaattggttctggcaataagcagtcacattctgctggaggtaactttagtaacgtcaagcaaaggtcttaaaattatgacag

SEQ ID NO: 511991 - DNA, 214 bp, Homo sapiens
aagaaaatttcaagaagataaatactagggaaagtttttagattaacatgcaagtatgataccctccctcacaaaaataaagttcattaacactaagcctgtaaatttcatagaatacttcttgaactaggagaactggaatcacycatcctgttagaatgcaattaattggaccctcttgaacccgtatcttgtgtgtcaggagttgtaaatc

SEQ ID NO: 511992 - DNA, 214 bp, Homo sapiens
aagaaaatttcaagaagataaatactagggaaagtttttagattaacatgcaagtatgataccctccctcacaaaaataaagttcattaacactaagcctgtaaatttcatagaatacttcttgaactaggagaactggaatcacccatcctgttagaatgcaattaattggamcctcttgaacccgtatcttgtgtgtcaggagttgtaaatc

SEQ ID NO: 511993 - DNA, 214 bp, Homo sapiens
aagaaaatttcaagaagataaatactagggaaagtttttagattaacatgcaagtatgataccctccctcacaaaaataaagttcattaacactaagcctgtaaatttcatagaatacttcttgaactaggagaactggaatcacccatcctgttagaatgcaattaattggaccctcttgaaccmgtatcttgtgtgtcaggagttgtaaatc

SEQ ID NO: 511994 - DNA, 623 bp, Homo sapiens
ctgattgaggctctgatacttactgggactctacttgtcctgcttccagtttctactgaacacccagtgtttgttayatcatgcataagtacaacactttatattaagtgccagatgtaagcacagtgagatgtgaaggagttctggagaatatgagctcacttggactggaacagtcgggaaagggttcaggaatgagggggccttgagctgattccaaatgatgggcaggacatggagtagctgagagggaaggcatgaacctgtcagataatggcataagcagaaattttcatggaagaaggaagatgacaaatagaataggagggaactttccaactctgtgaggccagtgttatcctcatattaaaatcaggcaaagatatcacaagaaaaaaactccacagaccaatatcctttatgacaatagacacaaaaatccttaagaaaaaactagtagcctgaatccaacaacatgtaagaaggcttaagtaacatgaccaaatgggatttatcccaggagtgcaaggttggtttaacataaaaaagccaatcaatgtaatataccatattaataaaataaaggataaaaaccacatgatcatctcaataaatgcagaaaa

SEQ ID NO: 511995 - DNA, 577 bp, Homo sapiens
tgaatgaatgcatgattactgctcttccccatactgacttttcccactggacaagtcaatattcatctaatttggcctccagtttcccaccttggtaaagagtatcactgtccctcagacctgctggaaaaggaagaatccacagttggtgccatgagacttcatgttaccaatgaagttatactgaagtgcaggctccctgcttaccgttgtttgcattgattcacctgaccttgctgcktttcagaggatgaagtcagaaaggacctgttttacttgactgtttatcctctatccttaggaagctgggatgtgctgaaattgaatagggaatggtgaagaggtgcaaaacccattaaataaaaattaggtactaagcaggaaaatcaacagagctgagctgaatatgtctagagaaaaagaaggttgatgaatcagttatagcaggggtccccaacccccaggtggtgaaccagtaccggtgtgtggcctgttaggaaccaggccgcacagcagggggtaagtggcaggcaagggagcattactgcctgagctccacctcctatcagatcagcag

SEQ ID NO: 511996 - DNA, 507 bp, Homo sapiens
tcttaacctcttacatccgattagaccctatgtcctctagttctcagtcttgagaccagcacccagctggctacatcagaattgccggtggtgatgttttagaagattccaaattcctggactccatccccggagttcatcccctagttttctagtgaggggcctagaacctgcgttttttaagtgtcatgttcatcgccattactgctactttagttcaggtcttcttggtcagctttttcctaaaacgttttcagttttgtttgcctctgattgactctgaattgctgccaaaatgatgttttattattccagtatcatcatccaactctctgatattaatgataccttttttaaagtttttcttcccttgcagtatctatttccctcaagtttcctttttytttcttctgttgattttgtgctctatctttcacattagaggctttcctaggatgtctggtggtccttatctgctcatatgtaagtgggggtatatttaaaagt

SEQ ID NO: 511997 - DNA, 643 bp, Homo sapiens
cttacctttccttcttcaagtcttttgattcttgcaatattattcctaagaagttgtgaacttctggttcattggatcccctttctaasaggaatgacttacagatttcagttcacaaaacagctgtattttatgagagctttttaggagtttttaaaaaatcagataaaaatctcttgtcttcaatgatacctgctctgtcacatcataccacatgccactgccacgccaagaagtggatttagtgttgtaaaaaagtatactatataattctgcagtattggaaagatagaaacccaataaaaatatttctgttaacagtaaggcgtgattttaaataacctgatgtcataattaataaaatgtaaaatgactaacttccccgaagtgacaattgcataaacacaggaagaaaaatgtgagtaaagcagaataactgtttaatttgtgtgcgctcattttgacaatatctattcagatgaagtctgcctagttttgcttccgctgcatggattcacaagcttcctttcagctctgtagttatacttttgaaaacataaaaggctttgttcattctttgaggagggaaatggggaccattatcatagaaaatgtgattttttttttggcgtgacttgagata

SEQ ID NO: 511998 - DNA, 602 bp, Homo sapiens
ataatggtcatgcaacataggattgtaaagctttgagaacttgcttttttgacatgagagatcttatatttgagattatcaattggggaatcaaataagagtataactccttacctagtttataaaattttatttcctactaatgtcacttaagtttgccttcctgaatgtaggatgggctaaaatgtaatttctgagtcttttcaggaagtcaatgctagaaaattgatcaagtaccacagtcaataataaaataaccattaaatacacttttaaatttatttaagwtttttttttttttgagacggagtctcgcactgtcgctcgggctggattgcagtggtgcgatctcggctcactacaacctctgcctcccgggttcaagcaattctcctgcctcagcctcccaagtagctggaattataggcaccagccaccacgcccagctaattttttttgtatttttagtagagacggtgtttcacgatgttggccaggctggtctcaaactcctgacctcgtgatccgcctgcctcagccccgcaaagtgccgggattacaggcgtgagccaccacgcctggccaatttatttaagatttaa

SEQ ID NO: 511999 - DNA, 501 bp, Homo sapiens
tatatctcactgttttgaaggtaaacatcaaaaatattttggactgggtcatagaattagatgacttcttccccataaattatagaaaaatattttctcaaagctgtgtatttctatatgtaatgatgtgtgtgcgtgtttgtgtgtgtgtgtttcaatccccaaatacattgtaaaattttgtttattaacattagtgacatccttgcttctattcaacaacctaatgcctttcttttagtgtgtctgtacayacacacacgcaaatcaaataactttgcagatataggtttggcatagatactaaaattacaacagagataaaatagagaataatgcatgttcttaccatgtgacaagcaattttaactattttaaaaattcatttatttttcccaacaaaccaatcactaactcacaatttaaagattaacctatattgtgcattatgggtgaagaaattgaggcacagggaattttctaatccatttagaaagtagt

SEQ ID NO: 512000 - DNA, 642 bp, Homo sapiens
tgtggaatcctccagctcaaggggagttacagttagccccccactactgggctgaagtcagaatggtgcaaattggacctctggataagcaattatgtgagatgaccatcrtaacacaacacacagatctgcacctccttttcactactaaatttttcccacacatttttctcatggttcctttgaggcttgatcctggccattctcccacctgcaggcatttgaccaaaaaaaagctgctttccttttaccacacctcactttccacgctttgacttctgagcatcaagcatcctgacttgagcagttacaaaagagaacatactcatgattgaggtatgaaaggaaaaatcttagttgaagatgtatgactgagtataaaatctgaaaagtaagaaaaaaaaatgggaagaaaagttacaaggtcagttgtcagaaggaccatggattgatgacagaagagaagacaaactatggcaagaagctgaatgtcttttctacacgattttgtgacagaatgagtctacctgtttaaagagttcatgaaccaccagacagtcacttataatcaccaaagggagctcaaagatgcttcctcttgacaagcacccgtgatctctgggacagctctgcttagtatcc

SEQ ID NO: 512001 - DNA, 587 bp, Homo sapiens
tgtcaaaccatgacagctcttctctgcataaaaatttgcgacaaagacagcaataatgaatttctagagctgtgccactacttgatattaaaactgtgctcttctcaatttggtgagaaaagatgctgcctggctgacaaaaacagttcctttatcactacagaaaatktgagaggagagtatattctgacgtaaaagagccaagcaatagaattgtgttagataatcattttcctggaaagagagatctaaaattaaaaattctcccattaattaattaggtaaccttgggaaaatcacctagtctctctggtcttaattatccttgtgcctggaatgaggagttttgaattgattatcctctatatccctttgaatttgttatatccaaaagcttactcatcaatttctaaaattaaacctagtaactgacaagaaccggttcttagtattggaatgaagctataagatgtatagcatcccaaagacccttgtctttggtctaatggtgaaatttagaatgttaaatatttctgttttttcaatgtgggctgcaggtagatttcatgtgaaagctttttgtgatg

SEQ ID NO: 512002 - DNA, 669 bp, Homo sapiens
tcaaaccatgacagctcttctctgcataaaaatttgcgacaaagacagcaataatgaatttctagagctgtgccactacttgatattaaaactgtgctcttctcaatttggtgagaaaagatgctgcctggctgacaaaaacagttcctttatcactacagaaaatttgagaggagagtatattctgacgtaaaagagccaagcaatagaattgtgttagataatcattttcctggaaagagagatctaaaattaaaaattctcccattaattaattaggtaaccttgggaaaatcacctagtctctctggtcttaattatccttgtgcctggaatgaggagttttgaattgattatccyctatatccctttgaatttgttatatccaaaagcttactcatcaatttctaaaattaaacctagtaactgacaagaaccggttcttagtattggaatgaagctataagatgtatagcatcccaaagacccttgtctttggtctaatggtgaaatttagaatgttaaatatttctgttttttcaatgtgggctgcaggtagatttcatgtgaaagctttttgtgatgataccacgtgccttcagaagaaatagtttgaatggcaaagcttgcctttgaatataaaagtaaaagcttcgtgtcataaaacta

SEQ ID NO: 512003 - DNA, 278 bp, Homo sapiens
ttggctgttttctactattaacatggactttattagcatttagtaaaccattgtttttttyccccaaatagcccttttagtttcaggttacagattctattttgtcagttttttatgttttgatgatttagagttattcaattattttacattaaaattattttattaaaatttttttccttaaatacattagggatattgtttataatagatatgctttagaattggtgaagggacagatttaatcttttccccttgccaataacccatctgcttgc

SEQ ID NO: 512004 - DNA, 536 bp, Homo sapiens
aactgcagggaatttacaaatggcattgtatgtgtccagtagtctaagggttcaaagatactggggtccattcccagagcactccttttacatgtatacattctctctctstctctctctctctctcacacacacagacacacacacatgcacacacacacatttgtaaacatatttgaaactatacccctttgaaatctaaagtttcacctcctatatcttaaaaatgtaccatgcctttcacctcccacaggaatatgactttgcaccactgtgtattgtcgtttggctgggcaagccccattttgaagggattgctggttcctgacatcttccttagggtttatgctcctttgcttcctgctgcaccaactcagcctctggaagagcagacagctggtgtatctgcaaatcctcctctcagcctgccagagtgcctgccctttaagtgatagcaggcccaggcagttgagtggttttccccaggacaagctgcagagcgagaaccaaatccaggactgcactccctcaacagt

SEQ ID NO: 512005 - DNA, 536 bp, Homo sapiens
aactgcagggaatttacaaatggcattgtatgtgtccagtagtctaagggttcaaagatactggggtccattcccagagcactccttttacatgtatacattctctctctctctctctctctctctcacacacacagacacacacacatgcacacacacacatttgtaaacatatttgaaactatacccctttgaaatctaaagtttcacctcctatatcttaaaaatgtaccatgcctttcacctcccacaggaatatgactttgcaccactgtgtattgtcgtttggctgggcaagccccattttgaagggattgctggttcctgacatcttccttagggtttatgctcctttgcttcctgctgcaccaactcagcctctggaagagcagacrgctggtgtatctgcaaatcctcctctcagcctgccagagtgcctgccctttaagtgatagcaggcccaggcagttgagtggttttccccaggacaagctgcagagcgagaaccaaatccaggactgcactccctcaacagt

SEQ ID NO: 512006 - DNA, 627 bp, Homo sapiens
aaaagctctagtggaaattgtcacatgtatttcacaatagatcccccatttgatggctaggagataaaagagcaacagacatgaaagaaaaaccttatgaaattctactgagaatatgccctttttcttcataatgctcatgtttctcatgctgacaatagctgtgcattttgggtgttttcagagaaattccttttaggggaatattttctggcctacttgatcaatcttgtatctaatctgagttttcttcttaagatgcttttaacttagtttgttctcagtagaatcttgctgagatggagagctgcttttctctctcatgctttggktgtctgtttcagaaggcctattcatatcctgtggtttgtgtgaattaggtgggctgtcacagtgagaactcttggagcatctgcacttatcctggaaatccagcagtgttttttaatgtcacaattataactagaaactgaggctgaaacactgctcccattcccattattatgaaggcacaattctatccaggaggcctacaggatctcctcatgcagctcaggctttactctctgatgtggcactggagtgctgctatggcaattggggttcatgtatgatgtgagctgccag

SEQ ID NO: 512007 - DNA, 627 bp, Homo sapiens
aaaagctctagtggaaattgtcacatgtatttcacaatagatcccccatttgatggctaggagataaaagagcaacagacatgaaagaaaaaccttatgaaattctactgagaatatgccctttttcttcataatgctcatgtttctcatgctgacaatagctgtgcattttgggtgttttcagagaaattccttttaggggaatattttctggcctacttgatcaatcttgtatctaatctgagttttcttcttaagatgcttttaacttagtttgttctcagtagaatcttgctgagatggagagctgcttttctctctcatgctttgggtgtctgtttcagaaggcctattcatatcctgtggtttgtgtgaattaggtgggctgtcacagtgagaactcttggagcatctgcacttatcctggaaatccagcagtrttttttaatgtcacaattataactagaaactgaggctgaaacactgctcccattcccattattatgaaggcacaattctatccaggaggcctacaggatctcctcatgcagctcaggctttactctctgatgtggcactggagtgctgctatggcaattggggttcatgtatgatgtgagctgccag

SEQ ID NO: 512008 - DNA, 627 bp, Homo sapiens
caaacaacaacaacaaagcaaaactcctgcagctagcttggtgtctgcccaaatagccacccagttttgtgcttgaaacccagggctgtgctggtgtaggcacaccagggaatcccctgatctgcagattgcaaaaatcatgggraaaggatagtaacctggccgggtagcacagttcctcacggcttcccttggctgggggagggaggtcccccagctccttgcacttcgtgggtgaagcgatgccccaccctgcttctgctcgccctccatgggttgtacccactgcctaaccagtcccagttggatgaactgggtacctcagttggaaatgcagaaatcacctgtcttctgcatgggtctcgctgggagctgcagactggaaatgtttatttggccctcttgaccctgtcccccaaatcatcttttatttttatttcatccaaatagctgctatcttttttttgtacatctttgcctaaattataataagaacaacgatctaaatttgcatagcaagtggaccctatatttggaatttaaagagtttctggcaaaatttagattaaattggctaattaataacacttttcaaattgctttcccctgctccaataatgaagtata

SEQ ID NO: 512009 - DNA, 627 bp, Homo sapiens
caaacaacaacaacaaagcaaaactcctgcagctagcttggtgtctgcccaaatagccacccagttttgtgcttgaaacccagggctgtgctggtgtaggcacaccagggaatcccctgatctgcagattgcaaaaatcatggggaaaggatagtaacctggccgggtagcacagttcctcacggcttcccttggctgggggagggaggtcccccagctccttgcacttcgtgggtgaagcratgccccaccctgcttctgctcgccctccatgggttgtacccactgcctaaccagtcccagttggatgaactgggtacctcagttggaaatgcagaaatcacctgtcttctgcatgggtctcgctgggagctgcagactggaaatgtttatttggccctcttgaccctgtcccccaaatcatcttttatttttatttcatccaaatagctgctatcttttttttgtacatctttgcctaaattataataagaacaacgatctaaatttgcatagcaagtggaccctatatttggaatttaaagagtttctggcaaaatttagattaaattggctaattaataacacttttcaaattgctttcccctgctccaataatgaagtata

SEQ ID NO: 512010 - DNA, 627 bp, Homo sapiens
caaacaacaacaacaaagcaaaactcctgcagctagcttggtgtctgcccaaatagccacccagttttgtgcttgaaacccagggctgtgctggtgtaggcacaccagggaatcccctgatctgcagattgcaaaaatcatggggaaaggatagtaacctggccgggtagcacagttcctcacggcttcccttggctgggggagggaggtcccccagctccttgcacttcgtgggtgaagcgatgccccaccctgcttctgctcgccstccatgggttgtacccactgcctaaccagtcccagttggatgaactgggtacctcagttggaaatgcagaaatcacctgtcttctgcatgggtctcgctgggagctgcagactggaaatgtttatttggccctcttgaccctgtcccccaaatcatcttttatttttatttcatccaaatagctgctatcttttttttgtacatctttgcctaaattataataagaacaacgatctaaatttgcatagcaagtggaccctatatttggaatttaaagagtttctggcaaaatttagattaaattggctaattaataacacttttcaaattgctttcccctgctccaataatgaagtata

SEQ ID NO: 512011 - DNA, 627 bp, Homo sapiens
caaacaacaacaacaaagcaaaactcctgcagctagcttggtgtctgcccaaatagccacccagttttgtgcttgaaacccagggctgtgctggtgtaggcacaccagggaatcccctgatctgcagattgcaaaaatcatggggaaaggatagtaacctggccgggtagcacagttcctcacggcttcccttggctgggggagggaggtcccccagctccttgcacttcgtgggtgaagcgatgccccaccctgcttctgctcgccctccatgggttgtacccactgcctaaccagtcccagttggatgaactgggtacctyagttggaaatgcagaaatcacctgtcttctgcatgggtctcgctgggagctgcagactggaaatgtttatttggccctcttgaccctgtcccccaaatcatcttttatttttatttcatccaaatagctgctatcttttttttgtacatctttgcctaaattataataagaacaacgatctaaatttgcatagcaagtggaccctatatttggaatttaaagagtttctggcaaaatttagattaaattggctaattaataacacttttcaaattgctttcccctgctccaataatgaagtata

SEQ ID NO: 512012 - DNA, 405 bp, Homo sapiens
ttcacggtgacccctgacacaaaaagcaaggtctacctgaggacccccaactgggaccggggcctgccatccctcacctctgtgtcctggaacatcagcgtgcccagagaccaggtggcctgcctgactttctttaaggagcggagcggcgtggtctgccagacagggcgcgcattcatgatcatccaggagcagcggacccgggctgaggagatcttcagcctggacgaggatgtgctccccaagccaagcttccaccatcacagcttctgggtcaacatctctaactgcagccccacgagcggcaagcagctagacctgctcttctcggtgacacttaccccaaggactgtgggtaagggccttcagggtctttggggacrgtgatgaacaaaaaattgtcag

SEQ ID NO: 512013 - DNA, 518 bp, Homo sapiens
ggcaccattcagtgacccatctgggtctggcccttatctagtgagtggcagacaaatccagagctctgccaccaagggagacccccacaagctggagtaaagacctgacagaaactggtttacaggaaatgcttatgatatgtattttgtgaatttttttccccttgaagaactttaaaaataagaatcwcaaagaaaagttcattcaccttgtgtatttgggtggttctgggagaggaaaaaagaggaggcactctgctgcaggtacacacccagggcgtctgtctgtctggttagccatcccaaatcctgggaaagtccagctctgacttcctgccctccaagagatccgaatggaattccctaggttcaggggctttagtggcagccactttggcccttagccatcctttcttatcactcttgttttgaaattgctttgtgttttataaccactccctggtgtttcctaagattttgttttgtcagcattaagaaggcagctttcaagatgttgt

SEQ ID NO: 512014 - DNA, 581 bp, Homo sapiens
ccaggatatgtggagcccaggaaccctggctttggacctcccttgtgcgggcactgtgctggcaactttccctccatcacctcctcaagccctctccrtggccccatgaggcaggctgtgcggaagtacctccttttcacagagggcactgagttcacttgctcaaggtcactgcctttgttctgcctagagctgtgctgtccgacatggtagcctcacgggagtactgagcagtcagaaggtggtgagactgacttgagatgcactgtagcactgtatgtataaaacacacacgagatttccaagactccgtataaaaaaagaatgttaaatatctcagtcattttttatattgattatatgttgaaatgatcgttttttaatatattgaatgagatatattattaaaatgaatttcaccttttcaaacttttaaagaatggttactagaaaattctaaattacatatgtcgtttacattgtatttttattagacatctcccagggtctgttctcatgaaggtagggatggtctgctcatccttgaccctgccagtctggaaagcaagaaaaggctgcag

SEQ ID NO: 512015 - DNA, 498 bp, Homo sapiens
tgcctgactccagaatatgtttccasatgtaatcctgtgccccctctttctgggggcctgaaaactgagcaaggatccgctcactcaggcatgtaatgaatgcaactcagtacaagcctccagcccctggcaccaagccagcctggctcccacaccccaccccagccctggcccggtccaacacctgcatctccaccacaacccagcatctgcggctcccctgcagccatggtcaagttccaggaagctgagctgaagccccacctccatcaagcgtgggtttgaagtcccagctctgcctctgactgtggccttgagccgggcactgcccatctctggcctcattttcctatccacaaaatgggcaacctaaaaccttccaacagggttgttgtgaggggccaggggatatgtgtgtgaagctcctagcttagagcactgcatgagactggtgccacatggtcacagctaacccttcaagagcttatcctgcccatg

SEQ ID NO: 512016 - DNA, 555 bp, Homo sapiens
acacgatagaactttttcagggatacctaagtgtagggagagattttaaggaatttgtgaatcccctataactgcaggtaaaattgtatggcttgtgtatctgagtgaacacatgtcatattttttctagggatggtagaaagtttttaccaagttctcatagagacccttgactccaaaaggataagagttgcttggtgttctgattaccctaggttttaaacctgttgtggttccttatcaggtttttaaatgacttctagcttgtaattgcacaggcatgtgggtgaattcagggcctgctgtcctagaaacagataatctccttggagcagtgatgaaggtctcaccctgaacaccttctccttcctggcttaacctatgtattagtcaatgcttgaatgatttccctgtcttaccccaagcctacactatacctctccacttggtagcctgaaggtataggaggagagtcatttttgtcccactgctgccctgaaataagctgatkagagggctggctggcagaaaaaaaaaatgtcagctctaaagaag

SEQ ID NO: 512017 - DNA, 456 bp, Homo sapiens
ttcagtgctttccttccaagccccccacttctcccagggctgagtatgggtggtaggctgtgagctgtgagattccaggattggatcccactaattttgttctctgtccctttgtcaaagacattcgaaccagagcaactcatcttgaataagtgctgggtaaaataaggctgggacctgctgggctgcagccccaggagggtaagcatccttagtcacagatgagacaagaggttggcacaagctgcaggtcacaaacaccctgctgataaarcaggatacagtaaagaagccagccaaaagctaccaaaaccaagatagtgacaaaagtgacctctgatcatcctcactgctcattatacactaattataatgcatcagcatactaagattcactcccacctgtgccatgacagtttataaatgccacggcaatgtccagcaattactttatat

SEQ ID NO: 512018 - DNA, 573 bp, Homo sapiens
aatttcaaaaacctaaggctattgtgtatgcttatgatatcaaataataatctactttatcatgtctatgactttaattgtctggttctgattaaaattgtgatctctagagaaaagtatgtgaaaagtagctgtcaactgctcaataaacatttactaaaaatttattttacttataattatyttttggtggataattgtgaacatttaatgtttctcaaatctatgcattgccaaaacaaagcaaaacaaaaaccaaaatatatatgtaataagcattatatatataaaatatataatatatattttacatatataacgtatacataatatgtattatatataacatgtatacaatacatgttatatatattacatatattacatataacatatatacacatagtgtgcatagtataatttttttaacttttaagctcagaagtacaagtgcaggtttgttaacctaggtaaacttgtattgtgggagtttttacaattcctagcatttctgtgaaaatacgttgtgaattttgccaacgtaatctccacgaatttcttccctttttacag

SEQ ID NO: 512019 - DNA, 605 bp, Homo sapiens
ctgccaagactccacacagctctgtgtgtcagacccaaggccctggtggagtgggctcacgaggtgatctcctgatccaagsgttgcaaagattcatgagagaagagtggtttcccagggtcacacattccctcaccacttctcttggctggggtggaggtggcttcatatcattcccaggtgggccatcaccttgccctgcttttctctgttctctcccttgggttgagttgtttccctaatcagtcccaatgcgaatacatggatgtttctgttgaagatgttctatttactcaccccttgtgttcctctctgtgagtgacacataccatagctgcttctacacagccatcttggctccctcccccaccttgttgttatccttaattcaagcttttctttctatataaatcattacatttggtattgtagacatttttgttatcggtacttgaacatttctctaatgatgactaaagaggataagaattcccattctcatagatttttaacatacttaaaattttacctatcagttcaatgtagctcagttaaattttttagtttcactgagagctatatctatatagcaagtaaatttagag

SEQ ID NO: 512020 - DNA, 631 bp, Homo sapiens
ccccactctccttctggggcaacrtggcatggctagggcatcaactatggaacccccaggaacattttctagacatggggacaattatttcaagctaaggccacctctgtgtccttagatggttttcaccccgcttaaccccctaaagttatgctgaccaggatggtcaaggaacccatactgttttttggttttttttttgagacagttttgcttttgtcacccaggctggagtgcaatggcacgatctcggctcactgcaacctccacctcccgggttcaagcagttctcctgcctcagcctccgagtagctgggattactgtgccaccacgcctgtttaatttttgtattattagtagagacagggtttcaccatgttggccaggctggtctagaactcccaacctcacgtgatcctctaaggaatccaacccaccttggcctcccaaagtgcagggattacaggcataagccaccacacccggccagggaacctacactcttatgcaaggttccaagggtcccaaaaaggagatagaaaattgtgggtctgtataagtgggaggcccagagaagctggtcatacccttggtagtactgagcagtagacagatgcccagcacagagca

SEQ ID NO: 512021 - DNA, 549 bp, Homo sapiens
ctgctctggaggctgaggcacgagaattgcttgagcccaggagggagaggttgcaatgagctgagatcttgccactgcactccagcctggcygacagagagagactccatctcaaactccagcatagctgacagagagagactccatctcaaactccagcctggccaacagagagagactccatctcaaaaaaaaaggagaataaaagaatgggtaagaacatttgtatctaataataatactcattttaagtaattttagggagttttataaacttatattttggggaaattctctgttttacttcatgattgtactagtttctgatctgtatgttgagttagagtgatgagtgctcgtatgtgattgcagccagtgaaggttttctctcacttattagatggaaaaaaagaataggaaacaagacaaaagattgacttcgaaaagggagtcataatttggaaagtgacagatagcaaacatagtctctttaccttacctaagattgtctaccatagcttcccttctcctatctaatttttttaaatt

SEQ ID NO: 512022 - DNA, 577 bp, Homo sapiens
cttagtgatggtgctctagtaagaattctgcatgctaagacttgggtgagtttccctggttggcagtgcttcatgcattttgtcatacactgatgccaggagagcaatgcatcctgactccatcggaagaggacaatgacaggtcacatttggaacttaccttgactctgccctatgcctctcttcctttagctgattttaatctatatccttttcctgtaatgaatcataaccatgagtataacaggtttcggagagttttatgagtcttttcagagaaatattgaaactgaayagggttttgtgaatgctacccatcccagtcccctcctcaacttatagttggtgtcaaaattcggggcagtcttgggaactgtgtcctctaattttatacttggctgaaacttcttgcacatagtaattaaaagtataggctttggagtcagacagacctagatttaaattctagcttggttactttgcaacctgtgttacctctcaaagctttacttttttttaacagtagcagatgtctttggtgctctgtgtcatctcttcttggtttacattggattta

SEQ ID NO: 512023 - DNA, 588 bp, Homo sapiens
gaccttgggcatttcacagatcaaatgacatcattaaatgcttttactgactcgccgcatccagaagattattgtctattccttagtttcctggatagcttgtaggcgccctagcaaactggtttaataattactggttctggttcaagggatcagagatcaacaaggtatctgaggaaaaaaatccttatgggtaaagggatgcaggcggctactccattgagagtggaagagctcaccattctggtgtttatatttttatttaaatgttgtttgtttgacaaaaaacaccaggtkccctgaggacggagatcctctgatgatgcttctttgtgtctcaaagattatatcagtatactgacctcagccttcatttcaaataggcagtaaactctctggggaaaaccagaactcaggcactgattgattacgtggtagcgttattcactataggacatagctgtttgatttctttgtctgaaaacccttccttgcagagagagtatatgtctggagacttggcacaaatttagcaagtgatatgattatggtgattggttgggcaggatatgtaggcaataatggtga

SEQ ID NO: 512024 - DNA, 450 bp, Homo sapiens
actacaggtgcacaccaccacgccctgctaacttttgtcgcttttgtagagacgagctctcattatgttgcccagcctggctttaaactcctggcctcaagtgatccccctgccttgaccttccaaagtgctggaattaaaggtatgagccactgtgcccagccaaaaagaacttttttttttttgatcaggtaacatgctcattgtgaaaaattcagatgaggcaaaaaatatagacattatatagtttaygtaaatcattagcccatcttctggaaatatcctctaataatatatggaaatattaactttcagactttatatatgtatatacacactgcatatatattttaatatgattatgtatggtgttttgtgacattctttaaagtgaacatctttttatgatgatgaaaatagatctacatcaaaattttaaagtttgtgtaa

SEQ ID NO: 512025 - DNA, 616 bp, Homo sapiens
tgcaaccaggtctatcgcccctttgataaaaatttcagttaccccagggagaagctttcaactttattaagtattgaagtctgtacatttgttcttctttggaagagcagatcaaaagcacgctttctaagtaagtaatctgataaattaggatagcatttgcagacttgggcaatatgtttttccgtaattgaaacctgagaacctgtgtcaactgactatactattataaacttcttagcatttaacaagagtttcttttattttttgaaagtaaatagaattccttgattcgatttaaccaattctttagcatgctgtttcctttttgttgtggttaggaaaacctcaatgtaggtttagagatagaaaactgacaatcaagaaaaaaaaaagcaattagatgatcaagttgtggtacagacaaaagcccrtgttgtcgtcttatctctggcattaatttactgtaaaaacttgagcaagccacttaatttttctgggccacagtttcctcatctttgaaaagggataattggctaaattatgtgtaagacttctgctgattctgaaattctctgattctaagtcttaggcagaatgaggctagacacagaat

SEQ ID NO: 512026 - DNA, 538 bp, Homo sapiens
tacatcctccagagcagaggaacactgtgtcctcacatggtggaaggcaatggcaaaggcycaaatgctgcaggaagccattattatgagggccttaatgccaatcactaaggggtagctttcatggcctaatcacctcttagaggtcccacctttaatgctatcacactggcaacacctgaattgtggaggagacacattaaactaatagccatattcttgaaacagagtataggtataaccctatttgaatggcccctgttttgcctaaaatccttactgatactgaagagactctttgtgagcattgtttgagaactccaaatgaaactctgccaatgaatgattaataatcagttagtaagccaaccctgggactcatttttctggcacaaaaaaatgcataattctatgactcttattcatctgatctagtcatcatcctattaattattcttattgctaatttctaagtattatctgtacctttttcaatggagttcttctgaaattatttctgtgttactaccacggctca

SEQ ID NO: 512027 - DNA, 538 bp, Homo sapiens
tacatcctccagagcagaggaacactgtgtcctcacatggtggaaggcaatggcaaaggctcaaatgctgcaggaagccattattatgagggccttaatgccaatcactaaggggtagctttcatggcctaatcacctcttagaggtcccacctttaatgctatcacactggcaacacctgaattgtggaggagacacattaaactaatagccatattcttgaaacagagtataggtataaccctatttgaatggcccctgytttgcctaaaatccttactgatactgaagagactctttgtgagcattgtttgagaactccaaatgaaactctgccaatgaatgattaataatcagttagtaagccaaccctgggactcatttttctggcacaaaaaaatgcataattctatgactcttattcatctgatctagtcatcatcctattaattattcttattgctaatttctaagtattatctgtacctttttcaatggagttcttctgaaattatttctgtgttactaccacggctca

SEQ ID NO: 512028 - DNA, 478 bp, Homo sapiens
gagcaattgtgtggtgccatgttccagattgtgacagatggcgaaagtcatttattagaaatgaaaaaataaaggaactagataatccaatttggataacttgtccacataaatactcaataagttaggaaagagaaccatagacctagtatcaaaatatcaaagaatatggggaaatgactaggagataagtagaatgcagtcacaagtaactygagagggctacacaaaatctagaatacactctcctaaaatagagattgtgatatatacatggaaggagtcacttcagtgggtctttggagtacatatatgattgcaaactatattctgaaatatagccatatgttataaacagtaaaacaaacacagcatttaaagtaaaatataaaaattccacatcggcatggcttataagaatgtggcatcagcactacagacgaatgagaacaagaatctaatatgttcttcttttagt

SEQ ID NO: 512029 - DNA, 478 bp, Homo sapiens
gagcaattgtgtggtgccatgttccagattgtgacagatggcgaaagtcatttattagaaatgaaaaaataaaggaactagataatccaatttggataacttgtccacataaatactcaataagttaggaaagagaaccatagacctagtatcaaaatatcaaagaatatggggaaatgactaggagataagtagaatgcagtcacaagtaacttgagagggctacacaaaatctagaatacactctcctaaaatagagattgtgatatatacatggaaggagtcacttcagtgggtctttggagtacatatatgattgcaaactatattctgaaatatagccataygttataaacagtaaaacaaacacagcatttaaagtaaaatataaaaattccacatcggcatggcttataagaatgtggcatcagcactacagacgaatgagaacaagaatctaatatgttcttcttttagt

SEQ ID NO: 512030 - DNA, 628 bp, Homo sapiens
  misc_feature (1)...(628): n = A,T,C or G
tagctccatccccttgatgctgtcctcactatagggagtaaattctcttcagatctggctgtttaaaagtgtgtggcacctcccactctctctcttgmtcctaccttcaccatttgatgtgcctcctcctgctttgccttccaccatgagtaaaagcttcctgaggcctcccagaagcagatgctggcactatgtttcttgtacagcctgcagaaccatgagccaattaaacctcttttcttataaattacccagtctcagatatttctttatagcaatgtaaaaaaaaagcccaacacagattcccaggtgttctaatactattaataaaaattttattctttcctcagtgatttttaagggcagttctttgtcatttagccatacatgtgtagatctgtttccaggctctattttctggcttttagtctattagtttatntcagtgcctgctctccactatttttaattacaatatttgaatatgtgttgatatccccttttcatcatatttttcttataaatatcttatttaatcttgaatttttgttcatttatctcaatttcaggataatcttggcaagttccattaaagtcatacacacacacacacacacacacacacaca

SEQ ID NO: 512031 - DNA, 628 bp, Homo sapiens
  misc_feature (1)...(628): n = A,T,C or G
tagctccatccccttgatgctgtcctcactatagggagtaaattctcttcagatctggctgtttaaaagtgtgtggcacctcccactctctctcttgatcctaccttcaccatttgatgtgcctcctcctgctttgccttccaccatgagtaaaagcttcctgaggcctcccagaagcagatgctggcactatgtttcttgtacagcctgcagaaccatgagccaattaaacctcttttcttataaattacccagtctcagatatttctttatagcaatgtaaaaaaaaagcccaacacagattcccaggtgttctaatactattaataaaaattttattctttcctcastgatttttaagggcagttctttgtcatttagccatacatgtgtagatctgtttccaggctctattttctggcttttagtctattagtttatntcagtgcctgctctccactatttttaattacaatatttgaatatgtgttgatatccccttttcatcatatttttcttataaatatcttatttaatcttgaatttttgttcatttatctcaatttcaggataatcttggcaagttccattaaagtcatacacacacacacacacacacacacacaca

SEQ ID NO: 512032 - DNA, 681 bp, Homo sapiens
tcagcctttgttttgattttgtgcaaatttgcatgtgtactaatgttctatttcccatttagtttcaacatacataataggtattttattttccaattactcacacagcttcctaaagcaactattttgagaactgacaaaagagacaggtagagatagtgtttaaatggtggtccacaaaaccatgaatcccatttttagttgcagtatcttttaaagaaacataatataggttggtgcaaacrtaattgcagtttttgccattacttttaatggcaaaagccacaattacatttgcaccaacctaatatttttaactggtattaatgacattattacagccaaatgagcacattctgttttctctgttggggtatgatgcatctatatttactatatcaattcctttcagccaacgaccagcagaacacacttgtagttgaacaaatttacattcatttacttattacaatgatggagaacacagaccatgataaactgggggatctcttagaagatgatagaaaagacttattgtaagagtttgtcttgtgttaaatgattgagggaagggtccaaggcagtaaaactttgctctgaattggatgcagtcagaaattgggagtaattctgtgattgaatgtcttcataattaattagaaggcaagaccagcagaggga

SEQ ID NO: 512033 - DNA, 586 bp, Homo sapiens
gttaaatggaaaaatcaaaatttcagaaatttgtatggagtaaaggaatattgagataaattacaaacgaggagacaatttttcttcacagtgtggagaaatatcaatcaaaattttaacttgcaagatagagtttgtwtacctatcaattacctgcaattttttttaattcaaattttattttagatacagggggtgcatgtgcaggtatgtcatatgggcatattgcactgaggtagtgagcatagttcccaataggtagtttaccaatccatgtcgccctccttccctaagccctctagcagcccatagtgtccgttgttcccatgtttatgtccatgtgtgctcagtctttacttcccacgtataagtgagaacatgcagtatttgattttcttttctcttgttaatctgcttagtgttatggccgccagctccattcatgttactgcaaaggacattatttcatttcctttttatggctgcatagtattctatggtgtatatagatcacattttctttatccagttcactattgatgggtacctaagttgattccatgactttgctatcgtgaagagcatg

SEQ ID NO: 512034 - DNA, 581 bp, Homo sapiens
agctatcctgccccactctagaagcctggtgaattcattggcttactaagagtttatctgagcaaatttggttgagtgtgagatttgatacaagcatgcatgagcacacacaaacatactcagcaacatttagctgttcttcgtggttcatcagagtactagagtcctttccatttaaggttcacaatttaattggattcaagaccccatacctgacagggtgacaccgctctcgttaatatatggaggaagatctcagatgctccactttcccgagttccagggagctgacctgtatgctcttgagcaggggcagggtaagcaacccattcatattttataagtttgtttaatggagccttattttttgggctatgtatttttaaagactgcgtagcttagattgatggagtcgctacrctgattctcctcttacaagccagagggctggaggaagctcagcccttctggggcccaggagggacaagaaagagttgcaaatggacagagctacctaaatgcccatcagtagggacccggtaaaataaattatgttcatccccgtaatggaatccatgcag

SEQ ID NO: 512035 - DNA, 581 bp, Homo sapiens
agctatcctgccccactctagaagcctggtgaattcattggcttactaagagtttatctgagcaaatttggttgagtgtgagatttgatacaagcatgcatgagcacacacaaacatactcagcaacatttagctgttcttcgtggttcatcagagtactagagtcctttccatttaaggttcacaatttaattggattcaagaccccatacctgacagggtgacaccgctctcgttaatatatggaggaagatctcagatgctccactttcccgagttccagggagctgacctgtatgctcttgagcaggggcagggtaagcaacccattcatattttataagtttgtttaatggagccttattttttgggctatgtatttttaaagactgcgtagcttagattgatggagtcgctacgctgattctcctcttacaagccagagggctggaggaagctcagcccttctggggcccaggagggacaagaaagagtygcaaatggacagagctacctaaatgcccatcagtagggacccggtaaaataaattatgttcatccccgtaatggaatccatgcag

SEQ ID NO: 512036 - DNA, 521 bp, Homo sapiens
gctcagaaaatgacaacaattccagccttttttttaacttaggacattattaccttccaagaattgcccaagtatagataacagagatacttaaatgccaattattattcagcctttcttcaactattttcctcattctcattgatatgaaaagaccatacattggcaaaacaaaagtatatgttttaaaggggcaaagagatctttacttgccatgatcatgtcttcctatcaagaatggagtctatagcatgacctcagtggtcatcccatctgccctttctgagatacagcttagcttggtagtaaaagttggcttctagggccagacagcctgtatttgaatcctatctgcattaatcattaatgttgtgactatgggaaagttccctaatgtctctgtgtttcagtttttttttattctgtaaggcagttaattgtacttattccatggaagctttatgaggattraatgagttaatctgtaaaactgatctgtaagatgcacttaaaatagtgtg

SEQ ID NO: 512037 - DNA, 174 bp, Homo sapiens
acctggcaaggatgacttttcaaggctttgaacmtttgcttcttaatgcacacatggtaagagttcatcattcattcttaactattttttaaaaaatagtaacagagtcagatgcttctcttctcttttgtgagaattaaataataataatgttcaaaatgtctatattggttt

SEQ ID NO: 512038 - DNA, 615 bp, Homo sapiens
  misc_feature (1)...(615): n = A,T,C or G
atctacttctggctggcatctgtttaggtcgcttgatgtctggactatatagtctgtgaggcattttgaggatctctatgattgactcatagagttactgtgagatccaaataacaaatacatggcgaagatttatcttagtgcctagcacatggtaacacctaataaatgtggacgtttattatatgatagtaataatatttattggatgtagtaaatcagtaaatgcttagtggtgtaataattctgaatataagaattccaataaggtatctttgccccatagtagaagttctataattgtttctgtgttaatgtctcattttcagagtggtgttnactggtaatatagtctctttcctacttctgatttatttccacaattcttccaagataggatgcaagccagtctccatctggaagttcaggagcactttgtctctagttccttcctcccttctgawaataaagccgtcaccatctgcatcttcagtatctccttccttatccccagaccaacatggtttaaaagagtactgagtagactaagtctcaatacctattcatgcacacccacttccaagggaaatcacccacccttgcccccctcaacag

SEQ ID NO: 512039 - DNA, 262 bp, Homo sapiens
ttatcatcatagaagctggagcttataggggaaagtaacctggtcctggggctgggcttttccttcaataatgtccttcctatcaaaaataaatttctgctcttctcctttacatctttgccattctctggcctaaaatgttgggtgctcatctttcctagcattacatctcaatttttcagtagacgtttggttacacatatctgtgctgtaacccaaagttgagagtctctgatatyaagcaacaacacctctccttttg

SEQ ID NO: 512040 - DNA, 618 bp, Homo sapiens
tatatgtgtatatatagtgtatatatgtatatgtgtatatatgtatatgtgtatatatgtatatatacgtgtatatgtgtatatatgtatatatatgtgtatatgtatatatacacgtatatatgtatatatatacgtrtatatatatgtataataatgcagccgggtgtggtgactcatgcctataatcccagtactttgggaggccaaggcgggcagatcacttgaggtcaggagttcgagaccagcctggccaaatatggtgaaaccttgtctctactaaaaatacaaaaattagccggacttagtggcgggcacctgtaatcccagctactcgggaggctgaggcacaagaattgcttgaatcgaggaggcggaggttgcagtgagcagagatggcaccactgcactctagcctgggcaatatagcgagactatctcaaaaaaaataaataaataaaaataaatttaaaaatataataatgcatgaagaatacctagcacagtccctggtacatgctaagtgcctaataaattgcaactactaataataatcaataaatattccttcgcctggttcatggtcagcacaccttacccagtccttccctttgtcag

SEQ ID NO: 512041 - DNA, 618 bp, Homo sapiens
tatatgtgtatatatagtgtatatatgtatatgtgtatatatgtatatgtgtatatatgtatatatacgtgtatatgtgtatatatgtatatatatgtgtatatgtatatatacacgtatatatgtatatatatacgtgtatatatatgtataataatgcagcckggtgtggtgactcatgcctataatcccagtactttgggaggccaaggcgggcagatcacttgaggtcaggagttcgagaccagcctggccaaatatggtgaaaccttgtctctactaaaaatacaaaaattagccggacttagtggcgggcacctgtaatcccagctactcgggaggctgaggcacaagaattgcttgaatcgaggaggcggaggttgcagtgagcagagatggcaccactgcactctagcctgggcaatatagcgagactatctcaaaaaaaataaataaataaaaataaatttaaaaatataataatgcatgaagaatacctagcacagtccctggtacatgctaagtgcctaataaattgcaactactaataataatcaataaatattccttcgcctggttcatggtcagcacaccttacccagtccttccctttgtcag

SEQ ID NO: 512042 - DNA, 618 bp, Homo sapiens
tatatgtgtatatatagtgtatatatgtatatgtgtatatatgtatatgtgtatatatgtatatatacgtgtatatgtgtatatatgtatatatatgtgtatatgtatatatacacgtatatatgtatatatatacgtgtatatatatgtataataatgcagccgggtgtggtgactcatgcctataatcccagtactttgggaggccaaggcgggcagatcacttgaggtcaggagttcgagaccagcctggccaaatatggtgaaaccttgtctctactaaaaatacaaaaattagccggacttagtggcgggcacctgtaatcccagctactcgggaggctgaggcacaagaattgcttgaatcgaggaggcggaggttgcagtgagcagagatggcaccactgcactctagcctgggcaatatagcgagactatctcaaaaaaaataaataaataaaaataaatttaaaaatataataatgcatgaagaatacctagcacagtccctggtacatgctaagtgcctaataaattgcaactactaayaataatcaataaatattccttcgcctggttcatggtcagcacaccttacccagtccttccctttgtcag

SEQ ID NO: 512043 - DNA, 498 bp, Homo sapiens
cacaaattagttccaaagacaagcctctggaaactgctgcagggcagagacccaaagaaatgtggatttgttctaagggctctttctaatagaaaagggctctctacagactatctgagttaaggaggttggcaaaatcaagttcaaggaagatgctcaacatgcacacgcttacttgtagttttaaaaatatctggatagaataaaaaacatcaactctgagtcaacaatgggattttgtttacaatccccaagacacagaaaatacttacaaccttaaaacaagcagtgttaacatccctgccctaatggacacatgctttcctaacacaaaggcctaatgacagcctaactccctgtgaggctcttctcccaagcatttcarttgcactcccaggagcagctctggcccagctctgccactctgctaaatgcctggtcaggggcggaaggcctgtacctccgtcaggtcgctgctgggaagaatggccaggtcag

SEQ ID NO: 512044 - DNA, 654 bp, Homo sapiens
tatttctttttgaagaaaacagcatctacttctyacacacatgcaacagagttcgattcctttattcctggattccacacttacctctctcctatccctacctgccccagtcaaatccagattgttacggtcaaatcagaccatgagcaattctaggggtccagaggtgaaataatggctcagggtggagccccccacaatcatccctcttttacgtcagcagaggaagggctcaaacaagcaaagatgacgctcctatcccagagactgacctggacagcataagagatggcgagacccgcataggctgggggaatctgcccgtgcataagaacgatcatcagccccgtggtggtgatgagggcgatgctgatgaggtccagccgcacagccagccaccgcatcgcacacgtaaacaaaaaaaaaggagcttggttgtcatccagcagctcctggtatctgtgagaaagacaacacttaatgggcaaagaaagtactacacaaccccgcgcatggacaaagcttcagcgaatcagatgatggagggcacgtatttaaatacttcctgtttctaactgagagaatgccctggaaactccaggagggtattctaggaattctggaggtattctaggccgcatgcataggaggaca

SEQ ID NO: 512045 - DNA, 654 bp, Homo sapiens
tatttctttttgaagaaaacagcatctacttctcacacacatgcaacagagttcgattcctttattcctggattccacacttacctctctcctatccctacctgccccagtcaaatccagattgttacggtcaaatcagaccatgagcaattctaggggtccagaggtgaaataatggctcagggtggagccccccacaatcatccctcttttacgtcagcasaggaagggctcaaacaagcaaagatgacgctcctatcccagagactgacctggacagcataagagatggcgagacccgcataggctgggggaatctgcccgtgcataagaacgatcatcagccccgtggtggtgatgagggcgatgctgatgaggtccagccgcacagccagccaccgcatcgcacacgtaaacaaaaaaaaaggagcttggttgtcatccagcagctcctggtatctgtgagaaagacaacacttaatgggcaaagaaagtactacacaaccccgcgcatggacaaagcttcagcgaatcagatgatggagggcacgtatttaaatacttcctgtttctaactgagagaatgccctggaaactccaggagggtattctaggaattctggaggtattctaggccgcatgcataggaggaca

SEQ ID NO: 512046 - DNA, 657 bp, Homo sapiens
ggttatatactatatgattcaatgtatatagcattcttaaaatgacaaaattacagaaatggagaaaagattagsagttgccagagactggggttgaggggacatgactgtggctataaaagggtaacgagagatccttgtgatggaacctttgcatcctgactgtggaagcggtcacacaaatttacacctttaaaaaatgcatagaacacaacacacacacacacacacacacacacacacacaaatgagtgcatataaaactggtgaaatcctaaagtcaatggattgtatcaatgtcaatcattatcctgttgtgatactggactatagttatgcaagatgttaccactgggggaaactggatgaagaatatataggatctctatattattttttataattgcatgtaaatctacagttagctcaaaataaaaaggtttttttttttaatctcattaacttccaatagttccctaatgcccacagtgaaatatttcttagcatggcatgcagaatttcacccgacctataatctctttacacatcctatgccctgaacaactagttctaagagctaacatttattgagcactggccatgtgccaggtaccattttaaatattttatatgtattatctcatttactcctcagtg

SEQ ID NO: 512047 - DNA, 657 bp, Homo sapiens
ggttatatactatatgattcaatgtatatagcattcttaaaatgacaaaattacagaaatggagaaaagattagcagttgccagagactggggttgaggggacatgactgtggctataaaagggtaacgagagatccttgtgatggaacctttgcatcctgactgtggaagcggtcacacaaatttacacctttaaaaaatgcatagaacacaacacacacacacacacacacacacacacacacaaatgagtgcatataaaactggtgaaatcctaaagtcaatggattgtatcaatgtcaatcattatcctgttgtgatactggactatagttatgcaagatgttaccactgggggaaactggatgaagaatatataggatctctatattattttttataattgcatgtaaatctacagttagctcaaaataaaaaggtttttttttttaatctcattaacttccaatagttccctaatgcccacagtgaaatatttcttagcatggcatgcagaatttcacccracctataatctctttacacatcctatgccctgaacaactagttctaagagctaacatttattgagcactggccatgtgccaggtaccattttaaatattttatatgtattatctcatttactcctcagtg

SEQ ID NO: 512048 - DNA, 586 bp, Homo sapiens
attgggatcttgatgcagtaatctatgaggagagcctgtaggttcttgaccaggaaagcaacatggtgagaatgttattttaggaagatttatctctgagttgggcattgaagagattaaagcaggaaaagtctggaggcaaggaaacaagaaaaattgtagaaatgaattagtatgactagactatgcaccaagatatagtttcattctagtttttgttttactttttacttcatttaatggtaaatacaaggcattgtattcaggatattcattttctaagctacttcttttttcaaaaatttattatcttggccaggtgtggtggctcacacccgtaaccccagcactttggcaggctgaggcaagaggtctgcttgagcccaaaagtttgagacaatcctgggcaacatagtgagactctatctctacaaaaaaaataaaaaataaaaaaaaattagccaagcattgtggcatgtgcctgtarttctactcgggggtctaaggctggagggttacctgagccttgtagttcgaggctgcagtgagctatgatcatgccactgcactcttgcctgggttataa

SEQ ID NO: 512049 - DNA, 664 bp, Homo sapiens
gtttatctcccaattatttttttcttcttcagctttgaatttattcttgttcatacttatctcagttgcaatttttcatttatctggaggattatttgattagtgccttccttgccaactggaaagtaagttagagtaaatcggggctgtatttactagggctgccgtatttatcacaaacaagtaaacaaaaaattacaggacactcagctaaatttgaatttcagataaacatagaataatttttagtacaagaatgctgtttatctaaaattcaaatttaactgggaatcctgtattttatctggcaacatttttagtcacagtttaccttcaaggcttatcatagtattaagaatattgtaagagttcaattaaaatgtcttgaatggatgaatgccagattgcaaggaggaaggaaggtatcataacattttagacagttgcaaatacataagattgcacactgtatacttataattcatttccaaaaactcttccttgaaataaattttcaaaagccaggaacgacccatagagmtcatagataaaacttttatgagtagtagtcagtaaaaatgtcataccacaattccaccatcaacatactttcgattctcctgatttctatacagaaaaggtaacgaaaatcatatacacatca

SEQ ID NO: 512050 - DNA, 601 bp, Homo sapiens
atagtatgccatgtgtctggtaatcagtattagagccagaagtgttgctagacttcaacaatctttggcagttattgagatagatgtgtctcttggagaaagattaattggagtctgaaatgtttaaggaagctaacaattattgagtgcttgttctgtgccaggcaatatgctaggaatttctgcatatgctatctcatgtcacagaatctcaatttttctgcttatgagttggaatatgggattttatttaagtcttccttttagcaattttgtctgaagtgttgcctatgtaattttacacttgaaggaaagtgtattcagtggttaaaaagagccacagaggtagcaaataatttggaattcggcttgttcattaagtacacaaataaatccaaagtacacaaacaaattcacattacagagttagagcttgtattaggccattcttacattgctataaagaaataatgagacagggtaatttacaaaaaaataagtttgattggctcacagttctgcaggctgtacaggractgcaggctgcatagtggcatctgcttctcaggaggcttcaagaagcttccaatcatggcacatg

SEQ ID NO: 512051 - DNA, 461 bp, Homo sapiens
tttataaacttaaactgtaatcaagatacatacatgattgcgctacagaatttcacccacttccatttaaacacktcacaaacattttctatgtcatcatgttagtaaatcatttttgaatcatcattttgttttttatttttgaatttttaaaaatcattgccttatttttaattatgatgggtacctaagagtagtatatatttgtggggtacatgggatgttttgatacaggcaaacaatgggtaacgatcaattcagggcaaatggagtatcaatcacttcatttatcatttatttgtattaggaacattccagttccactctactagttattataaaatatgccatagattattgttaactatagtcacccttctgtgctaccaaattctagatcttatttacgctttctaactttgtttctgcacctattgaccctcctcactttattcatccct

SEQ ID NO: 512052 - DNA, 461 bp, Homo sapiens
tttataaacttaaactgtaatcaagatacatacatgattgcgctacagaatttcacccacttccatttaaacacttcacaaacattttctatgtcatcatgttagtaaatcatttttgaatcatcattttgttttttatttttgaatttttaaaaatcattgccttatttttaattatgatgggtacctaagagtagtatatatttgtggggtacatgggatgttttgatacaggcaaacaatgggtaacgatcaattcagggcaaatggagtatcaatcacttcatttatcatttatttgtattaggaacattccagttccactctactagttattataaaatatgccatagattattgttaactatagtcacccttctgtgctaccaaattctagatcttatttacsctttctaactttgtttctgcacctattgaccctcctcactttattcatccct

SEQ ID NO: 512053 - DNA, 632 bp, Homo sapiens
tagggaatgactgtctcaaggagagcattggcagcaaaatttgcatctggattttattccagttaaaacaggacgtcaataaatagtttaaaataaggaccgtagagaattgcaagaaaacccccacttcactcctcccttggaccttattccatcctgctacaaattaaatcttgacctgtcttccctccatctggtatttttcattcaacttctgatcctgacagtgatttccactggctttttcatctgcacctgaatcctccctctccaaatctattgtggacagacattccagcccctgttctcctgcctatcctaagttccttgtagccccaacttcactctgggtccttctctaacagggtgggaaaacctttcagacactgctactgatttcctggaagcagtgtttactctgcaaagcaatcagcagggctctggtgatgggaggcttctcttgctactccatgyaaatgctgaggtgaccagaatgctctgaaagttgcataattttagtgcagaaacaggattaatatctgccttcagagtagaagtaatttaagttccttgtaaccagaggtccttttctgtcttgttcaccacagtatcttggtacctagtacagtgtt

SEQ ID NO: 512054 - DNA, 627 bp, Homo sapiens
taagaacaggatccctgagtcagataacctgggttgctgccccattccaccttagtcatctccacaagcttgaggttcctcctctgtaaaatgacatcagtaattatacctacctcgtggaatcactgggaatattagccaaataatgtatataactgaactctgaaaagcaccccttttgtaaaacacagctattgattaattattcacacatctattcmtcaagtacttaacacgtgtcaaaattagtcctagaggcaggagatgtaggtagattgattggtctgaattctttcatctttcataggatagactgtagattctattgctacagagatccactcggttctgctttttactgaagctcactacttttagacactataattactcaaaatttaaaatgagggaactaagagtgaggaaactgcaattcatatgtgtggttacgtgccttataacattctttgggcattttcttattaccagatcctcagcaaagcactttcattcattgcctcatgcaatgctcaaaattgccatgtgaaaggaaggtactatccttatactctttttcaggtatgaaaagtaattctcccagatattctttagcttttcaaaaagctt

SEQ ID NO: 512055 - DNA, 580 bp, Homo sapiens
gccaagcagcctcgtttctttgcactcctgtcgcttaggcgcgttggccagcgggtggcgcgcgggtccacctcaacgccgagcttgccccacgtcaagcacctgctcaggggaaaggggcgtggagcgggctcggtcactgcagtgtctaaagagctgcttcccagtctctgcacgtaaggaggaaggatgccccgctccaggcggcgaggaraggccccaggaggcttcgtcttctttgctgcgctctgctggagacgccgcggcgccggcccgctgagcccgcaggagagacccgcgcacctgggcgcccccgccgcaggaggatcggagctcctggcaacggcagaaaacacagaaacccgaaggcaaatatttacgggcctgcagaggaagaaactgaaacctctacgcgtgatttaaaaggcatgataacaactgctgtttggtttctggaaccgggctcgtccagcttcttacaacaccgtcctttagcccgtaggcccggctcccccgccgctgggggcagggtgtggacgttaaccacctgggaagtgacgggtcgatgacaagcttactt

SEQ ID NO: 512056 - DNA, 590 bp, Homo sapiens
ctgggtgggcttactgtggccatacaagaatgttttctgagaatctcaatgataaaagtctgaatgtgttcggtgttattgcctgtgctggctacatatggtagcttggatgccaggtggaggaggccttcctactccttgaaagttaggtgagattgtctcctgtatccctttcccataaccctggaagttcaaaatcctcccttggagtcccccgattcctgttgtagggcagggacactaccttccttgtggcctctcctgactcatgggctccatttcccttggtggcctcctctatttgcaccacacagaggcagtgattccataagagaaaaatcactcataccaagcgcaatggagtgattgtcctcctaaaatccatttgttgaagtcctatcctgccakgtgatggtatcaggaggtggggcctttgggaggtaattaggtcacgagggtggagccctcatgaatgggattcatacccttataaaagagatcccagagagcttcctccccatctttatcccatgtaaggccacaacaggaaggcatctgtctgcaacttggaagacagccctcaccagaac

SEQ ID NO: 512057 - DNA, 612 bp, Homo sapiens
tgttatatttgtacctgagttgaatttttatactggtagaacactaatattttgaaatatcctctgatatgatttatagacttggtaattttattttatttttatttctccctcgcatttccttttgtcattaagtgtaaaccttgtgggaggctgagggttactcctcagggtagggaagagtaaacactgcatagtacaaagaataactgttcaactttggcatycaagttgagatttttaagctctatagggaaataatggttgtgaaaatcaggttttgagaagaaaaaatgattttctcagactctcaaaatcatatcttcataggttgagttgcacaaaatttttaacattcaaccattttttgaccaatgaaatgtaactttattattgttcaatttatagtgtatatcaagaactcaagcttggagaattggccctagattacagcatgaagaagaaagggaggtcatgtgatgtgatataaagaaaatgcttacctttttgttgctagaaggaggagctgaagagagaatagggagaaaggtctgtgaaggcagacacaagatcaacccctgggcgagagcagtggacagggagatacacacc

SEQ ID NO: 512058 - DNA, 471 bp, Homo sapiens
tgctttcagctctctgaatgccaggcggccccaattgccttccctggccccaaactccaagcccactcctatgatgcccctgggtgcagccatgagttgtttcaaaaggccttctcaggtgccatagacccagctctgaccccaagccctggggcgggtgaggggagtgtgcctcacccccagacaggcttccctggcaggacacggcccctggccctggacccccagcacggaaggaagagtcccttcccccagtaggcccagcactgccatcagaacagtgcgccaagtcctccctaagggcaaaggggagttgggcacagcctgggatggccaacttgcaactcaggtggcatctgtggggcccagcatccggggcccaggtcacacaaaactcctatgcttatgggctccctactaccacctgacaccacgtgccagccctgcamacaggagccccaaccccagcac

SEQ ID NO: 512059 - DNA, 519 bp, Homo sapiens
attgtacgtaagaaaatgctgagaaattgtttccaatgaaaaattatttttcgtgctctgctgcatttttttcttggtgtttggcatttagatagtgcatgtggatatattagttaattttaataatattgtatgatgctgattgaacaatttcaaaytattaagtgtgtcttcagcaagtgttcagcaagcaagtattcttacttgtgagtaatcattacttcggtttcttgccctgatttcatctgccattggaaatgcaaaaaacaaaacactttaagacatctaccagagttgatttattatattttacctttgtgtaatatctttctagctttcgtttgacaacagagatgttattacctgggcataacacattggtaaataatacaatcaatcaaaatgatagatatttcagagtttgagatttgctcactctagatggcaattatatctaaattctagatgttgcaaaatacttttttcttgcaaggagggtttatgatctggaataacatt

SEQ ID NO: 512060 - DNA, 580 bp, Homo sapiens
tgttgtttcgctctttgcaataaagcttgctgctgytcactctttgggtccacactgcttttatgagctgtaacactcactgcaaaggtctgcagcttcactcctgaagccagcgagaccaccaaccacctgggaggaacgatcaactccagacatgccaccttaagagctgtaacactcaccgctaagatctgcagcttcactcttgagccagtgagaccacgaacccaccagaagaaagaaactgcgaacacatctgaacatcagaaggaacaaactctggacacaccgcctttgagaactgtgacactcactgtgggggtccgcggcttcattcttgaagtcagtgagactaagaacccaccaattccggacacaataagactggggatggttaacattcttgctataccgagtggggaaatctagtgctatgtgggctatctacaggactaagttagccctagactgaagttggctttggacctactctgataaagcttaacggtaagccttgaatgggtcaatatgatgtgctagtaaaagtgccataacaatgccaaatacacattaaaagtga

SEQ ID NO: 512061 - DNA, 496 bp, Homo sapiens
aatacatttcagggcacatgcaccagtaactattggtcatagcccaagcttatattcggaatctattgggagccccacaagctcttccttgttcatggtcaagggcgggcactgcgatggggctcctcccagaaagtgcacgccamccatgatggttttgcttccacgtgggtgaggtgtcagccctgcacatacaccaagggatggttacctgtgatctgcattgcccttgaggagcccagagggtctctgtcttttctatcagctccaagtggcacagagctttgtcccagttggcacggtgccctgggagctgggtacagcctgtgcctatggccagggagagggtgggggtgggggtgctccggggagcagtgtggctgactgttgcctaggagatcagatcccgagccaggaagccagaggcctggccaggcaaagccctaaggcccacaactgggtccctggagggtagaggaagtagatggaactcaca

SEQ ID NO: 512062 - DNA, 496 bp, Homo sapiens
aatacatttcagggcacatgcaccagtaactattggtcatagcccaagcttatattcggaatctattgggagccccacaagctcttccttgttcatggtcaagggcgggcactgcgatggggctcctcccagaaagtgcacgccaaccatgatggttttgcttccacrtgggtgaggtgtcagccctgcacatacaccaagggatggttacctgtgatctgcattgcccttgaggagcccagagggtctctgtcttttctatcagctccaagtggcacagagctttgtcccagttggcacggtgccctgggagctgggtacagcctgtgcctatggccagggagagggtgggggtgggggtgctccggggagcagtgtggctgactgttgcctaggagatcagatcccgagccaggaagccagaggcctggccaggcaaagccctaaggcccacaactgggtccctggagggtagaggaagtagatggaactcaca

SEQ ID NO: 512063 - DNA, 544 bp, Homo sapiens
gcctttccgcactcagtccgggcttactttattttgtgagacagggtctcgctgtgttgtccacaccagagtgctgtggggcgatcatggctcaccgcagcctccacttcctgggctcaagggatcctcctgcctcagcctctcgagtaacttggactacaggggcgcgccaccatgcctggctaatatatatatatatatatattttgttgtggcccgggaacggggggagtctgacatgttggccaggctgatctcgaactcctgggctcaagcgatcctcccgtttcggcctcccaaagtgctgggattaccggcgtgagccccggagccttgcccattctaggcttagagatttggattcctgtgtctggtcgacttcactgtgacctggasaaacccttggccttatctgggcctcagtttatccatctgtaaaacagatggaggtggtcttccccaggggctctaagagtggatcaaggaatggcttctagttgcctggctgcaccaatccactgagcgttcctcagaggaacttctc

SEQ ID NO: 512064 - DNA, 522 bp, Homo sapiens
tttttccatctgtatttgaggataataatatttaccttctatggttcttggtaatgaatagaggtaatacgtgcaaaatgttggacagagagtaggtatttaatattaataatagtgataataatgtagtagctaccatttattgagcagctattctgtgcatgctcaagcaaccttataacctcattccataggcacttttttttttttttaagacagagtctggctctgtcacccaggctggagtacagtggcatgatttcagctcactgcagcctccacctcccatattcaagtgattattctgcctcagcctcctgagtagctgagattacaggtgcctgccaccacacccggctaatttttgtatttttagtagagacagggttttgccatgttggccaggctggtctccaactgttgacctcaagtgatcctcccgcctcagcctcccaaagtgctaggattacaggcatgagccaccgcacccgaccagcactyttgttagttctattttacaaa

SEQ ID NO: 512065 - DNA, 556 bp, Homo sapiens
gataaacacttgttgaaaaatgctcctacaaagtacagatcatattttactcacaggctrataggaggattagattgattcattcactccacaaaaatattacttgagttctaactatgtgttaagtcctaggtagggtgagtggagacggtcagactgtccccaggaaaatggggtaaggtctacagaatgcctcgcacggtgcctgcctcagagtgggccctccaagtgggaatgagtgccctctgtcagtctgtctgtctctctctctctctctctctctctctcacacacacacacacacagacacacacacaccccagattctagtcagagtgctcttccgcttcttcagggaggctgcaacacagtgtcagcacaagcatggagcccggaggaggcctaggcttcagtacctgcttttctactcatttgctgcgtgacttttagcaaaccacccatcttccctggaccgatttcccaactgcaaaaaactgagcattctaataccttgttctgccttgagtacaaaggttaaacagatactatgggcaaa

SEQ ID NO: 512066 - DNA, 636 bp, Homo sapiens
gcattgcagctcagactgctacaatattaaataattgttgctgactggtttgytgagaaacaccccagagatagggctttttctgcaaagcaagctctgaatcaagtcaaataatgacaatgcccccaaatggggcttttccagggagcttcaagacaggtcagatagtggtaaagcactgggggtggcatcttttgaggaatttccatccccatccagggacttccagcctgctggcttttacaactgcttggttttgaggcaaacagctttcaaggttgtgaggcacttgagagaggagaatgggagtaggccaaagtgaaagccactgacccttctattcttaaccagatttggcaactttgttttaattaatgcttttcagagtgttgtaagcctttggttaatttccagagatgggaaaagtttaaagtttaatgttgacaatttttgccaacagtttcagtgcttctaatggagggctggatttacagagtttctcactacaccattccagaatgttccccaaactgtactctgctgttactgtctggttgtaggtaagataaagcaattaaaagtgggtgggggtgggcggggaagcaacttaagcatttctaacccactttggaaagt

SEQ ID NO: 512067 - DNA, 636 bp, Homo sapiens
gcattgcagctcagactgctacaatattaaataattgttgctgactggtttgctgagaaacaccccagagatagggctttttctgcaaagcaagctctgaatcaagtcaaataatgacaatgcccccaaatggggcttttccagggagcttcaagacaggtcagatagtggtaaagcactgggggtggcatcttttgaggaatttccatccccatccagggacttccagcctgctggcttttacaactgcttggttttgaggcaaacagctttcaaggttgtgaggcacttgagagaggagaatgggagtaggccaaagtgaaagccactgacccttctattcttaaccagatttggcaactttgttttaattaatgcttttcagagtgttgtaagcctttggttaatttccagagatgggaaaagtttaaagtttaatgttgacaatttttgccaacagtttcagtgcttctaatggagggctrgatttacagagtttctcactacaccattccagaatgttccccaaactgtactctgctgttactgtctggttgtaggtaagataaagcaattaaaagtgggtgggggtgggcggggaagcaacttaagcatttctaacccactttggaaagt

SEQ ID NO: 512068 - DNA, 497 bp, Homo sapiens
caacaaacctactctctgttggggcctctgggcagagcacacccatgcagacagcttgattttggcccactgatacttatttcagacttctggactcctaaaatgtaagagaataaatttatttttattataagccatgaagtttgcagtaatgtgtcacaggacccacatggaattaagcagggtgtgtgtggcatcatctgtctcaacatctgagggtggttactccaggcctctgaggggcagccgcaaagcacgtgttaaacagcagagaaagagcgagtatctttgtcttgtttctgatcttaacatttttctttccatattctcaagggatattggttttcttttcttatgacgaattttatttggtatcagggtgacactgaaatcataaaatgagttagaaattttattctttctctatttttgggaagtgtttgtggcacgttggtattaatktatttaaatctttcctaaaattcaccagtgaagcc

SEQ ID NO: 512069 - DNA, 442 bp, Homo sapiens
tttggtctggatatgagtcccactaagagcaagagaaaggctttaatcacagctcaattttaacatccttttgtgtagctgaaattggggggagtggcttctaatgaacacaatctggtcctgatccatgcaatgcattctcccccagcggcagactcctcagcaagttggctgcatgaagatgatgagggcgataggacagcacatcttcctgctttggggagcttttcaccaagagctgagccagaggcaaagcaatgaacaaaggcaggatttcaataaggaaaactcaagagctgaattgtgttggaaagaccttgcaaaaccaaatgcctagctttgtcctccagacctcaaaatatttkgaatttgtgtataatattcttatccacaaactgacaaatcctttgcttttccaaatatgctattaaaaatatacaaa

SEQ ID NO: 512070 - DNA, 580 bp, Homo sapiens
accattaactcaccattaactctacagtctcagcattactgagctttctgtttaaaggttaaggccgtttataactcaacaacccctcaggtcattcatgaaatacatcgcagcaccaagaaagtagtgttttcttccttaaacacatctcttatcccatcattcttctgctcaaaaatctgtgcttctctactgcttccagactccttaccatggaattcaacrtcctctatgatctggaccaaatgtcctttttggcgtatttcatactatccttaggttcccctggaaccctgaccccaggcaatcaagcagctcttggttctttcaatgtacctgatactttgccaatgatcttccatataagatgccctctctacctctgtctaaatcttattttaatatatgtgctgccgaaacgagaatgaaatcttcctactttgtaagaccaaactcagacaatattacctctatgaagatctttggtgtcagctattggaattaaatattccttatttgtgttaatagcacgtagtttaaaccttggttaaagcatttaatgttttcttttcttatttat

SEQ ID NO: 512071 - DNA, 539 bp, Homo sapiens
aataaacacagtcatctaagatagtttcctaggacagaggaaaaaggattagggcctggggaagaggagtaaaactgctatctgtcagaggacatcaatctgaaagagaaggtgcaagcaactcttcctataagaaggatggatagttcccagaagggattggtggaggagggagcatcacccttgcagtctcgtgacatttgttatcaactratgccttttttttttggcacactttagtatgacagtcaggtggctgatcctgggttactgtttttagagacattttcttattggtggctccaggcacagtaagtacgtttgcctttagctgtggtctgcccttacaccctcatgctaggacatgtggaggtttcaaggtgaacaaaactgattttctatcattcagttgctaacattgtagtaagggaggtaagacacgtaatcaaatagacataacccgggagaaaaagtagcaaatgcctgagagtgggccaggtgctgagagagtgctgtgtggtgacagcactcccagggag

SEQ ID NO: 512072 - DNA, 579 bp, Homo sapiens
aacaggcacatagtaacatttgacaaatattttaaagcctacctgttttccacagacctcacctggccaacggagaagtgcaattactagattataatcagatctatgattatttgttacctttattaaaacaattctatatattttattgcatgtaaaagagtaaaatggctatctttaagtaccaaatactccartagcagggtagcaacatttatttacactacagcttggtatgtatatgtgctcaattttttttaacctatacttggtgtgagtatgagcacctaggctttgagtagtgggggaaaaaatattaggcctagtccattccaatgcaattattttaaaaacctctttaaatattactcatttccttcagcaaagttatcttctagttcagatttctcctttttcagatcccattttcctgtgtcctagctagggaggcatctggtgtgcctggtgtatggaagcctgaaggactatgcagtgccttgtgttctgcttgtatggctcttcaggtagctgggaacatgatgtcccctggtgctgaagttttttgcagatactactcat

SEQ ID NO: 512073 - DNA, 629 bp, Homo sapiens
gctggccccgccgctcgctcccactcctggcacgcgtgtcgcgagcgctgcgcggagggggttggggacgcaggcagccgccactagccgcttctggttacctccgccccttccagtccacctggcccaaaccaagctggaacaagctcgccgctgggcgccacctgccggcgctctgtacagccggcggaaggcacccactcccggcgctataagggcataccgcagagatattgcaggttaggttccagacccccgcaataaagcgagtattgcaacaaaacgagtcacacgaatttttcagtttcctaatgcatataaaagttacgtttgcactatgctgtagtctgttaagtatgcaatagcaygatgtctagaaagagcaatgtacctaccttaacttaaaaagatattttatttctaaaaaatgctaaagatcatcttcacctaatgggaatctttttggtggtggaaggcattgcttggatgttgatggctgctgattgatcctggtagtgattgctgaaggctggaatagctgtgtcaatttcttaaaatgggacaacaatgaagtttgctgcatcaattgactcttccttttatgaaagatttttctgtagcatgcaatg

SEQ ID NO: 512074 - DNA, 304 bp, Homo sapiens
tcctagcagctggtgataaaactctatactggttctaagaattacatctcatgtgacttttacggatctttttaatcttgaatcagttctgcttccatgatccttgayaagacgctcttgctattaatggacaaaagaaatgtctaattataagaaaaatgtatttccaaggagttgaagagttttccatattttagatatatgtcagggaaactgtaatttgtataagatacaaataaccataggtaagtttggagatgaggtgtaacatatacatgcatttttcatgtgtggtacatgatct

SEQ ID NO: 512075 - DNA, 561 bp, Homo sapiens
gttaactaataggatatttcattttcctgcatatatctgagagacaaattgttcaattggtccagcaactctttccctgaattagtaatggagttcccagatgargtggacatatacaaatcaaagcctcatttgcaaacttttttcagaaaacaaaaaaggtacaatatgcatctaccttcacccttctctctgccatgtaaaaatccaggctgattatataactcaaagaccaaacctcttcctatgtttttccatgtgttgggtgcattgtccagcgaggagctgtaattttctctctgccacatccatcattaaggttgactattaggtttctcctactgtggctcagattctaatactgaaggtaactcaagagatagccaaatagccaggcacagaggctcacgcctataatcccagcactttgggaggcctagggtggaggaacacttgagagccccggagttcgagaccagcctaggcaacatagtgagaccttgtctctacgaaaaatgtttaaaaattagctgggcatggtggcacacctctgcagtccca

SEQ ID NO: 512076 - DNA, 542 bp, Homo sapiens
acatgtggtatttggttttctgttcctgtgttaattgacttaggataatggcctctaactgcatccacgtttgctgcaaaaagcaggattttattcttttttatggctgcgtagtattccacagtgtatatgtaccacattttccttatctaatccacccttgatgggcacctaggttgattccatgtcyttactattgtgaacagtgctgtgatgaacatacacgtacatgtgtctttttggtagaatgatttattttcttttggctatatacctagtaatggtattggtgggttagaccatttttcaaaagccacttttccaggctaatttgttctaggagataaaaactatcaagttaaacatggagctgtaccattgcacaagttcacatgggggatacctcaaagctgcacttcaaactctcatcccttcctgggtttctccactgccattcaataggcagggaatttaagatgtttttggtgtaatacctttattcctgtctaattttacacaacttgatacattttacccagtaa

SEQ ID NO: 512077 - DNA, 542 bp, Homo sapiens
acatgtggtatttggttttctgttcctgtgttaattgacttaggataatggcctctaactgcatccacgtttgctgcaaaaagcaggattttattcttttttatggctgcgtagtattccacagtgtatatgtaccacattttccttatctaatccacccttgatgggcacctaggttgattccatgtcctyactattgtgaacagtgctgtgatgaacatacacgtacatgtgtctttttggtagaatgatttattttcttttggctatatacctagtaatggtattggtgggttagaccatttttcaaaagccacttttccaggctaatttgttctaggagataaaaactatcaagttaaacatggagctgtaccattgcacaagttcacatgggggatacctcaaagctgcacttcaaactctcatcccttcctgggtttctccactgccattcaataggcagggaatttaagatgtttttggtgtaatacctttattcctgtctaattttacacaacttgatacattttacccagtaa

SEQ ID NO: 512078 - DNA, 510 bp, Homo sapiens
cacaaaatacatgatctctaaggtctctcccagctctgaaatgctattgctctgtaaccaccgcggcgttctgactcgtgactaaaagcatccaagatgttgttctacacttctttggtgttttagaaggcttatcagtattttttcccactattgtgagttttgggaatttaccttaataaagtaactggtaccagaatgctggcagtcagtgtttactacaattgtaaaaaagcctttcagttgcctaaaacacggtataaaatcccatgctttttactatagatagtttccmagggacgacttaggacttttcaagtgaaatcaagttgtttagactttatctcctcttctttctcctgaatagtttttccttctcaagcaaggatttttagaaatggatatactaataccagctcaagataaataggtacaacatgaacaagtagcgtaggttgactcagtaacaaaacccaggtgtgggcccattattgacccatgatctactgt

SEQ ID NO: 512079 - DNA, 579 bp, Homo sapiens
cagacgtgccgccagactatccgttccatgtcttgcagtgattggaagagatgagaattcgctttcctgtccatgcaaatccactgtaagggattctagagtaccggagcctagagagttctctgagatggagggtgcaggacatttgcaaataaaagagcctgaggcttaagagtcactagaggagctttaatcttatcagcatattttgcatctaccaactgcaaacctagcctaaggcataaagaatcgagtcttggtccctctgttattaaggactcactcacaaaattaacctcttaaagatctgccctctgattttagtgtctgaaatgcaaatgaagcagcccttcagtgccttgagataattataataatcttcttaaagctaaaatgcttcactcaactctaagtctccattacaacccggaccccagtcttcagttcatcaaaagccagacagaggaggatggggccacggcagaggagtgatagcatctgtggctccgatctaattccagggatggaygtggaccaggaggtgcctgtccccgaggcagagggggtagttcattcccc

SEQ ID NO: 512080 - DNA, 488 bp, Homo sapiens
cagattaaaaatctgagactcggagaagaatcacaaggcatccaaggtcacatgacaattaacaactaccagcaggtccccacatcctctcctgacccccatggagcggggctggaggtatgggaacaacctccattcattctcctctcaatcaacattatttggggagatctcttccaagtcaaaattggtcttttatttttttaatttttttgagacaaggtctcactctgtcacccaggctgaagtgcagtggcaccatctcagctcactgcaatctctgcctccccagttcaagtgattcttgtgcctcagcctcccaaatatccaggactacagttgtgtgccaccatgcccagctaattcttgcatttttagtaaagacagggttccaccatgttggccaggctggtcttgaactcctggcctcaagtgaactgtccttcttgacctcccaaaatgctgggwttataggtgtcagccaccat

SEQ ID NO: 512081 - DNA, 546 bp, Homo sapiens
tatgattcagacatgccatagtacttttagttcctgaataataggttttccatctctctgtggttttgtgtgttctgttcttttggtcaagaattccctgcatctattagctatctagcgaaaagctctcatcgctgaagccagagcgagcwtcagtcctttccctgttcaccctatccccatgtaggattatctcattctttgtatcctcaagacagtccatagctgctttgatcatagaactagtactgcatttttttttctgtttgcatgcttatttttttccactagactgtgaaaatgtttaggatagggctatagcttgctcatctatatattctcattgcccgtcacaatgtgaggcacataatcgacagaaaatgagttaaaaaacaagtgaatgaatatataaattagtgtatgagtgaattaatctactaagtggagctagaaacttttattccatgttcttttcagagtttatttgttgataaaatgagatgatggatatcaaaaaacaccttgtaaactctatttaactataga

SEQ ID NO: 512082 - DNA, 539 bp, Homo sapiens
ctgtctctgctggctgtgctttggaatctatcagagacacagcccatctcccacagaggaatccaaatggtcctcacagtgccacggcccggggtgagtaacccgaggggaggtcacatttgctggacccctgcaaagcggacaggtctctttcagccttcttcctactcatggctccccttccagttctcagaggttaatgcttttcccttcattagtcatcactgaacccatcatacggcatggccagggctggctttaacatgcccacgagatgcattccctctacacttrtgcacgcaggactctatgtgctcgcctgtggctgctgcttctggggttgccatgacccttcgtgctcctccccaacttctggagccagagggcccactccaactggtgaaggccgtgttctagacccctctcttccctcagatgcaagtgatattggcctcctttcctcagggcttccttcttccaattgcccatttttctttgtaaaacaaatctaagccaggtccctttcagacacagcggga

SEQ ID NO: 512083 - DNA, 588 bp, Homo sapiens
ggctgattattgcagaaaacatgactatgcacgaatgtcactttattccaagccccctgcacttgagaaaaaccactcctctgcagaagtccaaagctagccatctggagcttggatgggacagagctcagggctgttgttactatagcagcccctggcctcagcccttcyaacctgcctggagatgggaggaacatctctcccccaagtttccctccactccagtgccagccctcaaggtgctaaaatgggctatgatatgaactcaagcttggggcaggacaggtgggggggtgccctttaaggaattttgaagaatggggtagggtcatccattaaggggccatgggcacgttggggtctgtcagccttgccagcaggaagtgccagtgcttcctttactgtgggatgatccagaacagcatctttggaatggggccccacttccatggtcactcaaaggaaggagtttctttactcacccttggccctctgcatttgcacccccgtgtctttctctaggacaagctcccagtgatcactcaagaatctggctctcattctaagaggctgtgctgcccagtatgg

SEQ ID NO: 512084 - DNA, 588 bp, Homo sapiens
ggctgattattgcagaaaacatgactatgcacgaatgtcactttattccaagccccctgcacttgagaaaaaccactcctctgcagaagtccaaagctagccatctggagcttggatgggacagagctcagggctgttgttactatagcagcccctggcctcagcccttctaacctgcctggagatgggaggaacatctctcccccaagtttccctccactccagtgccagccctcaaggtgctaaaatgggctatgatatgaactcaagcttgggrcaggacaggtgggggggtgccctttaaggaattttgaagaatggggtagggtcatccattaaggggccatgggcacgttggggtctgtcagccttgccagcaggaagtgccagtgcttcctttactgtgggatgatccagaacagcatctttggaatggggccccacttccatggtcactcaaaggaaggagtttctttactcacccttggccctctgcatttgcacccccgtgtctttctctaggacaagctcccagtgatcactcaagaatctggctctcattctaagaggctgtgctgcccagtatgg

SEQ ID NO: 512085 - DNA, 588 bp, Homo sapiens
ggctgattattgcagaaaacatgactatgcacgaatgtcactttattccaagccccctgcacttgagaaaaaccactcctctgcagaagtccaaagctagccatctggagcttggatgggacagagctcagggctgttgttactatagcagcccctggcctcagcccttctaacctgcctggagatgggaggaacatctctcccccaagtttccctccactccagtgccagccctcaaggtgctaaaatgggctatgatatgaactcaagcttggggcaggacaggtgggggggtgccctttaaggaattttgaagaatggggtagggtcatccattaaggggccatgggcacgttggggtctgtcagccttgccagcaggaagtgccagtgcttcctktactgtgggatgatccagaacagcatctttggaatggggccccacttccatggtcactcaaaggaaggagtttctttactcacccttggccctctgcatttgcacccccgtgtctttctctaggacaagctcccagtgatcactcaagaatctggctctcattctaagaggctgtgctgcccagtatgg

SEQ ID NO: 512086 - DNA, 204 bp, Homo sapiens
tgccctcaccagctctgcgtgggaatcctgcttcagggccagcggcccctccctgcccctccagtgagtccatggccctgaactccttccccgctccctgcgatgggaggcttgtggcctagatctggggamaagccccagagcctgaggcagctccaagctgacctgatcacatccgctctcaggggatgggaggtgtgaaga

SEQ ID NO: 512087 - DNA, 498 bp, Homo sapiens
gctggaactgtctccctgagaacagcatcacatctcaaagattacataactttagcagttacagagacacatgtgtgtgaccatgacaccactagaggcatataggaacctcctgaatctctgaagttgtaatgatctgtcttttgtgattaacccagagttgtcaayttcattcctataactaataagctagatgattagaaaacaaagggcccaggtcccattcttccctttagcaaatgtttattaagcacctactatctaacagaaactacacatcagtgcacaaagaagacatgatttctgccatcaatgtgtcccttacggtgaacacagccctcaaggtcacaacttagaatgatcagaaatcgaaggtgacagaatgattaagaaatactctctttgcatgaaatatgcaaagtttggattagattctcttagaaaattaactcccactttgccctagtttttcttaaagcatatccttggaccacctgc

SEQ ID NO: 512088 - DNA, 513 bp, Homo sapiens
ttacataactttagcagttacagagacacatgtgtgtgaccatgacaccactagaggcatataggaacctcctgaatctctgaagttgtaatgatctgtcttttgtgattaacccagagttgtcaacttcattcctataactaataagctagatgattagaaaacaaagggcccaggtcccattcytccctttagcaaatgtttattaagcacctactatctaacagaaactacacatcagtgcacaaagaagacatgatttctgccatcaatgtgtcccttacggtgaacacagccctcaaggtcacaacttagaatgatcagaaatcgaaggtgacagaatgattaagaaatactctctttgcatgaaatatgcaaagtttggattagattctcttagaaaattaactcccactttgccctagtttttcttaaagcatatccttggaccacctgcatcaaaaaaacccagcttccagagctactgaatatgtaccttgggaggtgggaact

SEQ ID NO: 512089 - DNA, 498 bp, Homo sapiens
gctggaactgtctccctgagaacagcatcacatctcaaagattacataactttagcagttacagagacacatgtgtgtgaccatgacaccactagaggcatataggaacctcctgaatctctgaagttgtaatgatctgtcttttgtgattaacccagagttgtcaacttcattcctataactaataagctagatgattagaaaacaaagggcccaggtcccattcttccctttagcaaatgtttattaagcacctactatctaacagaaactacacatcagtgcacaaagaagacatgatttctgccatcaatgtgtcccttayggtgaacacagccctcaaggtcacaacttagaatgatcagaaatcgaaggtgacagaatgattaagaaatactctctttgcatgaaatatgcaaagtttggattagattctcttagaaaattaactcccactttgccctagtttttcttaaagcatatccttggaccacctgc

SEQ ID NO: 512090 - DNA, 633 bp, Homo sapiens
ggaaaccaaggtttagaaaattaacttgtttctcaagtagtaactgtggggattgggatccaggccttaggtctccaatccagagttcacaacacaaccccacagaactctctgcactggacatggccctgcccaggagtcccaggagtggagctgagctctagtaacagctctttctgatgcaggaggacctcggaatgatgctcaattcaacttctctgtgcaagagccaatggaaggcaccaatgttgtcgtgtgcgtcacagttgctgtcacaccatcaaatttgaaagcagaagatgcaaaatttccactcgatttccaagtgattctggtaaggcagcctgcttcagggctttcccttgtagaaatttagtgtaaaccttgagttggggagaacagctctggccaggctgggagatttgactgcaccacagccttggagataaagcccaaagaggctgtagcattcatgcaktccaagtctaaatgtgcaaaaaatctgaggccagaaagatgacactcgatcatgattacagtgggactcacctcctgcccgtgtcgcctgtcagcgttttctgggatgctgcagaatctaatgcttgctactcaaaaagtggtctgggccaagac

SEQ ID NO: 512091 - DNA, 507 bp, Homo sapiens
tggcaaataaactagatacttttaaagcctcatatgttttgtttgtttgttgctgagacagggtctcattctgtcacccaagctggagtatagtggcagtggcagtggcaggaacaaggctcactgtagcctcgacctcctgggctcaagggatcctcccacctcagcctccagagtagctggaggccaccatgcctggtcrgctttttattttaatttttaattgtacagacagggtcctgcgatgttgcctaggctggtctcaaactcctgggctcaagtgatccatgtaaaataagtgggtcatgtctaatatcaaggtctttcaaaagagaaagataaaaatatctgaatccaattgttgtaaatcctctttgaaacaagcccttaggaataaaagacaaaagagcataaactgcgaaatctcttgattctggtatgtttacagtctcaccccccttaaggtgagcaattctctgtatgttctccaattctctcatttttcaa

SEQ ID NO: 512092 - DNA, 507 bp, Homo sapiens
tggcaaataaactagatacttttaaagcctcatatgttttgtttgtttgttgctgagacagggtctcattctgtcacccaagctggagtatagtggcagtggcagtggcaggaacaaggctcactgtagcctcgacctcctgggctcaagggatcctcccacctcagcctccagagtagctggaggccaccatgcctggtcagcttttyattttaatttttaattgtacagacagggtcctgcgatgttgcctaggctggtctcaaactcctgggctcaagtgatccatgtaaaataagtgggtcatgtctaatatcaaggtctttcaaaagagaaagataaaaatatctgaatccaattgttgtaaatcctctttgaaacaagcccttaggaataaaagacaaaagagcataaactgcgaaatctcttgattctggtatgtttacagtctcaccccccttaaggtgagcaattctctgtatgttctccaattctctcatttttcaa

SEQ ID NO: 512093 - DNA, 507 bp, Homo sapiens
tggcaaataaactagatacttttaaagcctcatatgttttgtttgtttgttgctgagacagggtctcattctgtcacccaagctggagtatagtggcagtggcagtggcaggaacaaggctcactgtagcctcgacctcctgggctcaagggatcctcccacctcagcctccagagtagctggaggccaccatgcctggtcagctttttattttaatttttaattgtacagacagggtcctgcgatgttgcctaggctggtctcaaactcctgggctcaagygatccatgtaaaataagtgggtcatgtctaatatcaaggtctttcaaaagagaaagataaaaatatctgaatccaattgttgtaaatcctctttgaaacaagcccttaggaataaaagacaaaagagcataaactgcgaaatctcttgattctggtatgtttacagtctcaccccccttaaggtgagcaattctctgtatgttctccaattctctcatttttcaa

SEQ ID NO: 512094 - DNA, 618 bp, Homo sapiens
tgccagctttaaggcataatcaacaaataaccaatgttgtttttaaatgtctaacgtctataaagcccaatcctgagaactctaccattggagtgctctggttaattggatttctgttaatcaccaatcagtttttttgttaaaagggacttgttcaaaayttaaccaaactttaatttactttcttacttcaggaaaaaaaaaaatctcctgggcacacttctatcctgctttggtgacacagaaatctaagcatcctaggttaggatttggagcattagggagcatgctgaggatggaggaggagcgggaaagtgagccgcaggtgcaccggccgaggcctcaactctcagagggcttcttcttaacttgttccaggtgtggttaatgctgtcttgtagatgagtattactgttattcagattccagttaaccaacatttttttgaccggcacttttgcagctcttgaatccttaactcaagggacaaaacttttaaactgacttcagccaggttttttttaccactgggataaatttagattttattatgtgcacatacatccttttaaaaaatatcactcagctttatatttgtatcccaaatattttttcgca

SEQ ID NO: 512095 - DNA, 542 bp, Homo sapiens
ctgcaggatttctgcaagctattcagggtgcatctgccctggccaacactggagtccttagggcctctgggaacacatctcgggactcaaagctcacaacatcccctctgtaacctgctcttcgtgtcaggctgctagaacctgggaggaaactgctctgacttctcacagttcctctgcctgacctgctattcctaggagtttacatagcttgaggctgataggaaacaagtaaaattagaaacagattaaactactgcatcagcaacaaattagatgacaacggtatgatcacttccttggaacacagttctagctagatattcagggtacagggctatgtggagaaagaccctaagatgaagggaccagtgggggaggtggccccggcaggtgtcccagcagctttcgccttggcaggtgggagcatgacctatcgtgtgcagttcctggcgggctatacatagccagtcaaagcttcttacaaragaaacctctttcacaccctccacgggtcccacccacaggccacaggactcact

SEQ ID NO: 512096 - DNA, 584 bp, Homo sapiens
ttttaaaagacaaaaactttcatttagagggcatgtacaatgatctagtaataacaggatgtttcttggtggaccagattttttttattaatgtgatgtgttgctaaagattattcttcacatatatgtttcgttttattgggaactataatgacactatggaatgctccaagaatggcaaaacaaagtttataatttcagatctttcagtatttctttgttgatttaagtgaatcacaagacctggtagtttacttagtcctgcagtaccagattcaaatagttgtrggaattgtaaataccaagtgcttacctttctgagcttttggattcctcatgcattgtctttcttatgtagaactcgagactaagggggcatgaaatccagattaaaattaaaccaatatatgcctgacacccaagactacagcttccattctagaatttcattctagaagcatctcaggaaagagcaattatattctatgccactatataccaagcactgtccaaggctctttctttatggtgacttcatttaattccccagtaaaccaatgagagaggtagactacagcaaaaga

SEQ ID NO: 512097 - DNA, 582 bp, Homo sapiens
gtattttgggagaatagcttaaaatgtctgcattttgtgacttcttcaatctcacacccatttcgtcttgttcctaacagctctcaggccttccagaggactctgttggtttggggtacgtagaatgggacctcacaatgatgtctrtcctccttggtatcctgtctccagttagtcaacgtggccaccagttcactggtggggccttagagagggaaaggaaattactctttatgagtcatgcctacccccttcacttcagtttcttctcctaaatggcttggtgatctagtgatttgggccattgtttcatctccctattaatttgtgtagaccgtgaaagtaggaaccatttcttgctccttgcacagagtgtttgatacttttccaaaaatatttgttgagtgcttattatgtactgggtgcttttctagatggactttatgcattctagacagtgtctgtgatggttaattttatgtgtcaacttgactgggttatggggtgcccagatagctggtaaaacattatttctgggtatgactgtgagtgtgtttctgaaagagaacagcatttgaatca

SEQ ID NO: 512098 - DNA, 582 bp, Homo sapiens
gtattttgggagaatagcttaaaatgtctgcattttgtgacttcttcaatctcacacccatttcgtcttgttcctaacagctctcaggccttccagaggactctgttggtttggggtacgtagaatgggacctcacaatgatgtctatcctccttggtatcctgtctccagttagtcaacgtggccaccagttcactggtggggccttagagagggaaaggaaattactctttatgagtcatgcctacccccttcacttcagtttcttctcctaaatggcttggtgatctagtgatttgggccattgtttcatctccctattaatttgtgtagaccgtgaaagtaggaaccatttcttgctccttgcacagagtgtttgatacttttccaaaaatatttgttgagtgcttattatgtactgggtgcttttctagatggactttatgcattctagwcagtgtctgtgatggttaattttatgtgtcaacttgactgggttatggggtgcccagatagctggtaaaacattatttctgggtatgactgtgagtgtgtttctgaaagagaacagcatttgaatca

SEQ ID NO: 512099 - DNA, 623 bp, Homo sapiens
ataaacattcttgccttatgaaggcattagtttcacttaatggcttctagtgcctggagtataagctcttgtaatttttctcccccagagcagactgaaagaatacctaggaattgtcatctttgtagttgctcaagaaagatctttgggtggctgtgagcagatctgaaaatagtaagtatggcaggtrcatggagctgcatccgtttgcaaaagctatcaataaagaaaggtatagaaaggatgcccttgaccccggtatgtgcagatagaagtggaatttcctccggaatgtgcatgcaaatgtgcctagctgcaaaagaagaggcattccctgctcaggtgtgtagagtgatttagaaccatttgtttctgctcaatggttctcaaatgaacagtatttcctcactaggaaacagtgctaattccaggctaggacggtccacagagatggtggctgtgcccagatcattcttggaaatctgaggaagggagtcatttcttctcatgccacacccagtaaggggtacattagatactctatttcctccaggcagatctacagtgaccaggaccacgtactaggataggagaggttctggcactattcatcattggctccg

SEQ ID NO: 512100 - DNA, 598 bp, Homo sapiens
tccagcctggtgacagagagcgactccatctaaaaaataaaaaaaaaaaattttaaatttaaaaatctctactctccaggccaggtgcagtgagtggctcctgcctataatcctagcactttgggaggccgaggcagtcagattgcttgagttcaggtgtttgagacyagcctggtcgacatggtgaaaccccgtctctaccaaaaatacaaaaattagctagacttggtggtatgcacctgtagtcccagctatttgggaggctgaggcaggagaatctcttgaacccagaaagtggaagttgcagtgagcaaagatcatgccactgcactccagcctggacgacaacgagactatgtctcaaaataataaaataaaataaaataaaaatcctctactgtctacttcccccacccctaatatcctagctatgtggcccaagtacttatttagcccagtccatgaaagtaaaggacagtggacagtgtcctttgataggaggatggggcagaatgggaaaagaaaatggtagggtctggaggtacaagtgggggccagagagaggggctttacagattattcgggtgtttgaaagtca

SEQ ID NO: 512101 - DNA, 598 bp, Homo sapiens
tccagcctggtgacagagagcgactccatctaaaaaataaaaaaaaaaaattttaaatttaaaaatctctactctccaggccaggtgcagtgagtggctcctgcctataatcctagcactttgggaggccgaggcagtcagattgcttgagttcaggtgtttgagaccagcctggtcgacatggtgaaaccccgtctctaccaaaaatacaaaaattagctagacttggtggtatgcacctgtagtcccagctatttgggaggctgaggcaggagaatctcttgaacccagaaagtggaagttgcagtgagcmaagatcatgccactgcactccagcctggacgacaacgagactatgtctcaaaataataaaataaaataaaataaaaatcctctactgtctacttcccccacccctaatatcctagctatgtggcccaagtacttatttagcccagtccatgaaagtaaaggacagtggacagtgtcctttgataggaggatggggcagaatgggaaaagaaaatggtagggtctggaggtacaagtgggggccagagagaggggctttacagattattcgggtgtttgaaagtca

SEQ ID NO: 512102 - DNA, 598 bp, Homo sapiens
tccagcctggtgacagagagcgactccatctaaaaaataaaaaaaaaaaattttaaatttaaaaatctctactctccaggccaggtgcagtgagtggctcctgcctataatcctagcactttgggaggccgaggcagtcagattgcttgagttcaggtgtttgagaccagcctggtcgacatggtgaaaccccgtctctaccaaaaatacaaaaattagctagacttggtggtatgcacctgtagtcccagctatttgggaggctgaggcaggagaatctcttgaacccagaaagtggaagttgcagtgagcaaagatcrtgccactgcactccagcctggacgacaacgagactatgtctcaaaataataaaataaaataaaataaaaatcctctactgtctacttcccccacccctaatatcctagctatgtggcccaagtacttatttagcccagtccatgaaagtaaaggacagtggacagtgtcctttgataggaggatggggcagaatgggaaaagaaaatggtagggtctggaggtacaagtgggggccagagagaggggctttacagattattcgggtgtttgaaagtca

SEQ ID NO: 512103 - DNA, 598 bp, Homo sapiens
tccagcctggtgacagagagcgactccatctaaaaaataaaaaaaaaaaattttaaatttaaaaatctctactctccaggccaggtgcagtgagtggctcctgcctataatcctagcactttgggaggccgaggcagtcagattgcttgagttcaggtgtttgagaccagcctggtcgacatggtgaaaccccgtctctaccaaaaatacaaaaattagctagacttggtggtatgcacctgtagtcccagctatttgggaggctgaggcaggagaatctcttgaacccagaaagtggaagttgcagtgagcaaagatcatgccactgcactccagcctggacgacaacgagactatgtctcaaaataataaaataaaataaaataaaaatcctctactgtctacttcccccacccctaatatcctagctatgtggcccaagtacttatttagcccagtccatgaaagtaaaggacagtggacagtgtcctttgataggaggrtggggcagaatgggaaaagaaaatggtagggtctggaggtacaagtgggggccagagagaggggctttacagattattcgggtgtttgaaagtca

SEQ ID NO: 512104 - DNA, 370 bp, Homo sapiens
aggatactggtcctgggcttcagggacatgtggctctggggagggggctccatgaggcacaggcagaggagaaccatctggagcagcagagactgccaaggagctgctgtccctggagcgggagccggggaacataaggaggggagcttgggactgagcttgggtccctcacccacttctgcctcccagggctgagtggtgaarggactttgcacaccatccaaaggttctgtgccaggggcttcctcagagtctcccctgcctacctttttcctctggccttatcctgacagttcctggccctcactgtgggactagcctgggcagaatgtgcacctggctgggaaggataggggaggctggcctgcag

SEQ ID NO: 512105 - DNA, 490 bp, Homo sapiens
tcagccagccagaatctaagggcataggagtgccggcctttsgcaccctagggctgggagttgggggcacagataagtcctggatcctgggtaggaggcccaacctgagctgggggatgaagctctgtggatactgcggctcgcaccttattctgcccctctgactttctagctttggtgggagccagaactacgaacttgggccctcttctcctcctcagcctcccaacccaggcagcccctgtcttcagggtacaggcctccttaggagggtcctcataaaggctactaggcaatgctaatctggattgcctctgctcttgttccaaactctggtctgtgctaaagggcctcctgccatcactctggccagtggagtggtgagaaatcatgtcccctgaccccgtctggctttgaatagtggaagtaagaacaaagctcagcattggtcccgtccctgccctggaagagctaagaggatggcattcag

SEQ ID NO: 512106 - DNA, 627 bp, Homo sapiens
tcagtctggcaatgcacatccggagctgcctagaagcaaaggctgcttcctacatcctgcagcctgtggatgcaccatgccagaagtaaaagcagctgtgctgaccgaatcaggttccaggagccctcctactccagatgtggtacaaaaataggcctctgacgctgtcacatttgaggcctgtgctctccagccagctgagaggtacccaggagccaggaagagcagaggggagcatcagtgtccacatgttgggggatacctctgtgatctgtccacccctagtggacaagccacatattcaggccaatgcscagtaaggactggtaacaaatttctgtaagtcctccagctgccccagggagtcagctgtgccatcaggtcccatggccttgctcaggagaccagagtgaacatgacaaaaggagagccacttctccttcaacctctgttcactgctaagttaccttgcttctggaggaaaacaaatccttcctcagcttgtcagccacctcccctgaggccttccgtgcctcttttagattctcgtactctctgcaatgtggccatggaaagagatgccagaaaagaacacctgcaggtcagactgagccacagcactaatct

SEQ ID NO: 512107 - DNA, 627 bp, Homo sapiens
tcagtctggcaatgcacatccggagctgcctagaagcaaaggctgcttcctacatcctgcagcctgtggatgcaccatgccagaagtaaaagcagctgtgctgaccgaatcaggttccaggagccctcctactccagatgtggtacaaaaataggcctctgacgctgtcacatttgaggcctgtgctctccagccagctgagaggtacccaggagccaggaagagcagaggggagcatcagtgtccacatgttgggggatacctctgtgatctgtccacccctagtggacaagccacatattcaggccaatgcccagtaaggactggtaacaaatttctgtaagtcctccagctgccccagggagtcagctgtgccatcaggtcccatggccttgctcaggagaccagagtgaacatgacaaaaggagagccacttctccttcarcctctgttcactgctaagttaccttgcttctggaggaaaacaaatccttcctcagcttgtcagccacctcccctgaggccttccgtgcctcttttagattctcgtactctctgcaatgtggccatggaaagagatgccagaaaagaacacctgcaggtcagactgagccacagcactaatct

SEQ ID NO: 512108 - DNA, 545 bp, Homo sapiens
ctcaccacaaaaaattataagtatatgaggtgatggatggatatattacttaacctgatttaatcattccacaatgtttatttgtatcataacatcacaacataccccataaatatctaaaattattatgtgtcacttaaaaataaaataacaaaagctactaaatgcaaaataataaatatgtccagtagtttaaaattattttaaaagttaggcaaacttaaataaataaaactctttgttaaactattatgtttaatgattaaatgatattttattgtattgttcttctacaatttgctcaattattcttatgttgcaggacccatatgttgtttataattttttctattatagataatacmataatgaaacttaataaagatgcaatgaaatgaatgaagattgaaaaggaatgcctcaaattgtcaattttatattattgtccacttggaaaatctaagagactatccacagaatcatcaaaactaataagacagctcagtaatattgcttgtaaaagtaaaatacacctaaatcagtgt

SEQ ID NO: 512109 - DNA, 571 bp, Homo sapiens
ctgctggtggctcaaggcattctttggtttgtagctgcataactccaagctctgcttccatcctcaartagccttcttctatttcctgtatcttctcctcttctgtctttcataagaacacttattggatttagggtgcactaggatcatccagtatgacgtcatctcaagatccttattaatatatacaaaaaaattaggtcacatctacagtttctgtgggctagcatatggaaagatatgtgcatatttatcatattttgggaggcaccattgaatctactagagacaaacatctacatttaggatattaaagaaaaaaatccttgcctttgtaaagattacagtcagatataggatgacacaaaagaaataaaatatagacaggtgttgaaaagttatatattttgtgaagaaaataaagcaaggcaggatacacagtaatagtggcagattacaattttaattaatgtattcagtaagaaacattgtaaaaatagcattgaaataaacacatcaaaaggctgagggaagaaaaagaatacagtttttctctacatcccaaattact

SEQ ID NO: 512110 - DNA, 486 bp, Homo sapiens
tgctggtggctcaaggcattctttggtttgtagctgcataactccaagctctgcttccatcctcaagtagccttcttctatttcctgtatcttctcctcttctgtctttcataagaacacttattggatttagggtgcactaggatcatccagtatgaygtcatctcaagatccttattaatatatacaaaaaaattaggtcacatctacagtttctgtgggctagcatatggaaagatatgtgcatatttatcatattttgggaggcaccattgaatctactagagacaaacatctacatttaggatattaaagaaaaaaatccttgcctttgtaaagattacagtcagatataggatgacacaaaagaaataaaatatagacaggtgttgaaaagttatatattttgtgaagaaaataaagcaaggcaggatacacagtaatagtggcagattacaattttaattaatgtattcagtaagaaac

SEQ ID NO: 512111 - DNA, 571 bp, Homo sapiens
ctgctggtggctcaaggcattctttggtttgtagctgcataactccaagctctgcttccatcctcaagtagccttcttctatttcctgtatcttctcctcttctgtctttcataagaacacttattggatttagggtgcactaggatcatccagtatgacgtcatctcaagatccttattaatatatacaaaaaaattaggtcacatctacagtttctgtgggctagcatatggaaagatatgtgcatatttatcatattttgggaggcaccattgaatctactagagacaaacatctacatttaggatattaaagaaaaaaatccttgcctttgtaaagattacagtcagatataggatgacacaaaagaaataaaatatagacaggtgttgaaaagttatatattttgtgaagaaaataaagyaaggcaggatacacagtaatagtggcagattacaattttaattaatgtattcagtaagaaacattgtaaaaatagcattgaaataaacacatcaaaaggctgagggaagaaaaagaatacagtttttctctacatcccaaattact

SEQ ID NO: 512112 - DNA, 571 bp, Homo sapiens
ctgctggtggctcaaggcattctttggtttgtagctgcataactccaagctctgcttccatcctcaagtagccttcttctatttcctgtatcttctcctcttctgtctttcataagaacacttattggatttagggtgcactaggatcatccagtatgacgtcatctcaagatccttattaatatatacaaaaaaattaggtcacatctacagtttctgtgggctagcatatggaaagatatgtgcatatttatcatattttgggaggcaccattgaatctactagagacaaacatctacatttaggatattaaagaaaaaaatccttgcctttgtaaagattacagtcagatataggatgacacaaaagaaataaaatatagacaggtgttgaaaagttatatattttgtgaagaaaataaagcaaggcaggatacacagtaatagtggcagattacaattttaattaatgtattcagtaagwaacattgtaaaaatagcattgaaataaacacatcaaaaggctgagggaagaaaaagaatacagtttttctctacatcccaaattact

SEQ ID NO: 512113 - DNA, 490 bp, Homo sapiens
catattagtgttatttagccatgtcatagagccaattcccagatattttttccacttgttttgtcatgaagaatgagaagtagaatcagcatcaagtttgtgctaaacaagtacaataataagaagcacagcaaatgctgactagactgtaagaatatttttgcttttaggccacccgaaaaagataagatatatgaggtgatcaaagtgaataattatataaacaagaggaattagaatatgaataagccaggaaaaataggaataggccaagaaaacacacacacccatttctyatttaaacctaaagggagacaaattcattcaatctatacatatttattttgctacctcaatagagataaatatcttctctaagaaaaatcccactttacttaatatgtatcacatttacctaataaataacatattactaaaacagagagcaaccagtgttttactcttttttttttcagagattttttgctct

SEQ ID NO: 512114 - DNA, 490 bp, Homo sapiens
catattagtgttatttagccatgtcatagagccaattcccagatattttttccacttgttttgtcatgaagaatgagaagtagaatcagcatcaagtttgtgctaaacaagtacaataataagaagcacagcaaatgctgactagactgtaagaatatttttgcttttaggccacccgaaaaagataagatatatgaggtgatcaaagtgaataattatataaacaagaggaattagaatatgaataagccaggaaaaataggaataggccaagaaaacacacacacccatttcttatttaaacctaaagggagacaaattcattcaatctatacatatttattttgctaccycaatagagataaatatcttctctaagaaaaatcccactttacttaatatgtatcacatttacctaataaataacatattactaaaacagagagcaaccagtgttttactcttttttttttcagagattttttgctct

SEQ ID NO: 512115 - DNA, 490 bp, Homo sapiens
catattagtgttatttagccatgtcatagagccaattcccagatattttttccacttgttttgtcatgaagaatgagaagtagaatcagcatcaagtttgtgctaaacaagtacaataataagaagcacagcaaatgctgactagactgtaagaatatttttgcttttaggccacccgaaaaagataagatatatgaggtgatcaaagtgaataattatataaacaagaggaattagaatatgaataagccaggaaaaataggaataggccaagaaaacacacacacccatttcttatttaaacctaaagggagacaaattcattcaatctatacatatttattttgctacctcaatagagataaatatcttctctaagaaaaatcccrctttacttaatatgtatcacatttacctaataaataacatattactaaaacagagagcaaccagtgttttactcttttttttttcagagattttttgctct

SEQ ID NO: 512116 - DNA, 498 bp, Homo sapiens
gtatgcgactagttgaagtatggctgctggaattggccaagactcagcgattgttacaggygcatattcctaagttaggttttagtcttgtgtacctattgagttaggttgcagttcattcacaaggactgaaatatagaagtatggcgtttttctcaggccatatttaatttgatttaacaggactttgggtatgtcattgtattttactaatatattttacaaacaccccatgttatcttaatctatttaagttcacactttttaatcaaattttactttaaatgtatctaacctcctaaatttctgcctttgtgaaccaataatactttttccaaattcttattatagcatatatcagactatatagctatagacactttggcatcattgttttcccatacaaaacacaatacatttaatgaattaatgaatgatgcatcagcaaagaaggttttactgaaagtaagaaaaattataagccagtttgggtttccc

SEQ ID NO: 512117 - DNA, 498 bp, Homo sapiens
gtatgcgactagttgaagtatggctgctggaattggccaagactcagcgattgttacaggcgcatattcctaagttaggttttagtcttgtgtacctattgarttaggttgcagttcattcacaaggactgaaatatagaagtatggcgtttttctcaggccatatttaatttgatttaacaggactttgggtatgtcattgtattttactaatatattttacaaacaccccatgttatcttaatctatttaagttcacactttttaatcaaattttactttaaatgtatctaacctcctaaatttctgcctttgtgaaccaataatactttttccaaattcttattatagcatatatcagactatatagctatagacactttggcatcattgttttcccatacaaaacacaatacatttaatgaattaatgaatgatgcatcagcaaagaaggttttactgaaagtaagaaaaattataagccagtttgggtttccc

SEQ ID NO: 512118 - DNA, 498 bp, Homo sapiens
gtatgcgactagttgaagtatggctgctggaattggccaagactcagcgattgttacaggcgcatattcctaagttaggttttagtcttgtgtacctattgagttaggttgcagttcattcacaaggactgaaatatagaagtatggcgtttttctcaggccatatttaatttgatttaacaggactttgggtatgtcattgtattttactaatatattttacaaacaccccatgttatcttaatctatttaagttcacactttttaatcaaattttactttaaatgtatctaacctcctaaatttctgcctttgtgaaccaataatactttttccaaattcttattatagcayatatcagactatatagctatagacactttggcatcattgttttcccatacaaaacacaatacatttaatgaattaatgaatgatgcatcagcaaagaaggttttactgaaagtaagaaaaattataagccagtttgggtttccc

SEQ ID NO: 512119 - DNA, 478 bp, Homo sapiens
ggtggcggtcgcctgcagttccaactactcgggaggttgaggcaggagaattgtstgaacccgggaggcggaggttgcagtgagccgagatcgtgccactgcataccagcctgggtgacaggcaagactatatctcaaaataaatacatacatacatacatacatacatacatacatacatacaaacacatatatgtaatgtataaatattacctttttgtcatctatttaacaaaatatttgctcaaatatatccttccatctgacaactatttaacattacttttctaatatttttaccttattgctgctgacttgatacatttttattcattccactacatccttgttattttggaagatctatcctttatttctttattaaggggtatcttcaattttttgacctcacaattagatgcataattttcaagtactatttgaaataaagatgccttctattgtcttagcaaattag

SEQ ID NO: 512120 - DNA, 478 bp, Homo sapiens
ggtggcggtcgcctgcagttccaactactcgggaggttgaggcaggagaattgtctgaacccgggaggcggaggttgcagtgagccgagatcgtgccactgcataccagcctgggtgacaggcaagactatatctcaaaataaatacatacatacatacatacatacatacatacatacatacaaacacatatatgtaatgtataaatattacctttttgtcatctatttaacaaaatatttgctcaaatatatmcttccatctgacaactatttaacattacttttctaatatttttaccttattgctgctgacttgatacatttttattcattccactacatccttgttattttggaagatctatcctttatttctttattaaggggtatcttcaattttttgacctcacaattagatgcataattttcaagtactatttgaaataaagatgccttctattgtcttagcaaattag

SEQ ID NO: 512121 - DNA, 449 bp, Homo sapiens
ctgtgtttataatacatatatatctytgcctcttaaaccaagaataatttttacagggacaagaataaacacaaggaaatgaattagaaaactattaaagtgaaaggacaagaaggtggagaccttgttcaaaataatgaaatacatatttaatatatgtgcaagtttgaagaaaagagctactgatagggttttggtgtattagataagataaaatcaatgggaacaccagctgaagtaaacaaacaagcatacacacacaaactgggaagcagagaaaataacaaaactctacttaaaacattatgaatttcagttgtctataaaacaatccacatttgatattaagtaagtagatgactatgcaaagctctaactcagagaagataccaaaattggaaatattctgagatgctatcatgtaactggcctttaaactcatgaaaatg

SEQ ID NO: 512122 - DNA, 449 bp, Homo sapiens
ctgtgtttataatacatatatatctctgcctcttaaaccaagaataatttttacagggacaagaataaacacaaggaaatgaattagaaaactattaaagtgaaaggacaagaaggtggagaccttgttcaaaataatgaaatacatatttaakatatgtgcaagtttgaagaaaagagctactgatagggttttggtgtattagataagataaaatcaatgggaacaccagctgaagtaaacaaacaagcatacacacacaaactgggaagcagagaaaataacaaaactctacttaaaacattatgaatttcagttgtctataaaacaatccacatttgatattaagtaagtagatgactatgcaaagctctaactcagagaagataccaaaattggaaatattctgagatgctatcatgtaactggcctttaaactcatgaaaatg

SEQ ID NO: 512123 - DNA, 724 bp, Homo sapiens
gcataactctggcccagcccttcttaccctgcattttgtgtgtgtgtgtatgtgtgtgtgtgtgtgtrtgtacaaatccttggtttcaatgcccttcccttgtccattcctatgttctctggtctacctccatagagcaggtaaaaataaatggtcatagaatgaatgaatggaatgagtgagctatactaagaactgtcacttttggaaatatctaatggagaagagcattctaggaagagtgacttgcaaccagctttctctcccctgtttaaggtaaatttagtaaattgtgcctgccatgctttgttatttgctgtgggcaaatggttaagaggccattgcaatgatagattgtttttctttaggctcaggcccatgaagaggagcaggttagagcacatttcactaagattccaccagcatcttcacttcattgtaggagccatgagcagggttcagctctgctcctcattttactgattctggacctgaggcccagagggcaccggccaccggctccctcttgcctagcccacaatgctggttggaatggtgatgaataggaaccagctcttccaattcagcttaaacaaaatgaaacaaaccatcaaacaaacattaccatttgctttctatgagtcattattctggctgtgtttatttatggccaagcagagaccaactggtcagtattgctcactaaaggcctcttaaccaccag

SEQ ID NO: 512124 - DNA, 724 bp, Homo sapiens
gcataactctggcccagcccttcttaccctgcattttgtgtgtgtgtgtatgtgtgtgtgtgtgtgtatgtacaaatccttggtttcaatgcccttcccttgtmcattcctatgttctctggtctacctccatagagcaggtaaaaataaatggtcatagaatgaatgaatggaatgagtgagctatactaagaactgtcacttttggaaatatctaatggagaagagcattctaggaagagtgacttgcaaccagctttctctcccctgtttaaggtaaatttagtaaattgtgcctgccatgctttgttatttgctgtgggcaaatggttaagaggccattgcaatgatagattgtttttctttaggctcaggcccatgaagaggagcaggttagagcacatttcactaagattccaccagcatcttcacttcattgtaggagccatgagcagggttcagctctgctcctcattttactgattctggacctgaggcccagagggcaccggccaccggctccctcttgcctagcccacaatgctggttggaatggtgatgaataggaaccagctcttccaattcagcttaaacaaaatgaaacaaaccatcaaacaaacattaccatttgctttctatgagtcattattctggctgtgtttatttatggccaagcagagaccaactggtcagtattgctcactaaaggcctcttaaccaccag

SEQ ID NO: 512125 - DNA, 510 bp, Homo sapiens
ctaagctccttatcagattcgggaaaacagcaacaactggaaagacagtgtgagctgctgcatratgctcattatggagtcttgaaaacagacgtcgcataaacgcaaagagaggctaagcaaataaagattaaggtgatgtgcctgtgcgagagccaagcccacaaaacccgagatgtgaattagagacaataaggatgtgaatcctgagctgttcaggaacttcaggttcctggatggatggtggggagtgcaaatgtggtctgaagacatctaatatatttctggtgtgggctgccacactgcaaattcaccaaagggtgtaggaatgatttcacacaacagttcacttggtgatttacatgggtgcaggcagtggggtcatatgacactggtgagccaatagacagcagacctgctttgccactgacaatcaaccgacactgagagatgtcagcagccaatatgactgagaactgggaaggcataataacatttacattgatgttt

SEQ ID NO: 512126 - DNA, 479 bp, Homo sapiens
tgtggggccatggagggctgcaaggggccatgtaggtagacccccccagtgctggcggcctccacttgttgcccccttagatctgtgtggtggggcactggccctcctgctgagggcacgggtttcctaacaggcacctatccttcaagctccttgggcctggcccagaccttccagccctgtgggctgtgctcttcctgctggtcctgcctgccctctccacctcgggcctcacggctgcaccgctaacccccgcccccggacctggtctactgttgcagggcccggaactgacaccttcacactcaggtcacagcgcagtgacacccggcctctgggcctcagctrctggcagaaggctgggtgggggctaggtgggggctgggagtccataaggctgtgctccctgagcaagtctctgtggtcacaggcaaggatggaaaccgctgctgtagctcagaggtaaaacgggtctctgt

SEQ ID NO: 512127 - DNA, 626 bp, Homo sapiens
ggagggaacaaaggagacagtccctttatggcacacaagcaatgacaccagtgactccattgggtctgacattgggacctccttgtgtagctggtagccccagggcccackggaggcccctctatccccgcactcctgacacactcggctgggaacactggggactttcctcctgggcagaggctccccattcccaggcatctggagaggaaaccgggaagtgtggggtttccagcacctccgggaagccccagccaccacctggtctctgcctggcagagtccagccccaccagcccagcccctccagccggtgtcgggcttggctgcagtgggaatgcccagcaggaaggacagcaggatccaggaaatctcccaaagtcactatgctgcacggccccacccaggccccagcgccctccaggcccctcacaccacctaggccaagccgcccagccctgcccgcctaggctgcccactcagcatcgctccttcctgccccacccactgccatctgggcctggacggctccaggatatcctggacagtggggcaggctgaggtgagagagctgaccactgtcctgacccagccccagggctgcaccctcatccaaaggctggggac

SEQ ID NO: 512128 - DNA, 626 bp, Homo sapiens
ggagggaacaaaggagacagtccctttatggcacacaagcaatgacaccagtgactccattgggtctgacattgggacctccttgtgtagctggtagccccagggcccactggaggcccctctatccccgcactcctgacacactcggctgggaacactggggactttcctcctgggcagaggctccccattcccaggcatctggagaggaaaccgggaagtgtggggtttccagcacctccgggaagccccagccaccacctggtcwctgcctggcagagtccagccccaccagcccagcccctccagccggtgtcgggcttggctgcagtgggaatgcccagcaggaaggacagcaggatccaggaaatctcccaaagtcactatgctgcacggccccacccaggccccagcgccctccaggcccctcacaccacctaggccaagccgcccagccctgcccgcctaggctgcccactcagcatcgctccttcctgccccacccactgccatctgggcctggacggctccaggatatcctggacagtggggcaggctgaggtgagagagctgaccactgtcctgacccagccccagggctgcaccctcatccaaaggctggggac

SEQ ID NO: 512129 - DNA, 504 bp, Homo sapiens
tgtcctccctggaccatgtgctcagagatgggacaagggctgagcggcttgtcacaggcagaaagaagaacaggaacaggaacctcagggaaagaaagggctggttgggggtggagggggtggtgaatcaatagccaagggaggtgggtgaagaaagtgaggtgcagcaggtcaaatacgcagaccagagtggcctctccaggatccctgcccacattgtaatgcatgggctacctctctcggcttccagggcactgcacactcagtgcgactctggacctcagccgcttcccccacacagtctcccgtccctggttctctccacgttggggctgaggatgtgtctggtgtggaccagcgcacaycacagccacagagcagtgcccccactcgcgccatctgcacacagacacagatgagccgtgaaggtggcatgaaaccccgggcctctgttccccgactttcttgccattccctggttgccggcaggagtccatcttgggg

SEQ ID NO: 512130 - DNA, 405 bp, Homo sapiens
ccatctgccactctgcgcttgacaccagaggacaagtgcatttccttggggcaaagctgcaggccacagcaggcggctggccccttgggacgaggagagcagctcagttttggtgggccgaggggcaccaccagcagggagcctcagagagcctagcaggcttgggtgagctactgagctgcaggcttgctggatggatgccccacaggccagcccctaggagcaggactgcctctgtctcctctttgtgccacccacacccaccatccacccactcagcacagcctcttcatgcctggtgggctctcagggcagctcatgtgctgccacctgggctggccctcctggcaagctggaagagctcactgggcacatgggcctccygaccaccaggcccgggaagga

SEQ ID NO: 512131 - DNA, 537 bp, Homo sapiens
cccaaggtgggagtgtgcattcaggaggcacacaggcaggggaaaccactcacaaaggcaggaagggggatggccagctcaggagctggacggaggggcagggcggggacggcaggaaggctcggagagatgaagggaggcaccagagaaccacaccacctgctaacatgctccctagagcacgggagcgacctggcctcaacctctgcctctgcccctctctgcagaccccagaggctcaytggcaaaatcagtgtaatgatgctggcatcaaaaagaggcacattaagtcacatgtcagtgaaacgcccagcagagcccttggacagtaggctggtcaggggccctcccagcatctgggtataaatgcacacacccagaatgaatgtgtacacccagagcccccaggcacatgactgtacaccacacccaggcctgggcaccggcagggtggaccgagggcaccagcctccccacacctgctgctccttcctctccactctgcaacctgggccctgcctggcactggtgctgtcc

SEQ ID NO: 512132 - DNA, 537 bp, Homo sapiens
cccaaggtgggagtgtgcattcaggaggcacacaggcaggggaaaccactcacaaaggcaggaagggggatggccagctcaggagctggacggaggggcagggcggggacggcaggaaggctcggagagatgaagggaggcaccagagaaccacaccacctgctaacatgctccctagagcacgggagcgacctggcctcaacctctgcctctgcccctctctgcagaccccagaggctcactggcaaaatcagtgtaatgatgctggcatcaaaaagaggcacattaagtcacatgtcagtgaaacgcccagcagagcccttggacagtaggctggtcaggggccctcccagcayctgggtataaatgcacacacccagaatgaatgtgtacacccagagcccccaggcacatgactgtacaccacacccaggcctgggcaccggcagggtggaccgagggcaccagcctccccacacctgctgctccttcctctccactctgcaacctgggccctgcctggcactggtgctgtcc

SEQ ID NO: 512133 - DNA, 523 bp, Homo sapiens
ccccacgggcagggccaagtggctccccagacccagaccccacggagaagctagggtccgcccccctctcaggaccccagcaggcagactcccgtgcccataggaggcctggccactgtcccgccccctcccacctttcccactgcgggagccaaggaaggcacctgggygtggacttctcctgtacaactgggctctccagacgtcagcaggcagcagggcatgtagccctcgacggccgtgatccacagcgctcagcattctatttttatcatttaaccccaaactttctattccattgtttctttgacccatcattcaaacatgtgtttcaaattttctaaatatacaactcttttagagttatctattttgttatcactttctctcttaattgcactgtagtcggaacacttggcccgaatagcagcttctttgacatttgtgcgggcatctccgagccagcactgactgctcagcctgtgcgcacccaccaggcttggtgggtgcctggtgaccgcag

SEQ ID NO: 512134 - DNA, 523 bp, Homo sapiens
ccccacgggcagggccaagtggctccccagacccagaccccacggagaagctagggtccgcccccctctcaggaccccagcaggcagactcccgtgcccataggaggcctggccactgtcccgccccctcccacctttcccactgcgggagccaaggaaggcacctgggtgtggacttctcctgtacaactgggctctccagacgtcagcaggcagcagggcatgtagccctcgacggccrtgatccacagcgctcagcattctatttttatcatttaaccccaaactttctattccattgtttctttgacccatcattcaaacatgtgtttcaaattttctaaatatacaactcttttagagttatctattttgttatcactttctctcttaattgcactgtagtcggaacacttggcccgaatagcagcttctttgacatttgtgcgggcatctccgagccagcactgactgctcagcctgtgcgcacccaccaggcttggtgggtgcctggtgaccgcag

SEQ ID NO: 512135 - DNA, 494 bp, Homo sapiens
tggctggggtccaggacacacccggatgcactcaaggctgcctgacattcacatttggcgggtctgggtaccagagacctggagagccccatgggcagagagagtgggggagggtccaccagatttgggcagccttggtgggggtggggaaacaagccctgctgataaaccatcagaacgcgccccctctcctctcccagctcccgccagcctcctccacggaagctactctttgttaacagcgttgccatggcaaccagatccagggagaactctctcttcaaggtagagtctgagggtgacacttggagaaacagaagtggtggtgacaacaaacagggtgctggcctcccagccccaccccccaggattccttcctggtccaggaccccagacaccagccccccagactgtcccagagctctcaggtctgcttccctctcctctcctctccctggcgtgggtrcagcaacgtggcccaggccaggcacctc

SEQ ID NO: 512136 - DNA, 332 bp, Homo sapiens
gttgtgctggtactgctggggaagcctgcactccacctagcgttaatgagaatagtgtctccttggaggcacagggtaatctcatgggggacaattatctcaacaaacgtgaagcccagccacagagatttgagtggaaggaacacagatttctgctcctgttaatttcatgcttgacttaaccgtccttacgtgattgtggcactggtgacagtgcactggaaacacttcttactcttcttccccagccaaaccttctctttctttgtcccaaagatttgaactcttgcttttractcaagttccctgtcttagagattcatgggcatcat

SEQ ID NO: 512137 - DNA, 525 bp, Homo sapiens
tttcatgatgaatgtggggtcctacttttcaaggcacttgggatagagagtcagggatgggactagggcaagttcaagtgctataaaatttgcaattcttactgagattcagttatgttttttgaataaatcctcctaagatttctgcaagcgtttagttaattttggaagttctaaaaawgtggattctgacctttttgttttttgctggttttcttgttgcgtttatggaagagagggtttttggaggtccttactccaccattttcactacctggctatactctattgaaagcacttctgggatgtctctttaaacttacaatgatcataacctttgacccagcacatcaagtattaggagttcatcttttatatgtggtcacacatttgaataaaaacttttcatcaataatgcccattgcaggagtgtttttcgttgccaaagactgtaaagcaccttggtgtcttttgctagaggacctcttacatgtgtggcagcccacctacccagtggaataccct

SEQ ID NO: 512138 - DNA, 525 bp, Homo sapiens
tttcatgatgaatgtggggtcctacttttcaaggcacttgggatagagagtcagggatgggactagggcaagttcaagtgctataaaatttgcaattcttactgagattcagttatgttttttgaataaatcctcctaagatttctgcaagcgtttagttaattttggaagttctaaaaatgtggattctgacctttttgttttttgctggttttcttgttgcgtttatggaagagagggtttttggaggtccttactccaccattttcactacctggctatactctattgaaagcacttctgggatgtctctttaaacttacartgatcataacctttgacccagcacatcaagtattaggagttcatcttttatatgtggtcacacatttgaataaaaacttttcatcaataatgcccattgcaggagtgtttttcgttgccaaagactgtaaagcaccttggtgtcttttgctagaggacctcttacatgtgtggcagcccacctacccagtggaataccct

SEQ ID NO: 512139 - DNA, 605 bp, Homo sapiens
gctgagtcccctgcaggaattacccgcggcccatggtcatgcccctccttttggtatcttggcacctccagtagcctggaagggcagagttcccttgcctcaaggcaggatgtccctgaccagccatcccagcaccagagctcccccagggatcgggcgaggcctccgttgtggcatcctgtctccttcactctaccatgggggtggctcctgcctgcacaggaccagttcgagttttccagagaacctgacctaggggcttggttccagggcaggtggaggaagcaggctccacgtgggatgtgcgagctgcttcacatcactgctggcgctaaccctggtggtgggtggyaggttgacgcccctggcatgctgaagcaggcgaaattgttagaacttagaacctccacagttggtgaattagaatgggagaatgtgcactggggacgccatgtaggggtgggttgcccctccacacctttgggtgtttctcgtaaggtggaacgagagacttaggaaagaaaaagacacagagacaaagtatagagaaagaaataaggggacccggggaaccagcgttcagcatatggaggatcccgccagcc

SEQ ID NO: 512140 - DNA, 510 bp, Homo sapiens
taatcccaacactgagaggctgagatagggggatcacttgaggccaaaagtttgaggccaggttggrcaacaaagtgagaccctgtctctgtaaaaatacaaattaaagaactgtgacttggagatgccagtgactcttcctgggctttgatgaagaccccttcctggctgaggaacagaacctgtcccaacctgcctggaccagccctggggcctcatctggcccccacccagtggccaaggctttattatcagaaccaggactgcctcctcatgagtgcagcctcctgaagatggctgggaagtccatcagttgaaggcctggggaaggaggagatgtgaactcctcctcagtcaggagatgacatttacctgcaatcttcctcttatcttcccccacccgtaggccacattcagcattcttcaacaaacactctgttgcctgtgcccagagacccagatgctggaacctgaccgcccggatctaattctagtcccaccacttaccag

SEQ ID NO: 512141 - DNA, 322 bp, Homo sapiens
aaagggtagaggaaaaatagttttccctctcctagaaagatatatttaatggcacaatattaaagaggatggggtggtggggatggtacccagggcagagggagagagggtgacctatagagaaaaaaagagaccatgtgcawctttatgatgggaaggaagaagggaggtatgcaggtaagtgtataaacttgggggtaagagttgagacggttcctaacagtggtttcaaatttccctaggatgtaaaagagggagagtcattctttgacaggcaggggaatagagagaaggctgggagaaggctggaggatttgaaatt

SEQ ID NO: 512142 - DNA, 322 bp, Homo sapiens
aaagggtagaggaaaaatagttttccctctcctagaaagatatatttaatggcacaatattaaagaggatggggtggtggggatggtacccagggcagagggagagagggtgacctatagagaaaaaaagagaccatgtgcaactttatgatgggaaggaagaagggargtatgcaggtaagtgtataaacttgggggtaagagttgagacggttcctaacagtggtttcaaatttccctaggatgtaaaagagggagagtcattctttgacaggcaggggaatagagagaaggctgggagaaggctggaggatttgaaatt

SEQ ID NO: 512143 - DNA, 610 bp, Homo sapiens
tgctatcatcccaacttctgggaagaggagctgcagcgcaaagcacgtggtgctggtggctcagtcatgcctgtgcaatgaagccctggacgcagaaacccaactctagacacacaagctgaggtgaacctctctcatcggcaatgccttttgcatgtttttacccayggatgtgtcaggatggtgatgtccttgactccctgggagaggccatggaagctttgcatctgggaccctcccagacctcgtccttcaagacttcttcatttttttgagactcttcttgtggctggtcctgactcggccctttctgctatggtgaagctgtcgtcatgagcagagcgctgcctgagttccgagcgtgttccagtgaattccacttgagggggacccgctaaatttgtacccagttggtcaaaagtgcaggtggcctggggcctccaaatttgtggtgtgtctttcagtgagggcactcttaacctgtgaggtctggcctcggcctggggagtcaggctgccctgcattgcccaggcccttctccactggtctcagtgtggacccacccaccgcccccttgcacaggcccctccctctgctggagctatcactg

SEQ ID NO: 512144 - DNA, 610 bp, Homo sapiens
tgctatcatcccaacttctgggaagaggagctgcagcgcaaagcacgtggtgctggtggctcagtcatgcctgtgcaatgaagccctggacgcagaaacccaactctagacacacaagctgaggtgaacctctctcatcggcaatgccttttgcatgtttttacccacggatgtgtcaggatggtgatgtccttgactccctgggagaggccatggaagctttgcatctgggaccctcccagacctcgtccttcragacttcttcatttttttgagactcttcttgtggctggtcctgactcggccctttctgctatggtgaagctgtcgtcatgagcagagcgctgcctgagttccgagcgtgttccagtgaattccacttgagggggacccgctaaatttgtacccagttggtcaaaagtgcaggtggcctggggcctccaaatttgtggtgtgtctttcagtgagggcactcttaacctgtgaggtctggcctcggcctggggagtcaggctgccctgcattgcccaggcccttctccactggtctcagtgtggacccacccaccgcccccttgcacaggcccctccctctgctggagctatcactg

SEQ ID NO: 512145 - DNA, 499 bp, Homo sapiens
gctggaagaccctcaggtaggagggcrtcaggaacatgggagtctgtaaggaagagggaggactcagggtgggcacgagggttaccctcctggaaagggagcctgggcactgccgcgtccctggtccagggtccctggtgcatgtttggtgggaggctgaggatggcttggacccaagccgccctgctcgggcctgagcactgcttgtcctgtccccctctaggaccacccttctgaacagagcctgaggcggatgcagcccgcgacgccagaggaagcacgtgcactaactgggtttaaattttgactgatgtgggttgagatgaggaggcctcactggttggggtccattttgtatataacttttatgagaaaaaaatggtaattatttcacgcatcaacctttggcacttacaaagttttttttgtttattttaaataacagggcagggccctgctttggggagggggaggggagagtatcatgggagatggtatc

SEQ ID NO: 512146 - DNA, 551 bp, Homo sapiens
ggcaaagagccaagaagcttaatcaatctccaaagtttattatgagtaacccccaaagctaatggatcattcttagcaagaacatcatcctggttatttcctcatttttataaattgatctataacgttaaatctgggtccttgagagggctgctaggggcattaataatcagtgaatccagcagaattcttttgtttccaaaaagatcaaatgaaactgttcttgtttaagttgggataggatcctacctgctcagaccgcactccctgacccctacagtggcccctgcagtggccccacagggacctcctacgaaccttagggctctaaaragcacagtttgaagcactgatctcaccaaagtcccccattttgcagatgaggaggctgaggccctgagacaggaggtgacttgagcaaggtcatgctcaaagtgcatgtggcagacatgattggatgctactcagcagccattgcccaactccctttgtcttgcttgaagagctcatctcacattatacgggctaaaaatgctggctgctcacctttc

SEQ ID NO: 512147 - DNA, 535 bp, Homo sapiens
ggtgggaatgcagtgacctaatatcactggacagataattccttgccttggggaaagactggcaaagcccacggcatctgccatttccaatctactcctcggaatggtaagtaggggcttgtgccaggacgctcrgggggcagcacagaacgcgcgcaaccgtggctggaagtgaaaatgtaaaaaccctcccacggcctcgctgggagtcactgctctgcattggaaaacccgggtgtttgattcaactaaatcatctcaaagcctgcactggagaaaataattgaattaaagagttgctataactcattcaagtgagataaaaaccatccagtgggaggcgagacggcaaggcaaagacactgctgctagaatgtgccgtcttcttgagattgcgaggagaaacgcaatataatgtggttcaaaggacagatgggactttcctaattgtccccagattcctagcagcaggggtggtaactaaatggtttcaattaaaagttaaagaaacagaggaaagcaggcggtaagttac

SEQ ID NO: 512148 - DNA, 654 bp, Homo sapiens
cttctcttcacataatttatattaccataagctggcacacattctaaactattacatgcctccaattaatttttgcagcttttgcctgaaaatttaatgagatagtagtggatgaacctgctgactccagattatgtgtgtgctcccaatattaatgttggcacaataaaataatctgatccacacctgactcaagcatttcccctcgctggggtataaargtaatatggaaaccaggtccgctcatttcagtcttttaaatccaattacaaaatttactagtctcaaattaaactgctcctactcatcaacctgggagaaaaggagaaagcagcagcacagtctaattatcccaacaccatttctatcaacactgcagggaacagttacaatggatgactatttgtctaaggcctcagttctctaccgtggagaagtcacaagccgcactcctcaaagccaacccaaggaagccagcgcaacccccgtgatgagtacagggtacaaggaagcctgttctctgtcccgctgctacaggcgcgccttaggtgcatgcctcacgtggggtccataccattcacaatttgtacacgtgtgcatatcagtgtgtccatgtcagatgtatgtgtgcacacgtgtgagcatgcacacgtg

SEQ ID NO: 512149 - DNA, 614 bp, Homo sapiens
gccttaaagattgtctggaaatagtggcaatatttctgtgtctcattccagcccacgttgtggcagaagcctggaagggccacgttaaaggatgtgtcacagagacagtgtgtgtaggtcttcctgcagcacaagcaagctcagggcttgtaaagtccagcttatcgtggctgtgctccagccatgcctgaaatctggcctccagcaatctgtccmggcccaggacaaacaaaaactttattatggagtcatggaacctgaggaagtttctctggaaggaaccgaagacctagaccgtggagggagatcaactcctctggcctaatggggcttttctttttccaagatggaatttaaaaatctcatctataaaatgaggctagcaaagaatcattttatggtgtaagtggccagaatctaacctggaagtgatagtattgtacctgccgcaggtgtgtgtgtggcagcgggagggtggagaggggaaatgagaggagaagagtttggaggggaaaacagagcattcgaggtttctctgctggagggggtgaaaggccaggagtttgtgcacctttccttttaaatgagctctagctgtgagtttattattttgc

SEQ ID NO: 512150 - DNA, 614 bp, Homo sapiens
gccttaaagattgtctggaaatagtggcaatatttctgtgtctcattccagcccacgttgtggcagaagcctggaagggccacgttaaaggatgtgtcacagagacagtgtgtgtaggtcttcctgcagcacaagcaagctcagggcttgtaaagtccagcttatcgtggctgtgctccagccatgcctgaaatctggcctccagcaatctgtccagkcccaggacaaacaaaaactttattatggagtcatggaacctgaggaagtttctctggaaggaaccgaagacctagaccgtggagggagatcaactcctctggcctaatggggcttttctttttccaagatggaatttaaaaatctcatctataaaatgaggctagcaaagaatcattttatggtgtaagtggccagaatctaacctggaagtgatagtattgtacctgccgcaggtgtgtgtgtggcagcgggagggtggagaggggaaatgagaggagaagagtttggaggggaaaacagagcattcgaggtttctctgctggagggggtgaaaggccaggagtttgtgcacctttccttttaaatgagctctagctgtgagtttattattttgc

SEQ ID NO: 512151 - DNA, 432 bp, Homo sapiens
acaccctccaccctcaccctcggacatgcccattccagcaggacaggccrggaactgcaagtcctgtgacatggccaacgtccatcgacagcgaccgtgggagcctggcctatggctctggcctcctgacttcctgctgtcctcgaggaattatctaaacaccacctggccctctgttccatgcagtttccctaaatcattacaaagtttaggcatgtccagtgacaatggcgcccagggccttgccaaactgaacctgagatggacacaaggtggccagaagccaaagtggaggaagttctccaattcctttttttttcttttcctcttttttctttttctttttctttctttctttctttttctttttcatttttttttttatagagataaggtcttgctctgtctcctaggctggacatgcataatata

SEQ ID NO: 512152 - DNA, 628 bp, Homo sapiens
ttagcgacggggcggttagttgttgtccattcagttagatttcaaactcttaaagttatgttttctgcttttactattaccctgcagtcccactttcaacatgcccatgcatgtacacacatacacacatgcatatgcacacaccacactacacagccttgcccctgggtgatccttggtatatttcagatacttgaacccataaaactctaaaactgaaattaaacccaatctattaatttataggaacagtgaattaaatcagccacaatatcaatttatcctaatatataacccataacaagaattttctttgtttccccaaagtgttccaatttatataagtgacgagattccaaattatataagtgactggaattatataaatgacaaggttrattttcatgtgtgacaagtggaatcagtatcattactttatagtcacacttcacgttttcctaaattactgaatcaggagaagatgagaacgtcaaattattctctgaagggaacctcatctgagtagatattttattttgttggagtctgataagtattgattcatggattgatggacggatttgaatctgagcctgtatcagacttgttagaacacacttcttacact

SEQ ID NO: 512153 - DNA, 628 bp, Homo sapiens
ttagcgacggggcggttagttgttgtccattcagttagatttcaaactcttaaagttatgttttctgcttttactattaccctgcagtcccactttcaacatgcccatgcatgtacacacatacacacatgcatatgcacacaccacactacacagccttgcccctgggtgatccttggtatatttcagatacttgaacccataaaactctaaaactgaaattaaacccaatctattaatttataggaacagtgaattaaatcagccacaatatcaatttatcctaatatataacccataacaagaattttctttgtttccccaaagtgttccaatttatataagtgacgagattccaaattatataagtgactggaattatataaatgacaaggttaattttcatgtgtgacaagtggaatcagtatcattactttrtagtcacacttcacgttttcctaaattactgaatcaggagaagatgagaacgtcaaattattctctgaagggaacctcatctgagtagatattttattttgttggagtctgataagtattgattcatggattgatggacggatttgaatctgagcctgtatcagacttgttagaacacacttcttacact

SEQ ID NO: 512154 - DNA, 478 bp, Homo sapiens
gtgggagaagtagtgtcattagcagtattactatgaccactacctctrctattactactcccttacaactattattattaagttgggaccaaactaaaggcctagctgtgttacactgtttatgtgtttattatctgtctctctaaacagcctgtaacttccacagggtaggagttgtgtgttttatccaattatttgcatattcagcataatatatttggtaagtgaataaaaaatgtttctgagccctaggcatgccagaggttggggtgggggtgggaagggaaggctaaagatgaactagacagtctccaggctcaagggtacattcctttatttactcaatggctattcattgaacacaatttagtagtgcgtactaaacctttgttaggtgctgaggatacagttacaagggacacagatccttgtcgtcatgcaacttaccatctagcatcatggttctcattgggcatgg

SEQ ID NO: 512155 - DNA, 645 bp, Homo sapiens
gatagctcttctgatgaagtgtggatagatgtaggcacccagagagcaggagcaaacaagaggaaacacatgaggaaaaacagcccacttatgctttctgacttgtctagaaagggagactatcaggtattcatttgtctgacagaagatctagactctgaccacatgaatttgatcttaaagttttgttttgtttgtttgttttttcagtgatgggaaaggtgttttaaggatgtggtgagggccttggcgatacaatacrtgaaaaattagatttaatatttaaagttgctttaagaacattggaacggcaataaaagaaaaggagaatctcggccaggcgcggtggctcacgcctgtaatcccatcactttgggaggctgaggcaggcagatcacgaggtcaggagattgagatcatcctgactatcacagtgaaaccccgcctctactaaaacatacaaaaaattagcggggtgtggtggcgggcacctgtagtcccagttacttgggaggttgaggcaggagaatggcgtgaaccggggaggcagagcttgcagtgagccgagatcacaccactgcactccagcctgggctacagagtgagactccgtctcaaaaaaaaaaagaaaagaaaaagaaaagg

SEQ ID NO: 512156 - DNA, 668 bp, Homo sapiens
atttctgtgaatcgtaagacattttctttcataatagagaatgcatgtatatgcttgaatgtgtaaaataaaaattcatttatggtatagtttaaggaataaaattgagtcccctatgttttgaaagctgctgggctgactatccaggttcattcttcttcattttctcatcttgccatgcttcatttgcactattatgaggtgtcacttacaaggtttgcagggcgcagagagcgctcatggctacccgagtatctttgtgcaagctgacccagttgcagagattatgatgaggattttttttaagggcctgtgagaagcaggttttgagaacactgcagggtccttttatattttgcattggctcaaaaacataaatggtgaaactacctccatagaaaaattgtgttttttttttctagttaaatagasggagaactgtgtgactgtaaatgacaaaaagcaagcctgcttgtaattaagaatgctacttaacgccaacaagagtccagaatagaccagtgtgctcagccagtactgcttatgtgatgtgccatatgtggggagcatggaatgatgtcagtgaaatgcttaggttcccatctcagctcccggctttcctaagtgcctctgcatactttagaaaattagcttagagtctctcaata

SEQ ID NO: 512157 - DNA, 524 bp, Homo sapiens
gacaaatagatccagaattgcattctgactgccacatggcatctgtgtggccatagacaagttgattaacatatctgagagtcagcttcttcatctgtaaaatggaaacacaattacagatcttgcagggttgatttgagaattaaagatgatgtatggtaacatcctccctgtaccccaaaactagtaggaattatataattggtagctattgagatactgcctttgcctttgctttcaaggagctcatacacaagaggaaatgcctgacatgtacagatcattatgggacaatttatgaagtaatttaataccttgcttttcaaaatgtagtgmcatatacccatgtaacaaacctgcacatgcactcccatatttaaaataaaagttgaaatttaatgtggtcagaggaccaggagcatcagcagcacctgcaagcttactaaagatgcaaactcacagaccttccctcccccacacacctactgactctgaatatgcttttaacaagatcccagatgatt

SEQ ID NO: 512158 - DNA, 534 bp, Homo sapiens
ctgtgactgtagtatgacttccttcagtggaccactctgcaatgaccgtaagtacctctctgagtatggactgatactcatcgttgcttccagttactgtttgatatctaaagtctaacactgaaagtccttatattaactctgagtcagtcgaactgtcataacccatagaagcagttgtttctacggaaaggacagttttgaaatactaattgttaaagtggctaaatcctgtgatgatggtgattctttggtttttgggtttattrttattttttaattactaatgatcaccttgttcaaaagaatgtttttcatttccaatatatgacaattctcccttggtttttgaaagaaccttcatattgttttatattaaataatacttaatttcatatgattatgtctcgagggctgtaattttactgaatggttacaggtctcatttttctctctgcgtacatctctttaagcccattgctgccttttacttttaaaaaaatatgttcaaacattgtcccttcagccattctc

SEQ ID NO: 512159 - DNA, 534 bp, Homo sapiens
ctgtgactgtagtatgacttccttcagtggaccactctgcaatgaccgtaagtacctctctgagtatggactgatactcatcgttgcttccagttactgtttgatatctaaagtctaacactgaaagtccttatattaactctgagtcagtcgaactgtcataacccatagaagcagttgtttctacggaaaggacagttttgaaatactaattgttaaagtggctaaatcctgtgatgatggtgattctttggtttttgggtttattgttattttttaattactaatgatcaccttgttcaaaagaatgtttttcatttccaatatatgacaattctcccttggtttttgaaagaaccttcatattgttttatattaaataatacttaatttcatatgattatgtctcgagggctgtaattttactgaatggttacaggyctcatttttctctctgcgtacatctctttaagcccattgctgccttttacttttaaaaaaatatgttcaaacattgtcccttcagccattctc

SEQ ID NO: 512160 - DNA, 534 bp, Homo sapiens
ctgtgactgtagtatgacttccttcagtggaccactctgcaatgaccgtaagtacctctctgagtatggactgatactcatcgttgcttccagttactgtttgatatctaaagtctaacactgaaagtccttatattaactctgagtcagtcgaactgtcataacccatagaagcagttgtttctacggaaaggacagttttgaaatactaattgttaaagtggctaaatcctgtgatgatggtgattctttggtttttgggtttattgttattttttaattactaatgatcaccttgttcaaaagaatgtttttcatttccaatatatgacaattctcccttggtttttgaaagaaccttcatattgttttatattaaataatacttaatttcatatgattatgtctcgagggctgtaattttactgaatggttacaggtctcatttttctctctgcrtacatctctttaagcccattgctgccttttacttttaaaaaaatatgttcaaacattgtcccttcagccattctc

SEQ ID NO: 512161 - DNA, 539 bp, Homo sapiens
gctgcatgatcttggacaaatgatttaccaatctgtggctgaatttcctcatctataaaacaatgataataatattatctagcgttgcagagttttgtgagaatttcaatgaattaacaattgtaaatcaccttcaaaaatgactggagaataagaaatactcattaagaattagctattattatttttcctgtaattattatttatatagagtgcaatacttctttcatacaaatataattaattcctcaggaaattaaagcactgtgtttgagtcacgtgagtgagtaataaacctgggagcaaaataagtcttctgattcccaattttgtttgcttcccactgtaccatgttgaggtagaagaaaaagtcagaaacatagtgaagaaaggatgcataaaggaaatgtacaattttctctgttgaaaatcascattatttcagtccccaaattgggtgctaccaacaggtggattactgtgacacaatagaaagaagttttgttttattttctttattttcattgttttctatatgc

SEQ ID NO: 512162 - DNA, 609 bp, Homo sapiens
cttgagtagatttgcacacagtacccaaacttctctaggctcgctgagtttcacaatggtaaggttataaagcataaaaccaatgtctaagattaaaaagagtagtcaagttcttaatgaaaagtaaaaaatatatattcttggaaatattcttagagacatttcatcagccaagctttatacttcrtgttaaataaagatctttctcatattggatattatcctagccatttctatttccatgttttttctttaaggtttttataaatctgtgatcaggattgttataataaaacttgttactactatttactgggaacataatcttatttctcaaagggttaggctataaagaaggattagtgtcactaaacacaatatggtagaactgggtgtttaaaatgagatacaaatgttttagggacttaaaataaagcatgtatttaataaagaattaagcaagtcttgtattctgtttattgtttagttacactgtttgtggagatttcctccttttttacacccttctatttttttctaaattgcacgttaatattagattgctttggtacgtattgccttaatcagaaaagcatatgaactaaagcc

SEQ ID NO: 512163 - DNA, 609 bp, Homo sapiens
cttgagtagatttgcacacagtacccaaacttctctaggctcgctgagtttcacaatggtaaggttataaagcataaaaccaatgtctaagattaaaaagagtagtcaagttcttaatgaaaagtaaaaaatatatattcttggaaatattcttagagacatttcatcagccaagctttatacttcatgttaaataaagatctttctcatattggatattatcctagccatttctatttccatgttttttctttaaggtttttataaatctgtgatcaggattgttataataaaacttgttactactatttactgggaacataatcttatttctcaaagggttaggctataaagaaggattagtgtcactaaacacaatatggtagaactgggtgtttaaaatgagatacaaatgttttagggacttaaaataaagcatgtatttaataaagaattaagcaagtcttgtattctgtttattgtttagttacactgtttgtggagatttcctccttttttacacccttctatttttttctaaattgcacgttaatattagattgctttggtaygtattgccttaatcagaaaagcatatgaactaaagcc

SEQ ID NO: 512164 - DNA, 506 bp, Homo sapiens
gtgggaaaaatatatttgctcatacctttctgagcaacacaagatagaaaaacatgttttgactccaatatcaagttgttacaaaaagtacagcatcaaaacccagtacacccacaatttctcaatgtttgagtatatccatgaacagaacctgggtagtttaaatacattgcggagtttaagggatatgttttgggaggtttgctataatttccctctcttttttttttttttcattttgcttcaaaatttggcagagcagtaagccaatagaacacaaatggagacaaataattttgttcacaacccaaatcactgttttatgttttcataaaaattgattttctctctttcagacttacatggtaggaaatacttgtactgtgtctaagtcctttatactgttttctaggttttttagaagcttcaattgcaatttgtgtrtgtgttttcttcaggaattaatgaaataataaaaatgatgatcctttcaccatttcctttac

SEQ ID NO: 512165 - DNA, 456 bp, Homo sapiens
ttagagatccagctgccgggagtggaagaggaayatcaacaacaatttttatcctgatctcacagtctcagagtcttctacctcaatctgaggcaaaataataataataataataataataataataataataaaaaataaaataaaataaatctgatatggacatcctggtctttaggtaaaacagtcaatgccctaatctaagtaattatattaactcctccttggggtgtggtttggctcacagggaaccaggcagaggaggctctcatagaggagaatgagatcatattacccaagagtctacactcatacttgttgagatgttaaaacacagagtaaagtagagatttgcagaaaattggttaattagatcaacatggtatagcaatgctcaatgtcttttataaggaacaatggtgttgtggagtgctaatggatgtcattaaaaagagg

SEQ ID NO: 512166 - DNA, 685 bp, Homo sapiens
caaatgggtatacacaccaaatgggaataagtctactaatagcctcacaggctcgctttcaggtcaggctttcctaccaaatgagtttctgcaaaagattttggttcccagagtctttggatttcagaatttttaattagggattttggatctcaaataataaaaatagcaacaatgtccaatatttagaagtatttaccatgggacaggctttgtgttgtattttatgtattaaatcacttcaatcttctctcacaactctgccagctacctttatcaaccctattccacagatgaggtttgatgagttagacacttgctcaaggtcattaagatttagacagaggaaattttatccagggctagggtccaaaataggattatctgctgaaacctaataattctacctccatttagcactcaatcttttctgttcttgttttctgtatccataagtctatcaaagatgggtcaagaacatcatgtttgtaaatgaaagacagtatattatgttccttctgcattgcctgratattttactcattctactatttatctcattctacttagattcacagggttcctttgccaggctaatttattttaaaccttcctatcaagagtttcataggcacaaatcggacactcagtatgtatatattgaaaaactggcggtcaatatttc

SEQ ID NO: 512167 - DNA, 685 bp, Homo sapiens
caaatgggtatacacaccaaatgggaataagtctactaatagcctcacaggctcgctttcaggtcaggctttcctaccaaatgagtttctgcaaaagattttggttcccagagtctttggatttcagaatttttaattagggattttggatctcaaataataaaaatagcaacaatgtccaatatttagaagtatttaccatgggacaggctttgtgttgtattttatgtattaaatcacttcaatcttctctcacaactctgccagctacctttatcaaccctattccacagatgaggtttgatgagttagacacttgctcaaggtcattaagatttagacagaggaaattttatccagggctagggtccaaaataggattatctgctgaaacctaataattctacctccatttagcactcaatcttttctgttcttgttttctgtatccataagtctatcaaagatgggtcaagaacatcatgtttgtaaatgaaagacagtatattatgttccttctgcattgcctgaatattttactcattctactatttatctcattctacttagattcacagggttcctttgccaggctaatttattttaaaccttcctatcaagagtttcatargcacaaatcggacactcagtatgtatatattgaaaaactggcggtcaatatttc

SEQ ID NO: 512168 - DNA, 558 bp, Homo sapiens
ctagactgctggggaccctgtcacattgctaggtcaaaaacaatgttgcaccactggaaccctcttrgtagatgcgaggagatgtcagttgggccccaggacaggatgtagcctggtggggcctggggtctcaaaatggtgctgtgctgctcctgcgtagttcttgaggggtgtgtgggacctcgcgtgaacttcttctctccaggatcctaggaaatcccggccaggctggctgcctcacttgcctcttctttcatgcctcaggtgttccctgtcatatctctgctgaattccagggttcttagattctctattcaaattatgattatccacttgctgttttggtccttctgggtggagaaggggagtcctggatgtggctagtcagctctctcgaacactccctcaaccataacttttatttaaaatccatagtgatttgaattgttaatgccctagaggtagggtttcagtttctgtcttggtctatgttgtgttgctataaaggaatacctgaggctggttaatttaaaaagaaaaggtttatttggctcatgg

SEQ ID NO: 512169 - DNA, 558 bp, Homo sapiens
ctagactgctggggaccctgtcacattgctaggtcaaaaacaatgttgcaccactggaaccctcttagtagatgcgaggagatgtcagttgggccccaggacaggawgtagcctggtggggcctggggtctcaaaatggtgctgtgctgctcctgcgtagttcttgaggggtgtgtgggacctcgcgtgaacttcttctctccaggatcctaggaaatcccggccaggctggctgcctcacttgcctcttctttcatgcctcaggtgttccctgtcatatctctgctgaattccagggttcttagattctctattcaaattatgattatccacttgctgttttggtccttctgggtggagaaggggagtcctggatgtggctagtcagctctctcgaacactccctcaaccataacttttatttaaaatccatagtgatttgaattgttaatgccctagaggtagggtttcagtttctgtcttggtctatgttgtgttgctataaaggaatacctgaggctggttaatttaaaaagaaaaggtttatttggctcatgg

SEQ ID NO: 512170 - DNA, 216 bp, Homo sapiens
cagtagtgcttctcaacttatatatatatatgatgtatatatatcatatatatatctcaaatgatatatatacatcatatatatatgactattgtgactattaaattgtcacatattagaatcaatatcaattatattactgttgataattggaagcaagtatttctgtgtcragttatcattttggttgatcagcagattaaaacactaatggta

SEQ ID NO: 512171 - DNA, 581 bp, Homo sapiens
gctgagttctatccttagaggaattctaatgaaaaaagataattttatttactgtttaaatccaggaatgataaacagagaaacagaaacagtggaagatttttmggtagctaaatgagaattgctcatcaagtcatcaaagaattcatcggctattgtcaatattactaattccaattggtataaaagtgcaattgatatttctgataaaggtttttacaatgccttctttgttactggttattctggaatttaaataattttaaaagagctcaaaaagagaaatgcgataatatgaaatataccatacaataaatacttagagataccataaaaacctgtaagaaatatgtcacctaatgtactttttttaagaatataaataatttaattgtttctagacaaattcaatttactcattatattagttcatatttttccagtcgcttatactgtgactccagaatttggtttcagtatattcatcatgttaaaagcagggtttaaatcaaattgcctacatttagccgcctaaatgctaggacaccaggactgagatttgctgctttgtcgaaatgtcc

SEQ ID NO: 512172 - DNA, 581 bp, Homo sapiens
gctgagttctatccttagaggaattctaatgaaaaaagataattttatttactgtttaaatccaggaatgataaacagagaaacagaaacagtggaagatttttcggtagctaaatgagaattgctcatcaagtcatcaaagaattcatcggctattgtcaatattactaattccaattggtataaaagtgcaattgatatttctgataaaggtttttacaatgccttctttgttactggttattctggaatttaaataattttaaaagagctcaaaaagagaaatgcgataatatgaaatataccatacaataaatacttagagataycataaaaacctgtaagaaatatgtcacctaatgtactttttttaagaatataaataatttaattgtttctagacaaattcaatttactcattatattagttcatatttttccagtcgcttatactgtgactccagaatttggtttcagtatattcatcatgttaaaagcagggtttaaatcaaattgcctacatttagccgcctaaatgctaggacaccaggactgagatttgctgctttgtcgaaatgtcc

SEQ ID NO: 512173 - DNA, 491 bp, Homo sapiens
actgcagcactttgattaagaacatccagaagcaaagcttgtagtcacctctgtatatatgtcatttcatattctttttgttacaatgaggtgcttattcaatcccttgaatacaagttatagaatactttaacataggcattatttaaaacttccattatagtcttttaaagttgctttactttaaaatatttattacttaggcatagaaaaaaacatagaaatagtattttttttaaaacctgtaaacaactccagtttcracaatggataggtcacccagacagaaaatatgaaaacaacaaacttgaacaaagctatagaccaagtagacctaacagagacatacagaacattctatccaccagcagcagaatacacattcttttcaagtgcatgtggtacattcgaacattcaacaggatagataatgttaggtgccagaatttaagcctgaaagcatatcaagtatttcttctgatcataatgat

SEQ ID NO: 512174 - DNA, 466 bp, Homo sapiens
gtacttctccaaggcgctcttctcaagcctttccacctccttcttctgccaagctttgtgcttcttgacacgagtttcccacaaggctctgatgacagaaatgtcgaagacaaccactttatgtcccattttgggagcatgaaattacctatttaaaaaatatatagatatgtcagcttgatacacaaacagaaracagttttaacataaactttaaaatgaaatatgaatgaatcacttggcttaaggaatgatgatatgccttactacttcaaggatgacagtttgctttttttttttttttttttttttagcttgtttggctggttgggttttgtttgtcttgtttttattgagacagagtctcactctgttgcccaggctggaatgcagtggcacgatcatagctccaactgcagcctcaacctcctgggctcaggcaatcttcctgcttcagcctcccaag

SEQ ID NO: 512175 - DNA, 466 bp, Homo sapiens
gtacttctccaaggcgctcttctcaagcctttccacctccttcttctgccaagctttgtgcttcttgacacgagtttcccacaaggctctgatgacagaaatgtcgaagacaaccactttatgtcccattttgggagcatgaaattacctatttaaaaaatatatagatatgtcagcttgatacacaaacagaaaacagttttaacataaactttaaaatgaaatatgaatgaatcacttggcttaaggaatgatgatatgccttactacttcaaggatgacagtttgctttttttttttttttttttttttagcttgtttggctggttgggttttgtttgtcttgtttttattgagacagagtctcaytctgttgcccaggctggaatgcagtggcacgatcatagctccaactgcagcctcaacctcctgggctcaggcaatcttcctgcttcagcctcccaag

SEQ ID NO: 512176 - DNA, 331 bp, Homo sapiens
acagtggttccctgaggtcaaggtatctcccatgtgcctgctggcccctttctctctcctccagtgctctctgccgccccttaaaagggtccaccacatttcccacgaggatcaaagcaattgtgtgggagagaagagcttgcctctgaaggcaggccttggagatggcctcttattgatggtcctcaccccttcctcatggtcctgtgctaaccaggccacacagaccgagtcctcactgcaccaggcwccgctgccccagctccaggctgccaccctctgggctccagcagctgggggtgcagagagcacctggctcctcaggacacag

SEQ ID NO: 512177 - DNA, 502 bp, Homo sapiens
tcttagtaaaatcgaacaaaggattgactttataaaacttccgttgaaagatggatgtaagggggcacgttacctggctagatagaaagttctgattttaaatattccagataaccataaaaatctatcactgctaagggaatgcctaatttctaaagaagtaattgaagtctggtggctcacgcctgtaattccagcactttgggaggccaagttgggcagaccacctgagctcaggagctcaagaccagcctggccaacatggcgaaactccatctctactaaaaatacaaacatgtggtgacatgcacctataattccagctactgggaggctgaggcacaagaatcacttgaacccaggaggcagaggttgcagtgagccaagattgyaccactgcactccagcctgggtgacagagtgagactctgtctcaaaaaaaaaaaaaaaattaccctctgacatacatacacctgctcacaaatatattgtctgaccagtg

SEQ ID NO: 512178 - DNA, 648 bp, Homo sapiens
atggctccctggcagcacatcctcccagaatctggagctttggggttgccccattaattctacctgagaccatttttgtccatccctagcggtttgggccctccccacattattcacacgaggctgctctattaagagccaccttctctctgtccagagacctattggccttgagcaccaggtggctgttaacgcaaccactagcgagaatatttccccaggactcctagttcttcagtggtaagtgcttactatcrgcagagttcaatcttgtcttcctgtccttgcaataaatgcatggcaaacaaataaagaggtttgactgctggaaagaaagagaacaactccatatctgtataagcacaaaataaacagggtgtaagacatctcacgcatgccctactctgctccttccactagaataggtcttccactgtgcttggctgtgtgtggaatattgtttgaataagaagaggaccactggtgagaggggtagcaggactcctccctagagccccttccacatccagcccctggaagcaggcttggcagcttcatgtctcatagcagtcagggtaaacctgtcacctaactaaagtaatttcaaatgatataattgtaggactcagaaatctaagagagtcagat

SEQ ID NO: 512179 - DNA, 498 bp, Homo sapiens
ggtaacaggcttcagagagaatgcactgtaaatgtttcttatcagacctaaggtctgtgttgatgttaatactggaggatgtaatgaggcatgtctgatcccaacttcctgtcatggtctaaaccagtctttagggttaaattttagagtrccttggcctaggaggaagttcattcagatagttggaggccttagaattttatttttggttacattctcctccttctggcaagatttgccagggacaacatcaatggccagcaaatctttattttgtctcataacgttgctagtgtggcatggctgctgctccaggtccatcctgttatatggtgggacttcccatggccaagggtcttagagtctaaaggcttttagcaattaaatgttctaggccagataggaatagatgtagacaggcatttactacctcttaaaattattattttaagtaaaaagccaacaaacaaaaactaaaggcaaaaactgacttatcct

SEQ ID NO: 512180 - DNA, 632 bp, Homo sapiens
atagtaactctcagaatcaaaggagaggctgttgaactgtgctcagaaagtaagcaggagctaagggaagtcagcagccaagaacacaagaatggtccagttgggatgttcctgtgggcaccgctggagatggacacttgctgctggtggcactgctgtcaccatatacatcgtgacagccaccgcatctttgatttcattactgcaaattgtctgtctgaatctcaaaggaatgatgcaaaaaccaaactggactggcctagcctgggtcctgtgactcttctgcagcaggtagagagtggggacaggggacaatttctcttccaccactgyatgtcctgcctcctacgaagaaccataccatggggagggatttcccccaatctagaaggagatatgaatgctggggagacaaaaagaggggagaatgctctgtggaggcttctgctttgggccttactgtttagcatcacatgcggtcctgcagggtttggaaattactctgaaggaggtcagaagtcattggaaggtttagaggagatgagggcataatccaacttatgtttaatagaattacctgcattctgtgttaagaagagatttgcagggacacgggcaaaagcaggaggcca

SEQ ID NO: 512181 - DNA, 632 bp, Homo sapiens
atagtaactctcagaatcaaaggagaggctgttgaactgtgctcagaaagtaagcaggagctaagggaagtcagcagccaagaacacaagaatggtccagttgggatgttcctgtgggcaccgctggagatggacacttgctgctggtggcactgctgtcaccatatacatcgtgacagccaccgcatctttgatttcattactgcaaattgtctgtctgaatctcaaaggaatgatgcaaaaaccaaactggactggcctagcctgggtcctgtgactcttctgcagcaggtagagagtggggacaggggacaatttctcttccaccactgcatgtcctgcctcctacgaagaaccataccatggggagggatttcccccaatctagaaggagatatgaatgctggggagacaaaaagaggggagaatgctctgtggaggcttctgctttgggccttactgtttagcatcacatgcggtcctgcagggtttggaaattactctgaaggaggtcagaagtcattggaaggtttagaggagatgrgggcataatccaacttatgtttaatagaattacctgcattctgtgttaagaagagatttgcagggacacgggcaaaagcaggaggcca

SEQ ID NO: 512182 - DNA, 560 bp, Homo sapiens
agacagcctgactttgtctaatgttaccaggcaaaatcacacttcagtgctggttctcttacaaagtagggtctcagtgggtggaaagccaagagcaatttggatcctgggttattagtaaaagcagaattaagtggcggttgatcagaagtggttgatcttgggaactagccaggccagaggggactggttgagtggagaatggggctgaatacttgcttcaaaacagtctcagtaagagaggggactgtggccctaggcagaggtagcagttggatgggagtttcagagctagggcttacgctttgatrttttggagataaaacaggctcatgctcacacaatacatgagggtgtttgaaggcaagggagaccattgggggtgtttcaagaccatgaagatattcacatctctgaggatgaaggaagggtatattggctacaatgatgggagcaaagtttggaaagtcctgaagaacataggggagaggtcacatggaataattgattcaagaggatacaagaggaggtggtgaagtagacaaagaagggagaaatat

SEQ ID NO: 512183 - DNA, 600 bp, Homo sapiens
gtctgtaagggtgtttattctggtagaatctttatttggccattactggaagctcagtccttgtttttaaagcatgtctttttttcatatttctagaatgtccctccctacttattaaggatgcactataaccttcaaaatgctttcaagcttgctgtgaaaatctgagcccctgaatgttacatgttgaggtggcattaaagattatttagctgaacttcttcattgcacagatgaagaaactgaggccttgaggaggcaagtaatatatccgcaaagaggggckgtcctgcctgggaagatgagcgacacatgggttttccgagaagcgacacatctgaagagtgaaaggtaatttgtaaaacctgttggggagaaactttttctctggtgactctctgcagtggtgataagggtattatagatttagaagcttgaaatgaggaagagaaaggatttctttggaaatcttgtctgaaactgccataaattttagaaacatccagttggaaaacacatcaaacatgtcctttctgaagcaggttgtcacatttcatcaccacggctggttttctatttcagtctctgtctcctaaagca

SEQ ID NO: 512184 - DNA, 573 bp, Homo sapiens
tctttatttggccattactggaagctcagtccttgtttttaaagcatgtctttttttcatatttctagaatgtccctccctacttattaaggatgcactataaccttcaaaatgctttcaagcttgctgtgaaaatctgagcccctgaatgttacatgttgaggtggcattaaagattatttagctgaacttcttcattgcacagatgaagaaactgaggccttgaggaggcaagtaatatatccgcaaagaggggctgtcctgcctgggaagatgagcgacacatgggttttccgagaagcgacacatctgaagagtgaaaggtaatttgtaaaacctgttggggagaaactttttctctggtgmctctctgcagtggtgataagggtattatagatttagaagcttgaaatgaggaagagaaaggatttctttggaaatcttgtctgaaactgccataaattttagaaacatccagttggaaaacacatcaaacatgtcctttctgaagcaggttgtcacatttcatcaccacggctggttttctatttcagtctctgtctcctaaagcag

SEQ ID NO: 512185 - DNA, 628 bp, Homo sapiens
cccaggagctggatgagagagtggaaggaacactgaagtagaagtctaaaaacttgggttcaatcccaacccagccaagaacaagcccatgtgactttgcaaagatcatatgacttctctgaaagtcactttctttatttttaaagtgggaataatagcatttaccttgacagttactatatggatgaaataagatkattgatgtaaaaactccaagcatataataaacacccagtatatgtttgggaatctgaaactatcctcctagtgagcccccaggtttcacacacaggtcaaatacctagtcatccaactctgtggtatcagaacctggcatcagggcaatgtgtcaggcctcctaaagaatctctctgcaggccatactttctcaatctgataagcctcacaagtgtttttcataaatatgccattcccaaactaggtgacaaccagattcttcactcctttgtagcatttacaagacttagaataatactaggagcacaagttgtattttgatacacataagaaatatataaaaatatttaagggaaaattaacagaaccttgttactcaatatattgagctaacaatagtggtgaaatattcaagccaatcaaatttttt

SEQ ID NO: 512186 - DNA, 586 bp, Homo sapiens
cccaggagctggatgagagagtggaaggaacactgaagtagaagtctaaaaacttgggttcaatcccaacccagccaagaacaagcccatgtgactttgcaaagatcatatgacttctctgaaagtcactttctttatttttaaagtgggaataatagcatttaccttgacagttactatatggatgaaataagattattgatgtaaaaactccaagcatataataaacacccagtatatrtttgggaatctgaaactatcctcctagtgagcccccaggtttcacacacaggtcaaatacctagtcatccaactctgtggtatcagaacctggcatcagggcaatgtgtcaggcctcctaaagaatctctctgcaggccatactttctcaatctgataagcctcacaagtgtttttcataaatatgccattcccaaactaggtgacaaccagattcttcactcctttgtagcatttacaagacttagaataatactaggagcacaagttgtattttgatacacataagaaatatataaaaatatttaagggaaaattaacagaaccttgttactcaatatattga

SEQ ID NO: 512187 - DNA, 588 bp, Homo sapiens
tgcccaggagctggatgagagagtggaaggaacactgaagtagaagtctaaaaacttgggttcaatcccaacccagccaagaacaagcccatgtgactttgcaaagatcatatgacttctctgaaagtcactttctttatttttaaagtgggaataatagcatttaccttgacagttactatatggatgaaataagattattgatgtaaaaactccaagcatataataaacacccagtatatgtttgggaatctgaaactatcctcctagtgagcccccaggtttcacacacaggtcaaatacctagtcatccaactctgtggtatcagaacctggcatcagggsaatgtgtcaggcctcctaaagaatctctctgcaggccatactttctcaatctgataagcctcacaagtgtttttcataaatatgccattcccaaactaggtgacaaccagattcttcactcctttgtagcatttacaagacttagaataatactaggagcacaagttgtattttgatacacataagaaatatataaaaatatttaagggaaaattaacagaaccttgttactcaatatattga

SEQ ID NO: 512188 - DNA, 588 bp, Homo sapiens
tgcccaggagctggatgagagagtggaaggaacactgaagtagaagtctaaaaacttgggttcaatcccaacccagccaagaacaagcccatgtgactttgcaaagatcatatgacttctctgaaagtcactttctttatttttaaagtgggaataatagcatttaccttgacagttactatatggatgaaataagattattgatgtaaaaactccaagcatataataaacacccagtatatgtttgggaatctgaaactatcctcctagtgagcccccaggtttcacacacaggtcaaatacctagtcatccaactctgtggtatcagaacctggcatcagggcaatgtgtcaggcctcctaaagaatctctctgcaggccatactttctcaatctgataagcctcacaagtgtttttcataaatatgccattcccaaactaggtgacaaccagattcttcactcctttgtagcatttacaagacttagaataatactaggagcacaagttgtattttgatacacataagaaatatataaaaatatttaagggaaaattracagaaccttgttactcaatatattga

SEQ ID NO: 512189 - DNA, 176 bp, Homo sapiens
caggttttaagctttggcactcattataagccttccccacagtagcaagcaataacagttaagtaattaagctctaatattaagtaagtagcaaagacttratatcactaaagaacacctgcaaaagttggaagacatggctgtctcctcaaaagtgcagatgtcaatgtaaagac

SEQ ID NO: 512190 - DNA, 652 bp, Homo sapiens
tgagcacaattttcaaaccgcattaggaatggtagagatgccatcgaggagccaaccaccatatccattatgccatccaagctgctctctcgcacacttgggcattccacctgtagctggtcccttgtggtttggtaaataagatttcctcccgtgtcaccaggtttccgctcttcttcacttgagatacacctttcacaaagccctgaagaggaatatagcaccaatgccataatgccaatatcttctagaacaacgagaattctctgctaagataggtaaattctaaagccacaaacctgtattctcttcagtcatctttacacctgaatattcctgtactccatgcacaagtacagcaagtagggccatctcctcaatcctgggttgtgcttttccaactgaaaatctcattcccacagccagtatgggtctctctgggaacccaacctgggccagacaacagacaaaatactgtccttattcagcttatctcccaagcagtcttatttgaatttcttscttcttcagacacaaatttttcatgcaaatatctcatgcaaatagactccatttcagcctcttcactagtgttctctttaactgctcaaacttacctgtgccacaatagtggacaaggcctagggaaact

SEQ ID NO: 512191 - DNA, 636 bp, Homo sapiens
  misc_feature (1)...(636): n = A,T,C or G
gatgttaataaagggcagcaggaatgaaattcttcaggctaccaggnggaaggactacaggactattrgtaaatctggattgagaaacacaccattctgcccattattatcctgtaggtagaaacaaaaatgaatcaatgtgcatgcctacgtgaatggtcttgaagatagagataaattcatgtgataaaatgctttctcattaatctatttcattattcctatggaaatcagaattgacaaataacactttggaccaaaaaagaaatactttacttaaaaaaacccactgtgtttcctagctctaattaagtcagtttaattgggaagaatgtgtcactaaaggtcatctggctagaatttctgaacttttctccaaattccacttattatctcccttatatgtcttatgttcttcagtattttttctaacaaacaaactaactgcattatgcattagcgttaggatttttgaagtactagaaatagccttcagacatcaattactacctttgaagactctaggttttctaccattgatctaatctatccccttcctctagacaaaatattgctagaacaagaccgtttcttacttctaaggataaaaggaaatgagatgaagcagagctgtcc

SEQ ID NO: 512192 - DNA, 636 bp, Homo sapiens
  misc_feature (1)...(636): n = A,T,C or G
gatgttaataaagggcagcaggaatgaaattcttcaggctaccaggnggaaggactacaggactattagtaaatctggattgagaaacacaccattctgcccattattatcctgtaggtagaaacaaaaatgaatcaatgtgcatgcctacgtgaatggtcttgaagatagagataaattcatgtgataaaatgctttctcattaatctatttcattattcctatggaaatcagaattgacaaataacactttggaccaaaaaagaaatactttacttaaaaaaacccactgtgtttcctagctctaattaagtcagtttaattgggaagaatgtgtcactaaaggtcatctggctagaatttctgaacttttctccaaattccacttattatctcccttatatgtcttatgttcttcagtattttttctaacaaacaaactaactgcattatgcattagcgttaggatttttgaagtactagaaatagccttcagacatcaattactacctttgaagactctaggttttctaccattgatctaatctatccccttcctctagacaaaataktgctagaacaagaccgtttcttacttctaaggataaaaggaaatgagatgaagcagagctgtcc

SEQ ID NO: 512193 - DNA, 523 bp, Homo sapiens
agcccagctactcaggaggttgaggcaggaaaattgcttgaacctgggaggtggaggttgcgggtgagctgagatagcgccaytgtactctagcctaggcaataagagcgaaactctgtctcaaaaacaaacaaacaaacaaaaaacaacaacttaaaaagctaacaggaaatataggttgtctaataatattctgtaaaatatatatcatctatagacctatttagagtaggatttttcaaccttaatactactgacattttgggccagatatcatttgtcgggggtgaaccagactgtcctgtgcattaggatgtttagcaggaatcttggcctctacacactagatgccagtaccttcatccccagttgtaacaactaaaaatatctccatgaaacttttggagacatgaggtctgcaaatgtctagcatgctttagttgaaactgattgggctttagctaaaaatatgtaagaatataaatgacccttactatactatatagcaacatggtacacaaaa

SEQ ID NO: 512194 - DNA, 525 bp, Homo sapiens
tattttattgcctttgtattctgtctccagcaatatatttctgctgttgtctccgcattgttttttgttgatttgtttgtttgtgtcaaaatgccccactcattaatttgagttagagtttttccctgccacctctctaagccatctggtttttaaactttcaagaaatctaaaagtgatctmtcataggatttttttgtcttgttttattagaagagatatgagtccttcctctataattatcaccatcccctgccttttgaatcatctttttcatcataaccacaatatttcattctttttttttttttaagaaagggtctcactttgttgtccagggtggaatgcagtgatgtgatcacaactcactgcagccttaaactcctgggctcaagtgatcctccaacttcagcctcccaagtagctaggactacagatgtgtgccaccacacccagctaattaaaaaaaaaaaaaaaaaagtttgtaaagacaggatcttgctatgttgcccaggctagtctcaa

SEQ ID NO: 512195 - DNA, 582 bp, Homo sapiens
atcataacctgtcggatagtgttgcttggaattagaaagtctaaaagagagtaaaagtctaattttgaactattcatatttctattcaatttgtgttaattttattcctttccttcctgaaaaatctgtgccttaaaaaaataattttcagtggtaaagatattgggaccctgaagaaagggagccaagaagagrtgcaactgtttttagtttagttctttggtgctttagcacttacggcaatttcatcattgaatttgctgtcatttcaaaattttgtctttttattaatcttaatattaatattgaatattttaatattaaaattaagccgattagggaaagctaaaatattgagatgtgctgatcacaaaaagaggaaggtaaggaggatacaaaccctgagccacattggactatttgatccctgagcatgtcaagtgcccggattttgttttatctaatcctttgctcaggtcacccatgttgcccttatacatggttgaactcctatgcatcctttaaaacccattttaaaattatctctttggaaagacttcctcaacactaagaaaaaagtta

SEQ ID NO: 512196 - DNA, 582 bp, Homo sapiens
atcataacctgtcggatagtgttgcttggaattagaaagtctaaaagagagtaaaagtctaattttgaactattcatatttctattcaatttgtgttaattttattcctttccttcctgaaaaatctgtgccttaaaaaaataattttcagtggtaaagatattgggaccctgaagaaagggagccaagaagaggtgcaactgtttttagtttagttctttggtgctttagcacttacggcaatttcatcattgaatttgctgtcatttcaaaattttgtctttttattaatcttaatattaatattgaatattttaatattaaaattaagcygattagggaaagctaaaatattgagatgtgctgatcacaaaaagaggaaggtaaggaggatacaaaccctgagccacattggactatttgatccctgagcatgtcaagtgcccggattttgttttatctaatcctttgctcaggtcacccatgttgcccttatacatggttgaactcctatgcatcctttaaaacccattttaaaattatctctttggaaagacttcctcaacactaagaaaaaagtta

SEQ ID NO: 512197 - DNA, 433 bp, Homo sapiens
gcacattttatatcacctgtatggtcattacactttagagttttagagttttaattattttaatataaacagttatcccaggaactttgtcttgattaaattaccacccggtgtttctcttgaktctttacacttgagacttctgttgtgaaatattatggcagagtgaaaagagaatgcaaacgttgaaatagggcagagctgaattaactttagggtgaagtccatagtaatttcctatgacaaagtagtaaagctttttttgaacttggattctcaacctgttagctttgtacaagttacctataatctttatgagctttagttctgatgcttgtaaggtacaggcaataaaatatatttaaaggtagttctgtgaattaaaaaagcaagctatagttacctgatgagcactacttcttatttgtattca

SEQ ID NO: 512198 - DNA, 401 bp, Homo sapiens
attttatatcacctgtatggtcattacactttagagttttagagttttaattattttaatataaacagttatcccaggaactttgtcttgattaaattaccacccggtgtttctcttgagtctttacacttgagacttctgttgtgaaatattatggcagagtgaaaagagaatgcaaacgttgaaatarggcagagctgaattaactttagggtgaagtccatagtaatttcctatgacaaagtagtaaagctttttttgaacttggattctcaacctgttagctttgtacaagttacctataatctttatgagctttagttctgatgcttgtaaggtacaggcaataaaatatatttaaaggtagttctgtgaattaaaaaagcaagctatagttacct

SEQ ID NO: 512199 - DNA, 401 bp, Homo sapiens
attttatatcacctgtatggtcattacactttagagttttagagttttaattattttaatataaacagttatcccaggaactttgtcttgattaaattaccacccggtgtttctcttgagtctttacacttgagacttctgttgtgaaatattatggcagagtgaaaagagaatgcaaacgttgaaatagggcagagctgaattaactttagggtgaaktccatagtaatttcctatgacaaagtagtaaagctttttttgaacttggattctcaacctgttagctttgtacaagttacctataatctttatgagctttagttctgatgcttgtaaggtacaggcaataaaatatatttaaaggtagttctgtgaattaaaaaagcaagctatagttacct

SEQ ID NO: 512200 - DNA, 655 bp, Homo sapiens
ttgtaaggtacaggcaataaaatatatttaaaggtagttctgtgaattaaaaaagcaagctatagttacctgatgagcactacttcttatttgtattcatagccaaattgccaactccatggttcttcatcatcgaagatgttaaccacataatcaacctaagtgtccatcaataggtgaytgaataaaaatatatggtacatgtacaccacagaatactatacagccattaaaaagaatcaaaccagccgggtgcggtggctcacgcctgtaatcccagcactttgggaggctgaggcgggtgcatcacaaggtcgggagtttgagaccagcctgaccattatggtgaaacccatctctactaaaaaataaaaatacaaaataattagctgggtgtggtggcactcatctgtagtcccagctacttgggagcctgaggcagtagaattgcttgaacccgggagacggaggttgcagtgagccagggttgtgccactgcactccagcctggatgaaagagcgagactccatctcaaaaaaaaaaaaaaaaaaagaaagaaagaaactgtgtcttttacagcaacatagatggaggtggaggccaatattctaagtaactcagaaacagaaaattcatactgcatgttctcactta

SEQ ID NO: 512201 - DNA, 655 bp, Homo sapiens
ttgtaaggtacaggcaataaaatatatttaaaggtagttctgtgaattaaaaaagcaagctatagttacctgatgagcactacttcttatttgtattcatagccaaattgccaactccatggttcttcatcatcgaagatgttaaccacataatcaacctaagtgtccatcaataggtgactgaataaaaatatatggtacatgtacaccacagaatactatacagccattaaaaagaatcaaaccagccgggtgcggtggctcacgcctgtaatcccagcactttgggaggctgaggcgggtgcatcacaaggtcgggagtttgagaccagcctgaccattatggtgaaacccatctctactaaaaaataaaaatacaaaawaattagctgggtgtggtggcactcatctgtagtcccagctacttgggagcctgaggcagtagaattgcttgaacccgggagacggaggttgcagtgagccagggttgtgccactgcactccagcctggatgaaagagcgagactccatctcaaaaaaaaaaaaaaaaaaagaaagaaagaaactgtgtcttttacagcaacatagatggaggtggaggccaatattctaagtaactcagaaacagaaaattcatactgcatgttctcactta

SEQ ID NO: 512202 - DNA, 655 bp, Homo sapiens
ttgtaaggtacaggcaataaaatatatttaaaggtagttctgtgaattaaaaaagcaagctatagttacctgatgagcactacttcttatttgtattcatagccaaattgccaactccatggttcttcatcatcgaagatgttaaccacataatcaacctaagtgtccatcaataggtgactgaataaaaatatatggtacatgtacaccacagaatactatacagccattaaaaagaatcaaaccagccgggtgcggtggctcacgcctgtaatcccagcactttgggaggctgaggcgggtgcatcacaaggtcgggagtttgagaccagcctgaccattatggtgaaacccatctctactaaaaaataaaaatacaaaataattagctgggtgtggtggcactcatctgtagtcccagctacttgggagcctgaggcagtagaattgcttgaacccgggagacggaggttgcagtgagccarggttgtgccactgcactccagcctggatgaaagagcgagactccatctcaaaaaaaaaaaaaaaaaaagaaagaaagaaactgtgtcttttacagcaacatagatggaggtggaggccaatattctaagtaactcagaaacagaaaattcatactgcatgttctcactta

SEQ ID NO: 512203 - DNA, 459 bp, Homo sapiens
ataaaattttaatatctgaatttattggaagtctaaatatttgttatttcttctaattttgcacttatggtgacttgcttcctttatgtctggtgatttttgatggtgaactcacattktcttaatcttaacctgggaatttagtgggcttaactagaaattttttcttgaaaaagatttgtgtttgaatctgctaggaccgttggggcactaccagtctaaatgacttttagcctttttggtttctagattagcacagaggtctcagattcagctcttccatattgctgttgatgtaagccttgttttctgaatacagttccctggggcattttctcagcttaacctttttattcttaaatgcctactatcagaagatcttgtttatttgtggggaagagatctggagaatgagatgtcaggaggacacatggaaatttctcctactttcttcaagtt

SEQ ID NO: 512204 - DNA, 573 bp, Homo sapiens
tctttttttaaaaaaaatttacttaataggcattagaagtttatctattttgatacattctagtttacccattttaactgttacatagaagtgtggattcaattgtgtgtccagacccctccccaaatttgtatgttgaagccctaacccccaagtgctgtatctgatggaacggatacagcactcrgaaggaatcaaccctgctggcaccttgatcttcgacctcaagccaccagaactggtaaaaataaaataaaataaaataaatttctattaagccatcaagtctgtggtactttgttatggttgccctagcaaactaatatgcacggtattccattgctttatttattctttaataatgggctcttaacggtatttccagctctgtactgtaacatacaacattgcaacaaatgtttggtatggagatcttgttattcatattgcaggactttttcttggacacatacacaaatattcgcacacacactacagtatgttgatcttcaactttctaattattgccaaattgcctttcaaggtaattttggccaatctatactccatcag

SEQ ID NO: 512205 - DNA, 573 bp, Homo sapiens
tctttttttaaaaaaaatttacttaataggcattagaagtttatctattttgatacattctagtttacccattttaactgttacatagaagtgtggattcaattgtgtgtccagacccctccccaaatttgtatgttgaagccctaacccccaagtgctgtatctgatggaacggatacagcactcggaaggaatcaaccctgctggcaccttgatcttcgacctcaagccaccagaactggtaaaaataaaataaaataaaataaatttctattaagccatcaagtctgtggwactttgttatggttgccctagcaaactaatatgcacggtattccattgctttatttattctttaataatgggctcttaacggtatttccagctctgtactgtaacatacaacattgcaacaaatgtttggtatggagatcttgttattcatattgcaggactttttcttggacacatacacaaatattcgcacacacactacagtatgttgatcttcaactttctaattattgccaaattgcctttcaaggtaattttggccaatctatactccatcag

SEQ ID NO: 512206 - DNA, 573 bp, Homo sapiens
tctttttttaaaaaaaatttacttaataggcattagaagtttatctattttgatacattctagtttacccattttaactgttacatagaagtgtggattcaattgtgtgtccagacccctccccaaatttgtatgttgaagccctaacccccaagtgctgtatctgatggaacggatacagcactcggaaggaatcaaccctgctggcaccttgatcttcgacctcaagccaccagaactggtaaaaataaaataaaataaaataaatttctattaagccatcaagtctgtggtactttgttatggttgccctagcaaactaatatgcacggtattccattgctttatttattctttaataatgggctcttaacggtatttccagctctgtactgtaacatacaacattgcaacaaatgtttggtatggagatcttgttattcatattgcaggactttttcttggacacatacacaaatattcgcacacacactrcagtatgttgatcttcaactttctaattattgccaaattgcctttcaaggtaattttggccaatctatactccatcag

SEQ ID NO: 512207 - DNA, 573 bp, Homo sapiens
tctttttttaaaaaaaatttacttaataggcattagaagtttatctattttgatacattctagtttacccattttaactgttacatagaagtgtggattcaattgtgtgtccagacccctccccaaatttgtatgttgaagccctaacccccaagtgctgtatctgatggaacggatacagcactcggaaggaatcaaccctgctggcaccttgatcttcgacctcaagccaccagaactggtaaaaataaaataaaataaaataaatttctattaagccatcaagtctgtggtactttgttatggttgccctagcaaactaatatgcacggtattccattgctttatttattctttaataatgggctcttaacggtatttccagctctgtactgtaacatacaacattgcaacaaatgtttggtatggagatcttgttattcatattgcaggactttttcttggacacatacacaaatattcgcacacacactacagtatgttgatcttcaactttcyaattattgccaaattgcctttcaaggtaattttggccaatctatactccatcag

SEQ ID NO: 512208 - DNA, 398 bp, Homo sapiens
ccgcacacctacagagatcctacaaatgtgcacccgactggggaaagccacattcaatgaatgcatcagcctcctcctccgctcccaccgcccgccgccccccacccactttgcagcagaaatgtgcctgggctttttcacgcgagcgatggaggatcctcttaccagatggagttcttgatcttgtgttgcagcgcgctggcctctgtccctggcagcccgggcacaagggctggcagggccacccccgagttgggggcgctggggggaagctgctgatgggcatcaggctgctgtggtggcggctgttgttgttcctctgccatcgctgcaraggggtgggagggagggagggaaagatgggggcgcggggaagggtgagggaagagaccgggagg

SEQ ID NO: 512209 - DNA, 624 bp, Homo sapiens
aacccaggagtgtccttgcaaggaacaggatgctttcccagggttttgctcaagtttaccaaagattcaaatgtctttcgggtggtcaytggtgttttaaagacctctacaaatttcatcaggggcactgggttgagtaaatggaggccagcaaatcggtcttgtttggtggtagcattggctatgcttgtaatttgcaaagaggaagtgctgctggcaaacttgtatgttcagcaacaaacttgtccaacctcttggagagcttgattttcacctttagattttctacaatggcctctaccactaggtctgtgctgtggactacggatattgcatctgtgctggttgatatgctgcttagggttttctccacaaattcatcaaaagccttagggttttctacaaacaacttctttgtcactttcctaaggcttttctcaattccctctttatattttgccaagatgtcctctgtctggtctagcaacactactgtgtggccggtcactgcagcaacctgtgtgatgctgatgaccatcatgtgcttgatgatgatttttcttgcccaaggttgtggacaaggaagacaaagagtgcatgaactgcctggtgatgaaagccatg

SEQ ID NO: 512210 - DNA, 624 bp, Homo sapiens
aacccaggagtgtccttgcaaggaacaggatgctttcccagggttttgctcaagtttaccaaagattcaaatgtctttcgggtggtcactggtgttttaaagacctctacaaatttcatcaggggcactgggttgagtaaatggaggccagcaaatcggtcttgtttggtggtagcattggctatgcttgtaatttgcaaagaggaagtgctgctggcaaasttgtatgttcagcaacaaacttgtccaacctcttggagagcttgattttcacctttagattttctacaatggcctctaccactaggtctgtgctgtggactacggatattgcatctgtgctggttgatatgctgcttagggttttctccacaaattcatcaaaagccttagggttttctacaaacaacttctttgtcactttcctaaggcttttctcaattccctctttatattttgccaagatgtcctctgtctggtctagcaacactactgtgtggccggtcactgcagcaacctgtgtgatgctgatgaccatcatgtgcttgatgatgatttttcttgcccaaggttgtggacaaggaagacaaagagtgcatgaactgcctggtgatgaaagccatg

SEQ ID NO: 512211 - DNA, 597 bp, Homo sapiens
ctgggcttgtaagaaattaaattcttggagcaggtgctatgtgccccaagtactttctccctggcctcttgattgatttagttgactatgacaagaatgacctaatttgtataatcaactttcgcagtgccataatgaaataaacaggtgtcagatcaatcagctatgttatttttttacagtgtgaaatgtgtattactttttcacttgcagattttttttttttttttttttttgagacagagtcaagctctgtctctcargctggggtgcagtggcataatctctgctcactgcaacctccgcccccggggttcaagcgattctcctgcctcggcctcccaaatagctaggattacaggcatgcaccaccatgcccagctaattttttatatttttagtagagatggggttttgccatgttggccaggctggtctcgaactcctggccccaagtgatccacccaccttggcctcccaaagtgctgggattacaggtgtgagccatcgtgcccggccacttgcagactttttactaagcacctactacatgcaaggccctagcaacacaaagaggaaggaaattcttgccctaga

SEQ ID NO: 512212 - DNA, 481 bp, Homo sapiens
atcctgtctctgaggctctccttgtgaggtttttccatgggtttggacaacatgggaatgaagaggggagtgaggatatatagacttaaaactcaatgcacctgtgcctcctccaagtcttcatggattctcttctgtgcagaagaagctggtggtctctggagcacctggttctgactcacaatgctcatgctgtggtctgtgaaatcacctgctcccctccacagttcataacggccacacaaaaggccagattccttttgcataaggcagtgggtagaagagtgtgactttgacaggatgtttgaatcatggtatcagaagacttctctagagatctctctctctctctctctctctctctctctctctctmtatatatatatatatatatatatatatatatatatatatatatatacacacacatatatatataatatttttgaaattcattttaacacagtacagtttaaaaata

SEQ ID NO: 512213 - DNA, 548 bp, Homo sapiens
ataaagacatttttagaaaaaattaaaaacggaaagaatttgtcacaaaaaggcctgcagtaaaggaaataccaaaggatgttctttagatataaagaaaatggaaactcaggcacaagaagtgaaaaacaatagaaacagatgtaatttgtgacaataaaagtggggggatagagctgtataggagttttctatagtattgaggctgaattggcatcaattcaaactatattgttggaggtattcattgtaatacctgtggtaaccattgagaaaataacaaaatgtacagaaaaagaaatgagaagggaatcaaaaagatgcagcacaaaaatatcaattaaatacaaaagaaggcaataacggagaaaatgaacaaaaaaagacataagatgtataaaaaatatacagaaatagaaggaaatgtcatcattataaaagaaccaattaagtargaataaacaatcatcttcagtttctatgcatataacaagtttaaaatatataaaataaaatttgatagaactaaaaggagaagtaaatccaca

SEQ ID NO: 512214 - DNA, 510 bp, Homo sapiens
ttttcctttcaggtgaaattttcataggtaggactttcaggaatctcaagatcattctgttgtggtggtggcaccacctgtgagccaaaaatccacaaaasaatatggttaataaagccttggaagagtgaggctgatgaaagaggaaggcaaggccaggctatgactggtccatcctacagaagtagagtcatatgtgctggcccagggatggcgcaatcaaccagcctgatgccaagcatttatggaggctcctaataggaaaggctgtgggctggactctctgcaaggccaacacaagacagtttagtgcagcaaatccaggggataaaaaaatgacaatgaaggggcttgccctcacgaagctactgtcaaatgattccaatctctgccctagctggagaaacaaaacgaacatttataagaagataatttagatggcagaggttaagttccaaagtaatggtccagaccattagtccccaagctgttcccaagggttcttaggct

SEQ ID NO: 512215 - DNA, 510 bp, Homo sapiens
ttttcctttcaggtgaaattttcataggtaggactttcaggaatctcaagatcattctgttgtggtggtggcaccacctgtgagccaaaaatccacaaaacaatatggttaataaagccttggaagagtgaggctgatgaaagaggaaggcaaggccaggctatgactggtccatcctacagaagtagagtcatatgtgctggcccagggatggcgcaatcaaccagcctgatgccaagcatttatggaggctcctaataggaaaggctgtgggctggactctctgcaaggmcaacacaagacagtttagtgcagcaaatccaggggataaaaaaatgacaatgaaggggcttgccctcacgaagctactgtcaaatgattccaatctctgccctagctggagaaacaaaacgaacatttataagaagataatttagatggcagaggttaagttccaaagtaatggtccagaccattagtccccaagctgttcccaagggttcttaggct

SEQ ID NO: 512216 - DNA, 624 bp, Homo sapiens
ctgcatgccacatctgcctgcccatggactgcccaagggcttgcacctggtgcaagatgatggtcaggggaattcactctccacagcgtcaatgttaaccagtgggaaataggaggaggccagatagaaaaatatcctctttttccatgggctttttttttcccctaggcaaagagtctctgtgcagagtgtgtctggacgcatctgagtagctgagcaaatgccctgaaagtgatcggctgtgtctctttggagttccttatgaagcagttgctagcgcagtartgcatcactttgcattgcttctcatccctccagctttacttacagttttccttccccttgtttccctgggattgtatgtcccaaataaatcttcagagcttcatcctgcctcaggcggtttttccaggaaaactctgccaagatgatataataatgacttgtttatatgcttttcgcttctgggagactgtaaaccccttgaaagcagaagctatgtcatatatttttgttttacttcctcagtgcctgacacaaaataggccaaaagtccattacctatgacagacttctatacgaaaatgtagaaaatcatagaatgaaattgttgtttgtaaaatg

SEQ ID NO: 512217 - DNA, 528 bp, Homo sapiens
ttgtgtggctctgggaaaatggtgagaaataaaggtggggatgtgggtcttgtgtggctctgggaaaatggtaagaaataaaggtggggaggtgggtcttgtgtattcctgggagggaaaaagtaaaggagcacttgtggaagygaatgcacctcaggatgtgggatagccaatggcagaagcttgcctggatcctgatattcccagttcccacacggcctggttcacctgtggccccaggtgcttgtcccattcagttcggtgcacctggatgcgtaaccacccaagtgctctctgatttctgccttcaaatgtaggctcgtcctctgtgcttctccattaaaccaccatccagtcttcactcttgaattgcagtgtgtgttttgctccgcatgctcacctgcttttaaagatcctttcagtcagagatggagaagggaaaatttctccaccagctcactagtgtcgtggaactctgactgcagccttcttcctttccttcttttctggcttaggaaacgagtttgc

SEQ ID NO: 512218 - DNA, 656 bp, Homo sapiens
gcacctattcccacgtgggtagggcacrcttcttagcatagtagtggtgccttatgcgtgtggagcctgctctgatggccagccaggaactagcaaggactggctctgtgtgagggacagaccagatggagaatgccgaaggcccctcagcccatggtgctgaaatggagttctgctttcattggaagcccttggaaaattttcttaaggaagaccttcagcttttccttctgtgctttgggaaatctgctagttgtcacaatatctgttaactttaccctcttctaaggggcatggtttgacccttagtaatcctttcactagtatacaatttttacatattcagttttgttttatttgagacagagtctcgctctgtcacccaggctggagcgcagtggtgcgaacttggctcactgcaacctccgcctcctgggttcaagtgattctcctgtctcaacctcctgagtagctgggattataggcatacaccaccactcccggctaatttttatatttttagtagagatggggtttcaccatgttggccaggctggtctggaactcctgatctcaagtgatcggcctgcctcagcctcccaaagtgctaggccttttacatattcagtttactttttgttgccatttcccccttt

SEQ ID NO: 512219 - DNA, 645 bp, Homo sapiens
cacctattcccacgtgggtagggcacacttcttagcatagtagtggtgccttatgcgtgtggagcctgctctgatggccagccaggaactagcaaggactggctctgtgtgagggacagaccagatggagaatgccgaaggcccctcagcccatggtgctgaartggagttctgctttcattggaagcccttggaaaattttcttaaggaagaccttcagcttttccttctgtgctttgggaaatctgctagttgtcacaatatctgttaactttaccctcttctaaggggcatggtttgacccttagtaatcctttcactagtatacaatttttacatattcagttttgttttatttgagacagagtctcgctctgtcacccaggctggagcgcagtggtgcgaacttggctcactgcaacctccgcctcctgggttcaagtgattctcctgtctcaacctcctgagtagctgggattataggcatacaccaccactcccggctaatttttatatttttagtagagatggggtttcaccatgttggccaggctggtctggaactcctgatctcaagtgatcggcctgcctcagcctcccaaagtgctaggccttttacatattcagtttactttttgttgccat

SEQ ID NO: 512220 - DNA, 517 bp, Homo sapiens
atgggagggtcaaactctcatatgccattagaagcctttctttattttgacactgattttttttttttttttttttttttgagatggagtctgtctcatgttgcccaggctggagtgcaatggcatgatctcggctcactgcaacctccaccttccgggttcaagtgattctcctgtctcagcctcctgaggaactgggattacaggtgcatgccaccatgcccggctaatttttgtatttttagtataracatgttttcaccatgttggccaggctggtcttgaactcttgacctcaggtgatctgcctgccttggcctcccaaagtgctgggattacaggcgtgagccaccatgcccccgcccgacattggtctgttaaccttttaaattacgtttttcacccaagtgagaatccacacatgcctataactgagctaaatttccccacatctttttgtcactgatctgtattattcctatattattcacaaagataacttgagggagtttgttga

SEQ ID NO: 512221 - DNA, 517 bp, Homo sapiens
atgggagggtcaaactctcatatgccattagaagcctttctttattttgacactgattttttttttttttttttttttttgagatggagtctgtctcatgttgcccaggctggagtgcaatggcatgatctcggctcactgcaacctccaccttccgggttcaagtgattctcctgtctcagcctcctgaggaactgggattacaggtgcatgccaccatgcccggctaatttttgtatttttagtataaacatgttttcaccatgttggccaggctggtcttgaactcttgacctcaggtgatctgcctgccttggcctcccaaagtgctgggattacaggcgtgagccaccatgcccccgcccgacattggtctgttaaccttttaaattacgtttttcacccaagtgagaatccacacatgcctrtaactgagctaaatttccccacatctttttgtcactgatctgtattattcctatattattcacaaagataacttgagggagtttgttga

SEQ ID NO: 512222 - DNA, 632 bp, Homo sapiens
tagtctaaaacatccctgtgtcttctcatattagtaaactttcaaactctttcttaggttttaagttttcacataatgaatcttgcaggaaaataaaactaatctcttggttcactatttcactgaaaagactgaacacttttggtgcatcacatacccttttagttgctgggaataacgcagtgaaaacagacaaaacagaaaaataatttatgtcttggtaagccttctaacaagtgagtaaacagaaaaaaatacgtgaatttttttaaagatatatatatattttaaaatatatrtatatatatagacagataatatgtacacataggcttaaaagaaggctagtgcaacaataaaagtaagagtatttcactataatgagatcaatgaggatggagaggagttttcagaatgtggggtcaacaggatttgctgaaagatttgactggattacatgtagaagaatctagaatgacacaaacgttttaaactaagaacttgaaaatacagagatgccacttattgaaatggggaagattttaagtgaaacaggcttggttaagggaaagatcaggactttgattcagacctttgaattttgagatactgctctatggttatgtggaaat

SEQ ID NO: 512223 - DNA, 632 bp, Homo sapiens
tagtctaaaacatccctgtgtcttctcatattagtaaactttcaaactctttcttaggttttaagttttcacataatgaatcttgcaggaaaataaaactaatctcttggttcactatttcactgaaaagactgaacacttttggtgcatcacatacccttttagttgctgggaataacgcagtgaaaacagacaaaacagaaaaataatttatgtcttggtaagccttctaacaagtgagtaaacagaaaaaaatacgtgaatttttttaaagatatatatatattttaaaatatatatatatatatagacagataatatgtacacataggcttaaaagaaggctastgcaacaataaaagtaagagtatttcactataatgagatcaatgaggatggagaggagttttcagaatgtggggtcaacaggatttgctgaaagatttgactggattacatgtagaagaatctagaatgacacaaacgttttaaactaagaacttgaaaatacagagatgccacttattgaaatggggaagattttaagtgaaacaggcttggttaagggaaagatcaggactttgattcagacctttgaattttgagatactgctctatggttatgtggaaat

SEQ ID NO: 512224 - DNA, 632 bp, Homo sapiens
tagtctaaaacatccctgtgtcttctcatattagtaaactttcaaactctttcttaggttttaagttttcacataatgaatcttgcaggaaaataaaactaatctcttggttcactatttcactgaaaagactgaacacttttggtgcatcacatacccttttagttgctgggaataacgcagtgaaaacagacaaaacagaaaaataatttatgtcttggtaagccttctaacaagtgagtaaacagaaaaaaatacgtgaatttttttaaagatatatatatattttaaaatatatatatatatatagacagataatatgtacacataggcttaaaagaaggctagtgcaacaataaaagtaagartatttcactataatgagatcaatgaggatggagaggagttttcagaatgtggggtcaacaggatttgctgaaagatttgactggattacatgtagaagaatctagaatgacacaaacgttttaaactaagaacttgaaaatacagagatgccacttattgaaatggggaagattttaagtgaaacaggcttggttaagggaaagatcaggactttgattcagacctttgaattttgagatactgctctatggttatgtggaaat

SEQ ID NO: 512225 - DNA, 632 bp, Homo sapiens
tagtctaaaacatccctgtgtcttctcatattagtaaactttcaaactctttcttaggttttaagttttcacataatgaatcttgcaggaaaataaaactaatctcttggttcactatttcactgaaaagactgaacacttttggtgcatcacatacccttttagttgctgggaataacgcagtgaaaacagacaaaacagaaaaataatttatgtcttggtaagccttctaacaagtgagtaaacagaaaaaaatacgtgaatttttttaaagatatatatatattttaaaatatatatatatatatagacagataatatgtacacataggcttaaaagaaggctagtgcaacaataaaagtaagagtakttcactataatgagatcaatgaggatggagaggagttttcagaatgtggggtcaacaggatttgctgaaagatttgactggattacatgtagaagaatctagaatgacacaaacgttttaaactaagaacttgaaaatacagagatgccacttattgaaatggggaagattttaagtgaaacaggcttggttaagggaaagatcaggactttgattcagacctttgaattttgagatactgctctatggttatgtggaaat

SEQ ID NO: 512226 - DNA, 437 bp, Homo sapiens
ctcaagcaatccacctgcctcagctttccaaaatgctaggattacaggcatgagccaccgtgcctggctggtctggtgactttgttggtaattactaccattcatgtgaatccacctgggcttttatactttattcctctctagtatgtttaggccactgaaaatgtatcttctgacctggacctcagggacctgccctactgttttatattggaaacgaaaggttctaaggaatgttcagaagtcatacaattgtcagggtcatattcagtatctggttcacaaaggatttgtcttggagaagttaatggtcataggagtctaactgccagctctacaatgytcctgaatatattataatctaatggttagactggtgaagtcccacacttaattcacccataggcaaggtctggagaatattgtgtaaatcagcc

SEQ ID NO: 512227 - DNA, 630 bp, Homo sapiens
agctggaagtgggaaggagttcactgtaacagtaaagtccaaggccacttcatcaggacaccaccaaatctcaaactgacctgcccttacaccagtcttctctgcctttcyttctgatacaataaatttgctgtagtcttactgtataacttgttttatagtataatgttctttcactaaacttcacatgctaaaatgcatggggaaaaagaaaggaaatcagtatatatcaaagagatatctgcagtcccaaatctgtacaccaaccaaacataacatgcagtttacctatataacaatcctgcatatgtgccctaacagaattgccactcaacctggcagtcttattactgggtatatacccaaaggaatataatttattctactgtaaagacacatacacacatgtttattgcggcactcttcacgatagcaaagacagaatcaacctcaatgcccatcaacagtagacaggataaagaaattttggtacatatacaccatgggatactaaacaaccataaaaagtgagataatgttctttgcagcaacatggatggagctagagaccattatcctaatcaaactgatgcagaacagaaaaccaaatactatatattctaaattata

SEQ ID NO: 512228 - DNA, 630 bp, Homo sapiens
agctggaagtgggaaggagttcactgtaacagtaaagtccaaggccacttcatcaggacaccaccaaatctcaaactgacctgcccttacaccagtcttctctgcctttccttctgatacaataaatttgctgtagtcttactgtataacttgttttatagtataatgttctttcactaaayttcacatgctaaaatgcatggggaaaaagaaaggaaatcagtatatatcaaagagatatctgcagtcccaaatctgtacaccaaccaaacataacatgcagtttacctatataacaatcctgcatatgtgccctaacagaattgccactcaacctggcagtcttattactgggtatatacccaaaggaatataatttattctactgtaaagacacatacacacatgtttattgcggcactcttcacgatagcaaagacagaatcaacctcaatgcccatcaacagtagacaggataaagaaattttggtacatatacaccatgggatactaaacaaccataaaaagtgagataatgttctttgcagcaacatggatggagctagagaccattatcctaatcaaactgatgcagaacagaaaaccaaatactatatattctaaattata

SEQ ID NO: 512229 - DNA, 630 bp, Homo sapiens
agctggaagtgggaaggagttcactgtaacagtaaagtccaaggccacttcatcaggacaccaccaaatctcaaactgacctgcccttacaccagtcttctctgcctttccttctgatacaataaatttgctgtagtcttactgtataacttgttttatagtataatgttctttcactaaacttcacatgctaaaatgcatggggaaaaagaaaggaaatcagtatatatcaaagagatatctgcagtcccaaatctgtacaccaaccaamcataacatgcagtttacctatataacaatcctgcatatgtgccctaacagaattgccactcaacctggcagtcttattactgggtatatacccaaaggaatataatttattctactgtaaagacacatacacacatgtttattgcggcactcttcacgatagcaaagacagaatcaacctcaatgcccatcaacagtagacaggataaagaaattttggtacatatacaccatgggatactaaacaaccataaaaagtgagataatgttctttgcagcaacatggatggagctagagaccattatcctaatcaaactgatgcagaacagaaaaccaaatactatatattctaaattata

SEQ ID NO: 512230 - DNA, 630 bp, Homo sapiens
agctggaagtgggaaggagttcactgtaacagtaaagtccaaggccacttcatcaggacaccaccaaatctcaaactgacctgcccttacaccagtcttctctgcctttccttctgatacaataaatttgctgtagtcttactgtataacttgttttatagtataatgttctttcactaaacttcacatgctaaaatgcatggggaaaaagaaaggaaatcagtatatatcaaagagatatctgcagtcccaaatctgtacaccaaccaaacataacatgcagtttacctatataacaatcctgcatatgtgccctaacagaattgccactcaacctggcagtcttattactgggtatatacccaaaggaatataatttattctactgtaaagacacatacacacatgtttattgcggcactcttcacgatagcaaagacrgaatcaacctcaatgcccatcaacagtagacaggataaagaaattttggtacatatacaccatgggatactaaacaaccataaaaagtgagataatgttctttgcagcaacatggatggagctagagaccattatcctaatcaaactgatgcagaacagaaaaccaaatactatatattctaaattata

SEQ ID NO: 512231 - DNA, 556 bp, Homo sapiens
cttttgtcattgataattgctcttctatgggattccatagcacttgtaatttgattcatgcagtctagcatgaagatgccatcttacattactgttgattgtacttggcttttctacttaacaaagtaaccagcatctctaggttgggccaaatcttagttttgatcctacagtgctcaataaatggtgccagtgttaaccttgctcgggatcctaagacaaccttgatttcctcctttaatatcacagaggatgctctaagcaataaggttcagaaacttgtagtctatctgctcgctgaggcatccagacatgtgctcagggatcttctggagagatttcactttcccaagagatcagaaggaagcccatgaggaacgtgaccctggcttctgttccttctacacacccaccccctccccagtagcactgatgaaactgcaccagaaatcatcccttcctaggacsctggcactctggaatttccaacatttgaagccatacccgatctactgcctgtggaagcagtttaaccgtgaggaggtccccagcccag

SEQ ID NO: 512232 - DNA, 648 bp, Homo sapiens
agctgccggagatgaccaccagggccctccagtgcagccctcctttcctggcctcccaccttggaactctcaagtaagagcccaagcttgggcttctaagtgaggattgtgactgctcaagcagccgcagacagacttttgcttcagattttcccagagccttgtttcaacacggacttcccagacatatctccttmacatgtgggatgtctgcccatttccttgcatggatcatgcaaggtgagggcaacttgggtaactcttcctggattttaatctaggaactttatgtagatgatcaggtatcaaatagacttgttgaatatttgcattggttcccctagaatttgggtcacattgatatttctaaaattaaagatgtatgtgtttgtgcattagggctggcctatctaggactgccaaattctgtgggaattcttttttccatgacaagaccaatgtttggatttttctaagcatttcagtatattttcaaagcatattaaaaacacccatcataataagatatgaattatttccttgctctgtattcattatcatggttttaaaataggaataaagtgtctctaaggagacaacttttgtcacactaaataatttttttcacttcacacatgaacttgcttt

SEQ ID NO: 512233 - DNA, 648 bp, Homo sapiens
agctgccggagatgaccaccagggccctccagtgcagccctcctttcctggcctcccaccttggaactctcaagtaagagcccaagcttgggcttctaagtgaggattgtgactgctcaagcagccgcagacagacttttgcttcagattttcccagagccttgtttcaacacggacttcccagacatatctccttcacaygtgggatgtctgcccatttccttgcatggatcatgcaaggtgagggcaacttgggtaactcttcctggattttaatctaggaactttatgtagatgatcaggtatcaaatagacttgttgaatatttgcattggttcccctagaatttgggtcacattgatatttctaaaattaaagatgtatgtgtttgtgcattagggctggcctatctaggactgccaaattctgtgggaattcttttttccatgacaagaccaatgtttggatttttctaagcatttcagtatattttcaaagcatattaaaaacacccatcataataagatatgaattatttccttgctctgtattcattatcatggttttaaaataggaataaagtgtctctaaggagacaacttttgtcacactaaataatttttttcacttcacacatgaacttgcttt

SEQ ID NO: 512234 - DNA, 634 bp, Homo sapiens
taacttctgttgcatacaaaaactggaattttaccctctaccccatttatatttttgatgtcataatttacatctctttatattctgtagtctttaacaacttattgtagctttagttatttgtgaacatttttatgttgcatctttatactaaagataagtatgatttacacaccacacttacagaattggagttcttccactaagccaagwtctattgctccagggcacatctcagcagcttaggcccatgaggctgggatgtagctgtggttctgaccctggggggcaagttataccactggcatggccctggggaagaaggcatgctctggaggcttaggccccaagaatcagggcatagttgcaatttgggactcagaaccaatagggcactttggcagcttgggacccaagggatgaggtaccacacagagtcacagaattgtgactttggaccctgagatggtgggatatggcagtagcccaggctctttgaggccaggggcagcagcagtaaggacccagatggcaagatgctgctgtggctttgtcccagaagatgggtaggagtgtaatgatgattctactgcctggagattggggtgcctcagtagcttgacctgagtcaggg

SEQ ID NO: 512235 - DNA, 681 bp, Homo sapiens
cttactctgactttgggccaaggacttatccttgtacacatcaaatcatttaaccttcaccacaactctgtagaggtgcctttattacttctagctgaggtctcagtttccactgctgtaaactgggaatactaatggggtagttgtgaggaataaatgagttaatgtgcaaaaagtgtttataaaaggcttggcacataaaaaactttatcgttccttaagsctttaggttcaactcacaaatcttagctttctgtttataaatctataaaattttaacaattatttttaaagtaacatttacaactgaattaatttttcttatatactttaaattgcatttctacagttggtgttctttattttcttcaagaaatccaattgtctgaaaaacagatcatataaagaacttaaataatccttataaatatgaaactttaaacttacaaatatggggagtttaaagtagtgacatagcaatgggagtgacagatgtggtccactcttgggtacagacagtaaaggggtatgtgatctgtagataatttaaaaacaataataaaagcaattaagtattgttggtctgccttttattatcatcatgtactgacatactatcaataacagtgacaaaatactccttatgctggaatggaccacttctatagtctgcaccccttg

SEQ ID NO: 512236 - DNA, 681 bp, Homo sapiens
cttactctgactttgggccaaggacttatccttgtacacatcaaatcatttaaccttcaccacaactctgtagaggtgcctttattacttctagctgaggtctcagtttccactgctgtaaactgggaatactaatggggtagttgtgaggaataaatgagttaatgtgcaaaaagtgtttataaaaggcttggcacataaaaaactttatcgttccttaaggctttaggttcaactcacaaatcttagctttctgtttataaatctataaaattttaacaattatttttaaagtaacatttacractgaattaatttttcttatatactttaaattgcatttctacagttggtgttctttattttcttcaagaaatccaattgtctgaaaaacagatcatataaagaacttaaataatccttataaatatgaaactttaaacttacaaatatggggagtttaaagtagtgacatagcaatgggagtgacagatgtggtccactcttgggtacagacagtaaaggggtatgtgatctgtagataatttaaaaacaataataaaagcaattaagtattgttggtctgccttttattatcatcatgtactgacatactatcaataacagtgacaaaatactccttatgctggaatggaccacttctatagtctgcaccccttg

SEQ ID NO: 512237 - DNA, 638 bp, Homo sapiens
tttcaagcaaaagccattactatagaatacatatacagaatggaaacaaatgaatagaatctggctcagaaacaccttgatttaagaaaaaaagtcctaaaaatacactgaaaagggcataagaaggtatgcgttacttctcaaagtgagatttgttaaacaatctaacagttggctattaaagaagtgacaggaaagaattctctgcatctttttaaaacaggaagaataatcagtctactcagggagttaatcatttataggcattctctaattaaaatttttatctgtccaaattctctttggttgactcttttcaaggtctattatcaagcagaataaatacacacttgcaagcaaaagactgaatgtttgayattctcaaacgcattttaaatccacaggaaagaagggatcaaaacttaaaaaataatacaataagtagaactcattttcttattagctcaaaacacagttctatggaaaataccacaaactccatttaaatgatagctaaataacatgacattgctatttagtataacaccatactacagaaagttataagtcccatctaccttgttctgctaccagggccttgagctctcccaacaaatattttataattctaacttttt

SEQ ID NO: 512238 - DNA, 627 bp, Homo sapiens
tcttcattttttagttatttcatcttttagaaggtcaagtaaacaacagtggcaatagcatgctatataatctttgtcctgtaaagacagccagccaaatagctctggtgccagttgaagaattaggtcagacatcaaacaaataccttttaaaaaaactagaaacaagtggtggcccataaaayagtaaacttcattttcttgagtggcttatgaattagctcctaaggcaatttaaaaatgttctaaggaaccgaaataaataagaaccactaatattttccatggtgacaatgttaaaatacaatattctcagactaagttttggtatccttatttaaggaaccaattatttgattgtcattcctttaaataatatgcttgtttactttgaatggcttacaatacattctatgttccacaaaatacacctaaatagtgaggtataattaaatctctacttcctaaccgagacagtgtaaaagtctacaagttaagatcactgtactctaaaaccaaattgcctgggttcgagtcttgactcttaacttcttagatatataaccttgggcaagttacataaactctttgtgccttcatttcctcatctgtaaatgcgagtaaata

SEQ ID NO: 512239 - DNA, 627 bp, Homo sapiens
tcttcattttttagttatttcatcttttagaaggtcaagtaaacaacagtggcaatagcatgctatataatctttgtcctgtaaagacagccagccaaatagctctggtgccagttgaagaattaggtcagacatcaaacaaataccttttaaaaaaactagaaacaagtggtggcccataaaatagtaaacttcattttcttgagtggcttatgaattagctcctaaggcaatttaaaaatgttctaaggaaccraaataaataagaaccactaatattttccatggtgacaatgttaaaatacaatattctcagactaagttttggtatccttatttaaggaaccaattatttgattgtcattcctttaaataatatgcttgtttactttgaatggcttacaatacattctatgttccacaaaatacacctaaatagtgaggtataattaaatctctacttcctaaccgagacagtgtaaaagtctacaagttaagatcactgtactctaaaaccaaattgcctgggttcgagtcttgactcttaacttcttagatatataaccttgggcaagttacataaactctttgtgccttcatttcctcatctgtaaatgcgagtaaata

SEQ ID NO: 512240 - DNA, 463 bp, Homo sapiens
ctgatcttgggcccatgcaactggggttgtggctacagccacccacrtaagcttggtgtaaggaaaatggagctccagtgctggaaggtgcagtacttactggcccccagagcaggatgcaatccagaggtggctgaggtctcaagattgtgccttgctgcagcagcttggctcacaagggatgggagagatgggaagtgcatactttgtgctccgaattcagggcaatgtggctgtgtgaattccagtggctctccaaactgggcccaggacttgtaaggactgtgggattctcctgttgtaaggactgtaggtgtttgcaatgccagtggggaccggtggggatcttctgcttatcttttccttgcaacaagaagtctctcctgactccagacaatcttggcaggggagatagatctgcagaggttgggtggctccatgctgccctcctggacaccacagg

SEQ ID NO: 512241 - DNA, 463 bp, Homo sapiens
ctgatcttgggcccatgcaactggggttgtggctacagccacccacgtaagcttggtgtaaggaaaatggagctccagtgctggaaggtgcagtacttactggcccccagagcaggatgcaatccagaggtggctgaggtctcaagattgtgccttgctgcagcagcttggctcacaagggatgggagagatgggaagtgcatactttgtgctccgaattcagggcaatgtggctgtgtgaattccagtggctctccaaactgggcccaggacttgtaaggactgtgggattctcctgttgtaaggactgtaggtgtttgcaatgccagtggggaccggtggggatcttctgcttatcttttccttgcaacaagaagtctytcctgactccagacaatcttggcaggggagatagatctgcagaggttgggtggctccatgctgccctcctggacaccacagg

SEQ ID NO: 512242 - DNA, 552 bp, Homo sapiens
gggtgtctgctcagtttaaaaaactccctttcttttagaatgtctactctcacttgtccaacctccttcttgataggtgattggaacaagggtcaaatatcctgtcttggaatttgatattgattcacagaaagccacatagttcgttcttgtgactagagcagagatggtataaactctgggtcagtgggatggcatactccactttgaaattctgtgggaagcatggaggaagattgagagagagagaaagagagagatagaaggctgagcatactgttctctgggttcttgattctttggcagtccctgaggcctgctccttctggggttcttgtacatytttccctcagtctcttggtctccgttgaattgtccttctccttttatgactcaaactaaccttaatcatcagtgttaaaattatttcatttgttctgtattcattttcccttggtctttacttttcactttcctgggattgtagtatttgacttgtcctttcagtttctcaggaaaacctccttacgggatgagtcataaaagaacatt

SEQ ID NO: 512243 - DNA, 309 bp, Homo sapiens
tccagaagaaaccagccctgctgataccttgaccttagcccatcaaaactaaygtgactggagatcacaaaaggaaagtcacaggcaaaattccatgagcatgtctgttttgtttggccagaatagtgttttgagaaggaaaagaaaaatgagccaaactttaaaaactggtacatttcacacacaaaaaaaatctacatttctagattctcttaaagcaagcaaacaaacaaacaaacaaataatttcctcccctcctcagagacatagaaatatataacctccattttggtgtggcagcacagccag

SEQ ID NO: 512244 - DNA, 266 bp, Homo sapiens
gaaatttgtttttttctttcagaattataaactcactgagggtagcaatcatgtatactctctatccccattaactaaaataatggctattcagtaaaaaactattgaattaatggatagtttatttgccaagaaataaattctgtcaactttttttggaagcacatktcattcagaattctatgtagtaagagtttaaagaaaaattcttgtgaaatatcaagaggttgatgcaactgtgtatgtatgcattgtttcattaaatg

SEQ ID NO: 512245 - DNA, 637 bp, Homo sapiens
caactactttggatacatttcttgatcattcttagccttagtttcggtatctaygaactgagaatgacaatgcctaacattatttcttggaaatatgattgtgattattttatctggagagaagataaagttaaaaaaccacatacaaaatattttgatgtagaatgcatcactctgaataaatgaagtgcagattagtgaactgggccctaacacctggcctctggtgggagcaatatcttacttatatctaggaacatttccccatatgtaaaataagtcaagctggcattgagaatcatacacctgcttttcttgtcttggaagaaattggcttttctcttctcttggggaaatgtggagttgcctgtcttctgatcatggtacaggatacagttggaaggctgaggcctggtaacctgatgtggctgccacatagacttcatttgttcacaacacattaaagtcctagggaagctccctttaaaataacaacagacgatagatgctagtatcagcaattcacagtttatttcaggtccttgagtctgttgccagctcagatattgaatggaaaaaatccagtccatgaacattctttcttgcatcgaagggtaggagaaaggcagagctgggc

SEQ ID NO: 512246 - DNA, 359 bp, Homo sapiens
aggctgaacaaacacacgcggtcccatggcttctagtgccagcccccacacaccactcgccacccaggctgtcttgagtccacaggtgtccccaccccactccagatcttctgtttacactcggcagsagcgtcccatcttttgacttccctgggccacaatgtaagaaatattgtcttgggtcacacataaaatacaccaacgatagccgatcagctaaaaaacaaaggttcatgcataaatctcagaatgttttaagaaagtttatgaatctgtggtgagccgcattcaaagccatcccaggtcacatgcgcacgggccgcaggttggacaagctcattcacagattctccccatgg

SEQ ID NO: 512247 - DNA, 533 bp, Homo sapiens
ctgccaacaactttctggctctgtgacccggggagtctacctgtctgagcctcgactttctcattggtgaaacggtgatgataacagctcgtatctcagaactgggtgtgaggatcaaattaggaaaatccgttaataatggcaaatacttatttggcacttactgcatatcaggccctgactcggtgacttacaagtaagataagggccagagaggatctggatgtgtctgctggccccttcctgccatgccccttytcaggctccagaaatgaccacagacccttttcccaaccccctgccctgaggaatgcacagaacgccagagtgggagccagaagtcctggcatgagttcaagccgagtgctccctgggcctcagtttcctcccctggcccgccctgccccctttggaggtggaaggtgatgacggaaatgtagcagtgttttgcctggtgatgtttatattcccctcccgtaccttccccaaatgacaggcttgtccagatgaatcaccagggggcaggaatgccc

SEQ ID NO: 512248 - DNA, 587 bp, Homo sapiens
gccacatgtagaagaataaaatgtgatactcgtctctcaccttatacaaaaatcaactcaagatggatcaaggacttaaatctaagacctgaaaccatgaaaattatagaaaagaacattggaaaaacccttccagacactggcttacgcaaagacttcatgaccaagaacccaaatcaagtgcaagaaaaacaatgataaattaaactaaattattaaactaaatacttaaactaaaagttaactaattaacttaattaaactaaaagtttctgcacagctaaagaaacaatcagcagagtaaacagacaactcacagcgtggcagaaaatattcacaatctacacattggacaaaggactaatgacagaacctaaatacctcagttgctggtgtgggattcacaccgtttttgatctttgcaatgggagcctctgattgccactgcttccagttggmcatcttggctttgcccctgccccccatgccccatatactttcttttgcatttactttactctcaattgaaatctccctttttatggtgtatataatggtaaccagcaattctaggcataaatcttcat

SEQ ID NO: 512249 - DNA, 587 bp, Homo sapiens
gccacatgtagaagaataaaatgtgatactcgtctctcaccttatacaaaaatcaactcaagatggatcaaggacttaaatctaagacctgaaaccatgaaaattatagaaaagaacattggaaaaacccttccagacactggcttacgcaaagacttcatgaccaagaacccaaatcaagtgcaagaaaaacaatgataaattaaactaaattattaaactaaatacttaaactaaaagttaactaattaacttaattaaactaaaagtttctgcacagctaaagaaacaatcagcagagtaaacagacaactcacagcgtggcagaaaatattcacaatctacacattggacaaaggactaatgacagaacctaaatacctcagttgctggtgtgggattcacaccgtttttgatctttgcaatgggagcctctgattgccactgcttccagttggccwtcttggctttgcccctgccccccatgccccatatactttcttttgcatttactttactctcaattgaaatctccctttttatggtgtatataatggtaaccagcaattctaggcataaatcttcat

SEQ ID NO: 512250 - DNA, 552 bp, Homo sapiens
tgcctttatcagtggattaactcattcaggtattaatgaattaatgagttatggactcacagtttataaatggagtgggrctgctgcctttataagaagagaaagacttttggcatactctgcctcctcaacatgcgatggtctgggctgcttcaggattctacagagttccccctagcaagaaggccttcaccaggtgagggccccttgaccttggacttctcagccttcatagctgcaagaaataaatttgtattctttataaattattcagtttcaggtattctgttataagtaacagacagtggactaagacagagtgtgaaatttgtggatgatcaagtcattgacatcttagatgtatccagaggagaatctttgacttgacctttgagttatatctgggtttcaactactcagctagctcattcatttgcttagtttctggacgtaagaaaacatacaaaaagggaacaaacaaaactgagttcagaagtcaaagatttgaaaataagccgccaaaatgtattaagttccacaaaatggactttg

SEQ ID NO: 512251 - DNA, 552 bp, Homo sapiens
tgcctttatcagtggattaactcattcaggtattaatgaattaatgagttatggactcacagtttataaatggagtgggactgctgcctttataagaagagaaagacttttggcatactctgcctcctcaacatgcgatggtctgggctgcttcaggattctacagagttccccctagcaagaaggccttcaccaggtgagggccccttgaccttggacttctcagccttcatagctgyaagaaataaatttgtattctttataaattattcagtttcaggtattctgttataagtaacagacagtggactaagacagagtgtgaaatttgtggatgatcaagtcattgacatcttagatgtatccagaggagaatctttgacttgacctttgagttatatctgggtttcaactactcagctagctcattcatttgcttagtttctggacgtaagaaaacatacaaaaagggaacaaacaaaactgagttcagaagtcaaagatttgaaaataagccgccaaaatgtattaagttccacaaaatggactttg

SEQ ID NO: 512252 - DNA, 602 bp, Homo sapiens
attcataccagtacgcctctcaatacaatcaggcttcttcagttttataaaatatacttagtccccttaaaaagattcattatattaacttcataaatcaaaatttagaaaacaattcctgtttttagacactatgtataaatttgctcacaatacacatcttcttttctctgtcatgatgaaaatctttaactcaaagaaaaaattgctagagtaactatgcctcttaatttttttcagtttcctatcttgaacttcatttcttacttcaatctttaaatawatattcaattataagctaacgtctgtggatataagaataaaatgtactcacttcaattattttgaaatcattcatattataatttcactataataattcatcttattattgtgaaatatactataatgaatataatgaaaaagttctactgtaataaaaagcgttatgtaagaattttcaaaaatatttcaaagcatgattaggaagtgctattctgccaaagtacttaaggactaccttcccaaaaaaggtgaaatttgagctaagtcatcttggctggataagcatcctaatgatagagaagaaaataaaaggaaca

SEQ ID NO: 512253 - DNA, 629 bp, Homo sapiens
atttcttacctccacattcctgtgaggtgggtactgtacccccattttcattgatgaggagcctgagtttagaaaggacatgcagtaggtcgaggagctggggtttgaacccaagtctttctgtctttttatcctcaaacttatccagacagtgcatatcctcttctgggagctacctgcaaccagtaatgcattggaaactgagagccaggctggtttgggagatgatgtgatagctactgattgatcagtgatacctttaaaggtgtctccagaagagccaatccacaagtcaaactaatgtatggagttggcttcccgagactgaggtgttctgaccgtcctagatagaagttccccacccctcaggagggttcaagcagctcatccatatcagactggtctgggccgtggagctaggcaggtggatggcgaagtggagtcctaacttcatgagaacctgaacacagaagctgcacagctgggcctgctggtgacctgctggtctccctagtcatccccactgggaggcagtgctgcagcaggtgtgttctagaacacttccattcttwttcctgatttgctgtgtgacattgggcaaattgcttctctgcgtaaaatgaggactt

SEQ ID NO: 512254 - DNA, 615 bp, Homo sapiens
aatttattgtttgacaatgttgaaatgctgatttttttttagaaaactcatttttaatattttaaaatcttgtttctattcttataggaaaaataaattataggaatttcataattattaacaagtcattatattaattacctgacttttgaattcacttagatgtattgtggctatatgcttcaaattttttatagttgcacattgtttattaaaagcattatatcgttctcactcaaaagtgggagttgaacaatgagaacatatgggcacagggaggggaacatcacacaccagggcctgtcgggtggtggggggctaggggagggatagcattaggagaaatacctaatgtagatgacgggttgatgggtgcagtaaaccaccatggcacatgtatacctttgtaacaaacctgcacgttcacgttctaccaagtattccagaacatatatatatatatatatatatatataaagatttttgagggagcaggagtagctctgttaccgccagagttgacattaaatctktttgtgcgttacatttcagtctaagtggcatgaatcatggaatgatggagaaagttactcattgaaagttgctttagtgatc

SEQ ID NO: 512255 - DNA, 592 bp, Homo sapiens
atgaattttgaaagcagtagaaaattctacttctttgtacattataaagctatagctttgtactctatcactgcaaaaagtagatttatcactgaaattttaaaaaatagaaagaaacccattatgaccttccagcttagagaaataccttgtttgttcacaaaggatattagttattaattayttatttcattcattcatctcttcatttattcaatgacttaacaaattatgttttcacagtcttccctttgtttcctagtagccacatgttcatgctgctgcagagaagacacaatctctagcttctccttttcatgcccagcccaccatactattactctgagacttagcgttcagcccacttaaggaagaaagtttctgatggagtttcaatcaccctttgaccaccaaagtttaagagctgctgaagatgaatatacatggcagtcttgcattttctggcttaaactgtttactcaccttctctcaatacctttcagggttaatcttgtcattcctcactttccaattctccttagtcatttggagaggcccaaaacatctctgccatcaatcatcaagtgaacat

SEQ ID NO: 512256 - DNA, 592 bp, Homo sapiens
atgaattttgaaagcagtagaaaattctacttctttgtacattataaagctatagctttgtactctatcactgcaaaaagtagatttatcactgaaattttaaaaaatagaaagaaacccattatgaccttccagcttagagaaataccttgtttgttcacaaaggatattagttattaattacttatttcattcattcatctcttcatttattcaatgacttaacaaattatgttttcacagtcttccctttgtttcctagtagccacatgttcatgctgctgcagagaagacacaatctctagcttctccttttcatgcccagcccaccatactattactctgagacttagcgttcagcccacttaaggaagaaagtttctgatggagtttcaatcaccctttgaccaccaaagtttaagagctgctgaagatgaatatacatggcagtcttgcattttctggcttaaactgtttactcaccttctctcaatacctttcagggttaatcttgtcattcctcactttccaattctccttagtcatttggagagrcccaaaacatctctgccatcaatcatcaagtgaacat

SEQ ID NO: 512257 - DNA, 440 bp, Homo sapiens
gttaccatttttttcttgccagtgtatctataattcaaatagttgttatcaggtgaaaagtgatagtcattaaggaaaaaaaactttttttgccaaaaagaaaagcattttatctgtcagtaattttcctttgttgcttttttaagcaacaaagaaaaattaacttacaattaacttacttaaaattcagtgagggcacaatttcttttgcacatcacttttacagtatttctctcaacaagaaaatacatttcttatcttctttctcagtaatgggtcacaggaattctaatccaaatttcatacrgattttattatatataaaaaaatccaatttagaaaaatctaaacaaacatttttaaaatttttaatatcttaaattgttcttagagaaaacaaaatttgtctttggaaatattaggtgtattaggtaatatta

SEQ ID NO: 512258 - DNA, 316 bp, Homo sapiens
ctgggaataggagctgcaaasaggcaattcccataacaatttatagggagaaatatatcaaaggagctaaagaattacccctgagagccattaaatttgagcatgatggcatctgttcctgtgatgtatagcttatgtgttacgcatgtatttttgctttggatgatcattggctaggtatgctgcaagtgcaagttcatttccatgctagaggaaaaggcaaaaagaaatctttggtaaatattcttttattgaaacagttgttcctagacaggttggcagaagcaagccatgtaggcatgggagcagaagaaat

SEQ ID NO: 512259 - DNA, 568 bp, Homo sapiens
tgacattttcagtattttgtttaagaccttgcatcttgtttaaatcttgttaagtaggggaaatgttggcattttcgtttgggttggcaattaacaagattatgttcagatccttcaagcgtgtgctgtgattttaatatcagttcagttttaacgtcattgtaatgctattaaaaactatcctgtgtaaataccactcagttgcctgtctgggactaacaatactctctccatgagatcagttctcaaagcctttggcatgctttttaggtccagtcatcccatgtacttctcaagagtgagctcaggggatcataaacaaatttgtgaagtwtctttcccgagctccttctactccatgatctctgctgcactttacagttccctgaagctctccttttttgtgctttgtcctcaaagctggatgttcagttatattttaggctgaagaaattctaagccagggtacagagtataaaagacacaggttaccaaaaaaattctcaagaaattaacacttttagaatctgaaagttttcataataagaaaacccttttactattcgtt

SEQ ID NO: 512260 - DNA, 564 bp, Homo sapiens
cttggagtgactatgtaaactctctgggtttcagttctatcatttataatatcaggagattagagtaagtcagaagctgtaagctcaggtgccagtgcctactgaatgaatgatagggatgatgataaacggagtagcacacacctcttctaaatgggcagctattgcttagatccaaccaatggtttccatggttcccatgctgwagttcagattgtcaaatctcccaatattccctgaaaactgaaatctcatattatgtgaacttttcagatttttctgtgttggtacaacttttataaaaaacacagtgcaggccaaagaaggattatcaactgtgaccagcataggttgatggtcacttctggactagttaaatctcaaatgtccttccagttcttcaaccttttacaaaatggtatatcaatgcaagagtattctgttaagtctgggacacctgtgcataatgctgcccctgttcctacccgtactcttttcctcaaaaggggtttatgtactttggctgaacagtcatgagtaatatttctcagtgaggaaattatg

SEQ ID NO: 512261 - DNA, 564 bp, Homo sapiens
cttggagtgactatgtaaactctctgggtttcagttctatcatttataatatcaggagattagagtaagtcagaagctgtaagctcaggtgccagtgcctactgaatgaatgatagggatgatgataaacggagtagcacacacctcttctaaatgggcagctattgcttagatccaaccaatggtttccatggttcccatgctgaagttcagattgtcaaatctcccaatattccctgaaaactgaaatctcatattatgtgaacttttcagatttttctgtgttggtacaacttttataaaaaacacagtgcaggccaaagaaggattatcaactgtgaccagcataggttgatggtcacttctggactagttaaatctcaaatgtccttccagttcttcaaccttttacaaaatggtatatcawtgcaagagtattctgttaagtctgggacacctgtgcataatgctgcccctgttcctacccgtactcttttcctcaaaaggggtttatgtactttggctgaacagtcatgagtaatatttctcagtgaggaaattatg

SEQ ID NO: 512262 - DNA, 518 bp, Homo sapiens
attttttgcttatattgctggggttcattgagcctcttgattctgtaaattttttatgtcctttatttaatgtgagatgttttaaaatagtatttcttttattttttgcaccgggctctttcctctctcctcaatctccaatgacatcaatgttagaccttttaatattgttccacaagtcttcaagactcagtttattcctatgctatttttttctttcctatacaatttgaataatttgtattgacctatattcaaattcaaaatatacactctctcatatacactgagagcctctaataaacatttcttttctttttgcatcttcttaagtctaaaattgtcatatgattatttrtagtgcttatctctttgctgagaacgttcacctttccattcatttcaagagggtttgtcttacttcatggactaaaatggtgtgactaattccaaacttagggccatcttggggttggcatatgataatcatcttttaagagaattaaggcttttctggt

SEQ ID NO: 512263 - DNA, 619 bp, Homo sapiens
ttaaacgtatacctatcacgtgacccagacgttccactattattactcaatagaaatgaaaatatgttcacagaaaaacttgtacccaaatgaccataatttcttttcttgtaatcagtaataactaaaaacaacccaaatatcccatattgtggtatatccgtaatatagaatactacccaacaataaaagctaacaaactattgatacacaaaacacatgcataaatttcaaaataattacactgagtaaaagaaaccagaccaaaaaaagartatataccaaagagtatattccatttatatataaaagtatagaaaatgcaaactaatacatagcgatagaaagcaaattcatggttgcctcagtattggggtaaggagaggtagtgagggaggtgggcattataaatggtcatgaagaaatgtttaagagtgattgataggtttattatcttaactataatgatggtttcaagggtaaattcgtcaaaactaatgaaatggtatactttaaatatatgcaggctgtatttcattaaaatatacctcaataaagctatattttaaaaagtccaacaacgaatattttttttaaaaaagagaggggcatcctagta

SEQ ID NO: 512264 - DNA, 619 bp, Homo sapiens
ttaaacgtatacctatcacgtgacccagacgttccactattattactcaatagaaatgaaaatatgttcacagaaaaacttgtacccaaatgaccataatttcttttcttgtaatcagtaataactaaaaacaacccaaatatcccatattgtggtatatccgtaatatagaatactacccaacaataaaagctaacaaactattgatacacaaaacacatgcataaatttcaaaataattacactgagtaaaagaaaccagaccaaaaaaagagtatataccaaagagtatattccatttatatataaaagtatagaaaatgcaaactaatacatagcgatagaaagcaaattcatggttgcctcagtattggggtaaggagaggtagtgagggaggtgggcattataaatggtcatgaagaaatgtttaagagtgattgataggtttattatcttaactataatgatggtttcragggtaaattcgtcaaaactaatgaaatggtatactttaaatatatgcaggctgtatttcattaaaatatacctcaataaagctatattttaaaaagtccaacaacgaatattttttttaaaaaagagaggggcatcctagta

SEQ ID NO: 512265 - DNA, 648 bp, Homo sapiens
aacctaaatgaccattaaatatatttgcatagttgtatttgcaaaatactggtaagcttataagaaacttacttgccaaatttattgtatgagtaggagaaaaaagccgaaaattttattagctgagtcaaagtttaatcttaagaaaagcttcatattgacaattcagaacaagggacaactcttaggtaacaaatattagttggcaattattctttttgacagccttgaccaaaaagctaaaaaaaacttctgagaatcatagtaatctagaaagattcctgtatttagattgagaaaccctggactcaaatcttggttttatcacttaatatttgattttggtaaataacctaagctctttgagccggtttactcaccaaagaaattacatgtgataatctctacctgtatcacagggtcgttgttaagaattaagagacatgaaagttctctgtaaactactgtatttgtattaccagtaaactttgtaaataggaattgttttgtattacaagtgttcacagagtccaaasatgtttcaagctttgaaattctattttgctcaagctccaaaataaattttccattaacttatatttcaaacagagaattcacataaaaacttcttaaacatttattatatta

SEQ ID NO: 512266 - DNA, 539 bp, Homo sapiens
tcgaatatcttcccgtttggtctttattacatgacgaggaaaccacttctccaaatgaattggaagttcaaagttaacaataggatcctaatgagaggaaaaaaagagtgtaatcactttagcagcataatttcaaatttgttttaatttcatttttataagaaatgacaaattgctaacttttttaaaataacaattatattaagatataattcacataatacaattcaccaatagcatacaattaagcatttttagtatattcacaaaatcaaatccatctggaaagggtatgagagggscagaacctgacaccctatgatgaagttctagtgtggaataaaaaagggagaaaaaacccaacataatagatatttaatgatttccaaaatgtgtactgtattttactatatattatccttcctctctcatattaaagacatcaaaaagttgtagctgcatactataactctcatgctttcaaagtaccgttaagcattctccaagccgacttctggtcaaaaacattctgctactag

SEQ ID NO: 512267 - DNA, 630 bp, Homo sapiens
ataacatgggagcttaggaggcaagtctccccataaaaagtgcctgccacataaaacttaagagaccacaaaggagacatataatttaatcacaaccagaaagtagtagagaagagatgacaactaattagtcatcctcctgctggcattctctcttaaagcttagaaataagaccagttgtgaattccgggctataatcttggaataggtagagcagtactcaatgaaaaatgtagtcagtaatgaaggtataatatgtacttcttgcrccagaaaggttcagtatggtaagagtcatccacattgatttaatcttagtatcatggcacctaaatcaaaaaagaaaactgtaaatttaaagtgctaatatgatagtttctaccttattggctattttcctatcctagtctttcaagtgtcttttttcaaaacaaagaaatagaatcacatggaggtacagaaatcaccattaaatgcacagactccatattcttccttagcaccatgagaagacatggatgaaatatgaacaaagaagcaatttctgaaagagaacttgtaacaaactccaaagtaccttaaattgaagcatatttcagtaagcaatttcattttccctatcatatgtt

SEQ ID NO: 512268 - DNA, 630 bp, Homo sapiens
ataacatgggagcttaggaggcaagtctccccataaaaagtgcctgccacataaaacttaagagaccacaaaggagacatataatttaatcacaaccagaaagtagtagagaagagatgacaactaattagtcatcctcctgctggcattctctcttaaagcttagaaataagaccagttgtgaattccgggctataatcttggaataggtagagcagtactcaatgaaaaatgtagtcagtaatgaaggtataatatgtacttcttgcgccagaaaggttcagtatggtaagagtcatccacattgatttaatcttagtatcatggcacctaaatcaaaaaagaaaactgtaaatttaaagtgytaatatgatagtttctaccttattggctattttcctatcctagtctttcaagtgtcttttttcaaaacaaagaaatagaatcacatggaggtacagaaatcaccattaaatgcacagactccatattcttccttagcaccatgagaagacatggatgaaatatgaacaaagaagcaatttctgaaagagaacttgtaacaaactccaaagtaccttaaattgaagcatatttcagtaagcaatttcattttccctatcatatgtt

SEQ ID NO: 512269 - DNA, 630 bp, Homo sapiens
ataacatgggagcttaggaggcaagtctccccataaaaagtgcctgccacataaaacttaagagaccacaaaggagacatataatttaatcacaaccagaaagtagtagagaagagatgacaactaattagtcatcctcctgctggcattctctcttaaagcttagaaataagaccagttgtgaattccgggctataatcttggaataggtagagcagtactcaatgaaaaatgtagtcagtaatgaaggtataatatgtacttcttgcgccagaaaggttcagtatggtaagagtcatccacattgatttaatcttagtatcatggcacctaaatcaaaaaagaaaactgtaaatttaaagtgctaatatgatagtttctaccttattggctattttcctatcctagtctttcaagtgtcttttttcaaaacaaagaaatagaatcacatggaggtacagaaatcaccattaaatgcacagactccatattcttccttagcaccatgagaagacatggatgaaatatgaacaaagaagcaatttctgaaagagaayttgtaacaaactccaaagtaccttaaattgaagcatatttcagtaagcaatttcattttccctatcatatgtt

SEQ ID NO: 512270 - DNA, 576 bp, Homo sapiens
tttggccagcagtacctttaattcttagaccttccatcagctatcaaaagaaaaatagttgcccaggagctataaatggagtgagatatgtggtaagaggccttgccttccatatggcaataaagaagagcaagatgcagcatgctccacaggacttctcaatgctagtcatataaccctcttggratgattttctttttcctgccatcagaaaacctaaagctgcttacttcttttccttgagttgatgacggggcatagtaaagcacagaattttgtgactgagaagaaccttaaagattttccaattcatctcccttatatacaggataggaattaaggaccagaaaagtgcttaatctgccttagcctaaggtaaccaagtagcaagtcccacagctttagtgcctttgttactgacccctgtctagtgttctgtctagtattcccaactgtgttattttggcgtatcaaagtttctggtcaagcaggaaaagtcaacgcattgccctggctactccctactatacctttttgcatacaattattattccttctgcttggaatttatacctt

SEQ ID NO: 512271 - DNA, 576 bp, Homo sapiens
tttggccagcagtacctttaattcttagaccttccatcagctatcaaaagaaaaatagttgcccaggagctataaatggagtgagatatgtggtaagaggccttgccttccatatggcaataaagaagagcaagatgcagcatgctccacaggacttctcaatgctagtcatataaccctcttgggatgattttctttttcctgccatcagaaaacctaaagctgcttacttcttttccttgagttgatgacggggcatagtaaagcacagaattttgtgactgagragaaccttaaagattttccaattcatctcccttatatacaggataggaattaaggaccagaaaagtgcttaatctgccttagcctaaggtaaccaagtagcaagtcccacagctttagtgcctttgttactgacccctgtctagtgttctgtctagtattcccaactgtgttattttggcgtatcaaagtttctggtcaagcaggaaaagtcaacgcattgccctggctactccctactatacctttttgcatacaattattattccttctgcttggaatttatacctt

SEQ ID NO: 512272 - DNA, 615 bp, Homo sapiens
ctgctatgcattgcttgaatagccagtgctgctgaggaatgcagaaatgttgatcaattttctagcaatacaagtctgtcaacataaatttccaaataccaaaaagagcacatattaacttaaatactgagatttataaatctataaataactttttttttttatagggtctcactcttttgcccaggctggagtgcatgggcgcaatcttggctcactgcagcatcgacctcccagactgaatcgctcctcccacctcagcctcaggagtagcygggactacaggcgcatgtcaccatgccaggctaagttttgtgtttttggtagagacagggtttcaccatgttgctcaggctagtctcaaactcctgggctcaagcaatctgcccgccgcagcttcccgaagtgctgggattccatgtgtgagccatcgctctcagcctgataattttcttaaaattgccagtgctactgtaagagacatagttaagtttatattaaaaggaaaaccaggtattgcttagttgtcataaagttgtgtgaagattaagtgaaatatgttagtggttttctcacagagtatacacacagagagttacactttacacagaaatc

SEQ ID NO: 512273 - DNA, 629 bp, Homo sapiens
atgtcagtgtgacataacaggcccccgtatggatagttactatacctttaggcaggagatgcatggatcagaatgactggctagagacttccagcgtctgcattgtttaaatatttagygtttaaaaagtggaaaatgagggaagctgaaattatagcaactgtttagttttattgaggaaaatatcacattatgtgcttgacaggaagtaatatcataacaaatagtttttaaaagcgctgaagcagaattagctgatttcaaatgcagtgttctttattcattcctgatgccgatccagtttccctggagcaatatactgtacaaaatgcattgttcgtagtgattttgtagtaaatggggcacggcacaaattgcattttacattttttagcatacgatcattattcactaactgtgtttggggagttgcaaaaagactttgatgctatttttatttttggatacaataaatggaaccttcatactaaaatactttcaaaagcctaatgaacaaaatgtgaaataatatgttaatatatagaaaacactgcatctttatgtaactagttaaatgttggatgttaaggagcactgtaaaaacttaatgctaaaaaggtgagtatttt

SEQ ID NO: 512274 - DNA, 544 bp, Homo sapiens
ttctggtcagccattttatcactctgtttttctccttaaggaagattagcacatccttttctactgttagtgttctagtcatgctaacagtrgctgcagaatcaagtctttcctagagaaagcctaactgtttcagtgttgtcctggagtcgattccatgttgagtgacatcaggttggtagcttgaaattggctatagtgagagaattcataacacagaaaccagcaacaaatgctacaaataggagatttgttttcaggagaactgcttcactagcatagtagttgttttgttccaggtagctgatctgacgaagtttagaatctcatactctagtgagaagaaataaactggggaaaagaagtattaaaaattgattatgttcttcttgagtcaatgaatttatttcagagaagtataattttttagaaaaataatggagtccttaaactaataattttggaaaatgttaagtgtgaaaaattgtcatataaaattgtaagctgagaaaaaatagtacttttgcttaaggcgacttaaata

SEQ ID NO: 512275 - DNA, 632 bp, Homo sapiens
tgcacaattctgggtctcatattcaaatatgacagcatccagcagaaaatgaagccacattatttgagtgctttcaagaataagaaatctttctcagaarcctaccagtagcattctgcctgtttcattgactgtaattacattgcatgccctgcataattcactcacaggaaatgagtaagattaccatggttgcttagacaaattagaatttacacttgacatggaaataggctctcctccctgaaaggatgtacctattgtatctcaagaaaactggagctctgttaacaaggaatggagagcaaatagttaatgggcagacagctaccaactctagtttaacctggaataagaataatacaatatatagaagaacatttacagttttgtgtccttgtagacatttttaaagcactgaaaacaataatgaaattgtgtaaagatacaaacacacataatgagtggtcaaaaccaaaggcagacactttacatagcggctattgggctgccccattgaacaactggggtctacagtgcacagcttgcctctcttagcattgtgtttgactcagtggccttctggttttctttagggagagaggaaagggaataagatgtggagagatgca

SEQ ID NO: 512276 - DNA, 491 bp, Homo sapiens
cacaattctgggtctcatattcaaatatgacagcatccagcagaaaatgaagccacattatttgagtgctttcaagaataagaaatctttctcagaaacctaccagtagcattctgcctgtttcattgactgtaattacattgcatgccctgcataattcactcacaggaaatgagtaagattaccatggttgcttagacaaattagaatttacacttgacatggaaataggctctcctccctgaaaggatgtacctattgtatctcaagaaaactggagctctgttaacaaggaatggagagcaaatagttaatgggcagacagctaccaactctagtttaacctggaataaraataatacaatatatagaagaacatttacagttttgtgtccttgtagacatttttaaagcactgaaaacaataatgaaattgtgtaaagatacaaacacacataatgagtggtcaaaaccaaaggcagacactttac

SEQ ID NO: 512277 - DNA, 623 bp, Homo sapiens
atgggagacaaaaaactgtttcacctaactcaaaycacataaaggactttcaaaaacatttgagcattcctgggctctgttccctccatatatcctactagccagacaaggaagtacctctttccctgtgtgaaatctcttctgttagacaattagttccacgtcttgggatctcatttcctaaggtcctgccagtgaccttctctttaaaaccattaattcttgtgagattctggccaggtgaagtttggactggctcctgtacaagggtgatgtggggcagtcctgtgaagcctaaagcagtattacacatcaccttggagttggaacatttttggctcaggaaagtaaaatgactggatgaagtcttgctgtgtaagtcataactctataatcagagttgtgtattttttttaatttataaaaaggatttggctttggagtggcaagcagcagtggtaagcccttccagggagctctcgtgaccctcaccagagttatttatgttagatgaaatggtactttgagctgtgcccaatgactggttccccacttatacacccaagccccacctaaaattgaatcaaaccatacacacctacatctctgccctcttttcctga

SEQ ID NO: 512278 - DNA, 444 bp, Homo sapiens
taccttaactaattaatatctacaacaattctacttccaaatagggtcacattttaggggaatgcaattcaacctattgtatatggcttccaatattcttagtgtggggagaatcccattaatgaaattggtttcagagctcagttgatcaaagtttcagagctcagttgctttaataacacatttctatggaagactcttggctaaattatgcagaaccaatgagtttgctgttattctgctgtctctttctgggtccttttgctcttggtgggtctgctacccttaattcttttgtattacctgcccttcagaacagatacgtaatttataattaaacttctgycacagactttgtcgatttagggaacatctctgatctctcttgctaatcatgacagaattttggagtctatttaacttcttagctggtagctctatctg

SEQ ID NO: 512279 - DNA, 255 bp, Homo sapiens
tgtccaaaacttatctttccttattcctgttttcaatccacaaaacaaaattcatttgtgtatcaggcagcctgtagtcccggattcaattcattatggaacatgagcccygcacttctgagtttctcatccgctagctggtaaatgtgaccaggcaggacagcgctggcacaaaccagtgcagggaaaaagagaggaagtgattccaaggcaaggcgagactcccagacaaaggatggagatgagagtgctttt

SEQ ID NO: 512280 - DNA, 380 bp, Homo sapiens
gacagcactggtgcttggctgctgccccggaagcaacgtcttgacaaagctaagcagtggctgataaaggcaggcgcccgggcagcatggttctttcaaatccgttcccactgcaggaaggctgccgagatccccagcattgctatgggatccaagtccctgaggaggcggcaagcaggcatgggttgtctgctggcagtcccagcccttaactgtcatggctggttaacattagggtggccacatcctccacgcctctctgtcccctttggtaaatgtcggtgatacctcctcttctggacagagaggactgagggcgagatcatggaggatcatgraggccaggcattttccaacctcagaagaaaaaatgctgtgca

SEQ ID NO: 512281 - DNA, 571 bp, Homo sapiens
tctatatttattggttatttatgggaatatatgyctgccagggaattccaagtcacaaagcttaaggcaggtgccaacctcctcttatttcattacctcagtttgatgtcagaggtagggatttttgtagaatttttagaccatagcatggattactgtgatcagcattcatataaatttagtataagaaagggcattttgatagattaaaaaatcatgaaaataggtaaaagtgatttaatgctaaaaaagataataatctggatatattgtggtttcaaacactagatatattgtctgtctgtattgtgtgcactctatgttttgtagaggtttgtaattctactgtcatagtttacaatacagaaaagtataaatctgctgctactggtgttcattcaatcgagtacctctaaggagtccacacaactgcttatagctcttaaacttgtccttattgaagattcttggtgctgctgctctctagatcaacagtaagcgttgtcatgaagcctttgggagagaaagaaatgtaattctgagcactgatgagaacagaaatgcaggaatc

SEQ ID NO: 512282 - DNA, 663 bp, Homo sapiens
ctgtcccaagctgcttcccagcagtccctgaatatcctgatgcccctgcagttaattctcaagctcacagatgactgacactctatttctgtcatcttctcaatgaactgcagcttttaagtgcaaaaaatacatccaccaagccttccacaggtgttctctctgccatttgctctgtgaaaacacggccatggcctgtcaccacaggaagctagcagagagctgctggacgtgggaccttccagactgggagcccaaaatacgcttttctaaggtgtgctgctgagacattctatgtgactaagtccccacctgcagraagataccgcagtggggaggctatttgtgcattaagtgcttgagataaaattcatctctcagggcctccatttcctatatcttggagctgccaaatggttcttattaaagttatctcttgctgcccctattcctctatcttcctagtaggggacatggtgagattttgtgacagcaaagctgagtcttagactactattcatgtgcagtgggtttaggaatatatattaatactggtcctggcatacaatcagtctggttcagaaattacaaagagcacaaatgatgctcagccactctccgctgaaaccccagtttaccatcagtaaaactggggcctagata

SEQ ID NO: 512283 - DNA, 451 bp, Homo sapiens
gggccgttactttgcaatatgactgtcagtatttcacaagcataaytgtaatgtataatgtgcttttgcaagatagacaactattaaaggttaacaaagagtattctcatgttatttaataattgtcatattactgacacattattggcatattatcacagtgcctggcacatattagggatcatggggatgttgacatattgacatgtgaatttcagaaattattaatgtttttataaattaaaaattacatttatagctaaaggcacccacctgatcccttgcctctcatttcttcaccagataatggatatctttaagctgatgcagattctggaatatattttatcccaaatatattttttgtgtaatatgtaatatataatcacaattatttaaatacatcatggtatacatatccttgtaatttgtagggttttttttcactcaa

SEQ ID NO: 512284 - DNA, 451 bp, Homo sapiens
gggccgttactttgcaatatgactgtcagtatttcacaagcataactgtaatgtataatgtgcttttgcaagatagacaactattaaaggttaacaaagagtattctcatgttatttaataattgtcatattactgacacattattggcatattatcacagtgcctggcacatattagggatcatggggatgttgacatattgacatgtgaatttcagawattattaatgtttttataaattaaaaattacatttatagctaaaggcacccacctgatcccttgcctctcatttcttcaccagataatggatatctttaagctgatgcagattctggaatatattttatcccaaatatattttttgtgtaatatgtaatatataatcacaattatttaaatacatcatggtatacatatccttgtaatttgtagggttttttttcactcaa

SEQ ID NO: 512285 - DNA, 549 bp, Homo sapiens
tgctgcatctggtatgctcagggctaagcacatgacaggaataacctcaytttgcctagcaatcctatgaaaaaggcactcttactatcccattttaacagatgcaggaaccaagatttagagtaagtcacttatccaatcaaggcacatactttagagcaagtaagaggcaaagctggggctcagtcccaggaaggctgaattctggtgcccttgttcttcaacacccgaaggccctctcagttggatacagcttaccagacaggttatgtcctgcaatgccagtgccaacgttcagtcagtccatgagcagagggcccccaacagctttgtatggtctgataattatatgctgtgccactttctgagactctctggactccagcttccccagaagcagcccaggatatccaatacaggaggctcctcagaagccatcaaggcaaatcctcttattcttatagatgggggaaactgaggcaggaagcagcagaatgactcgacaaaagtctctccaagaattagcaggagagcaatgccaggatctca

SEQ ID NO: 512286 - DNA, 549 bp, Homo sapiens
tgctgcatctggtatgctcagggctaagcacatgacaggaataacctcactttgcctagcaatcctatgaaaaaggcactcttactatcccattttaacagatgcaggaaccaagatttagagtaagtcacttatccaatcaaggcacatactttagagcaagtaagaggcaaagctggggctcagtcccaggaaggctgaattctggtgcccttgttcttcaacacccgaaggccctctcagttggatacagcttaccagacaggttatgtcctgcaatgccagtgccaacgttcagtcagtccatgagcagagggcccccaacagctttgtatggtctgataattatatgctgtgccactttctgagactctctggactccrgcttccccagaagcagcccaggatatccaatacaggaggctcctcagaagccatcaaggcaaatcctcttattcttatagatgggggaaactgaggcaggaagcagcagaatgactcgacaaaagtctctccaagaattagcaggagagcaatgccaggatctca

SEQ ID NO: 512287 - DNA, 630 bp, Homo sapiens
acagctgctgtggatggtcccattgtccaggcctagaactagtcagaagggaattttccctctcaccaccatcttctatgtgttcaagcccagttgactgggtgttcccacccatgcactctctcatttagtgacctttgctgctgcttccagccaggaatctttctttcctcacactgaaatgccaacatcagaacctgggtttagtctttgtagtagaatggcttttgtmcagtcagaccagccctgtttagaaaaagggttcttacttttttctttctcagagctcagactaactctttaggaatctgttgggtttggagaaaacttccagatagtagggttgcttaaccttgctttgctctctgtggggggttatacatagatctccaccacacttccatccttctaagtctgcttttcactctcaattccagtattgtctccatagccttgctactatgttaaatgatcatgttcatctatttatgggtttctgtattgcttctctcccctcactaaactgtgaactctgaggactttgaccatgttttgatacatggcaggcactaattaatttcaaatgaatgaatgaatgaatgaagcaaagaaacaagcttcattcattgg

SEQ ID NO: 512288 - DNA, 630 bp, Homo sapiens
acagctgctgtggatggtcccattgtccaggcctagaactagtcagaagggaattttccctctcaccaccatcttctatgtgttcaagcccagttgactgggtgttcccacccatgcactctctcatttagtgacctttgctgctgcttccagccaggaatctttctttcctcacactgaaatgccaacatcagaacctgggtttagtctttgtagtagaatggcttttgtacagtcagaccagccctgtttagaaaaagggttcttacttttttctttctcagagctcagactaactctttaggaatctgttgggtttggagaaaacttccagatagtagggttgcttaaccttgctttgctctctgtggggggttatacatagatctccaccacacttccatccttctaagtctgcttttcactctcaattccagtattgtctccatagccttgctactatgttaaatgatcatgttcatctatttatgggtttctgtattgcttctctcccckcactaaactgtgaactctgaggactttgaccatgttttgatacatggcaggcactaattaatttcaaatgaatgaatgaatgaatgaagcaaagaaacaagcttcattcattgg

SEQ ID NO: 512289 - DNA, 626 bp, Homo sapiens
ataattttctaaagaatagaaaattagagccatatagatagcgtaattaaaataataatatttgtttcagaataattttaaaaattgtaaccttaagttttatgcacattttttaaaaaatcaggattccttttcttagaattaaggaaaaagtcagtgccgttttacgataacaagaagacttggttatcattgctgataggggcagatgctacattttatctctcatttctaaactttcttactaaagtcagaatttaaaaatgaacttggccaggcatggtggctcatgcctgtaatcccagcacttcgggaggtccactcggaaggatcacctgaagccaggaattcagaaacagcgtgtacaacaaagcgagacttcgtgtctctaaaaaaatttttaaagaattagccagrtatagtggcaggtgcctgtaccccgagctacccaggaggctaaggcaggaggatcacttgagctcaggggttcaaggctgctgtgagctatgatcgtaccactgcaccccagcctgggttgacaaagcaagacccagtctctaaaggaaaaaaaacccttggctttcagtagtactctgtttattgatgttatgccaaaaggaaccagt

SEQ ID NO: 512290 - DNA, 402 bp, Homo sapiens
aagtttcgtactttcagtagagacagtgtttygccatgttggccaggctggtctcgaactcctgacctcaagggatctgcctcagcctcccaaagtgctgggattacaggcgtgagccaccgtgcccagccagctctaacttgtattaactcatttaattcacatatactatggtaaaatgatttttttttctgagatgaactccttggactgacagtaagcactataggtttactttagggtttgagtcagaagttacttccataagaaaagtcttttaagtcctgattcctggcatcatgctattgtggctatagtcaacccagaattacattccttccagaatgaattgaagaatctcattaagttcaaaattcacttaaatactgacggaccctgcaa

SEQ ID NO: 512291 - DNA, 568 bp, Homo sapiens
acagtttctttttcacacgcttctatccagagataccagacaccgaaaggagcatttccaagaagccgcctcttaggaaagcccatagcatggtgattacaagcccaaccatggcctcagactgacctgcatttgcgtcccagctctgtcactcactggctgtgtgaccttgactaatttaactgagagcctctgtttcctgtcttataagacagggctaaaaataatactttcctcttatggaaattgggaaaattaaatgtgataacaaacataaaacacataaaatagtacctagcacatgataagcatttaacttaggctctctacccatatcattgtttgtcagaggtcacattctcttggcaagtcccactgcactctggcaacccatcygggggctgaggaatcaaacaatatgcggtttctatggaattcctggcgctagaaggagctcagaagacgagctgatgggttgtcttccatttctggtttgtcaaataaaaaaaattctggatgtggtaaaagagagaccttcattcgaaggaattattgccagggcattgcg

SEQ ID NO: 512292 - DNA, 568 bp, Homo sapiens
acagtttctttttcacacgcttctatccagagataccagacaccgaaaggagcatttccaagaagccgcctcttaggaaagcccatagcatggtgattacaagcccaaccatggcctcagactgacctgcatttgcgtcccagctctgtcactcactggctgtgtgaccttgactaatttaactgagagcctctgtttcctgtcttataagacagggctaaaaataatactttcctcttatggaaattgggaaaattaaatgtgataacaaacataaaacacataaaatagtacctagcacatgataagcatttaacttaggctctctacccatatcattgtttgtcagaggtcacattctcttggcaagtcccactgcactctggcaacccatccgggggctgaggaatcaaacaatatgyggtttctatggaattcctggcgctagaaggagctcagaagacgagctgatgggttgtcttccatttctggtttgtcaaataaaaaaaattctggatgtggtaaaagagagaccttcattcgaaggaattattgccagggcattgcg

SEQ ID NO: 512293 - DNA, 519 bp, Homo sapiens
aggatgatcaaataggctataaaaccaaattcacaaacatttctggcacattaggaaataacttctgagttatataaaaaccaaaaccagaaacaaaaacaaaagcacagaatccacgggaaaaaagaaacaaaagagtcagcgaaggtaaagttccattgccacttggaatttgctgcagaagccaagagaggatgtttgcttccatgcctacacacagattggctctggaaggtgcatttacagggatatcttggtggaacctctgatttgaataaacttatgcaaasatttctttaactcattggctaaaggaagactgtaagactggttcattaactctataaaaaataaaataaaaatgaatgcctaaactaagatctccttcaaagaaggaacattcccagctttgcaaagttcaacctcagagcaggctgttcttcctctgattacttcttaatgaaagctgtactggctcagagatctacttccatctgtactggccagataccacaagcc

SEQ ID NO: 512294 - DNA, 559 bp, Homo sapiens
atattaaaaactatcatggctctctttctcctttcctctcttgttaagaaaacatgagctacttcacctaaaaggtatttctattttgcaaaaaaaaaaaaatttacaatccttcacatccaatttgtatttcataaaataatttcttctttcttctttcatcaaacaattaatgaatacctattacataaatgctatgcctgtcctcatggtgtttacagtctagtgctaatcatgggcataaaaaggggcaacaggtaatttgagacgaagaggagtgttaaaggagacattaggaaagtacatttgacctgaattcacagccagaaaaggcttcctggaagagttggcaatctgaaaagagaatagcagttagccagatgagaaggtgagaaaaatagcttctagacaaaaagagtagcatgaacagtataygggagagtcaggaggagaaaagggagaatgagagaatgagagagtgaatagagcatctaaggaagtgaaagaatacaatgaggaatgaagctagagtggaaaccagtggcctcaatacacaaga

SEQ ID NO: 512295 - DNA, 549 bp, Homo sapiens
cttattgctgaaggcaaagtattacagagaagaatctgaacaattaggcctcgtattatacatatattatatatatatacacacacacacacacacacaactgtatataaagcctaatatatataaactctaagtagstatatagtttatatataaactaaagctatatagtttatatatagatataaactaaagctatatagtttatatatagatataaactatatagctggtctcgaactatagtttatatatatatatataaactctatagagtttatatattaggctttatatacagtatgtgtatatgtattatatatgtatatatataatatgaggcctaattgttcagattctatatagtttatatatataatatactctctctatatgtattatatataatatactctatatgtattatatataatatataataaaccctatacagtttatatataatatataatatatataatatatgatatatgtatttgtgtatatataatatatacacaaactatatatatagatatagtttatata

SEQ ID NO: 512296 - DNA, 499 bp, Homo sapiens
caggtgtgaagaagtaaagctgccaggtgctgctccctcctgctcaccaagcaatggaaatgaaaaagctgttggrcatcattccttcccactcgctgaactacaaaagcctcaatatttcttgggagtccagaccttgggactccccaggcaagagctataacagcccttggggctttgcaggtgcttgcatctctgagttttcaggtgccatcacattcccatctagatgctggtgcccaatgcagaagctgctcatggcatgcccgttccagccgcgggttgagtgtggagctgtggtgggtgcgagatcagggccagggcatgagctgaatgcagcctgccggttcaagctggcagagtgagcccagcaggcctgaatgaggccctgggcagaggtcacggtggctgcagagatttctggctggtgaagtggcaccagtggaatcctgtaacataattaggtgtttgctgatgtgacctggtatggtgtttctca

SEQ ID NO: 512297 - DNA, 631 bp, Homo sapiens
atgtaaactgaatttgttgaacaccagaaatctgttgtgtaaaccataacattttgttgctgaccatctgtggttattaagccagctggtaactggttagtaaatgcctcttctgtaagctcttcacttagtccatctgtagctgtgactgctccaccaactcccttttctcctttcatagcctctctgaatttttgaagatataatttcagaggttccacgtaactgtctaggcctaaggtagacatggtgatatggtttggctgtatccccaccaaatctcaacttgaattktatctcccagaattcccacttgttgtgggagggacttaagtgggggtaattgaatcatgggggctggtctttcctgtgctgttctcatgatagtgaataagtctcgtgagatgtgatgggtttatcaggggtttctgcttttgcttcttcctcattttctctcatgtaagaagtgcctttcgcctcccaccatgattctgaagcctccccagccatgtgtaactatacgtccaagtaaacctttttcttcccagtctcgggtatacctttatcagcagcatgaaaacagactaatacacatggcaaacagaatgtcttctccattgattgttttctg

SEQ ID NO: 512298 - DNA, 631 bp, Homo sapiens
atgtaaactgaatttgttgaacaccagaaatctgttgtgtaaaccataacattttgttgctgaccatctgtggttattaagccagctggtaactggttagtaaatgcctcttctgtaagctcttcacttagtccatctgtagctgtgactgctccaccaactcccttttctcctttcatagcctctctgaatttttgaagatataatttcagaggttccacgtaactgtctaggcctaaggtagacatggtgatatggtttggctgtatccccaccaaatctcaacttgaattgtatctcccagaattcccacttgttgtgggagggacttaagtgggggtaattgaatcatgggggctggtctttcctgtgctgttctcatgatagtgaataagtctcgtgagatgtgatgggtttatcaggggtttctgcttttgcttcttcctcattttctctcatgtaagaagtgcctttcgcctcccaccatgattctgaagcctccccagccatgtgtaactatacgtccaagtaaacctttttcttcccagtctsgggtatacctttatcagcagcatgaaaacagactaatacacatggcaaacagaatgtcttctccattgattgttttctg

SEQ ID NO: 512299 - DNA, 306 bp, Homo sapiens
aaccagcaaagacatttaccagagtctgggatggtgggcttctccccccaccactaacacctcagacgcttgggcagggatgggggtgttggatgcctggatctctgtaagggccagaagtgagggcccagaggtctgggtcccccagggggcasgggccaaaggtccagaccccccaagtccagtgagggcagtagggattgggttgggggaagataactgggggaaggccagggcccctaggctacaaaaccaggtcttgtggggagggggtcagtttctgggaagggtggggggggcagggaa

SEQ ID NO: 512300 - DNA, 497 bp, Homo sapiens
tgcacctgtagtcccagctactcgggaggctgaggtgggaggatcacttgagcccaggttggagtgcaccattgcactccagcctgggtgacagagtgagaccctgtccctaattcaatgaatcaatcaataaaataaaaaataaaaataaaaataaaacaagctagcccattactgtttcacaaatgttgccagaagacacaagactcctgggccagagacaagggactttattactcaccagccagcagggagcatgagcatcartgccttggtattcattctcctggactccaaggtcccacgggggctggtgcagatgtctgtaatcccgtgggttctgaagaagataaagagctcctgggtggagcttgattttaaaaagctcttgctaaagaggctcccactcaaatgcggccatctgtctggtcacttgctgcagccacgttagtgaaatttccacacgtgagatgtggcgtcctcaagatcccaaaagg

SEQ ID NO: 512301 - DNA, 619 bp, Homo sapiens
aaagtctgcagcatttaattaagcgaagtaggccgggcgcggtggctcacacctgcaatcccagcactttgggaggctgaggcaggcgcatcatgaggtcaggagttcatgaccagtctggcccacatggtgaaaccctgtctctactaaaaatacaaaaaattagccgggcgtggtggcagacacctgtcatcccagctactcaggagactggggcaggagaattgcttgaacccaggagacggaggttgcagtgagctgagaccgtgccattgcactgcagcctgggcaaagsgagactgagagcgagacttggactcaaaaaaaaaaaaaaaaaaattaagcacagatttacgggccagtgactccattcccaagcataggaaagttctcacacaaaccctagaaacggatggttcatcgtgatcatgtttggatcacgtttgtgattacaagaagctgtctcattatttagggaatcaaatataaaatgtggatcttaaatgcatgctatggaggacggtgcagcagtcaaggacaacaaaccaagtctacctgagtaaccgacggccacactaaatcaccgtaacaactctcaccactgtggggtgctgagccc

SEQ ID NO: 512302 - DNA, 460 bp, Homo sapiens
ttttttttttttttatagagatggggtttcgccatattgcccaatctggtctcaaactcctgagcccaagccttccacccacctcggcctcccaaagtgttgggattacaggcgtgagccaccacaccctgcagcttctccttttttctcgggtctcaacttaagcacttcctttcctgggaccatttccctcatcattctgagaacatcccacctcagctcctttytgagtcattatccatcgttatcgtcttcacagaactattgtccatctgaaataatctcagttgtgtttatttttttaatttacttatgcatctattagctgaggtccccgttagactatcagcatcatgagaacaaagaacaggccagagaaggcacccctggatttttagcacccaggacagtgcctgtggtgttgtcgaatgatcttgcctttagaggctagatccaacag

SEQ ID NO: 512303 - DNA, 442 bp, Homo sapiens
gaagtaaattgaagtcaagaacaaaatgctgatgaaaatcaagcctgccacttagtgtaacatttgtgggcatacaagcttgcactcagtggctacaataaatcattcgactttctgcccagatggagaagacayggcagtccttcctaaagggggtaagagaaattggcaacactaggtttctgcctggaggatcaaaattcttaccaaagaaaggaagtgtgtgtgtgtttgggggtggagggatcctaatttcatctttgctcttctctgagttttctaaaaggttcacagactacttttgtatatggttctcccaggatagactttttttttttttttacaatatgctaaattctttaaaacaccagatatctgaggcgatggaagaccccttgaggagtgggttcccaattcattagttggtgtgaatacttccagc

SEQ ID NO: 512304 - DNA, 391 bp, Homo sapiens
ttgaagtcaagaacaaaatgctgatgaaaatcaagcctgccacttagtgtaacatttgtgggcatacaagcttgcactcagtggctacaataaatcattcgactttctgcccagatggagaagacacggcrgtccttcctaaagggggtaagagaaattggcaacactaggtttctgcctggaggatcaaaattcttaccaaagaaaggaagtgtgtgtgtgtttgggggtggagggatcctaatttcatctttgctcttctctgagttttctaaaaggttcacagactacttttgtatatggttctcccaggatagactttttttttttttttacaatatgctaaattctttaaaacaccagatatctgaggcgatggaagaccccttga

SEQ ID NO: 512305 - DNA, 442 bp, Homo sapiens
gaagtaaattgaagtcaagaacaaaatgctgatgaaaatcaagcctgccacttagtgtaacatttgtgggcatacaagcttgcactcagtggctacaataaatcattcgactttctgcccagatggagaagacacggcagtccttcctaaagggkgtaagagaaattggcaacactaggtttctgcctggaggatcaaaattcttaccaaagaaaggaagtgtgtgtgtgtttgggggtggagggatcctaatttcatctttgctcttctctgagttttctaaaaggttcacagactacttttgtatatggttctcccaggatagactttttttttttttttacaatatgctaaattctttaaaacaccagatatctgaggcgatggaagaccccttgaggagtgggttcccaattcattagttggtgtgaatacttccagc

SEQ ID NO: 512306 - DNA, 442 bp, Homo sapiens
gaagtaaattgaagtcaagaacaaaatgctgatgaaaatcaagcctgccacttagtgtaacatttgtgggcatacaagcttgcactcagtggctacaataaatcattcgactttctgcccagatggagaagacacggcagtccttcctaaagggggtaagagaaattggcaacactaggtttctgcctggaggatcaaaattcttaccaaagaaaggaagtgtgtgtgtgtttgggggtggagggrtcctaatttcatctttgctcttctctgagttttctaaaaggttcacagactacttttgtatatggttctcccaggatagactttttttttttttttacaatatgctaaattctttaaaacaccagatatctgaggcgatggaagaccccttgaggagtgggttcccaattcattagttggtgtgaatacttccagc

SEQ ID NO: 512307 - DNA, 550 bp, Homo sapiens
ggttgccacagagggatgtggggccaggaccacaccaacttctgttgcttgtttcaagagaagtcagacatctggatttgaggtagaatctctcaatttttaaatgttgactctttagaaacaccatgcagggcaacagaaaacacatcttcattccagtttgcaaacttcatccgagaactggttataagcggccctctctcattatctgccaaaagtactttggactctgttgttttcttctctcatgaacctcaagtctcatcccagtccttacgtccagggtgtttcttcccggcgctgccaagcccacctcgccttcttcctctgcatcccgctgctctcctcactttgagtcaggaaagctgctccctgcctcgtccacccgcgttggtcctaggcctcactgtgctgttcctcttatcccccatatgtcctcctcttctgtctgctgrcacaaatcccacccacccttcaaccccagcccaattccagcctcttctgaaaagtcctcttccattgaattctaaattcattttgtccttattat

SEQ ID NO: 512308 - DNA, 581 bp, Homo sapiens
catggtgcctctgcctgagggagaggcatcagggaatgtctctctgaggacggtgcatttgggtggaaactaaatgaagagaaagagcaagatctacaagctttggtggagtgcttggcaggcagcaggaagagcagatacacggctatagaggcaggagcctcggaggtccctgaatgttctaaaatcagagatttgcgtacmaggcattacaaaccatattctgtggttgttctgcgtggtggatgtcatctcagatcttcagttgtcctgggtctgattctggtgtccttccagaggtttagtttctatcccaagtgccttactattgattaaatatcacccctcaacccctctttgcttcaggcattgtgtttccaccaagtaaatttcaacctggggtggccctgtccagcccctgcagttacctgctgttcttgaccagttaagacacaggcagtaggggtaggcacggtggctcacacctgtaatcctagtgctttgggagaccaaggtaggaggatcacttgaagacaggagtttgagaccagcctggccaagaaagcgagaccctgtctcta

SEQ ID NO: 512309 - DNA, 605 bp, Homo sapiens
ttctaacatggtataaaaataaaaaaatataaaaaccttaaagaaacctgaatgtgaatataaaagaggacaaacttattctagagagagatgatrtatgatgttagtttagcaatttaaattcctaaacaatttaaagctgggtttaaaatttccagcttatactaaggaagatatatacatggacctatatgtgcaaatacatacatatctacaggagacagactgtttaagttagccttatttttttcattgttctttaagtgtcctaattgacttcaatacatattaattactattgaaatttaaataaaataaaaagggaagaatatttctgcttttgaaaaattatacattattcaataaagtagatattttataatactttgacaggttttattgtttgtgtatcacaaaacatgtaaatgtgtaaataataggaaattattaggttctaaatattaaatatagttaaaagttatataattttgcagtgtatattcagtttgaggcaaatgtttttaaatgaatactaacattactagtcatttacttggttattttgagcaagggaaaagcaggtcattgttataagttaacagctc

SEQ ID NO: 512310 - DNA, 605 bp, Homo sapiens
ttctaacatggtataaaaataaaaaaatataaaaaccttaaagaaacctgaatgtgaatataaaagaggacaaacttattctagagagagatgatatatgatgttagtttagcaatttaaattcctaaacaatttaaagctgggtttaaaatttccagcttatactaaggaagatatatacatggacctatatgtgcaaatacatacatatctacaggagacagactgtttaagttagccttatttttttcattgttctttaagtgtcctaattgacttcaatacatattaattactattgaaatttaaataaaataaaaagggaagaatatttctgcttttgaaaaattatacattattcaataaagtagatattttataatactttgacaggttttattgtttgtgtatcacaaaacatgtaaatgkgtaaataataggaaattattaggttctaaatattaaatatagttaaaagttatataattttgcagtgtatattcagtttgaggcaaatgtttttaaatgaatactaacattactagtcatttacttggttattttgagcaagggaaaagcaggtcattgttataagttaacagctc

SEQ ID NO: 512311 - DNA, 588 bp, Homo sapiens
ttcttggtatcctttgatacatttacatatattttccctcaatatttgagttggtgttattttcattatttccctatattctcttctctgctttctggttttgtattttactgcccttttacaggtgtctaatctatatagccaaggagtcaagctactgagaatttccttgaagcaggaaatctgtctacgagctgaaaaaatgttcaatgtcctctgtaccagaagacactcacggttcattattgatatgagtaccggcaaatattcatgttcatcacagaaaagatgcaataattcttgcttcaaacactatctwcactatctctacatttataattatttcagtgtccatcatccttaagtagcatgaaaaagtcatcttccatgtcttacgtaacgtcagaaagcacacagtctttaacttgatgcttcaaaggttatcagtgtaattctacttgtgactgtgaaaaaaaaaaaagaaaaaatgattaagatgataactttgtgtaaatgtagtcaataattttctaagaccacttgtttaatgtaacctaaaaatggtgctcctgtcatgtttttgtcata

SEQ ID NO: 512312 - DNA, 588 bp, Homo sapiens
ttcttggtatcctttgatacatttacatatattttccctcaatatttgagttggtgttattttcattatttccctatattctcttctctgctttctggttttgtattttactgcccttttacaggtgtctaatctatatagccaaggagtcaagctactgagaatttccttgaagcaggaaatctgtctacgagctgaaaaaatgttcaatgtcctctgtaccagaagacactcacggttcattattgatatgagtaccggcaaatattcatgttcatcacagaaaagatgcaataattcttgcttcaaacactatctacactatctctacatttataattatttcagtgtccatcatccttaagtagcatgaaaaagtcatcttccatgtcttacgtaacrtcagaaagcacacagtctttaacttgatgcttcaaaggttatcagtgtaattctacttgtgactgtgaaaaaaaaaaaagaaaaaatgattaagatgataactttgtgtaaatgtagtcaataattttctaagaccacttgtttaatgtaacctaaaaatggtgctcctgtcatgtttttgtcata

SEQ ID NO: 512313 - DNA, 588 bp, Homo sapiens
ttcttggtatcctttgatacatttacatatattttccctcaatatttgagttggtgttattttcattatttccctatattctcttctctgctttctggttttgtattttactgcccttttacaggtgtctaatctatatagccaaggagtcaagctactgagaatttccttgaagcaggaaatctgtctacgagctgaaaaaatgttcaatgtcctctgtaccagaagacactcacggttcattattgatatgagtaccggcaaatattcatgttcatcacagaaaagatgcaataattcttgcttcaaacactatctacactatctctacatttataattatttcagtgtccatcatccttaagtagcatgaaaaagtcatcttccatgtcttacgtaacgtcagaaagcacacagtctttaacttgatgcttcaaagkttatcagtgtaattctacttgtgactgtgaaaaaaaaaaaagaaaaaatgattaagatgataactttgtgtaaatgtagtcaataattttctaagaccacttgtttaatgtaacctaaaaatggtgctcctgtcatgtttttgtcata

SEQ ID NO: 512314 - DNA, 500 bp, Homo sapiens
tcaggaataaagaaaatttaataggcacaaactgcaaatctagcagtccaatgacaggaatacggtrggttttttatcagataaacatgccaactactcccttgtatgctatattttgttatgcttattctacatggacaggttgtcctcaaagagtgctttttgagataagatgtatgaaatcacgcaagagactgggtgctgtggctcatgcctgtaatcctagcacttcaggaggctaaggcgggtggatcaccagaggtcaggagtttgagaccagcctggccaacatggtgaaaccccatctctactaaaaataataataaaaaaaaatagccaggtgtggttgcaggtgcctataatcccagctactcaggaggatgaggcaggagaatcctttgaaccatgggggcagaggttgcagtgagctgagattgcaccactgcactccagcctgggcgacagcatgagactctgtcttgaaaaaaaaaaaaatcatg

SEQ ID NO: 512315 - DNA, 500 bp, Homo sapiens
tcaggaataaagaaaatttaataggcacaaactgcaaatctagcagtccaatgacaggaatacggtaggttttttatcagataaacatgccaactactcccttgtatgctatattttgttatgcttattctacatggacaggttgtcctcaaagagtgctttttgagataagatgtatgaaatcacgcaagagactgggtgctgtgrctcatgcctgtaatcctagcacttcaggaggctaaggcgggtggatcaccagaggtcaggagtttgagaccagcctggccaacatggtgaaaccccatctctactaaaaataataataaaaaaaaatagccaggtgtggttgcaggtgcctataatcccagctactcaggaggatgaggcaggagaatcctttgaaccatgggggcagaggttgcagtgagctgagattgcaccactgcactccagcctgggcgacagcatgagactctgtcttgaaaaaaaaaaaaatcatg

SEQ ID NO: 512316 - DNA, 568 bp, Homo sapiens
ccaggcagggagagccactgcccacttcagctgggcaggtgaggatctcccttcgggttccaaatcccctttatcaaaaaatccayggcctactgctctcacccattccaggagccagaagtcctacacaaagtctaatctcaatccttcttgctgcagctatccatttctttttgtctgtcagaggagatacaagtccttttaccataaagaataactttttagggactgaagctggttctttgttttccttttcctagactccaaatattagccccttgcttttgtccacaatattagcctcctctcctatgacctggcagcccagccctggggtcttaccgagttggctcccttggaatccagtggtggtatatgggttgagggttcttttgtgctgggttccttactgcctctctcgtgagttttagggatgcattctgcagtttctggggagggaacataggggtgggaggaagaggtggcattcataaaggtgttggggagggaactgcttctcctcactgcacccataccccagtggcccctgagagggccccaggaccaa

SEQ ID NO: 512317 - DNA, 360 bp, Homo sapiens
gattagcaacctcagttcaatctgcaaccttaattctctgttgccagtgtaacccaacacactyacaggttctgtgatttccgacgtggacctctttgtggggcattagttattctgctcccacacatctcccatgggattagccaccactcacatccccccttaagccataggaatcagtcaccaaaggccttgaaaccattcaggtcagcaccaaggtctattccttgtcctgattcctcttgtagaaaggtgggcaaccaagatccttgggttctgtctctctgttgaccacagtcacttccaggaccaagccaaagctttcagatatatttgtcatccagaacccctaccctgttt

SEQ ID NO: 512318 - DNA, 360 bp, Homo sapiens
gattagcaacctcagttcaatctgcaaccttaattctctgttgccagtgtaacccaacacacttacaggttctgtgatttccgacrtggacctctttgtggggcattagttattctgctcccacacatctcccatgggattagccaccactcacatccccccttaagccataggaatcagtcaccaaaggccttgaaaccattcaggtcagcaccaaggtctattccttgtcctgattcctcttgtagaaaggtgggcaaccaagatccttgggttctgtctctctgttgaccacagtcacttccaggaccaagccaaagctttcagatatatttgtcatccagaacccctaccctgttt

SEQ ID NO: 512319 - DNA, 510 bp, Homo sapiens
tttagcaaggtctctaaagccctccttgaccaggccaactactatattctgactctgtcttgtcacaactccccctctctcactatgctccagccactctggtatctttgttgttccttgaacactcttagcacattcstacctcagtgacttgcacttgctgttctggaatggtctttctcctagctgtctgcatggttcccacattacgttagatctccagtcaaacgtcaccttatctgtgagaccttccccaccaccctgccctcttttttctccagaaggcttatcactacctagtgtgttttgtatatttgatgacatgttccgtttattgatttctccttgcatttgaatgtaaaggcaacaagctctcattttcaaatattggaggactataatgtttattaagtttttttttgaaaaagttatttgaagataagaccgagctaatgcagagttgaatggaaaagctgtagcaaaataattaatacaaaatcagtgcaggca

SEQ ID NO: 512320 - DNA, 557 bp, Homo sapiens
ttgcaagtattattttggggcttgggaaagttatccagttttgaattgacttggagtctagaagattcctggacaaaatggtttttcccattgtcaccataaaattggatacgtgtataaaaagtgggtggttcactaacattaaaaacatttatttttgggctgggcatggcagttcatgcctgtcatcccagcactttgagaggccaaggtgggtgaatcacatgagcccaggagctcaagaccagactgggcaacatggcaaaaccccgtctctacaaaaaacacaaaaataggctgggcacgataccactgcactccagcctgggcaacagagcgagagactccatctcaaaaacaaaaacaaaaacaaaaaaacccacaaaaattggctgggcgtggtggggtgtgcctatagtcccagctactygggaggttgaagtgggaggattgcttgagcccaggaggttggggctgcgctgcattccagcgcgggcaacagagccagaccctgtctcaaaaagaagaaaaataattcttttttgtcctatggctgg

SEQ ID NO: 512321 - DNA, 636 bp, Homo sapiens
ctgaggctgtcctgacgctctcgttggagggagagaaggaagagtgtctcacagccctggatcatcagtctggtccagatgctcagtcctgatccccttgggtattccacttaccatatgttggtgcttccagcctctggtcctaactcaggggcatcaccctccaggaattgcccatcggcctctgcagtgttgactttgccctttttggatgctgactctgcatttgtgtgagggtgggagatccaccttggatctcagctttggcttttggatgtgaggataaattcagggtctttttgtctttaaaggaaaaaaggctgcattcttcctaccaatccgtcagagctttacttaggaacaaagtgtcctaagcttccgagaaattccctatccctgggaagcaaccccagggttctctgtaagtgacaggaatggttgctctggaggaattctgagttgctgctaactcccgacagcctgccygaccagggcccctcgcctcctgtcatcctgaacttgattcaggttttgtccttgctaaggaagccaaaagaaagggtcttactccatctttctgcccttggcttcctcattttccttctcctgtgagatctcgaacaagcgtcttgaatg

SEQ ID NO: 512322 - DNA, 607 bp, Homo sapiens
aactgtgccttgccacgtccctttccaattccagccgtgacaggcagtctcttggctccccatgttataagttgtggacatcttcagtgttgcaggccatatggtctctgtcagaacaaaactctgcccttccagacagcatccataggcagtatgtaaacacatgagcatggctgtgcgccaataaaactttatttacaagaaagaaatacgggcccacccacccttcgggctccttctccacctcttgtcctctgtccagggaaccattactgtcaccagatccaggttgctacccttgggaatctcttggcctcatccttaggattctatttccaatgtatgaaaagcagatttctgattaatgtgtagtaataggaagcgctggaamtatccaggcttatctctccttgccagtgacttttaaaacggttgcttctatccaattctgtcggagagaggcagaggccccatgggacatgaagatggagacccagctcctgctggcccatagtataggattccttgtctgggactgtgtgtttgaaacatcctttatatacaaactccagcctccttcagcccgtgcattgcaagccaggggtca

SEQ ID NO: 512323 - DNA, 535 bp, Homo sapiens
tggtgaggttgagggtattttcactttggggaaacattgccttccacatcactgttcatctattaaaatgctttatgtactatatctgggcacctaatagaaaaaaaaaagccattttgctcttcctgtaagtttttcagcaagaaagggccagaaaatcactttggttagacattagagcaacttcccttagatcgagcagggataaggtatcccatagctcctaaaggtagcctcccttgtccaggtagcctggttgtccrggggaaggtatttaatcaaacgctctgggttctgagagcgatgatggtgtggatcagcgagatgtcagagaagagtggccagcgtggtctctaagaccttggaggacctgtttttgtacagcgccaccttgtggccatgagaagcaatggcagtggaggacacagcgccaactttctgtgggataacaaacttcagcttattagacaattcaagggaaagatgaggctcctagagggagactctagacttcccatgaataattcacgtaatg

SEQ ID NO: 512324 - DNA, 485 bp, Homo sapiens
taattctgggtctgtttattaaacatagtttattaaacatataaacatcaataggtttattaaacatataaacatccaatgcctggtcttcctgaccccatgattatagttgcccctcatgaagaatttcaccattttcttactctttcatcagggtgctcctagatttaagamgagccttggtttttatggcagaaagttgctatggagatacagtgtgcatccgtcttcagaaatgcacagaaaaagcagcaggagctacaaacctttaaaaaaagtccttcagggatattcaccactaaaattggaggaggggagggggagaatgaatagctgtgcttgaactcttgcaaaactgaattcaagtttgtgggtcaaatcctgggctgcagcacgttccactctgggcatgggggagcactcaattaggctgcaggagacctggctcagccatgctgactcagttcactgtgtgacctcagaca

SEQ ID NO: 512325 - DNA, 606 bp, Homo sapiens
tgggtactggcagagccagaagttaattctgggtctgtttattaaacatagtttattaaacatataaacatcaataggtttattaaacatataaacatccaatgcctggtcttcctgaccccatgattatagttgcccctcatgaagaatttcaccattttcttactctttcatcagggtgctcctagatttaagaagagccttggtttttatggcagaaagttgctatggagatacagtgtgcatccgtcttcagaaatgcacagaaaaagcagcaggagctacaaacctttaaaaaaagtccytcagggatattcaccactaaaattggaggaggggagggggagaatgaatagctgtgcttgaactcttgcaaaactgaattcaagtttgtgggtcaaatcctgggctgcagcacgttccactctgggcatgggggagcactcaattaggctgcaggagacctggctcagccatgctgactcagttcactgtgtgacctcagacaaatcctttcccctgttctgggcctcagtttgtctacctataaaatgaggactttgaaggagggaatccaaccagctcccacaatactcttcttttccc

SEQ ID NO: 512326 - DNA, 661 bp, Homo sapiens
agtggtaatcttccaggagcacattcataaagagcaaaaatacagcattttattgagtctaaaccaccatcaaatctaagatatgccactaaaaagaaaaactaaacaatgaaaagaattttttatttaaaaaatttaacataacaaaataaaaacactgtcaattaaaataagatggttctttcttatcacttagaatttttattttgtaaaaatattttaggccaggtgcagtggctcatgcttgkaatcccagcattttgggaggctgaggcaagaggatcacttgaggccaggaatgtgagaccagcttgggcaacacagtgagacccccatctctacaaaaattaaaatttttttaaaaattaaaaaatatatatattatttcctaatttttaagaaaagctccttttttacctacttaaataattttttaatattccatttatatctatatattctgttcaaaccaaaaggaaaacacaggtaaaatacattggttaaggtattcctcaaacttcttcacattcaaagcccaactcttcagaatcactcttccactcagagtcaacaatgtcctgtggaacatttcttaagaggatgctcctctgttgtctccaagatttcttcccagctgcagacccaagtctgaaagttttta

SEQ ID NO: 512327 - DNA, 476 bp, Homo sapiens
ggcatctccaactcaatatgcttaaaacataactcctcaccttctcattatgaatttcttttcttcctgttctcctggtacatttaaggcatcaccttccactcgtgattcctgatattcctgccctcccaccccttacttataatccatcacaccaagttctgttgattcttctgtttagatatctttccaatgaatgtcttcaccccttctccaccacygctgttctccccacaatcattgccatagcctcatcttagctccttgttccttgtgagtgccatttttctcccttgaaagcaaatgcaattattcccttcctcaaaatccttccatggattcctatttccgggcagataaagcccaaacttcctaacatggcttataaggcatctgaaagatctggcttctacttccctccccaacccccctcctccctttctctgtcttgcctcccattcgaatatggcccagct

SEQ ID NO: 512328 - DNA, 630 bp, Homo sapiens
ctgggactacaggcacgagccacctggttaatttttctatttttagtagagccggggtttcactatgttgaccagactggtctcgaactcctgacctcaagtgacccacccacctcggcttcccaaagtgctgggattacaggagtgagccactgcgcctggccttgtatatttagtttagaacaatgcctggcacacagtaagaaaacaaaaaatgttacctacaaaaaagaaaaargaatcctacctctgagtgcagtctcacctgaattctttccctcccacccccacctctgggtttgttaagtcattctcccctcccacaggatctgcaccactgttcctcctttatcacactcacttgtcacacaagtttttaacctttgggcagctataaattcctttgacaatctaaggaaagctacaccatccccaggaaaacacacatatgcacgcacacacacactcttaggtacaattctggggtgcctatagaactctaacactaacctgcctttttagatccctgagttaaatggacattaatgtcaaagactccttattcctttggagcagcaaacctcaacaggtcacaggagattcccagagcagatccttactgcaaggatc

SEQ ID NO: 512329 - DNA, 630 bp, Homo sapiens
ctgggactacaggcacgagccacctggttaatttttctatttttagtagagccggggtttcactatgttgaccagactggtctcgaactcctgacctcaagtgacccacccacctcggcttcccaaagtgctgggattacaggagtgagccactgcgcctggccttgtatatttagtttagaacaatgcctggcacacagtaagaaaacaaaaaatgttacctacaaaaaagaaaaaggaatcctacctctgagtgcagtctcacctgaattctttccctcccacccccacctctgggtttgttaagtcattctcccctcccacaggatctgcaccactgttcctcctttatcacactcacttgtcacacaagtttttaacctttgggcagctataaattcctttgacaatctaaggaaagctacaccatccccaggaaaacacacatatgcacgcacacacacactcttaggtacaattctggggtgcctatagaaytctaacactaacctgcctttttagatccctgagttaaatggacattaatgtcaaagactccttattcctttggagcagcaaacctcaacaggtcacaggagattcccagagcagatccttactgcaaggatc

SEQ ID NO: 512330 - DNA, 444 bp, Homo sapiens
gcgtccccgggccactcccccaggtttccccttcgcgtccccgctgggtcgacggtcgggttcgcgcgcctgtccttcctgttagtcagcttactcatctgtggcccccagagtggcttgggtcaacgtgtaatagctaggggtggccgggtgacctgacctcccctcttcctggcccgggcgmcctggtggagtgggggtccaagggcaccgtgggcctcgccaccataggctctcactaaatctccgttgcgggactcagggttgtgcgttttctgtaaagctaggttttttggtgcccagatgttttgcaaacaagctcctatgctaaatactagccagcgacagctaaccttttcgccggtttcttccttttttggaggcagcatgccgtgggaagcacgagttgggaaaagatgggaagggaacttgtgccagtttcgc

SEQ ID NO: 512331 - DNA, 486 bp, Homo sapiens
cctcgggctgccgcctgcggggagcagccccggagccagcaggcgtccccgggccactcccccaggtttccccttcgcgtccccgctgggtcgacggtcgggttcgcgcgcctgtccttcctgttagtcagcttactcatctgtggcccccagagtggcttgggtcaacgtgtaatagctaggggtggccgggtgacctgacctcccctcttcctggcccgggcgacctggtggagtgggggtccaagggcaccgtgggcctcgccaccataggckctcactaaatctccgttgcgggactcagggttgtgcgttttctgtaaagctaggttttttggtgcccagatgttttgcaaacaagctcctatgctaaatactagccagcgacagctaaccttttcgccggtttcttccttttttggaggcagcatgccgtgggaagcacgagttgggaaaagatgggaagggaacttgtgccagtttcgc

SEQ ID NO: 512332 - DNA, 670 bp, Homo sapiens
ttattaccagatctgcaaaatgtacacacaggcatattattcctgggtctttcactctatttcaacagaaaaaaaaaaaaaatggagagagaaaccaaacactgatcccttttgaagtatgaggttttccataggaatttgcagtgattttttaatatttcagcatgaatataagaggggagaagaagaacataagcataattagactagaatttggacaatgttaacttacagtwgatgggtagggagggtccattcagaaattatttttggttgtcattgaaataaatactacatctgaataagatgctgagcaaagctttaggctatgtattggttattcatcttcatcccacccaacttgcactaatcagaaacttccttgggagttcctttctcctgtaagtgagggtgcttcctacttgaagacacaattaaaaatggaacaactaaagagactgttagcaaggatgtggagaaaacagaactctcatccattgctagtgggcatgtacgtcagtctaacacagttagaaaactggtaatatctactaaagccaatgatacacctactctacaatgcagtaattccactcttaggtatatatatagccaagaaaaatgaagggttatgtccaccaaaggacacgttctacaagaatgatcaaag

SEQ ID NO: 512333 - DNA, 458 bp, Homo sapiens
tgcatccatgttgctgtaaaggacatactttcattcttttttatggctgtgtagcattccatggtacatatgtaccacattttctttatccaayccatgattgatgggcacttgtgttggttccacatctctgctattgtgaatagcgctgtgacgaacatatgaatgtatgtgtctttttggtaaaacaacctattttctcttgggtatatacccagaaatgcgaatgatgggttgaatggcagttctatttttagtcctttgtgaaatctagtcctttgagttaatttgaaccttataatgatagaagttgaaaaggagagaatgagaactaacattcattaacattttactatttatcatcttaattttcatcttaactctttgaggtgggaggtatttgtatagagtaaactgtgtctcagagaaattatagtattttcccaaaatcacacagt

SEQ ID NO: 512334 - DNA, 576 bp, Homo sapiens
ttatggatgaatcttagcaaactaggagtagttttttgtttttgtttttgtttttttgttttgagatggagtctcgctgtgtcgccaggctggagtgcagtggcgcaatctcagctcactgcaagctccgcctcccgggttcatgttattctcctgcctcagcctcccgagtagctggaactacaggcacccgccaccacgcccagctaatttttttgtatttttttagtagagacggggtttcaccatgttagccgggatggtctcgatctcctgatctcgtgatccgcccgcctcagcctcccaaagtgctgggattacaggtgtgagccaccgtgcctggccaactaggagtagttttgataaaggctagctaccaaaaaaaaaacactagagccaacaaaaacattcacatagtggtgaaatactgaaagtttctctctgtggtggggaatgagtaaggatgtgcattatcacctcttttactcactacatcagaaatcctkcagaccagcattttggctcagttccttgggcaaccttctccatcattcaatggtaggccactcctatggg

SEQ ID NO: 512335 - DNA, 611 bp, Homo sapiens
atcagacacagctccaaaacaaacttgtgaattctgcagactgtgaattttccttaattaacatgaaacacatccttcccatgcctcatgccagagctttttcaatcttggggaaaaaagagctataggatccaaagctaaccatcattggctctcaagagtatagcaataaaaagaggaggttctagagccagacaggtgtggatgtcaatcttggctctgctacttactgacygcctgacctttggtaagtcgcttaacctgtgtgtgcctcagttttcacacctattaagtgtggaaaataatagtatcgccctcatggggttgttgtattaagtataaggtgctttcaagcccaacagataatgggtgttcaataattattatgactctaacccagcggtggacactgtcattttttttctaccagcacccattattcttccttatggtaagagtctcttggttttcctttagggaaccactccccttctactcatagactagttcaagtgggacctaaataaaaccaccgtcagttccagagcaggacctgtgtattagattgctaaggctgccataacaaggtaacacagattgggtggtttaaa

SEQ ID NO: 512336 - DNA, 611 bp, Homo sapiens
atcagacacagctccaaaacaaacttgtgaattctgcagactgtgaattttccttaattaacatgaaacacatccttcccatgcctcatgccagagctttttcaatcttggggaaaaaagagctataggatccaaagctaaccatcattggctctcaagagtatagcaataaaaagaggaggttctagagccagacaggtgtggatgtcaatcttggctctgctacttactgaccgcctgacctttggtaagtcgcttaacctgtgtgtgcctcagttttcacacctattaagtgtggaaaataatagtatcgccctcatggggttgttgtattaagtataaggtgctttcaagcccaacagataatgggtgttcrataattattatgactctaacccagcggtggacactgtcattttttttctaccagcacccattattcttccttatggtaagagtctcttggttttcctttagggaaccactccccttctactcatagactagttcaagtgggacctaaataaaaccaccgtcagttccagagcaggacctgtgtattagattgctaaggctgccataacaaggtaacacagattgggtggtttaaa

SEQ ID NO: 512337 - DNA, 611 bp, Homo sapiens
atcagacacagctccaaaacaaacttgtgaattctgcagactgtgaattttccttaattaacatgaaacacatccttcccatgcctcatgccagagctttttcaatcttggggaaaaaagagctataggatccaaagctaaccatcattggctctcaagagtatagcaataaaaagaggaggttctagagccagacaggtgtggatgtcaatcttggctctgctacttactgaccgcctgacctttggtaagtcgcttaacctgtgtgtgcctcagttttcacacctattaagtgtggaaaataatagtatcgccctcatggggttgttgtattaagtataaggtgctttcaagcccaacagataatgggtgttcaataattattatgactctaacccagcggtggacactgtcattttttttctaccagcacccwttattcttccttatggtaagagtctcttggttttcctttagggaaccactccccttctactcatagactagttcaagtgggacctaaataaaaccaccgtcagttccagagcaggacctgtgtattagattgctaaggctgccataacaaggtaacacagattgggtggtttaaa

SEQ ID NO: 512338 - DNA, 484 bp, Homo sapiens
  misc_feature (1)...(484): n = A,T,C or G
aagagtacccaacgcatatgacacagaagaagagcattgggtgagaactctagggcctgattaacatcttggttctgctgggttactcagttttgctcctgaagcttgctcttgacccanaatgacaagagcattgttgtgtcattttactatcagggtcatcgtgatatttagctaactctgaccatgttctttacagaggcttgagaatgagtctgattggttcagtctcakgtcgtttttatcaagtctagtccttggccagcctgtggaatagatgctcttgggtcatggcccacccccaatccaataacctatggctagggagggaccagtcatcattatggctcatgagtgagcagagagcataaatgtgaagagggaggcagagaaatggagccagcaagacaaaaagcagaaggggaagactctgcagcccctgctggaagaaagacatttaaagtggctctttaaaatggaacac

SEQ ID NO: 512339 - DNA, 484 bp, Homo sapiens
  misc_feature (1)...(484): n = A,T,C or G
aagagtacccaacgcatatgacacagaagaagagcattgggtgagaactctagggcctgattaacatcttggttctgctgggttactcagttttgctcctgaagcttgctcttgacccanaatgacaagagcattgttgtgtcattttactatcagggtcatcgtgatatttagctaactctgaccatgttctttacagaggcttgagaatgagtctgattggttcagtctcaggtcgtttttatcaagtctagtccttggccagcctgtggaatagatgctcttsggtcatggcccacccccaatccaataacctatggctagggagggaccagtcatcattatggctcatgagtgagcagagagcataaatgtgaagagggaggcagagaaatggagccagcaagacaaaaagcagaaggggaagactctgcagcccctgctggaagaaagacatttaaagtggctctttaaaatggaacac

SEQ ID NO: 512340 - DNA, 365 bp, Homo sapiens
ctgggaatcgccataagtatttccttaggacaaaagcatggttgtggaatggctggaaagggtcagcccttcgccaaattaattgccctccagagaggctctgctgtttattcccccactagcagtgcagaaattgycacgaccctcctgctttttaaaacctcatccaggagtgactccccatcctccctctctcattcctccctttgaacatacctgatgtgttatttgaagatgccaacctaggagaataggcacagattatttatcctcgctgctagacctcaacctcactcatctttacttccctcaaagtccaaggggtaaggccaggtgtctgtattgggaagaggccatctccttaa

SEQ ID NO: 512341 - DNA, 495 bp, Homo sapiens
ctggcaaggaggaagcttcaaatcacacttgcaaagcccctcactcagctagtgactgccttaaagaaagccttgtactgacaagtggcccctacccagccaggactstgttccaggaaagctaaagagcccagactggctcctccttctcaaggctaatccaacatatgcctgcaacaccaaccttgtgagctgtcagacaggctgggcagaacccagtgggtgcactctgcttcccctctgccaatgaataaatcattacaggagcgttatgcatcccacccgcatccataaggatctgaattatatataacaaggcagcaaaagcaatttattccaggcacgtgcaagtcataaaataggagttcttaggtgcctgagacaattttcagatattgcagtttttatcaaagcaataaggaccaccaacggagcaccctgccccacgggtgtggggacaccttagtcgggtttatttatcatcagagaagaaaa

SEQ ID NO: 512342 - DNA, 495 bp, Homo sapiens
ctggcaaggaggaagcttcaaatcacacttgcaaagcccctcactcagctagtgactgccttaaagaaagccttgtactgacaagtggcccctacccagccaggactctgttccaggaaagctaaagagcccagactggctcctccttctcaaggctaatccaacatatgcctgcaacaccaaccttgygagctgtcagacaggctgggcagaacccagtgggtgcactctgcttcccctctgccaatgaataaatcattacaggagcgttatgcatcccacccgcatccataaggatctgaattatatataacaaggcagcaaaagcaatttattccaggcacgtgcaagtcataaaataggagttcttaggtgcctgagacaattttcagatattgcagtttttatcaaagcaataaggaccaccaacggagcaccctgccccacgggtgtggggacaccttagtcgggtttatttatcatcagagaagaaaa

SEQ ID NO: 512343 - DNA, 495 bp, Homo sapiens
ctggcaaggaggaagcttcaaatcacacttgcaaagcccctcactcagctagtgactgccttaaagaaagccttgtactgacaagtggcccctacccagccaggactctgttccaggaaagctaaagagcccagactggctcctccttctcaaggctaatccaacatatgcctgcaacaccaaccttgtgagctgtcagacaggctgggcagaacccagtgggtgcactctgcttcccctctgccaatgaataaatcattacaggagcgttatgcatcccacccgcatccataaggatctgaattatatataacaaggcagcaaaagcaatttattccaggcacgtgcaagtcataaaataggagttcttaggtgcctgagacaattttcagatattgcagtttttatcaaagcaataaggaccaccaacggagcaccctgccccacgggtgtggggacaccttartcgggtttatttatcatcagagaagaaaa

SEQ ID NO: 512344 - DNA, 550 bp, Homo sapiens
ggctggggtttgataatggccatattcttccacctgtggccgcagcttctgttatacgctcttgtgaggttctggtctcacactcttccccctcaacccttagtgctttcctggtggtaacagctttctctgctactgttagtctctgaggggctctctatcaatcattcccctacctctataaatagtcctttcattaaatattcttcgtataactctttgagtatgccaaccagggccatgagtgataagcactttccacagcattctcacatccttcatatctgagatttataatctttgtgaattgggcaggatcactctcattttgccagtgggaaaacacatattctgaggggttaaaccaacctgctcaaagtccatgtttcacccccatatccggtactctttccaacttgtcccactcactgggtctgtcttgttcactattgtatatccaactgcagtgcctggcatggacttgttgctcaattagcatttcttggacagaataaaacaaaygaccagagagcaagatcttgaaggaata

SEQ ID NO: 512345 - DNA, 659 bp, Homo sapiens
gcatggaatcagatgtgtctgggttgctcttcctaagtacatcacctgagtctctaagccttaaggttttcacttggtgaatggggataatagtaccaagtcataagtttacattgaaaggtgactgagatgaagcatgtgcagtactttgcatgtagtagctgctcaataaatattagctctattactgttactcataaaataataattaggccatttccccaaayatcagaccaggtaaagcaagctgttactacaatatgggagaaagggcttgaaaacagacacagtactgagaatgctatccttggcccacggtcttggaaaagttatccctagcaacaaggcaggaggctgtacaaggagtcagagacttgagatgtagaatcagggctgaaaacagaaacctcctgaggttttaatacaaaaggaagttaatacagggggtaggttacacagaagcgcaaacaatggagaagccaaactaatgtcatgaggcaaaactcagagatgggtaacagcaggaagctgttatctcttctaggccagaggaacagagaggggatggtgtgaccagagcctaggagctgaggtcactctttggaagctggaacaacagagagctttctggcaggagctagagttatagaggagacaca

SEQ ID NO: 512346 - DNA, 659 bp, Homo sapiens
gcatggaatcagatgtgtctgggttgctcttcctaagtacatcacctgagtctctaagccttaaggttttcacttggtgaatggggataatagtaccaagtcataagtttacattgaaaggtgactgagatgaagcatgtgcagtactttgcatgtagtagctgctcaataaatattagctctattactgttactcataaaataataattaggccatttccccaaacatcagaccaggtaaagcaagctgttactacaatatgggagaaagggcttgaaaacagacacagtactgagaatgctatccttggcccacggtcwtggaaaagttatccctagcaacaaggcaggaggctgtacaaggagtcagagacttgagatgtagaatcagggctgaaaacagaaacctcctgaggttttaatacaaaaggaagttaatacagggggtaggttacacagaagcgcaaacaatggagaagccaaactaatgtcatgaggcaaaactcagagatgggtaacagcaggaagctgttatctcttctaggccagaggaacagagaggggatggtgtgaccagagcctaggagctgaggtcactctttggaagctggaacaacagagagctttctggcaggagctagagttatagaggagacaca

SEQ ID NO: 512347 - DNA, 659 bp, Homo sapiens
gcatggaatcagatgtgtctgggttgctcttcctaagtacatcacctgagtctctaagccttaaggttttcacttggtgaatggggataatagtaccaagtcataagtttacattgaaaggtgactgagatgaagcatgtgcagtactttgcatgtagtagctgctcaataaatattagctctattactgttactcataaaataataattaggccatttccccaaacatcagaccaggtaaagcaagctgttactacaatatgggagaaagggcttgaaaacagacacagtactgagaatgctatccttggcccacggtcttggaaaagttatccctagcaacaaggcaggaggctgtacaaggagtcagagacttgagatgtagaatcagggctgaaaacagaaacctcctgaggttttaatacaaaaggaagttaatacakggggtaggttacacagaagcgcaaacaatggagaagccaaactaatgtcatgaggcaaaactcagagatgggtaacagcaggaagctgttatctcttctaggccagaggaacagagaggggatggtgtgaccagagcctaggagctgaggtcactctttggaagctggaacaacagagagctttctggcaggagctagagttatagaggagacaca

SEQ ID NO: 512348 - DNA, 659 bp, Homo sapiens
gcatggaatcagatgtgtctgggttgctcttcctaagtacatcacctgagtctctaagccttaaggttttcacttggtgaatggggataatagtaccaagtcataagtttacattgaaaggtgactgagatgaagcatgtgcagtactttgcatgtagtagctgctcaataaatattagctctattactgttactcataaaataataattaggccatttccccaaacatcagaccaggtaaagcaagctgttactacaatatgggagaaagggcttgaaaacagacacagtactgagaatgctatccttggcccacggtcttggaaaagttatccctagcaacaaggcaggaggctgtacaaggagtcagagacttgagatgtagaatcagggctgaaaacagaaacctcctgaggttttaatacaaaaggaagttaatacagggggtaggttacacagawgcgcaaacaatggagaagccaaactaatgtcatgaggcaaaactcagagatgggtaacagcaggaagctgttatctcttctaggccagaggaacagagaggggatggtgtgaccagagcctaggagctgaggtcactctttggaagctggaacaacagagagctttctggcaggagctagagttatagaggagacaca

SEQ ID NO: 512349 - DNA, 539 bp, Homo sapiens
tgtgggcagggtatgggtggaaagggtaggaagtggagctctactccttccacttcatcccagggagctgccgggagcactkcttggtttaaaacttttttttttttttttttttttgagacggagtcttgctctgtcacccaggctggagtgcagtggcacgatcttggctcgctgcaacctccacctcctgggttcaagcgattctcatgcctcagcctcccaagtagctgggattacaggcgcccaccatcatgcccagctaatttttttttttttttaccgcaacctccgcctcccgggttcaagcaattctcctgcctcagcctcccgagtagctgggattacaggcgtgtgccaccatgcccggctaatttttttatttttagtagagatagggtttctccacattggccaggctggtctctaactcctgacctcaggtaatccacccgccttagcctcccaaagtgccgggattacaggcgtaagccacggcgcccagcctaatttttgtatttttagtagagacggggttt

SEQ ID NO: 512350 - DNA, 627 bp, Homo sapiens
tgctgtaggaaatttgctttgattatcactaacattcacactcaaaaggcaacctaagctgacgtgccattccaggacacactgaccagacagcagcattcatcctgagttactcttttgaactcatcaaagtatttcccacaatgaagttcatatctttgtgttgtgatgaaacctctctgcagaaaatccaccattctataacaataatatcctcaagtcatgatgatttttcacctagagatctgaagaaccataaatacatattttacagagccccagactgggcctataatattttcagttcagactggagaatcaccatgaaagaaccagtcttgatataaatggagaaacaccagggctaattttattaagataaatatcaggattaaattagaactctgaamgaaaagatcagctctatatgatacctaaatcctaaggccaaataaatggggaattgtaactagccattgtagatgttacccagaggcacccatgagcaaacaaggatgactagaactgtgataaatttcttattaacatctccatcatttgagaagttagaacttgttttggaacatctcctgtcatcaaataaaagttcataaggcaacctgtggt

SEQ ID NO: 512351 - DNA, 523 bp, Homo sapiens
cattgatgctgtgggactgcaatcacattcacatagaatgaaacatgctgcctgcaataaattactgggtatgttggagccttcgtttaacccawagtgcttcataatgcgtgttttctgtgctaaaatctctgctttctttggagtaaaaagaaaaacctgaaatctttccccatctgtggctcatgatctatagctaaggaaaaaaaaatcctatttctgcattgttgcaagaatgtaaaactttactgttcccaggaagtgggaatgagtcagtaattataagcactaaaattactatcactgttaattttctttacctacccaaaatactagagaacgttaagtacagtggaaattgtttttttaaaaaatacatacatatgacgtatcatagagtcatcttcttgaaccatatcaatttcctctcatatgtattagaaagccaagagatctgataacttcttccctctgttctgatactcatcgagccaagtacttcttaatagtgtgatgattacca

SEQ ID NO: 512352 - DNA, 523 bp, Homo sapiens
cattgatgctgtgggactgcaatcacattcacatagaatgaaacatgctgcctgcaataaattactgggtatgttggagccttcgtttaacccaaagtgcttcataatgcgtgttttctgtgctaaaatctctgctttctttggagtaaaaagaaaaacctgaaatctttccccatctgtggctcatgatctatagctaaggaaaaaaaaatcctatttctgcattgttgcaagaatgtaaaactttactgttcccaggaagtgggaatgagtcagtaattataagcactaaaattactatcactgttaattttctttacctacccaaaatactagagaacgttaagtacagtggaaattgtttttttaaaaaatacatacatatgacrtatcatagagtcatcttcttgaaccatatcaatttcctctcatatgtattagaaagccaagagatctgataacttcttccctctgttctgatactcatcgagccaagtacttcttaatagtgtgatgattacca

SEQ ID NO: 512353 - DNA, 578 bp, Homo sapiens
acttgaaactggacattcatttcaagctattaaatgatatsttgtactacagtagggcatttagaatctgagtgacttctgcaaaaggtagctaccatgagcatatttgtctagctttcttcccaaattcctactgaagtgaccaatggaatattcaaatggaaaacactgcctcagcatcagacactagaagggggctccagctctccataccagaaagtggtaaggatggaaaagtcctgtggggatcaaaacattaggcaataagtaaaaggatacttcaaccaacccttattcactacagggacatccagaaccagaggcaggaaacatgatcatgagtagattcctgctctcctgtctttccagactgatagcaccagacctggcagccaacactggaaggcttcatggttttcttctagcacagacagaaccaatgcaggcaagaagtgggaatatgggagaaaattaatacacaatgtagtgcagtgacatatctcccggccacgatgacctgcacctgctccctccctgatcctcttatattggtgacatactgtgagatttttgttgat

SEQ ID NO: 512354 - DNA, 665 bp, Homo sapiens
aacttggtaacatcattatctccatcagatgagatattctcaggagggcattaccttattgcattgaagggattataaatgtgttattttcagaatgagatagatttctgttgcacttctttatcctcttggtctgaaatccctacttaagaattcatttwaacaataagaacacatggacacaggaaggggaacatcacacaccggggactgttgtggggtcgggggaggcgggagggatagcattaggagatatatctaatgctaaatgacgagttaatgggtgcagcacactaacatggcacatgtatacatatgtaacaaacctgcacgttgtgcacacgtaccctaaaacttaaagtataataataataaaatttaaaaaaaacaagcaaaaaaaatgagaacacatggacacactgaaggaaacaacagaactggggtcttgagcatggagggtgggaggagggaaaggagcagaaaaggtaactgttggctattgggcttgatacctgagtaatgaaataatctgtaaaacaaacctctgtgacatgaatttacctacataataaacctatatgtgtacccctgaacctaaaataaaagtctaaaagaaaaaaaaagaattcatttagtaatattctggtgttgctaatggtttagaa

SEQ ID NO: 512355 - DNA, 616 bp, Homo sapiens
cttagagagcagctccaaggtcttagacgttaggcatctccctgggctccacctctgagactagctggttctgtggacgttggacaagtccaggcacctctctgagcctcagtttccccatgtgtcagatggagtctggcaggggcctcatgagctcagagcacccatggcctagatgctaggtcatgaccactctgggggtagagtaggatagatgaagagcttttcctgctagaaagcagatgatgcactcacagacctacatctctgttaaaatgctccagaggccgggtgcagcggctcacgcctgtaatcccagcactttgggaggccgaggtgggtggatcacgaggtcaagagatcgagaccatcctggccaacatggtgaaaccccatctctactaaaattacaaaacttagctggacatgatggtgtgcacctgtagtcccagctactttgggaggctgaggcaggagaatcacttaaacccaggaagcggaggttgcagtgagccgagatcacgacactgcactccagcctggcgacagagtgagactctktctaaaaaaaaaaaaaaaaaaaaaacaaatctccagagatcctgccccctgggcc

SEQ ID NO: 512356 - DNA, 616 bp, Homo sapiens
cttagagagcagctccaaggtcttagacgttaggcatctccctgggctccacctctgagactagctggttctgtggacgttggacaagtccaggcacctctctgagcctcagtttccccatgtgtcagatggagtctggcaggggcctcatgagctcagagcacccatggcctagatgctaggtcatgaccactctgggggtagagtaggatagatgaagagcttttcctgctagaaagcagatgatgcactcacagacctacatctctgttaaaatgctccagaggccgggtgcagcggctcacgcctgtaatcccagcactttgggaggccgaggtgggtggatcacgaggtcaagagatcgagaccatcctggccaacatggtgaaaccccatctctactaaaattacaaaacttagctggacatgatggtgtgcacctgtagtcccagctactttgggaggctgaggcaggagaatcacttaaacccaggaagcggaggttgcagtgagccgagatcacgacactgcactccagcctggcgacagagtgagactctgtytaaaaaaaaaaaaaaaaaaaaaacaaatctccagagatcctgccccctgggcc

SEQ ID NO: 512357 - DNA, 542 bp, Homo sapiens
tgtgtccaggtggcagctcccctgggaagaagggggttcctgggggtgcagcagaggggatgtggctgctggtaggtgtcctgtgcacaaacagacctgggcttctttcttgccatgagttctggggccagttatttctctctctcagcctcaccttcctcatctgtaaaatgggcgttaatcctaccttcctgacattgactgggaggagcagatgaacgatatgagagagagcctggcacattctaagtaagtgtttcacaaaattttcatccctcttcctgggctggctctactcggccttcaagtcttagcgygaactcccccacttgggagcagccccaagcactctgcatgtccctcttcagaacatacaagttctgtgatatttacttgttcaatgccctcatgagggcagggtggtctgtctcatccgtcactccaaggcagtggttctcaaagcgtgttccctgaatgatgaggtcagcatcacctgagaacttgctagtgatgctgattccaagtccccacctcagaccacc

SEQ ID NO: 512358 - DNA, 595 bp, Homo sapiens
cacaaagaatggcagcccctccaagtgtccacgcttcctcaaggtcaagaactgggagactgaggtggttctcactgacaccctccaccttaagagcacattggtaagtatcccagcagggtgtagatgagagggtggcagcttcatcactatccacatttggagtcggataagtctttgttgtgggggctgtcctctgttgtagggtgttgagcaccacccctgacccataccccctagatgtcagtacgcccccttccaggttgtgacaaccaaaaatgtctctgacagagcaggagcactgccgtcttgggcaaacactgccattttaagttccagctccctttctaacttcatgtatttcaaggaaatcacctcccttctaacaacaagcagccagaaaaagcagatagtaaaacacagataagacagctcgggcacacagggaggggggaaagtctcttgggtaaccaccaaacttcaaactcatacaatgggctccagtaaaacagtgggccttaataagcatatwcctttccctttagatgcacaaagatagggaagctaaaagcagacttgcggggtatgcctgcag

SEQ ID NO: 512359 - DNA, 560 bp, Homo sapiens
acccactactcaaactctctaggaggagagctcagaaatctgaggggtgtgtgtgtgtgtgacagggtctgtttctgtctcccaggctggagtgcagtggcacaaccttagctcactgcagtctcaaactcctgggctcaagtgattctcctgcctcagcctccccagtagttgggactataggcaggtgccaccacgctcagctaatttttttattttgtgtatagacaggatctcactttgttgcccagcctggtctggaactcctgggctcaagcaaacttcccacctcggcctcctaaagtgctggaatcacaggcatgagtcaccatgccgggccaggaatctgaactttagcaagcctctcagttgatttggatgcaccctggagtttgagaaccaccaaatgtgaccacctgatagccctggccacactggccaccacaatgccaagctcattgggggatggcttttccagagrgagaaggacacctgagaggggtgggtgagggccatttagtgaaggcgagctcctcaattacatctgggaacaagggaca

SEQ ID NO: 512360 - DNA, 652 bp, Homo sapiens
accctagccatgaacaattagctgtgggaaatatctaaaatcacaggtaaaattctgtgcttgtgtgatgtatgatgtgtacttgcataggttcttatatgattttccgggtagagagttaagtcttttatccaattcttaaagaggtcatgcctccccccaccccccaaaaaagttaagctctttccagtgcttttctttatgtaaagagtccaaatattaaagtaacattggtgaaataaaaaccaggactgtcattaaaaattgactggaaagcctgccatgatgacttaaatacatgttatagcaaatacgtaattaggaatctgtgtttctgatgcacaaaatgaacaaaatgaactaaatgagattctacaatattgtattaattacgaaaatatgacaggtaactgtttaatcccttacaattttaaatgaggtatttacataacttacaaatgacacactattataacttttctgaatgctccacagtwttgttctttgataacatatttctggccaaggctacctaatcaaaaattgtaacgaaaataacttcagttcatctaggatgtttcatgtctggtttaggttacactatatgatttttgttttaacttttttggagaagaggggaaaaaagcaattt

SEQ ID NO: 512361 - DNA, 507 bp, Homo sapiens
caaatgacacactattataacttttctgaatgctccacagtattgttctttgataacatatttctggccaaggctacctaatcaaaaattgtaacgaaaataacttcagttcatctaggatgtttcatgtctggtttaggttacactatatgatttttgttttaacttttttggagaagaggggaaaaaagcaattttttagttctagtttatgctctaaaatccattctttggttttcaagaaaatattttatwtgtttaaagaggtcagaactacacaatagtcccaccttgaagtattctggggtgacaagaagctgtattccattatctgcatttgaattgcagagactaggaacacattttttttttaacaatttgtgattgttaattgattatctttagatgatgcaaactccctagagacttggctggagacaaccataataactcccagcattaacataaattaatcatgagggaaaataagatgtgtgaagagctgaa

SEQ ID NO: 512362 - DNA, 598 bp, Homo sapiens
tttatagcaaaatacctgctagcacctcaaatgagaatgtcttaagaaaaacaaaccacaatcgatattttgttgttgatgctcataaacttttgaattaaatctaagaaatgaccttgtcttggagttaaaaaaagcaaatggcactttcyttcaacctaagtaagttgtaatgatcacagaatgcatactgatggctaagtgcaatgcataactctagaatgagaaaccaaaattcctataaaggacattcattactggggcaaaagctgtaatttgaatgtgcactgtggattagataataggatctgctgtgtgtcaaatttcctgattttgataactgtgctatgattatataagaaaatgattttagatgaaacacaatgaggtatttaggggtaaagggacaagatgcctgcaatttacattcaaatggttaaaaaaaagtacgagcaaagacagcacaaatgataaagcaactggagcaaaaaggaaataactggtgaatctggataaaggctataagggaatttttaaatgctattattgcaactgctgtgtaagtatgaaatcatatcaaaataaaaacatggtcagg

SEQ ID NO: 512363 - DNA, 598 bp, Homo sapiens
tttatagcaaaatacctgctagcacctcaaatgagaatgtcttaagaaaaacaaaccacaatcgatattttgttgttgatgctcataaacttttgaattaaatctaagaaatgaccttgtcttggagttaaaaaaagcaaatggcactttctttcaacctaartaagttgtaatgatcacagaatgcatactgatggctaagtgcaatgcataactctagaatgagaaaccaaaattcctataaaggacattcattactggggcaaaagctgtaatttgaatgtgcactgtggattagataataggatctgctgtgtgtcaaatttcctgattttgataactgtgctatgattatataagaaaatgattttagatgaaacacaatgaggtatttaggggtaaagggacaagatgcctgcaatttacattcaaatggttaaaaaaaagtacgagcaaagacagcacaaatgataaagcaactggagcaaaaaggaaataactggtgaatctggataaaggctataagggaatttttaaatgctattattgcaactgctgtgtaagtatgaaatcatatcaaaataaaaacatggtcagg

SEQ ID NO: 512364 - DNA, 598 bp, Homo sapiens
tttatagcaaaatacctgctagcacctcaaatgagaatgtcttaagaaaaacaaaccacaatcgatattttgttgttgatgctcataaacttttgaattaaatctaagaaatgaccttgtcttggagttaaaaaaagcaaatggcactttctttcaacctaagtaagttgtaatgatcacagaatgcatactgatggctaagtgcaatgcataactctagaatgagaaaccaaaattcctataaaggacattcattactggggcaaaagctgtaatttgaatgtgcactgtggattagataataggatctgctgtgtgtcaaatttcctgattttgataactgtgctatgattatataagaaaatgattttagatgaaacacaatgaggtatttaggggtaaagggacaagatgcctgcaatttacattcaaatggttaaaaaaaagtacgagcaaagacagcacaaatgataaagcaactggagcaaaaaggaaataactggtgaatctggataaaggctataaggsaatttttaaatgctattattgcaactgctgtgtaagtatgaaatcatatcaaaataaaaacatggtcagg

SEQ ID NO: 512365 - DNA, 573 bp, Homo sapiens
tcccccctccacaaggctgtttcatcctaagctctttgctcattgcaaataggagtgctcggttttcttcatgcttttcaaagccagttgtggtataagcgagggcctcttaattctcccaggccagaatggaggcctaaycgaaattggcaagcgaggatgcagagagggagcaggccaagtaaacagtaccctacaaacagccttttcactagtcttgttcccattgaggacatgcgagaggctacatgtgtaccccatcaagaaggatgaaaaactcaaactaccacaagactgccccacattaattttgctaatgctaattttgtcattgggcgtttaaatcttatgattcactgatgttggaccccagctattggtggagatacctatggacagttaagttgaaaaacaactgcccccagcctcccttcccttgtgcctgcaatgcaccgcggtcctgtagtgcagcaacggctctccttccttttgtcctttggactcctaagtgcacagtaaggcctagttcttcaacgattggtttgtggggactttgccattcctctattcagc

SEQ ID NO: 512366 - DNA, 640 bp, Homo sapiens
ggtagacattaggtgacttgcaggacgttataaggattaagtgaaatcaagtatacagtgcttagccacacacagaataaaaggctttaatatgtggaacctatttttattatagcagtttacatgcttggtgtcaaaatgttaatataatagcaatgctatgaagccacctgagtcaaacaaaagctacctcaaagtaccccaacttaggaagactagagtggtcatatctccagaaaatcatcaaagccaagctcagttgtcttggcactcactgatcctatgtttgcagtcacagttgtcctttaagaccacttctcaaaccttactgtaaatttctacccttcaattagaaaatagtaagaaacataatcaaaataagttaatgaacaagataattcagaaattttttttgtttcaaaagataaaacaaatgagtaaatatgtcaatgtagatgggaaagataatttttaccattggaagaatgagatactattcagcaataaagtagaaccaaccactaacaaacatgacaatacagataaatcttaaaaacattatgcaacatgaaagaagatagacacagagtacatratacgttattccatttgtatgaattttagatgagacaaaactaat

SEQ ID NO: 512367 - DNA, 608 bp, Homo sapiens
gccctctacagtgttagactaacatctatagtactagtctaacatctktctaaagttggaatatgttgagcatttttacaaatatttaatgagtaatggactattatttttctgaatgaccttaaatattacaaggtagagaccaaattcacctgcaatgctcaggtgtatgttgcactgcagcagtcctaaatgccctggctcaccatggagaaatcaaactgctccttgacaagtgatccaataccttgcattgtgtcaaacaatgtaacaggaaaaaatgtaaaaagactgaaagtgactatgttgtcacggttcttccaggttgtcacagtcaaatcgcttttgctgcttttattcaataaatacatactttatcctaattctgtaatgatgtccctaaatatgttttgttcctctctatccacaacagacacagtgagcacatggcagaacaatatgagaagcaagaatttcatgctggcatttggaattgactccagccattgtaattgtgactaaccactggttattggtttttaaaaataagttgtctaaattaaacactactgtttcagacattgttaagaagggtaagttgtatttga

SEQ ID NO: 512368 - DNA, 502 bp, Homo sapiens
ttacattactaattgtctcttggctaaatcctttctcccaagttagacaacaaccaaagattccctgcacccttccttttaacactggtaaccattgaaactctgccatcaaactttggtgggtacaggtgaaacagagattatgacacactgagtcttgctcaggattaggacggatttggcctggtcagcagttgatccatgtggagtagatataaaactcaagattgaaactgaagattgtagtgggctcttgggcaataatttctaaagaactattcataccagacaaatctttatcaaaatatatgataaatgtatactataactgtgagagtaatttaatttcttgggattgatatttgactttttttatatcrcaaaggaaaatgaaaggcaacctagtcaagaaaaatgtgactaattggtttaattatggttcatctacatgatgtagtactctacagctggtagatatcttgttatagcacaatatttaatt

SEQ ID NO: 512369 - DNA, 515 bp, Homo sapiens
tcttgttatagcacaatatttaattgcatggaaaacttattaagttttaaagagccttttatagaatagtagatatagtgtaattcaaatttacattaaagatgtatttatatacatagataaaagactagaataaatatatctatgtacttacagtggtaatttctgggtgatatgtcagggatatttttcttttcttttcacattcttccgaatttcttcaagaactagtaatattttaataataataataaaaataattcttttcttacactgtagattctatattcaggctttytgcttttgtgacactgggataacatatttactagtgatatcggacattcctgaactatacatataattatgcacaagaagcacaaaaagcggtaatttaataaagtgttactaaaacaaatttcaaattttataaaaacttgttctcatttttttctccattctagtttctttcaagaatttggtccatcctcgtttgcttaagtgacttaatctgg

SEQ ID NO: 512370 - DNA, 515 bp, Homo sapiens
tcttgttatagcacaatatttaattgcatggaaaacttattaagttttaaagagccttttatagaatagtagatatagtgtaattcaaatttacattaaagatgtatttatatacatagataaaagactagaataaatatatctatgtacttacagtggtaatttctgggtgatatgtcagggatatttttcttttcttttcacattcttccgaatttcttcaagaactagtaatattttaataataataataaaaataattcttttcttacactgtagattctatattcaggctttttgctttygtgacactgggataacatatttactagtgatatcggacattcctgaactatacatataattatgcacaagaagcacaaaaagcggtaatttaataaagtgttactaaaacaaatttcaaattttataaaaacttgttctcatttttttctccattctagtttctttcaagaatttggtccatcctcgtttgcttaagtgacttaatctgg

SEQ ID NO: 512371 - DNA, 588 bp, Homo sapiens
gcactgagaggcaccagaagacgccggccggccattgaccagcggaacgacatggaccctgaggggaatatggctggggcggtcagagaagagtcaggccactgaacacccgactccaagagaaaaccaccttcccactccatcccccttttggctccccatccatctgctgagagctacttccaccgttcagtaaaaccttgcactcattctccaagcccacgtgtgatccgactcttccagtatactaaggcaagaaccctggaatacagaaagccctctgtccttgagataaggcagagggtctaattgagctgatcaacacaagccacctacagatagatggcaaaactaaaagagaacatggtaacacaygcccactgaggcttcaaaagctgtaaacattcacccctagacactgccgtggggttggagcccatgaccacaacctgcccgtctgcaggcttcccctacaggtttgagcagcagggcactgaagaagtgagccacacccccattgcatgccctgtgagggagataagggaacttttcccatttcagtgcgtatatttgcaaatatggaatctg

SEQ ID NO: 512372 - DNA, 446 bp, Homo sapiens
tgcattgccacagctccagtctgagttctgctcaccttctgtctggacaactgcagcgacttccaaggtggttctttccgaaccactcatcctttctctagcctgctattaaatcattttcctcacatataaattattttcattaatatctttgtttctgtctacyaggtcccatgctattccttggtataatgtttttaaatatctttaaaaaattagagtatttgaggtttacaacatgatgttatgggacacatactgatggtaaaatagttactacggtgaagcagattaacatctatcatcacacagttgcttttttgtgtgagacaagagcacctacttctttaacaaaaatctctgacactatataattttatgaactttattcctcatgttgtacatttgatctctagatttgttcatcctacatatctgctgtttta

SEQ ID NO: 512373 - DNA, 582 bp, Homo sapiens
acccagtgcctggcacagaataaaccctcaaaaaattttaactactatcattactattgtcattattatgcctatttaaagcctcttttgaacaaaaacaaagtcatttgtatcctaaaatgacttgcaaataacacataattaacaaacacactaaaatatgtggttataacttgctttttcatttcaaatttataagagaggaagcagaagttcaaaaagcaatttccttaattaaaaagaatctgatgtttaattcacaaacaaggttttatagccattaaactggaaccagtccattacttatacacctttgtggttttttcaaaacactttacctttaaacactttgaacctaatggatcctggatgaaggtgcaggtagagtcatttcccgtgatgaaatacctgcattagtcacgagccattatttagtaaagacaggaaataaacaaagatgcatatgaaacaaaatyattctgtgacctccacctgaggctttttgctttgtgacaaaatcaaataatcgacttatttaaaaattatgtattattaactttctaattgaggcatctggtagac

SEQ ID NO: 512374 - DNA, 673 bp, Homo sapiens
gaatttcaatatataaattttgggtggtggggacacaaacatgaagtccctaagagtagtttgctgaagatttctggtaatagaataaagcaatgcatatttactctttttttttccaaaaaatttagtcctcaaactcatgctattaccttttaaaatcaagtaaaatacaagattatatgtagtatttatgatttgacttaaattaggatatgctgagttgtatatacaatgaaaaataatagttgccttcacatctactagaatgactataataaaaaagacaggtaatagaacatgttgstgagaactggaaaaattggacccctcatactctgctggtagaaacgtaaaatggtatgaccactttgaaaaacagtctggcagctccttagacaattaagcagagagctaccatataatctagtaacgctactgctaagtatatgcccaaatgaaaacataggttcatgtaaaattttgtacacaagtgtttatagcggcatttttcataatagccaaaaactagtaaagaaaaaaacaaatgtctgtcaactgataaatgaatggataaaatgtgttatattcatacaatgaaatattattcagccataaaaagaaatgaagtactgacacatgccacaatatgtatgaatcttgaaaacgtgacaag

SEQ ID NO: 512375 - DNA, 435 bp, Homo sapiens
attcatggaaattaaatcataaaccttcgctgatccttgtgctcagaaattgctccaagcaacaccccttcaacccgatactacaagtyatacacatactgttgactaagaacctattatctcttacacccacctaactttttccatccatcatcctggctttgcactaaaagttctgacttcatgtgcttagcctggggtgcctccctgcgatgctgctacaatctaacaaagctattattgcatctgtaagtgagtattctctcaggcaggttgtttagaagtagaattaatgctattaaatgaaatgcttttatatttatgggtataatcctcacaatctgaagaggactgttcaatggggagagacttagattttaggcataatctgcaaattatatattattctttaatttaatatgaccgtattgctgg

SEQ ID NO: 512376 - DNA, 435 bp, Homo sapiens
attcatggaaattaaatcataaaccttcgctgatccttgtgctcagaaattgctccaagcaacaccccttcaacccgatactacaagtcrtacacatactgttgactaagaacctattatctcttacacccacctaactttttccatccatcatcctggctttgcactaaaagttctgacttcatgtgcttagcctggggtgcctccctgcgatgctgctacaatctaacaaagctattattgcatctgtaagtgagtattctctcaggcaggttgtttagaagtagaattaatgctattaaatgaaatgcttttatatttatgggtataatcctcacaatctgaagaggactgttcaatggggagagacttagattttaggcataatctgcaaattatatattattctttaatttaatatgaccgtattgctgg

SEQ ID NO: 512377 - DNA, 435 bp, Homo sapiens
attcatggaaattaaatcataaaccttcgctgatccttgtgctcagaaattgctccaagcaacaccccttcaacccgatactacaagtcatacacatactgttgactaagaacctattatctcttacacccacctaactttttccatccatcatcctggctttgcactaaaagttctgacttcatgtgcttagcctggggtgcctccctgcgatgctgctacaatctaacaaagctattattgcatctgtaagtgagtattctctcaggcaggttgtttagaagtagaattaatgctattaaatgaaatgcttttatatttatgggtataatcctcacaatctgaagaggactgttcaatgkggagagacttagattttaggcataatctgcaaattatatattattctttaatttaatatgaccgtattgctgg

SEQ ID NO: 512378 - DNA, 498 bp, Homo sapiens
ggacatctgtcgcagctggggaatgacttgagtcctggctctttatattgaagatcacaaccagaacagacggcagagaagttatgcctgagggctttgtatgaacagctgtaaaacccacagcatgstctttgatcactttgagacttccatcagtagaagaaatactaagtgaggataggtctctgcttttaaataatgtatacctttcaaactgtttattttttatggcaattttcatgagcaaaagatggcagacaaattaaacctgtccaaaaacgggtaaaatgttctgatcacatgaaatataaactgagtcctatctattaatttattaacattatctcatgctgccttgataaagtggaaaaagaatgagtttggaatcaacaggctgaggtgtgaaacatggctccaaaggagggccactctccctgtggacagtttcctcatctgtatttcgtagtgttgttgagatggttagatgaatgtataaac

SEQ ID NO: 512379 - DNA, 543 bp, Homo sapiens
tggatgatgaattttttctttaatctgttaatttgttgaattgcattgattttctaatattcaaccaactttgtatcctttgtataaacccaacttggtaatgttggacttcgttatttagaatttatgcatttatatttatgaatcatattggcttgtaattttccttttacatattgaacattttaattttaggtttgagtatcaaggtattcctgctcatgaaagaattttggagtatgtttcctcatttcctgttttctggcaaagttcatgtaacattagaattggttccttgtatgtttcatagaatttactgatgcaactgtctatacctataattttctmtggagatatatttgaccactgattaatttctttaataatcaaaggacttttaagactttttattttttccttgatttacttttgattagttatatttttttccaggaattagtccatttcatctgagttttcaaatgtattggtatgaagttgtccataatatctaactgtaaattatttttgtaatgaggtata

SEQ ID NO: 512380 - DNA, 543 bp, Homo sapiens
tggatgatgaattttttctttaatctgttaatttgttgaattgcattgattttctaatattcaaccaactttgtatcctttgtataaacccaacttggtaatgttggacttcgttatttagaatttatgcatttatatttatgaatcatattggcttgtaattttccttttacatattgaacattttaattttaggtttgagtatcaaggtattcctgctcatgaaagaattttggagtatgtttcctcatttcctgttttctggcaaagttcatgtaacattagaattggttccttgtatgtttcatagaatttactgatgcaactgtctatacctataattttctatggagatatatttgaccactgattaatttctttaatartcaaaggacttttaagactttttattttttccttgatttacttttgattagttatatttttttccaggaattagtccatttcatctgagttttcaaatgtattggtatgaagttgtccataatatctaactgtaaattatttttgtaatgaggtata

SEQ ID NO: 512381 - DNA, 569 bp, Homo sapiens
ctgctgtctcttgtctctctacagtccctggctctttgcctggggtaccctgagagccctgcctcagagtcttctgggacatcgctggggtgcccaagactgcagtagtcagtcccatgggcaggcagggagtactgactgtcatcatcagccaacgagcaaccagaaaggccaggggacttggctggctggcctagctggcatcggatttggggggagtcttccagccccaggcactgtctcggcagactgggggagggcaggaaggatgggaatatggaagcagaagaaggaggagaaaaagaagggaaggaggaggaaggaggaccaggatctggcctggagctcggttgccaggggcaacagcattgcattctgaggaggaaccagatgctgaggagggcggcaggaggaggggagctggggtccaggcagcagatccaaggctcctagggcttgggggygggggtacccatttggcaagaaccccaggagtcccaagtgtgtgtggagccctggtgagagctccttagtggctattctgaccccagggctcagaggcagacatg

SEQ ID NO: 512382 - DNA, 580 bp, Homo sapiens
atttcacatgacttgcagaactgtctgggaagtccccacctctcctcatagcagactcctgcggtaagccacgctaacctccctcctctccagattctcttctgctaaagattttcttggtttctttcctcctctgagctggctcacaccttatgtgggtgtgcttcsagcgctcagaggtcacagacgctcattcccgccctttggcggcgtggttccgacccccaactcttcccgcagcccagcccctcctgctgggaaggtgaagaggcgtctggcgggacttctcaagggatggaagaacctagaaaggaaaaagtaggccacatagcaagaatgccaggggtgcctcagacggcatagcggcttctcagactgatcctgttaaagaactgaaatagcagatgctccctgaaatgtttcaagacccccaaatgtggtgactgtccctggagaggtacccagaagccatttaaatccttttgcctggagaatctgcagagctcacagtggctcattctgcctttggcagaaaaataaaatgcctcaggtaacaaactgagtcagtttttacattttc

SEQ ID NO: 512383 - DNA, 594 bp, Homo sapiens
ttgtatttttagtagagacagggtttctccatgttggtcaggctggtcttgaacccccaacctcaggtgatccacctgccttgacctcccaaagtgctgggattacaggcgtgagcctccatacccggcctaatttttgtatttttaatagaaatggagktttaccacattggccagactgccctcgaactcctgacctcaggtaatctgcctgcctcagcctcccaaagtgctgggattacaggtgtgagcgaccgttgactggcctagtacttatttttttttcatgaactgttttgttattttgcccttctcctcatttaggttcattttgacatctaccttttgtccatgtattgattcattgagagaaaatgataggtttttaaatttttaaaaagtactcccttttctggcttagttagtaaaagcaatcaactatttttttttaaatagggatattaaaacttaaaaggcaattgcaatttacatttagctaatgcttatcaagtgttgcttaatatgtaccaggtactatgccaagtgatttacatggagtacctcctcctaacatatctatgaggcaggttctgt

SEQ ID NO: 512384 - DNA, 651 bp, Homo sapiens
cttcatgtgatacgatactgtttgacatgccccagcttctgttgccttttaaaagacagcatggtgtggtaaacagagctcttcactggcagtcagaaaaactgatgtcaagtccagtatctgctcctcccttccctggattcatagggcaagtcacatcacggctctgctgctgagtttctgttatttgaatacattgaggctaggggccacagcagcagagatgagctaaggccacaagtggagcatatggataccagcaactgcagaggaaaatctcagtgactggcaagagcacatgatgcagcctgggcccctgctggggaaaccgagggatttaaggagctggtttctggccagtctccctttgcttttcctcccccaggttggtgaaagtgctaaaaacatgagttcactgtgaaacacggaggcttgaggcagatcattacggaagcctcttagctccaaaatttggggwttaccataggagggactggactaaggcaggtgcaggaatattggtgaagctgctgctgttatcttgggggccccaggcaggaggaacaaaaatcaacttatttaatcttgcagttttcgtttcctcatttctgaaatggggataataatacctcctcggcttggtgctcagtg

SEQ ID NO: 512385 - DNA, 579 bp, Homo sapiens
tttgccctcattttgccttttatgatataggtcaaggttgtgaaaagtagtgtaaagttcactatacaaagattagagtctgggacacacccaggacatgggttccaagaatgactataaaataactattttataactcaataaaatagaggaaaatatggaaaaataaatgaaaaggtggagaatttcaccagagaattgaaacacacacacacacacacacacttaaataaatattctaaaactgaaaaattaaatatatataagattaaaagatataagggtaggagaaaagacagtcattatattcaaatcatatgattagattatctgcataaagggactaataagagatattagcaatactgttagataaaagattaatatgaagatattggcaggcacggtggctcacgcctgtaattccagcactttgggaggccaaggcaggtaagatcacttggrgtaaggagttcaagaccagacttgccaacgtggtgaaaccccatctctactaaaaatacaaaaattagccgggcgtggtgatgcgcgtggtgaggctgaggcaggagaatcgct

SEQ ID NO: 512386 - DNA, 579 bp, Homo sapiens
tttgccctcattttgccttttatgatataggtcaaggttgtgaaaagtagtgtaaagttcactatacaaagattagagtctgggacacacccaggacatgggttccaagaatgactataaaataactattttataactcaataaaatagaggaaaatatggaaaaataaatgaaaaggtggagaatttcaccagagaattgaaacacacacacacacacacacacttaaataaatattctaaaactgaaaaattaaatatatataagattaaaagatataagggtaggagaaaagacagtcattatattcaaatcatatgattagattatctgcataaagggactaataagagatattagcaatactgttagataaaagattaatatgaagatattggcaggcacggtggctcacgcctgtaattccagcactttgggaggccaaggcaggtaagatcacttggagtaaggagttcaagaccagacttgccaacrtggtgaaaccccatctctactaaaaatacaaaaattagccgggcgtggtgatgcgcgtggtgaggctgaggcaggagaatcgct

SEQ ID NO: 512387 - DNA, 595 bp, Homo sapiens
tcaaggtcagacggctaaggcccaggtacagttggcatcgcgcagaggcaggtccatccatatggaaagggatggagctgggggaatatctggggttgcctctagtggccaccaggcttgcggtttgtcaggagtataagaaccttaaagaaataaagtggggaaaaatgccagagaagaggaagtaatttcccttacagatcagtgcagggcccttgcacacatccagcctggatgtcccccagccccgccctccrgctcacactcccttggatggcctagcatagtgctgagtgcagagtcctgtctgtagaacgcagagtcctgtgttcactgtggcagtgactgcaaaggactctgttgaggcctaaaggtccatgagcctcgtcagggcctgctgtttggaagaggggagagtgggaaggaagtaggaacaggccacactccaggtcctcagctcactcctacctgaatgaattgtcatattttcccatttcacatgctgagcttccatgtcggcttccatttggatgaaggtctctggataaaatacatttggaaacctctgctcttcagctgtgatctggacagttgg

SEQ ID NO: 512388 - DNA, 610 bp, Homo sapiens
tcaaggtcagacggctaaggcccaggtacagttggcatcgcgcagaggcaggtccatccatatggaaagggatggagctgggggaatatctggggttgcctctagtggccaccaggcttgcggtttgtcaggagtataagaaccttaaagaaataaagtggggaaaaatgccagagaagaggaagtaatttcccttacagatcagtgcagggcccttgcacacatccagcctggatgtcccccagccccgccctccagctcacactcccttggatggcctagcatagtgctgagtgcagagtcctgtctgtagaacgcagagtcctgtgttcactgtggcagtgactgcaaaggactctgttgaggcctaaaggtccatgagcctcgtcagggcctgctgtttggaagaggggagagtgggaaggaagtaggaacaggccacactccaggtcctcagctcactcctacctgaatgaattgtcatattttcccatttcacatgctgagcttccatgtcggcttccatttggatgaaggtctctggataaaatacatttggaaacctctgctcttcagctrtgatctggacagttggccctctgaggctcag

SEQ ID NO: 512389 - DNA, 502 bp, Homo sapiens
catttaatattcagtggagtatgagggttctgatttctctgcatcttcaccaacacttatggtccatctttttttatgacaaccatcctagtgggtgtgaagtagtatctcactagggtttttccatcagggaaatttgcattttttctgatgactgatgatgtcatcttttcatgtgctcattgaatatttacagatctccctggggaaagtgtgtctatttagagyctcaggtaagtgaatttacatttctgaacctcagtttcacctaaagtgagaatgaaataggtggactgagtgatcacaaaggagctttttcattctgggtgtctctggctccatggaggggctttgagaagagctcttgttgttgttgttgttgttgcctttcctacccctttggcctgagtgattttcttgttttcactctgcttcctgaggagggctcatctttggcactcaatttaagctgtttaggaaattcaagtgtcattcactttat

SEQ ID NO: 512390 - DNA, 502 bp, Homo sapiens
catttaatattcagtggagtatgagggttctgatttctctgcatcttcaccaacacttatggtccatctttttttatgacaaccatcctagtgggtgtgaagtagtatctcactagggtttttccatcagggaaatttgcattttttctgatgactgatgatgtcatcttttcatgtgctcattgaatatttacagatctccctggggaaagtgtgtctatttagagcctyaggtaagtgaatttacatttctgaacctcagtttcacctaaagtgagaatgaaataggtggactgagtgatcacaaaggagctttttcattctgggtgtctctggctccatggaggggctttgagaagagctcttgttgttgttgttgttgttgcctttcctacccctttggcctgagtgattttcttgttttcactctgcttcctgaggagggctcatctttggcactcaatttaagctgtttaggaaattcaagtgtcattcactttat

SEQ ID NO: 512391 - DNA, 571 bp, Homo sapiens
aagttgtttctttaaatctatccctacttcacactgggacctgcaaatgtgaggcatgttcatactgatactactgatgtagtagcaccattaaatgggcctttttatcattaaatgggccaaccaaacaagggacttggataatgcttttgccctacagtcagggtgctgaaggccagccgaccttgggtgaaattgactactatctacgcatcatcatataaagcctcctctatgctgcttctcttatgtccaagcrtagcctaatagccctaccctcagcctctcctttggattgaagtcactaaggcctttgtgaagtttcagtaactggcctggaacaaaggggagtctttcagctattaacttagctctagctgagagcaggacctgagcaatggcattcaggatgagtaaatttcagagagaggaaaattggagtgcacctacaagttagggagtccccaaacccacccttacctttgacatcaacttcaagttctgaggttcccaagactttgatcattcactagaaggacccacagaattaactgaaaactgtacacttaaa

SEQ ID NO: 512392 - DNA, 510 bp, Homo sapiens
tacacgtggctgacaaagagaagggaagatggaaccgccatcttgaacatgctggcacaactgccagcatctatgtctgcagygcaattttacaggctgctctttgttacaaaggaaaataatttggggctgctttttgttaaaagggaaaccttaccaaggactgccataccctcactatctgcctaagtaatttcttcttaactcctgtatcagtaccttccatttccaacccaccaccacaagagtcaatctgattttcttccttttcatatgtttcactctcttttctgacaataagctagaatcctattgctctaactctgtttacttatttgtaataagtaaatatgtaatatttactccttctgtgtacaactaatctcctagcttgatggccaccctttccaccaaggattccccccaaatccattcagtctctggagccctgggatggccaacagcatgggctgccccctatctaccccactctctccttataaaatccca

SEQ ID NO: 512393 - DNA, 589 bp, Homo sapiens
gagcactttgtacagacctacattataccgggtaatgataatcactggataatcatatgactattaatctcccataaactagatacatggtcctcaaagacaggaattcatggtgctttcatgtttgtgtttccagtttcttgaatagtacttacacaaaatagaagctcaataaaaacattttgaatgaataaatgtttgaataaatcatacactaacctaaagtaaatttgagttataaccaagacctyttcttaagtccacactaatctccctactccattatcaaatggtttttactttttttgcagatccaccaaaagtgacaatcttgcaacttctgtattcacccatcccaatccctccactttctcctccttcacctagaggaagttatgaatataaaactgagagatttagggtaaaaagaatcatgcatcacagaatagacacgttacaagcatgattatttgtttctccttgcgaaccaattatttgtttcttcttgcgaaccaattattgaataatttgtattgaataaatgaactggaatgttctgagggacccaaagtgcacttattgggtcaca

SEQ ID NO: 512394 - DNA, 631 bp, Homo sapiens
aaatttagctaatgagagaacatttacacaacaaaaattaatcctaacttattgacatgaataacattttgaatcagttacagtgcactttatccttttataaatgttcaggaattaggaatattccccaaacatttacccagtttgacacaatgtaggtaagaaacattcatgaactatatccacaacaatttttaaatgtgcatattgcattaaattcttactttctctacttcacaaattcaattacttctgttccttttcctctcaccaaattatatatttattaactttgtattcaattcacctaaattrtcttaatggggccagaaatccagtgcctggaatttccttatgaagtaaaataatttgtttcccttttgttcctctatacttaaaaactcttctctctgggggcaaggcatagtagaacaaaaggcagcagacagcatctgcacaattaaaggtccctgtctgacaactctgaagtgggcagtgattctctcagcatggcgttcgagctctgagaacggacagactgcctcctcaagcgggtccgtgacccccgtgtagcctgactgggaaacaccaccccctaggggccaacagacacctcaaacaggcgggtggc

SEQ ID NO: 512395 - DNA, 526 bp, Homo sapiens
tgtgacagctgcttgaaaggtaccgtaccctgtgacaacagcttgaaagatactgtaatgatagtattttcattaaaatgtcacattgtttggcaacacttcctaaatttctgtgtaatagaaatgacagagctgtcagtttttcaggaaaaatgaaaagaggtaagaatagttactcttggagcagccttcccataaactcatatctgtaccgtaccttctctttggcaaagaacctttgtacatattttcccatctgataaggaaagtgagttgggtaggctttaaaaaaattgattaattatcttttttctttctttcttttttttttttttttagagatggattcatgctctgtcacccaggctggagtgcagtggcatgatcatagctcactgtgacctcgaactactaggctcaagcaatcctcccctctcagtctcacaagtagctggggctgcaggtgtatacyaccatgcctatctgtggtcttgaaatgttgcccaggctggcctcaaactcctgg

SEQ ID NO: 512396 - DNA, 599 bp, Homo sapiens
atgcccagaaattgtgtaacaggaaggtagacaggattattgagaccagacaagatcaagaacagaggaaaggaaaaaacttcgtttacattaaactcttttaaacattttgtaatctgcactagatgcaagtattacctattaaaattaatgcaatttaaagaggagctaatactacaatactaaagtgaaatgtcttcttgctagtttatgctttatggtttcatactaagagagctggaaaaattttattttcctagaggcagagctttttagaagaggtatcaagcacctcgactgaagtttctttwttaaaaattgtgttttgtttcagaaatatcatcttaatagcagaattagactaccaatgtaacattcaaatacatacacaaacacacacacatataatatacatacacatacacaatgcattgtttttaacaattatttaattgagctaatgtttattgccttggttaatttcatttaatataggaatttccaaacataacacttctctaatcttgttgaattctctttcatttcctctaggaattaagccagatcaatagtcaaattctactctgcttttgaagaaa

SEQ ID NO: 512397 - DNA, 623 bp, Homo sapiens
cgtctatgccgtagaatcacatgatctgaggaccattcatggaagctgctaaatagcctagtctggggagtcttccataaagttttgcatggagcaaacaaacaggattaaactaggtttggttccttcagccctctaaaagcatagggcttagcctgcaggcttccttgggctttctctgtgtgtgtagttttgtaaacactatagcatctgttaagatccagtgtccatggaaacmttcccacatgccgtgactctggactatatcagtttttggaaagcagggttcctctgcctgctaacaagcccacgtggaccagtctgaatgtctttcctttacacctatgtttttaagtagtcaaacttcaagaaacaatctaaacaagtttctgttgcatatgtgtttgtgaacttgtatttgtatttagtaggcttctatattgcatttaacttgtttttgtaactcctgattcttccttttcggatactattgatgaataaagaaattaaagtgatggttttattggtttcctttcccccaattaaggccaaataaagtcgtgagaacattacccatttacttcctaagagtggatttgagtttcaggagccttaaaaaggac

SEQ ID NO: 512398 - DNA, 623 bp, Homo sapiens
cgtctatgccgtagaatcacatgatctgaggaccattcatggaagctgctaaatagcctagtctggggagtcttccataaagttttgcatggagcaaacaaacaggattaaactaggtttggttccttcagccctctaaaagcatagggcttagcctgcaggcttccttgggctttctctgtgtgtgtagttttgtaaacactatagcatctgttaagatccagtgtccatggaaacattcccacatgccgtgactctggactatatcagtttttggaaagcagggttcctctgcctgctaacaagcccacgtggaccagtctgaatgtctttcctttacacctatgtttttaartagtcaaacttcaagaaacaatctaaacaagtttctgttgcatatgtgtttgtgaacttgtatttgtatttagtaggcttctatattgcatttaacttgtttttgtaactcctgattcttccttttcggatactattgatgaataaagaaattaaagtgatggttttattggtttcctttcccccaattaaggccaaataaagtcgtgagaacattacccatttacttcctaagagtggatttgagtttcaggagccttaaaaaggac

SEQ ID NO: 512399 - DNA, 623 bp, Homo sapiens
cgtctatgccgtagaatcacatgatctgaggaccattcatggaagctgctaaatagcctagtctggggagtcttccataaagttttgcatggagcaaacaaacaggattaaactaggtttggttccttcagccctctaaaagcatagggcttagcctgcaggcttccttgggctttctctgtgtgtgtagttttgtaaacactatagcatctgttaagatccagtgtccatggaaacattcccacatgccgtgactctggactatatcagtttttggaaagcagggttcctctgcctgctaacaagcccacgtggaccagtctgaatgtctttcctttacacctatgtttttaagtagtcaaacttcaagaaacaatctaaacaagtttctgttgcatatgtgtttgtgaacttgtatttgtatttagtaggcttctatattgcatttaacttgtttttgtaactcctgattcttccttttcggatactattgatgaataaagaaattaaagtgatrgttttattggtttcctttcccccaattaaggccaaataaagtcgtgagaacattacccatttacttcctaagagtggatttgagtttcaggagccttaaaaaggac

SEQ ID NO: 512400 - DNA, 493 bp, Homo sapiens
gctgagtgaggctctgcagatatctctgtcctcacaacctctgtgcaggtctctgtatttttagtcccatgtaacagatgcagaggcatcggagagtcaggaaagctctgtgacgcatggaggccacataactagtgagagcwgactcaggaatagaacaaaggccagtctgactccagagcctcaaggttccctcttggggtacaatcaaggcagtgagctttggggagtggggacagttccaagggctggcacagggtgaggtcacaaggtacaatgcagttcttgcaaatagaagtgtttgttctaccactgtaatgattttaggaatgaggtcccaaagcagtatgaggacttcatgtatgcgtagataaccacattggcacatggatgttttctaggagtatgaggtcacaggcaggtccaatatcacaaaagtatgaacctataagtctaaatgtacctgtgagaatgtaattgatttgagtggggg

SEQ ID NO: 512401 - DNA, 223 bp, Homo sapiens
gctccttccgttgccccacctggtttctctccctttttatcaagctcctttctatagcamcccttgcagaagtatctgcaattcaggttttgcttctagagagcccacactaagacagggccttatgattctccagtcattcctctcccactgacctgctacctctgctcttgttctctgactggcttctacccattttcttccacttccttctggatctctt

SEQ ID NO: 512402 - DNA, 257 bp, Homo sapiens
gaggctgcaattgagccctgggtgtggacatgatcaaggctgagcctgayggggaaggagacacaggagctggaaaggagtcatttgttggttgaatcatttggcaattgctgagccttatcactggctaggcactgggttaggctcctttgtagctgagctcttctctaattctcatagcctgtgaagtggggatggatctgtcctatttcatggattcacacttttatggatttgagcacagagaggttaagtgg

SEQ ID NO: 512403 - DNA, 646 bp, Homo sapiens
taccaaactctaaagtaagtatacactcaaatgagagttaggggacaaagaactgtcttctgaaccatgaaaagacggaatgtcgtgattacctcaggcactgaaagacagcaaaaatctacattagttctagtagaaagactacagagaatgtttgacccataaaattaatttttgcttcctacatagccgactccatggagacaaggtctaaaaagggaaaatggtcgaaatcttaggtttgtaggttaacttactttgtaaactagatatgtcctgaaaagactggaataatttaaattgtttctgcgttcataagaatcattttatgtatcaaaaattcttttgttttcagctagttttgaagattgtatttagattatggrcagactactttaattgggttgtgtttcaaaagtttcattatgaagttaaatatttgggactcaaaacttattttcaaatataaagaatgctataaatgctgtttcatgcccagattcaattttatgaaatccacaacattatagtaaaattacataagttataaaactagaaattgaagggaagaatcattgaaaacaatactatatgatcgtcaaaattaagccaattagacaaaaaatattacattatatatttactt

SEQ ID NO: 512404 - DNA, 646 bp, Homo sapiens
taccaaactctaaagtaagtatacactcaaatgagagttaggggacaaagaactgtcttctgaaccatgaaaagacggaatgtcgtgattacctcaggcactgaaagacagcaaaaatctacattagttctagtagaaagactacagagaatgtttgacccataaaattaatttttgcttcctacatagccgactccatggagacaaggtctaaaaagggaaaatggtcgaaatcttaggtttgtaggttaacttactttgtaaactagatatgtcctgaaaagactggaataatttaaattgtttctgcgttcataagaatcattttatgtatcaaaaattcttttgttttcagctagttttgaagattgtatttagattatggacagactactttaattgggttgtgtttcaaaagtttcattwtgaagttaaatatttgggactcaaaacttattttcaaatataaagaatgctataaatgctgtttcatgcccagattcaattttatgaaatccacaacattatagtaaaattacataagttataaaactagaaattgaagggaagaatcattgaaaacaatactatatgatcgtcaaaattaagccaattagacaaaaaatattacattatatatttactt

SEQ ID NO: 512405 - DNA, 646 bp, Homo sapiens
taccaaactctaaagtaagtatacactcaaatgagagttaggggacaaagaactgtcttctgaaccatgaaaagacggaatgtcgtgattacctcaggcactgaaagacagcaaaaatctacattagttctagtagaaagactacagagaatgtttgacccataaaattaatttttgcttcctacatagccgactccatggagacaaggtctaaaaagggaaaatggtcgaaatcttaggtttgtaggttaacttactttgtaaactagatatgtcctgaaaagactggaataatttaaattgtttctgcgttcataagaatcattttatgtatcaaaaattcttttgttttcagctagttttgaagattgtatttagattatggacagactactttaattgggttgtgtttcaaaagtttcattawgaagttaaatatttgggactcaaaacttattttcaaatataaagaatgctataaatgctgtttcatgcccagattcaattttatgaaatccacaacattatagtaaaattacataagttataaaactagaaattgaagggaagaatcattgaaaacaatactatatgatcgtcaaaattaagccaattagacaaaaaatattacattatatatttactt

SEQ ID NO: 512406 - DNA, 586 bp, Homo sapiens
cttcaataaataaagtaaaagaatattgtgatcacaacatgaaagmatgaaattaatctgtatttgttacagaacagaaataaaattaagttgtaattaattcaaaacagaaatatgccttatttgtaattaccttatttgtgacagcatttaattattcctttaaatacaattttggagaaactaaaatttttgactaaattttgattttaatcaacacacacacacacagtgtagtcttatgtcataataactgagattaatatccagtatgcaaaatacttgagattaatgtagaataattttgaagcaaaaatgtttttccctcagatgtgggacatgattcagcatttgatacttaaatttcctttgaaatgttgcagagacaaactgtactcaaactcaaataagagcaatttccattattacataccaatcctggaaatgtgtgtgagaatgacaacttcaatcaccaccacatcagtttgccttccttgtcgatttcttagtaaaaccagtttaaaagaatgtgtagccacaggtgtgtatagacaaaactgaacttataaataacacagcaattcag

SEQ ID NO: 512407 - DNA, 628 bp, Homo sapiens
ctgaactataattctctgtgtgttcaattagatagaaatccttcctctgatttcaaagggaattaatgtaaactttaatgttgcccttgctttattagcaaactagttttcaccacggtatattccttttatcatagagtatttgaaacatatatcatttgtttcctttctaagacctttagctaacattagctcaaactacttttattttgcccctragatagattcacctaaatgatattttccttgctaacctcaacagcctgacacagtatattactttttgagtaactgtcctccttttcatttccaatactttcttagccacatctttaagaaaaggcttttgtaaagccacatagaaaactactagctctttgttttcctttctttggaaattgtgaagtttcatcgttcaattatggggctctaactctctgctccagagacttgactcccatcagtattcattttttttcttctcccatttctagagtctctttattaaattccatggatgttcagtataaaaatcaacacagctaatttctaatctaattctgatacaaggagccttcatgttttttctttaccaattggttacaaaatcactagcagtaatcccagg

SEQ ID NO: 512408 - DNA, 366 bp, Homo sapiens
ttaacctgagaagaaaagaatctataataagtcattgccaagaccagacagactgttcgtctgttcttcagagggcagctttgagacattacccgagagacttcaactgcawaatacaacaacctctgttcaccctacagttcctccctcaacttcccataacttgtgggtcccattcagtttccaaagagaaccatttacaaactactgtctgctccttggatccattaaactctcctaaaatcactatcccccaaaattgcctatattcccccatctccctgactgctagaaagagagtgccatttaagctgtggctatctggcctttctgttacagcccaacaggttcttcttacctgctgcc

SEQ ID NO: 512409 - DNA, 490 bp, Homo sapiens
tttttttttttttttgagacggagtttcactcttgttgcccaggctggagtgcaatgacgccatctcagctcaccacaaactccgcctcscgggttcaagcgattctcctgcctcagcctcccgagtagctgggagtacaggtacctgccaccacacctggctaattttgtatttttagtaaagatagggtttctccatgttggtcaggctagtcttgaactcccaacctcaggtgatctacctgcctcagcctcccaaagtgctgcgattacaggcgtaagccaccatgcccaaccataattctgaattattatcatgaaaatagttttcacttaaatccctgaaagtcccatgggtactcccagaggcctccggactccactctcattccatttctttaaagtatgtattcctagaagtaaaactgctgagttgcaagaaagcacaacttgaacaattttgcatattgacaaacaggtctccaaggca

SEQ ID NO: 512410 - DNA, 477 bp, Homo sapiens
aagtcacaaagaagtaggaattgacagctatcaaataagagagaaaggcaaaagcaagtgcaaaacagtaaatagctaagccaaaagaaatcagaagaagacatgtataaaaaataagtgttagtaaataagtagtaataaattttatctcaacctaagactaagagacaataaaaaggatggtaaaaataaatgtttgaaaatcaaaagggggtaaacatgaaaaaagaaaaacagttwaaagcaatataagtaagcaaagtatatgaaaataaggcagaaatgatagcaataaaatgtgcctttcagggaggtttttttttttttttaaagatatttcaagaaaaaaagaagaaaatgatctgcctacaagagcaagtaggtgtcatgtgtccttagcagtcttctgagcagaggtaacatgttgcagtatagaatctctgaggaaactcaggcctgtgatggacagcagagctc

SEQ ID NO: 512411 - DNA, 573 bp, Homo sapiens
tgtacaccaccatgcctcgctaatttttttttttctgtattttgtaaagatggcgtctcaccacattgcccaggttggagaactagttttttaaacaattaacagaaataagttatttttctatgctgacttgaaaatgaagagcagagaaatactgaatactttctatgccaggcgttgttgtattaactaattaaacctcaaaatgatcccatgaggcgttattatttatgtctctgctttataaagaaagaaatggaagcaaaacaggttaagtaacttgtyaaccaaggtcacacagctattaagtgccaaagtaagactaggaccaggcctgcctggcttaaatcatcctcttatccactttgcagtgcggagtacataccaagggttgggacaagggtgaagtaagacacttgtcttgggtgcaaaattaaagaaggcaccaaaaaaacctcagtgatcagataggcattttaatgcaatattttaaaaaattagaattaatgcaaaaatcctatgataaaataccaaaattctaaataaagatgggatcagaattaattttctttg

SEQ ID NO: 512412 - DNA, 304 bp, Homo sapiens
agctgcttctctctgattcactttccctatggacaccaccactgtaatgcttcactcggtcatgtctagaatcatacagggctggggaatgtggtctaagagatgggttcagagtgttaaggtcttgtcagatagaagagatggagacatggcagccaggtagtccataagggcagaattaagggtcgtggtatagcagtctcccactgtctgctataccacagcagtaataacaacrgctagcatttactggtagcttactgtatgtcagattctatgcggaacgttttacatatgttctcac

SEQ ID NO: 512413 - DNA, 632 bp, Homo sapiens
ggcctgaaaatgagattagagagcctgtaccttcttctaattatacaytacagatccacaattccttctttggaattccaaaatccaaaatactcagaaaattaaaaattggaagctttcttcaagactcatttggctccaaaacctaaccttttactgacagcttttagcccacgttgtgtgataattaatataatttttgaagaagtagtatggccggattactgtatacaatgagttgctttcctaaaatttaaataatcctaaattccaaactgcatctgaccctagaatcttggctgagggcccagggacctgaaccaaactgaaggtttggttccatttaaaccttacaaggggtcatggcttaatagtgtacacaagcgatatctctctcaattttccagctaaggttattcctcatgaaatatatcatgttggatttttcaaaggaatgcagagtacaatcttggaaggacaagactaagaagagaacctcatggggaaatgaaaatattaaaacaaataaaaaataattgcgaaataaataaatcactttttcctctctttgcctagaaaatagccctgtatttcaaattacaactgcccttgaatgttctttttttcttttc

SEQ ID NO: 512414 - DNA, 570 bp, Homo sapiens
ctcaagagatgcaatgacatctgcttaaaatactgagtattaattcctattatattaataatatacartcttaccaatatggttgagaattgttggttgatagaatttgcatggttatacacttagactaaggaattaacagggtaattttaaaagttgtgaagtacctactgtatgccacaccacaggttacaatactgatgatacagagatttgtgggacaaaatccctgacatcaagctggtcacagttaaccagggagacaacatatccagataactgtaataacctattttaggtaaaataatagaggtttgtttagagttctgtggttatttctgcctcgataaaatcaaggaattcttccagaaaaagtgacatttagactagctcttgaaacatgaataggaatttccaaggttttctggagagagccctgggagtctgttgggggaggcagcattagatactggtacaagagcaaaaccagaggggaggaaggtttgtgacagtgtgggaagaaagaggaatgtggttaggatgtagagtgcacaggcaagtggtaggaga

SEQ ID NO: 512415 - DNA, 547 bp, Homo sapiens
agtgcagagctcagagattcagtaccttgccttcagaggctaaataggctacagtgaatttctttggtcaaaaagcttctagggcagtctactgggtatgaaggttctgacagagctctgtgacattttgttaactgaggtawgctgactgttttttcagacaggttttagctgccatcttgtgtcccatcccttcttctctgagaatggctgatccattactcctccttctttattgctccaggaagcttctatctttccatgctgtagcttggtgcttgccccaactaccctgtagattgtgggcctgtttagaagttaaaggtgcatttcttccaatcagctaaaaatagactccttcatgtacattgctcctccaagaaatacgacctggtgattttatgaccattcaggttcagcttccaaaatatagatacggagtgagaggaagaacatggactcagtgatagatgaacctggctctgaattgtgctcccccatttcttgattgttatactcttgccaagctcctgagattctctaagcc

SEQ ID NO: 512416 - DNA, 518 bp, Homo sapiens
tacatgtttggaaggaacatacaatagccctgagggtgatcacatacagtgataggaggcctggaagagaaattaaggagtataacagggaatagggagcactgagagagagaatgctctttaatagtgagcagtcagtgagggccttaatgataaagtgacatttcagtggtgatacgaggaggcaaaggggtaggtcttgcagttatctgaaggaagagtactctagtccgagaagacagccagagtaaaggtatggttatttttgtcawgtttgaacatcaacaagaaggtctgggtgattgaaatggaggaagcaagggagagaaggtcaaagagagagagatggagttggataaggtagagcctacaaggtcactgtgaggactttggcttttgggctgagtgggattggcgggctttaggcattttgaaaggagagatgtggtctgacttatatgtttatagtatctctggctgctgtgtgaggaaggaggtgattgagttgtgcagcccag

SEQ ID NO: 512417 - DNA, 518 bp, Homo sapiens
tacatgtttggaaggaacatacaatagccctgagggtgatcacatacagtgataggaggcctggaagagaaattaaggagtataacagggaatagggagcactgagagagagaatgctctttaatagtgagcagtcagtgagggccttaatgataaagtgacatttcagtggtgatacgaggaggcaaaggggtaggtcttgcagttatctgaaggaagagtactctagtccgagaagacagccagagtaaaggtatggttatttttgtcatgtttgaacatcaacaagaaggtctgggtgattgaaatggaggaagcaagggagagaaggtcaaagagagagagatggagttggataaggtagagcctacaaggtcactgtgaggactttggcttttgggctgagtgggattggcrggctttaggcattttgaaaggagagatgtggtctgacttatatgtttatagtatctctggctgctgtgtgaggaaggaggtgattgagttgtgcagcccag

SEQ ID NO: 512418 - DNA, 510 bp, Homo sapiens
ctcccagtcctagttttctaacttcccagcagttcatcccacagtttagtgactaaataaaccaggacccattggagatcctgacactcacctcttaggaagcagcttttctgccctagtacagggaggtgctggtcattgcaagaatgcatcaagttcactaaggaatttgctattttctaacataagagccataatatttttcctctttgcattgatttggaaggcagcttcagaagtacattgagaaatatatatgtaatttttttctgtctttgatagctccccaaaacgcagggcaaaatgtaagatttccttttacacttggccagatacaaattgccataaacagctgaaaatactttgggaaattacgagttgcttgyggatggatgtcagagtgcaccactaattgtgtcaaaatttctattgcttccacaagaagaacactttcaaaataatgaacatttgtattgagggttggctggaaaaatagtttgttgttggatg

SEQ ID NO: 512419 - DNA, 519 bp, Homo sapiens
gcttgtacacccttttctaagttctggaaaagctgtgggggatctcagagttttaacttaaggacaaagcagggccttcacattcttctttaaagtagaaatctcagaattacctactctctgatgggttcacgaaggaaactggtcaaagagaagaggaaggacaagtgggcatgttgaccaggtttggagggaggaagagagagagagagaaaaaaaaaaaaaagacaaggacaggaggaggaggtagtggtggaygacgaggaggaagaaaaggagatgcttggcccctttgatgtgccaggctttgtctaggtttgctaaccgcacagaggtagaaagaaatggaaaggctgtttaacacagtgatactgccttttggtaatcataactcactcagtgttttagaatctcattattcagattagcaattcttcttcccttgacagggatcatggaaaaaggtgggtggaggtaggcttggcattgggatacaaggctgaagactcgtgtccacta

SEQ ID NO: 512420 - DNA, 519 bp, Homo sapiens
gcttgtacacccttttctaagttctggaaaagctgtgggggatctcagagttttaacttaaggacaaagcagggccttcacattcttctttaaagtagaaatctcagaattacctactctctgatgggttcacgaaggaaactggtcaaagagaagaggaaggacaagtgggcatgttgaccaggtttggagggaggaagagagagagagagaaaaaaaaaaaaaagacaaggacaggaggaggaggtagtggtggatgacgaggaggaagaaaaggagatgcttggcccctttgatgtgccaggctttgtctaggtttgctaaccrcacagaggtagaaagaaatggaaaggctgtttaacacagtgatactgccttttggtaatcataactcactcagtgttttagaatctcattattcagattagcaattcttcttcccttgacagggatcatggaaaaaggtgggtggaggtaggcttggcattgggatacaaggctgaagactcgtgtccacta

SEQ ID NO: 512421 - DNA, 488 bp, Homo sapiens
atggtgctgtgggagcgatatgggctgtaaaagccaagcaatttgcaaaattaygttaagacaaggaattactcaatgcaaacacctgcttcagagtgatcatcaaattattcacagcctagctatgaccctgcaagctgacttccctgcaagctgactttcctttactcctactctgtggtcatttgcgtttatcagtaaacacccacagacccactacactttgctaaaccaagaggccaaattaaacaacacatactggagttaatgatgggttgtaataacaacagcccagaaacatttgaatggtgcattaacaatttgcaaaggacttcacacgcaggatctcacttacactttgtaatcactctacgcttaggctgttccctgggaaagttgccaccaatgagttttcccaaagagtatgcaaaactttaaaataaaactgaggttaatatactaccctaagtctcctttctactgtctcc

SEQ ID NO: 512422 - DNA, 629 bp, Homo sapiens
gctggaggtggggtacacttttgttgctttggattaccaaagaatgaattgaaacttcactttttcttttattaaacaccttattctaatagtatttttgccatttacatgataaagaatgtggtctcattttggtcttagcaacctctacgcaaacacatttggactctttttacataaactttgtatttggggataattgtagatttacataaaagctgcaaagacagttcagagtgttcctgtatacccatcacccaacttctctaatattaacatcttacgttagtatggtacctctgtcatcattgatgaaccaatattgatgcatcattattcacagaagtcatttctttattgagattgttctagtttttgcctaatgctctaatgtccttctttctgttctakgatctggataggatactactttgcattagattgggcttctttttgcattggcatcaaaaagccatatttttttcttttaaagtaaaactatcatgttaaaattaaggaaatgtttttctttttggagggtgtaaagttacaaacttatttacatttctgccatgtctatagtcaattaatactggttgtcttttcaaatttggattgtgcaactccag

SEQ ID NO: 512423 - DNA, 587 bp, Homo sapiens
agcaattctaattcctgtcatttaagttggcattttgttgttgtggttgttgttgttatgaataaacacatgagaaaaagatttatgtagaggatcatggtttaactattctattactggacaccataataaaacagatctgaaaactgtgaatgacagtgacaatcggaataccttttacatagtgcctgtctccaaggaatcatttttccctcatgtcagaggatccagtaatctgtctttggctaaagagagagaattttttttttttttttaatgtccaagcttccagtagcctaaacaattgccagcagagaaaccaaggctgttttctttcaaaagcctatacagaactattttggaaacagttcagccactgggtaagcgagtcaaagggctgctaggaagtgtrtgctgtagcacacatttcactgtctgcaaacattcttttctgatggtgcatctgagtgctgagattctctctccctggggccttcctgttccatctgctccagcttactggttcccctgcaaaaacagcaaaggatgccatccctgcactgggtatgtaactgaactgattatat

SEQ ID NO: 512424 - DNA, 510 bp, Homo sapiens
tagccctggtggatgaatatctcagcgtcttcccttcttggtgtctgagttttaagggatatgttctacattgtctctctgaggattcctggccagattgagttccaggtgcctgcagtggtaacctgctcattagcccatgatttctagacttttcttcccttcctgcctcctttccctactctctcgttatgcttccttagataatcttccaaccaaactaccttcccccggtctttgcctcagggtcagcttttggcagaagccaaagcaagacctccagtttggagttggcacagtccaagactgaaatcaaggtcaagccctagggactggaccttgatttcacacttgggctatgtatgtgcccagtggggaggaggaagcctggtaatgggtgtattctcagcaaacaatagcagaaacctcactagggactgggtggtcatgattttgrtcagagaaggttgtatttggttgacttcagagcagtaaggctaattcctgata

SEQ ID NO: 512425 - DNA, 632 bp, Homo sapiens
aaataaagtaagtgaaacctgctaccccagcctcgcctgtgtgttctgtaacccagactcatttggttgtgagggctgttgttagaaatgttatgaaaagaacaatatgcataaattagatcaaatgtaaaattatgcttataatgtcacttgagtgggaggtaagagggtggagtcacaggcactcagttggagtttacccacctctcgcttaccaggctcatgagtgtggcacagatgaacatcacctgacactggtgacagaagagaaaacgccggcatgaaggctaggtgggggagagatgccaggctgtggggctaggccctgggcatgctgagcctgttakgtcactggacatctaactgcccgggcaccagcccttgtcacatcagttgaggtaagaagattgggcagtactcttcagaagtcacactgctctgggagaatggaggagaatctacaacttctcatcctagggtaggttttagagtgagctggacactcttggagagctaatgagatgggaggaaggcagtcccccaggtgcacctgatggccagaacataggaagtgaggcggggtgtgtgcgggtggccagtccctatgagaggaggagtttaaagcttttaca

SEQ ID NO: 512426 - DNA, 478 bp, Homo sapiens
gtgggaggtaagagggtggagtcacaggcactcagttggagtttacccacctctcgcttaccaggctcatgagtgtggcacagatgaacatcacctgacactggtgacagaagagaaaacgccggcatgaaggctaggtgggggagagatgccaggctgtggggctaggccctgggcatgctgagcctgttatgtcactggacatctaactgcccgggcaccagcccttgtcacatcagttgaggtaagaagattgggcagtactcttcagaagtcacactgctctgggagaatggaggagaatctacaacttctcatcctagggtaggttttagagtgagctggacactcttggagagctaatgagatgggaggaaggcagtcccccaggtgcacctgatggccagarcataggaagtgaggcggggtgtgtgcgggtggccagtccctatgagaggaggagtttaaagcttttaca

SEQ ID NO: 512427 - DNA, 478 bp, Homo sapiens
gtgggaggtaagagggtggagtcacaggcactcagttggagtttacccacctctcgcttaccaggctcatgagtgtggcacagatgaacatcacctgacactggtgacagaagagaaaacgccggcatgaaggctaggtgggggagagatgccaggctgtggggctaggccctgggcatgctgagcctgttatgtcactggacatctaactgcccgggcaccagcccttgtcacatcagttgaggtaagaagattgggcagtactcttcagaagtcacactgctctgggagaatggaggagaatctacaacttctcatcctagggtaggttttagagtgagctggacactcttggagagctaatgagatgggaggaaggcagtcccccaggtgcacctgatggccagaacmtaggaagtgaggcggggtgtgtgcgggtggccagtccctatgagaggaggagtttaaagcttttaca

SEQ ID NO: 512428 - DNA, 569 bp, Homo sapiens
gtggctgctgctcagtcatccctctgcatagcaggcaggtcctcagccacacgtatagctgaatgtcttttggagtgtttagagggtgctgtatgtcttagaaattcctttcccctggccttgtccagtgaacacggttcacatggccaacaccacttcttgagatgtgggcatcatgctaagctgagaatggattgggtttagttaccattgtgcctcctcctcacctgagaggcctattttctttggttgattccttaagtgtattagtgctgtcagtcacttttggacaactgaaatgacaagtggctgttgtttcattaaaaaatgaaggctttgaatgtgaaaccctccttttctcctctccttctcttagatgaaagattttgttttataaaaaagggtacacagtggtatcccagcaggtgtagtgtgagaactggcatgtgctaggctatggtttcagtgtggatgggcaattcttcaggatggaaaaccaagtctcactgagttgctggagccatactcrcctttctccacatcccccaccaagggctttcacttttctc

SEQ ID NO: 512429 - DNA, 325 bp, Homo sapiens
ctgcccaaatcactatatcaggttcagatttctctgagccccagaattattactttgatttgggcatttcctgatttttttatagacaccactaattcatcatgtgcaaattgatttctcacttatatctgcttcatctctagttttccttctttgtgaggatggtaccccattttcacagtcatgcagtgactacattcttacattccacatacatgcatacagaatccatcacattmtttataccatcatggctgccccctgtattgtttgattatttcttgactgatttatcttcatggtgttctttcttgctaccttgtct

SEQ ID NO: 512430 - DNA, 470 bp, Homo sapiens
agtttgacatgacatggaagccttaataaggcaatgaagacctaagaaatgggaaaatttgtgtatgtttgtgctaggtttgatgaagaagtgaatagttgtrgaaaagttgtagattttagaaagtatgatctaatggtaataaactggggagaactcagcaaggcccatttattcaggttcttccctgggaccctgtgtcttccgggatgaggatgttcctttactctgcctatcaggaagtcacttctggaatgagggtcttttgacctgcttcagggaaaggtcggaaaatctttcctaggttttattacatgcttcaggggaaaaggctagaggaaagatgagagtgagcttcttgcttctgctgttttctcaaatgtcacattatggggtggcttgtcctgaaccctatcattgtgcaaggagaaatcatgacttcaaggaaactttcactgggagtgttgagg

SEQ ID NO: 512431 - DNA, 545 bp, Homo sapiens
tggttatgaggtcatctgggggacagcacgacaggtagagacaggaaaagtataaaggctctgaggtggaacctgagggttggaggcacagcaggaagccaagatagctggcattcaccataagaatggtagaaaggagtctgaggcaagatacaggccagcctgcayggggccttgtagaccgagtaaatacctcggatgttgcaaggacttttctgccttgcacgttctcctttctcaaaatctgttccttctgtttgttctacaaattcctagtttctgaaaaccagctactgatctggtctaattttctctttttatcatagggtaaaagatacttgaataatattccacatatcactacactcagattctactcttgattctgaagtttttgtttgtttgctttttactaacatcatcttctccctcaactacctaatctttggctttcctaaattgggaaaattaatatgacataagtttcttcatcagatatatcctcaaaatgatggttaactgagccaaggtcatattggaaaagg

SEQ ID NO: 512432 - DNA, 507 bp, Homo sapiens
ctgttcctctgaggtgctgagtctatgattagaagcagtgctgtgctaatgccatttccgggtgccttttcartaagtcacttatttctcttccctgcgtttgtttcctgaacgattattgattgtggtcagcctcctgcggctttcagagtggctttggtctgtaacaacatggagaccaggctttggcgcaaagaagagccttagattttgctttcatgtagccactgacctccctgctggggtgcagatggggttggtgaaaaggaggagattaaatagtatccttggaactttgtgagcacgtgggagattcctgggttacagatttgtactcaggtctggcctcaaaattcagcctgagagattataaaatggaaacatagccaggactttatttctccacagcgggtctctaactttaaaattctaagcagttgtaacataattcagaattgaggcagtgaatccaagcacagagagatcaaacctgccatcagcccactc

SEQ ID NO: 512433 - DNA, 392 bp, Homo sapiens
cctccctctacattcccgtcgcacttgtctgactctgttacactctcttagcatttaatcagagtttgccttttaatgataaaggttttcacatgtgtatttccttgtttcctatgtatactgtaagctcttcaaacatacccattcttacctctcctcttcctattttgaccacactatagtccctatgcttggtccctggcacccagtaggttctcactaactatttcttgatgaatgacaatgtaaatgaacacatgarcattgggaagtaggtttcccaatgcaaagggtccatctgtaagacaaggattttaagtaactccagggcaggtaagaaggtagtttggggcacaagaccacacgaggtccttgaaatcacacaggcagct

SEQ ID NO: 512434 - DNA, 368 bp, Homo sapiens
ctggggacagaacggtacctcctgcgagatgctctcaggggcttggctgagcctggctgaccggaccrtcgcctcaggctgcccagcatgctagggacccagattatttgccaccctctgatgtcatatctacaagtcttgcatctctaccctcttcactgggctggttggggtccagatacctaaagctactcacatatctccaacatgcacatggctgccaccttcctccccaactgcctctacccctagcggcctcgcccaccaaccaggttcatttcagttcaaataaatgtattgagtgttccccatgggttaggcattggaccaggacaggagtgtaggggatacgtcccctgctattgcca

SEQ ID NO: 512435 - DNA, 368 bp, Homo sapiens
ctggggacagaacggtacctcctgcgagatgctctcaggggcttggctgagcctggctgaccggaccgtcgcctcaggctgcccagcatgctagggacccagattatttrccaccctctgatgtcatatctacaagtcttgcatctctaccctcttcactgggctggttggggtccagatacctaaagctactcacatatctccaacatgcacatggctgccaccttcctccccaactgcctctacccctagcggcctcgcccaccaaccaggttcatttcagttcaaataaatgtattgagtgttccccatgggttaggcattggaccaggacaggagtgtaggggatacgtcccctgctattgcca

SEQ ID NO: 512436 - DNA, 368 bp, Homo sapiens
ctggggacagaacggtacctcctgcgagatgctctcaggggcttggctgagcctggctgaccggaccgtcgcctcaggctgcccagcatgctagggacccagattatttgccaccctctgatrtcatatctacaagtcttgcatctctaccctcttcactgggctggttggggtccagatacctaaagctactcacatatctccaacatgcacatggctgccaccttcctccccaactgcctctacccctagcggcctcgcccaccaaccaggttcatttcagttcaaataaatgtattgagtgttccccatgggttaggcattggaccaggacaggagtgtaggggatacgtcccctgctattgcca

SEQ ID NO: 512437 - DNA, 368 bp, Homo sapiens
ctggggacagaacggtacctcctgcgagatgctctcaggggcttggctgagcctggctgaccggaccgtcgcctcaggctgcccagcatgctagggacccagattatttgccaccctctgatgtcatatctacargtcttgcatctctaccctcttcactgggctggttggggtccagatacctaaagctactcacatatctccaacatgcacatggctgccaccttcctccccaactgcctctacccctagcggcctcgcccaccaaccaggttcatttcagttcaaataaatgtattgagtgttccccatgggttaggcattggaccaggacaggagtgtaggggatacgtcccctgctattgcca

SEQ ID NO: 512438 - DNA, 621 bp, Homo sapiens
ggcatttttttttaatgtttaaaaatatataaataatttattctccccattgcacagaatggcaatatgttctctcctaggtgattgaaaaggtttttgtctttagtctcttatggactggtgcatttgatggrgatccagaaaaaaagatgggactaagtgctgcacgcaaaagagaactggccatgaagaggacccacccgccagacaagagccctgtgtgtctgcctgggaaggagaggagctcattcctgaaggtcccacctggacgggctgtttgcttatgaatgtatgcacttaggtaggtaggtaggtaggtaaatgtgtctatgcatgtatacacataagcgtatgaatctatgtctatgggtgtgtgtatgttgcatggaagtacacatgtatgcagcaggctaacactgactgcatttactgtgtgcaagtctctgcaatatgctcccaagacacagtagctcatttagtcattacaacaacctttgcaatagaaataccaatggccacccatattcactggttctcatttgcctggctgtgttctaagccttgccaccacctgggaggtaggttctatcattttcccccatgaaataaatgaatgaactg

SEQ ID NO: 512439 - DNA, 612 bp, Homo sapiens
gctgctctgacatcaacagacacaagcggaaattaacagaggggaagccagagtggatagcaatggtggtcttaatcaaatgtgatttaaaatatgtattggttcaaattgtataaaaacataagaacatgtgaacacattatgagggctcctccccagggccttggaaggggtctgcatgggggaaggcatctgagacctaagcttcattctcttcatctgtgcatcaccctgaattcattcctgtatcactttgatagagtgagaattgttcattaccttaattgtattagggtgttgtgtgggattttttattgcatctagaattatgctgaggaaaaaatagacttttgcattctgaataattatcatccccctccagagatgactaagaggaagcagagcccattaccacgtcttcccctctagtctctgtattaaggagataakgactggggtgtggtggggaggaaatctggagagtcattggaatcgtaagtcatagaactatttgggaagttctgggggttttctaacccccataccaaataatgggtggtccaagagaacccttcatagtgactgggtggtttgaaaggaggagaactaatg

SEQ ID NO: 512440 - DNA, 472 bp, Homo sapiens
ctatttattccattccagggttcatgaaagacttcacctgagaggctgggtgcagtggctcacggctgtaatcccagcactttgggaggctgaggcgggtggatcacctgaggtcaggagttcaagaccagcatgaccaacatggtgaaaccctgtctctactaaatacaaaaaattagctgggcagggtggtgcatgcctgtagtcccagctacttgggagggtggggcaggagaattgcttgaacctgggaggcagaggttgaacctgggaggcagaggttgcagtgagccgagattgcaccattgcactccagcctgggcaacaagagtggaactctgtctcaaaaaaaaaaaaaaaaaaaaaaaaaagacttcccctgagaaattacacaggtgatgggtgaagaagsctcctttattgccacacatgaatggcacaggcccaataggaagactctggaatcaggaag

SEQ ID NO: 512441 - DNA, 583 bp, Homo sapiens
gggtgagcacatggtagaggcccactacatacttgttgaatgaaagtgtgggcctggtgtgctattagttggagccatttgcagagttggcagcaatgctccatctggccaccaggggggagcagtggcgcaattttgagccgccagccytctccaggcccacggtggggacatgaccaaatggagagtcccctttcctcggtcagtgtctgatgactccaaggccctccttttgtgccagagaacggacatcacgaaggcagccctgggtgtactgaggcagagtcgagtgaagacagtgtggctagtgggccggcgtggacccctgcaagtggccttcaccattaaggtgctggggccagagtgggaggagccagggttccaggtggagggggcctctccttaaggggttggggtggggcagagcccctgggagtagctgctgcctgggatggaagaaggggagcagtcagggccccgggggccctgtgcctttggggaggaggcgggtggtggtctctcctgcctgggctggaccctggggtgggctcaggtggactgtgttctgggcctgacctcctcc

SEQ ID NO: 512442 - DNA, 588 bp, Homo sapiens
aaaagttagaaacacgtcttttctgaattatttgaatgcctgctaaaagaatcaatggattaaaaaaaatcatttgctgctttctttgattaatacagttaaaataatcagtgattwaaaaaaaaccatgctgtaattgagcttctatttgaaagttttggagaattgttaactctcagatatcacacagtgggatatgctttagtttatggggaagttatatccaagagtgatcgttacttatttctgatttctaaacaacaatgtttgctactatttttttgaattatgatgcaataattgacttatgaaatacatttttatcaacctttgtataatatcaaggctgttaacattctgaaaaagaaaatgatattaacagtaatgatgcttcttaatttcctccttgtgtccaaagaagttgctaacaggacatcctcctgagaaggaaggaaggacttctcattctgactcaattattattcgcttctttctctaagcaatccggagtcagctttgaaaggggagaattcctctctggccacagccctgtggagctgggatgttagcctgttaaattcatagctc

SEQ ID NO: 512443 - DNA, 588 bp, Homo sapiens
aaaagttagaaacacgtcttttctgaattatttgaatgcctgctaaaagaatcaatggattaaaaaaaatcatttgctgctttctttgattaatacagttaaaataatcagtgattaaaaaaaaaccatgctgtaattgagcttctatttgaaagttttggagaattgttaactctcagatatcacacagtgggatatgctttagtttatggggaagttatatccaagagtgatcrttacttatttctgatttctaaacaacaatgtttgctactatttttttgaattatgatgcaataattgacttatgaaatacatttttatcaacctttgtataatatcaaggctgttaacattctgaaaaagaaaatgatattaacagtaatgatgcttcttaatttcctccttgtgtccaaagaagttgctaacaggacatcctcctgagaaggaaggaaggacttctcattctgactcaattattattcgcttctttctctaagcaatccggagtcagctttgaaaggggagaattcctctctggccacagccctgtggagctgggatgttagcctgttaaattcatagctc

SEQ ID NO: 512444 - DNA, 405 bp, Homo sapiens
  misc_feature (1)...(405): n = A,T,C or G
atgatctaatagcaccagagattctaaaagaggctgaaaaactctcagaagacaaattctctcccaacaaccagaaaacaggccacgaggaggaaaacagaaagcatctgaaggcctcatggtccccatgtgtggaagtgggtactggggacagcaaaacgtgcatccatgccttcacctgarggcaggggtttggaagccagtctcttgcaggtctccctcacccaggtccctgggacgccccacgcagagtcgacctttaagggcttgcagcntggaggatggggccgacgtgtatgtggatgtgcccagcgtacttgccagcaagaagcgagcgccaggagtgcaggagaaggaccccaaacctntgaattntaggaggcgtttcctttccctgtgcctcca

SEQ ID NO: 512445 - DNA, 498 bp, Homo sapiens
tgggcacacctgagccatagctgggctcacaatctctaaaattcaattgatacattttatatgatttcattttctacccttagaatatcaattatacttcattttatatttttaaggttgccctaaggtttgtaatatacacttataacaaatccaaatctactttcaaataacactatgccactttatgggtactctaagtacctcataataacaaagtaatcctaatttatagctcccatcccttgtatcatcgctgtcattcatttctattatatgtaagaatacataagtgtgtgtgcatatatgtaaacacaagtttawacataaaaatacttatttatgtgtatatatacttaagtatatatttatacttatggttatctatgtgagtatatatgtatgtatatatatgtgtatatatacatatatagatgaactcagaataagaaaaataaaagttttaatttgctttttattcctactttgatgcttgtc

SEQ ID NO: 512446 - DNA, 652 bp, Homo sapiens
gggcacacctgagccatagctgggctcacaatctctaaaattcaattgatacattttatatgatttcattttctacccttagaatatcaattatacttcattttatatttttaaggttgccctaaggtttgtaatatacacttataacaaatccaaatctactttcaaataacactatgccactttatgggtactctaagtacctcataataacaaagtaatcctaatttatagctcccatcccttgtatcatcgctgtcattcatttctattatatgtaagaatacataagtgtgtgtgcatatatgtaaacacaagtttaaacataaaaatacttatttatgtgtatatatacttaagtatatatttatacttatggktatctatgtgagtatatatgtatgtatatatatgtgtatatatacatatatagatgaactcagaataagaaaaataaaagttttaatttgctttttattcctactttgatgcttgtcctttctttatgtaaactgaaatttctgtcctatattacttctcttttctctaaagattttttatcattttttcaaggcaggtccactggcaatgaatattctaaacttttgtttgcctgagaaagtctatttctcctttaaatttgaagaataat

SEQ ID NO: 512447 - DNA, 548 bp, Homo sapiens
ctcaccctacaagagtctggagacttggcaaaagtgacaaggaatgtgaccctaattatggagacaggagayacagcagagagatcataagtaccaagacaggaaaatcccatgtgtttttccagaaacataattgacataaatacatatttaaaagactgagtttggtaggatttttttcttgtttaaatttgtgtcctgccaccagttagcttgagacattttgtacaggacttaacatctcaaaatttcagttttggctcctgtaaaataggaagaatactttgtcgatcaaaaggtcattttatggatcaaatatcgtaaagcacaaagtacagtgtggtgcatattacacaaggaatgcttaacatatgattagacattagcattattattagctattgtttttattgtgattgctagtttcacaggaattattacaatttttgtcagttaaaatgcatgtaaaaatgtggaaaatggcttagatgttatggcagaaaaaagaaaggagaaataaaaggtcttcccaaatgattcagctactc

SEQ ID NO: 512448 - DNA, 548 bp, Homo sapiens
ctcaccctacaagagtctggagacttggcaaaagtgacaaggaatgtgaccctaattatggagacaggagacacarcagagagatcataagtaccaagacaggaaaatcccatgtgtttttccagaaacataattgacataaatacatatttaaaagactgagtttggtaggatttttttcttgtttaaatttgtgtcctgccaccagttagcttgagacattttgtacaggacttaacatctcaaaatttcagttttggctcctgtaaaataggaagaatactttgtcgatcaaaaggtcattttatggatcaaatatcgtaaagcacaaagtacagtgtggtgcatattacacaaggaatgcttaacatatgattagacattagcattattattagctattgtttttattgtgattgctagtttcacaggaattattacaatttttgtcagttaaaatgcatgtaaaaatgtggaaaatggcttagatgttatggcagaaaaaagaaaggagaaataaaaggtcttcccaaatgattcagctactc

SEQ ID NO: 512449 - DNA, 548 bp, Homo sapiens
ctcaccctacaagagtctggagacttggcaaaagtgacaaggaatgtgaccctaattatggagacaggagacacagcagagagatcataagtaccaagacaggaaaatcccatgtgtttttccagaaacataattgacataaatacatatttaaaagactgagtttggtaggatttttttcttgtttaaatttgtgtcctgccaccagttagcttgagacattttgtacaggacttaacatctcaaaatttcagttttggctcctgtaaaataggaagaatactttgtcgatcaaaaggtcattttatggatcaaatatcgtaaagcacaaagtacagtgtggtgcatattacacaaggaatgcttaacatatgattagacattagcattattattagctattgtttttattgtgattgctagtttcacaggaattattacaatttttrtcagttaaaatgcatgtaaaaatgtggaaaatggcttagatgttatggcagaaaaaagaaaggagaaataaaaggtcttcccaaatgattcagctactc

SEQ ID NO: 512450 - DNA, 580 bp, Homo sapiens
ggagggaattctgccagtagaatgtgaacttgagctgaaatatcaattcttctttgggtctacagcttgctgggctaccctgcagatttgccagcctcaaaaatcatgtgagccaattccttaaaataaatctctctctctctctctctctctctctctctctctctctcwcacacacacacacacacacacaccccctcttggttctgtttctctggagaacctcattaatacaatatggaagctaggaagagaatcacttattctttcataataattcaaattattcattttaaaagtaagatagttcagaaggcgcttgtaagtttaacgtgcaagtggcttagagtcctaggtggcatatactgacagaatgtcactcttctctcaacatctaagatcgcattggtaactacttttgaatcattaattgaagatagacacattagtcctggtcataggtggctctaatttttaaaccaatgttatctgtaaatggatatccatgaggttattcattaactcagtaagtggttctaatgggtagtggctaaggagtcttctcagtggatagcatttc

SEQ ID NO: 512451 - DNA, 663 bp, Homo sapiens
gcaagatttaatagagtgaaaacagagctcccatacaatgrgaggggacccaaaggaggctaccactgctggcatgaatgcctgggtttatatcccaatcattgtccctccccctgtgctctcaggtaatagatgattgactatttctttacctcttgcttttagcctaattggtattttagtgagttctctttactaccagattggttgggtgtgagctgagttatagccccgtgtttaaaggtgggtgtggtcaccttccccatataggcttaggaattcttagtcagcctggaaaatccagctagtccagtctcccaataagaaggtagatgtagtcactggataactgttcatcatggctaaatatccattgtagtgtttcagaatagtagatggagcagatgaagtccttaaaatgtagagtccaactttagtaaggataaagtaagtcaaatctattattgaggtcttactatttcttagtatgataaccctgaaacatgttttgtgttgttcatgtttaaaaatgtgtattttaaaattaaaagttaaaagttaaaatattttattactttgaatctttcaaatgacgcttctaataattaattccaacatgaagtttaaattattttccaataaaacaattaaatcttctaagat

SEQ ID NO: 512452 - DNA, 663 bp, Homo sapiens
gcaagatttaatagagtgaaaacagagctcccatacaatgagaggggacccaaaggaggctaccactgctggcatgaatgcctgggtttatatcccaatcattgtccctccccytgtgctctcaggtaatagatgattgactatttctttacctcttgcttttagcctaattggtattttagtgagttctctttactaccagattggttgggtgtgagctgagttatagccccgtgtttaaaggtgggtgtggtcaccttccccatataggcttaggaattcttagtcagcctggaaaatccagctagtccagtctcccaataagaaggtagatgtagtcactggataactgttcatcatggctaaatatccattgtagtgtttcagaatagtagatggagcagatgaagtccttaaaatgtagagtccaactttagtaaggataaagtaagtcaaatctattattgaggtcttactatttcttagtatgataaccctgaaacatgttttgtgttgttcatgtttaaaaatgtgtattttaaaattaaaagttaaaagttaaaatattttattactttgaatctttcaaatgacgcttctaataattaattccaacatgaagtttaaattattttccaataaaacaattaaatcttctaagat

SEQ ID NO: 512453 - DNA, 654 bp, Homo sapiens
tgagtccctgacctacgttccttccatgaaactgaaatcccaagctcacgtgggtgtatacgggacgctaagccccgggtggccccggtcgtgctcaggttcacattcctgatccgtcccgcgggccaggatgggggaaccggaggtcgcatgggaccaaaactgtgtaatgccgatgcgctcttgccgcggcgccggcctcgagagggccacagtggcccaaccagcctgaggtctctcgaggcgcggacgaccggcgcaagcctcccaccctcaccagggccgcgagctgcggaggtgcagtctccgcccgcgggtccctaacgcgcacggcggcgccctctacagggttgaagatccctcgggaatcttggaaactcactgcgcggacaggtcgaaacggacatcccgatcctcccaaagcgcatccagcaccgacatggtgaacaaggcccgtggcaggatctctccacagccgtgsaggcctagctgcgtctctctggctccaaggcaacgggccgcctctgtcacgacgtctacggcgggcgccgagactcaagcttccgcgagagtgcgcgcgcgtcgcccagctctttcgcgtcgttaagccgatttgagatgcgaggcaggatttaggagtctctgagaagccca

SEQ ID NO: 512454 - DNA, 606 bp, Homo sapiens
ggaggtgaagtccattttagttcacatgtccttcctcttggatggaagctgaaatctcatctgtctcttagcctttctctagactcaagctttgacaggggtgcagtggaaccaactcatggttctttagggatgagtaacattgaatctatcacctgtctcattcatcttaagatagaggatgtctggatggtgacagtgccctgccctagaatcagggrtaggtacacaggaagaatgaacctttggttagaattaatatatgattttctggcttattcatcatgtataaataaaagctaaaacacctcagaagacataatcctcattaataaattaattaatagtttagcaattgatttaacatttttgaacatctattacatgtcagggacttccctagatattttcacatacttcttcattttgaatgccattaaatatatatttattataaatgtgagacatttagggaggagattgggaggaaggaggagttcggggaaaaaaacagaaaaaaaaaataagtgtcgactactatgtttagtacctgggtgactgtacacaaaacccctgagttgcaagtttacctgtatatgtagccct

SEQ ID NO: 512455 - DNA, 547 bp, Homo sapiens
cctctctcatgagcagggatttatctgctagctgctctcgggttctctgggaggctttatgatttaagtttccactcaggggcctcccctgcacccttgtctgggattgatttaagtttccactcaggggcctcccctgcacccttgtctgggattcagggggcatcagcctgaccgccaagttctgcttctctccccacaggagtttctgaaggaagggacgctgatgaaagtaacagggaaaaacagacggccccggcacctatttctggtaagtgcccggtccccaagcccagctcaggaactgccaagttctatgaggttttctagggccattattcaaggacaagtggaatagggkgagaggagagtagaacagagcagacatttgggggtgaggatcattctggacagctgagagcttcacccttggacaccacgcccaccactcatttgttatttgaatgattttgagtggaatgttggcaagatgtagttacccacatccccaccttaaatatctgtcaaccaccttatctaatgctca

SEQ ID NO: 512456 - DNA, 588 bp, Homo sapiens
cattgatggaaggcttctcacatgcacatatggcatagaacgtggatagaaaaccagtaccctggaagacacaatcaggattccaaaagaagtaactggatgacctagattagaatagaattggatagaagaaagagcatttcacagcagcagccataaaaaagggctcaaagattttccctaattgttatctaattatgagtccacagtatgacatgatttatgatttaccaaaatcaaataaaatcataggttgcttcacaagaaatataaggwctaaaattttaagtggaaatgccttgggaatgcagactgtagcttttccctctttacacagtcaatgtctatacacaacagatgttcaataagtgcctgaatttttaaataatgttatggacagtttctgatttcagacattcatgccaggcagttttctaaatgcttaactctatgatcacacttaattctcacaccagctcaacaaagtagacacaattgttatctctattttatcaaggaggtaaaagagagttgaggaaatttgtccaaaataatgtagttatgagtgttgagagcagaaatcaaaac

SEQ ID NO: 512457 - DNA, 269 bp, Homo sapiens
ttcagcatttactcctttggacattacattatattatttccatgaatgaaacggaaacttttaggtctgctctattctacaatgttcagaacatacctgaaatattatgtgtgatgcttcatatattaggagaaacatttataaagyttcttgtaccaaagggggagaactagagtgctaaagcattcagagtcatgatctatgtgagacagttcaagaaactaaaaactagagataattccttagaagttttatttcatatgtttaag

SEQ ID NO: 512458 - DNA, 156 bp, Homo sapiens
taaaatgtatattgtaacccctagagcatccactaataaaataattcaataaatgcatggagaaattaacaagaaattgacttaaaaatgctcatataaccacycccaccaagaaaacaaaagagtagaggagtaacacagaaataaaaaggatgt

SEQ ID NO: 512459 - DNA, 643 bp, Homo sapiens
agggatcttcagataaactgatcatttaacatagtcattgaatataagctcaacgtatagaaatcgattatatttctaattaccagcaaaaataatagaaaatagaatgaaaaaatacaataaaaaataataaatctaccaaatatgtataagacctatatgcagaaaactataaaacatcaagaggtactatagcagaccaataagtggaagaatacatcaggctcatgaattagaaggctatttaaatatgtaaattttcttcaaatggatctatataygcaatgctatcccagccaaaattccagtataattttttttgtgtgggggaaattgtctaatctgacgtgaaaaagcaaaggcctatttttaaaagcctctgatgagatggattttaagaatagaaaataaattctattaaaagcagatatcaaacaatattttcctcatttgggtgcttgtttgcagagatgaaccattacaagttagcattattttcatgtgtttttttctttttttatatgatttccactgctactacctctgtccaagcatcatcaatttttacctgcaggactcaatagcttcctacttagtgtctcaacttccaccttaacccttttctatctaaccttaaaccagc

SEQ ID NO: 512460 - DNA, 562 bp, Homo sapiens
gctgtaaatacagataaactttacttgctctcccgctgctaacctcctgctgtgtggcctggttcctaacaggccatggactggtacccatctgtagcttgggggctggggacaccttatctagaaggctgagtttcaagcttacaggcctgtcagaaagcttctgtaataagaaactaagtgtccccagagtgaaaactgtgggttggacaccattaattagaggtgagatgaaggaaggggctgagaatgagatgatctgcatgccagcaagaatagaagtaggtaaagaaataattactacatgacttagcarttctactcctaggaatagacccaaaagaattgaaaacaacttttcaaacaggcacttgtacacaattattgatagcagctttatttgcgatagtccaagggtagaaacaagccgatttttcatcaagagatgaatggataaacaaaatgtaatatatccatgtgctagaatattattcagccaaaaaagaatgaagcactgatgtatgccacaacatggatggctcttgaagactgtataagttaa

SEQ ID NO: 512461 - DNA, 352 bp, Homo sapiens
ctccctgcccctcgctccctctcccccttcctctctccccgcaggggtcccccggagacgctgggctgtccatcattggtccccgcggcccccctgtaagttgtttttgctcttcctcggggtgttggggggatgggtgagttgatgaaaagggcttttaggctggggatgaggggacagcgagggcggctgtgcccctgggtggggaggccaccgcatgtgatgtggtcagcccagccaggcctcgggtgccgatgttgatgttaaggaaagtggyctggctaaatatacctaaattacagtcccttgggagggttctgagggacctgccctctagccacgaaactacagc

SEQ ID NO: 512462 - DNA, 444 bp, Homo sapiens
gacagccccaggcaagggctttgctggggaggccaggcggatgtcagagctctctgcagacaaaaagtctgggtggtctccatagctctggtccctttctgtcaaggcactgggaaagccgcagccccaggcccagcaatgggccgagtccaccttggccactagcatcattcactgcccaggagaagggtttgccagttttgcccagcgaggtccattcctctcccctcccagcccactggggtctcccaaaatgggacaagtgacctgcaggccactcttggcgccacccttgtacttgcccccagcccaccatcccaaccaggggttccgtggggctrcaaggctcgtcagaggacttcctgggtccacaccagcccagtcaccccaccctgctgagtctcagccagacaggcagtcaagggccacgtactgagccattgc

SEQ ID NO: 512463 - DNA, 495 bp, Homo sapiens
ccccaggcaagggctttgctggggaggccaggcggatgtcagagctctctgcagacaaaaagtctgggtggtctccatagctctggtccctttctgtcaaggcactgggaaagccgcagccccaggcccagcaatgggccgagtccaccttggccactagcatcattcactgcccaggagaagggtttgccagttttgcccagcgaggtccattcctctcccctcccagcccactggggtctcccaaaatgggacaagtgacctgcaggccactcttggcgccacccttgtacttgcccccagcccaccatcccaaccaggggttccgtggggctacaaggctcgtcagaggacttcctgggtccacaccagcccagtcaccccaccctgctgagtctcagccagacaggcagtcaagggccacgtactgagccattgctcgatatatctggcactgctctaygttggtgctggcactatagaggtagaaaagac

SEQ ID NO: 512464 - DNA, 604 bp, Homo sapiens
ctcagccagacaggcagtcaagggccacgtactgagccattgctcgatatatctggcactgctctacgttggtgctggcactatagaggtagaaaagacatcttctagcagtcgagcttgggcaagtccacctctgagctttagtgtccttctctgcaaaatggggacaaagcagcacttttctcacaggagagttgaaggaattagatgagataacatatgtgaaatgataaaccagtacctgacacataataagcaccatacaagtattggcttattattattattatctctagccgcaggtgatagacaacaaacagaaataaataaatgggaaaaatttacacactgatgactgctatgagaagttacaatatgcaaatatagtagacggggctggaatttgggaaaatgctttagcttggatgactgaggaaggcctttctgaggaggtggtgttggagtcgaaacctagataatgaagaggcggcacragggagtccaagggatggtcactgcacaccagcacagcaagtgcaaaggccctggggtgggaaacagaaaaaaatcctctgtggttggagctgtgatgtctattacagca

SEQ ID NO: 512465 - DNA, 566 bp, Homo sapiens
cctctgctcaaaaaccatccatggctcctcagtgctcataccccccatcccaaagataagcccactttgtctctctagcctgatctctgaccagtcttccgctgtcctgcttttctttcagtaaaactgggctgctcccctgccagaacttacagtgtcccacttgcacacaactcatgctattctggtatctttgttctcagtttctacctagtgaactcttcayccctccatgtcagctacatcatccctgcagctccttccatcctctcctccccacttggcctcggccatgagttctgctgtttgatgagtatgttaacataatgcctggtgtatgctcgatgtacaatccaggcaaaaccacccactgggacaagtaatttgtcctaaaatgagaagtgcaaacagaccaagatgtatacacctgcagaggtttctccctgactgctagcattaaccatttgctttagatggtgtaggtgcttgagagcagcatgtagtatgagtctcttacacagcaagagtagcttttgtgggtttccagccagggagagccttcccac

SEQ ID NO: 512466 - DNA, 566 bp, Homo sapiens
cctctgctcaaaaaccatccatggctcctcagtgctcataccccccatcccaaagataagcccactttgtctctctagcctgatctctgaccagtcttccgctgtcctgcttttctttcagtaaaactgggctgctcccctgccagaacttacagtgtcccacttgcacacaactcatgctattctggtatctttgttctcagtttctacctagtgaactcttcacccctccatgtcagctacatcatccctgcagctccttccatcctctcctccccacttggcctcggccatgagttctgctgtttgatgagtatgttaacrtaatgcctggtgtatgctcgatgtacaatccaggcaaaaccacccactgggacaagtaatttgtcctaaaatgagaagtgcaaacagaccaagatgtatacacctgcagaggtttctccctgactgctagcattaaccatttgctttagatggtgtaggtgcttgagagcagcatgtagtatgagtctcttacacagcaagagtagcttttgtgggtttccagccagggagagccttcccac

SEQ ID NO: 512467 - DNA, 604 bp, Homo sapiens
ctctctaactctgctgagccagtcaaaccagccaggggctggggatctgttcagtttggtttggctcccaagcagtgtttactgaactgccttggcgtcagggccgtgccaccatctttgttgtaagaaagacattatgagagttgctaattacatcaggccttggtgatgagtactctgagggaagcccttgtccagtcttggcctctggaatgcttgggcttcccagggtggatgggtttgttcttgtctctcggactctgaactggccactaggaagcatagcagcaaatctagggttcagccagtggcaaaggcttttgtatgagccttgatcccagatcctatttgatcactctgcctttgctgttcttctaccttactgtatactgtctgtctgtctgtttgtatcagctgcctgaatgctcccttttagagccasagaggggtaaaagatctgaagtaactaaacattttaaagttactctcccctccttctcactgatccagatgtcctcaaaggcttgcccttgtacgggtgatgctggttgcattagaatcgcctggggagctttcaaaacacgccaggccaattgttcccaat

SEQ ID NO: 512468 - DNA, 534 bp, Homo sapiens
acattttaccaatcttgctagcaccaagcagaggactttgcaaacaaaacataaatgatcttcaacaaaagtctgctgcattgaatgagcatctgggatgagcctaaacccaaagcaatagaccgccacctaatatatctgtattactccccctggggaggcaggtagccagcccagtgggtagccctgccctctatttttgaagtaagatctttccctgtcccagacctaaactaatcccaggtctttgtcagctcagtggagggctgcagatggtaaagtttacacggatgcataaggcgtatagtctcatagtctttccagaaaagcacaaatatgacaaatatgcatgcaggtgrttcttctgtctcagcaaattccagagcctgagcccccagagaggacactccttcaagctcctgaactggtgcaggggccctgctgacagaaagatccccagaggccctgtggcccatcctttcttggctgcctgctcctgagcccgcagcagcatcagtgtcaggcagaattctg

SEQ ID NO: 512469 - DNA, 657 bp, Homo sapiens
ctcagtatatggacagactctggatccaggtttcctcaaatgcagccagcacaaggtggtaccagaggagtcaggggtgggatccagaccccagcaggcatctctccttcaccacaccttcccctttccagacaattaactaggtcagcagtggcccatacatggcttgggtgtgccctgctctccattccagggccctcagcagacattattaatcaattgctgcacactttcccatggagcttacatgcagcctcagaatccttttcaacagtgttcaggaagctgctacttactagtgacrgttggtgttcaagacgaaaagctatttcataactctagattttgtttttttaataacaggtgcttactataaaggcagggagaattactagagctctgccgcttctccaaaggtcttcgaactagcagatagctctgaacagactgaggacctcaggaggcagccaaccctcataggaaggtggtggggaaaaccaaaagcatctcaaacaccattccatctgccctaagcacagctttacggtttgataactcccagaaagatgtcttttccccttcttcttaatcactctagacttgccccactgctctctggaaagcctcctcgaaccactccaacccaatgtgggctct

SEQ ID NO: 512470 - DNA, 625 bp, Homo sapiens
gttggctttccttatcccaaacggtagcagatactactcatcgctcaatacactctttcccattcagcctaggtaggcctcggaatccttctcgacacagtcctccagtggcacggagaacagcaacccaggctgccgctcccgtccattagagtcagtgcacaagaggaaatccatttgccattcatggttcaacccaaccacattgtacaacggtctctccatgtgaccacacatgacccgatgacagcgatagaggcatgctgtcttgggtcccttattaattctagcccaggactttgcacataatacgcagctctcacaaattagctgttgatgtaaggtccccctgttagaggctggggaaggtttattagtcarctctcctcgcagcgtccccggccctggacccagcaataggctcagcatttgctcagggggtgtttctcagcaaccagcagaggatgagatgattgacttctgtgtgtccaggctgcatgccttgtcctggctgggagagcaggaaaggctcagtgatgtgttccccactgggcagagaagctgggggcacccaccccctcccatcctctactcccaaggtcaggagcttcatttttacctgccc

SEQ ID NO: 512471 - DNA, 558 bp, Homo sapiens
  misc_feature (1)...(558): n = A,T,C or G
nnnnnnnnnncccgtggtgaagacccattttaattttgtttctttgtttgtctttcctcaaatatacagtccatcaccttggctcagtgcatgtcaccaaaaattctccagggatttcatagtctggggaggagagtggcaacagttagctcggcattcaggcggcaccggctcctctagcttatgccacacaagtagccccccttgccactgcaccgctgcaccgtgctgcccgctcgacccccaccaaccccacttgcggcctgccctcctgcggcagcacagaggcaggcacaaatggcctccaggcagagtcagccatggatccaggccgggaggacacaggcaaaggagggggtgggcagggcacccacacagagaagaaccttcactgcttctgcccacacttctcygggcttggctgaagtggccacctctggcaaacgctgggaacagagcccagcgcccccattcgccgggctgcagaaggagggagcctgctaccagcaactctcatttcccctccacccctcctgtgctgagcggctgcgtctgacc

SEQ ID NO: 512472 - DNA, 573 bp, Homo sapiens
gagcaggggtagcctggagagcctggggaaggaagggagggagggagacaggcttgtactagtggcgagcatgcataggatcctcaaaggcagtgtgtgcatgtgtacacgtgcctgtggcaygtatgtgtacccatgcatgcgcgtctctgtgtggtggtaacgtgttgatggttggccaggaggtggttcagggttcttggctcttgctttctaaaatgtggcggctcactccttttatgaggcattgctgagagcaggtttgccctcattaatcaaagcaatagcaataagcaggcaattaagttctcccaaggatgcatgttcgagttcttggctccagcaaagctgtggtagttggtagagttaatggcaaggagctcgggcctggtgttcaggtcaaggctcattttcaggttcagcgagataatgacaggcccagaaaggtccagttttgtcagcttagagaggttaccctcaggcctactagatggtgagctcagcatcctaaggacaatgattttttaatctccctgacatgaaagtttttcggagtagctgctgctggctgag

SEQ ID NO: 512473 - DNA, 566 bp, Homo sapiens
ggtagcctggagagcctggggaaggaagggagggagggagacaggcttgtactagtggcgagcatgcataggatcctcaaaggcagtgtgtgcatgtgtacacgtgcctgtggcatgtatgtgtacccatgcatgcgcgtctctgtgtggtggtaacgtgttgatggttggccaggaggtggttcagggttcttggctcttgctttctaaaatgtggcggctcactccttttatgaggcattgctgagagcaggtttgccctcattaatcaaagcaatagcaataagcaggcaattaagttctcccaaggatgcatgttcgagttcttggctccagcaaagctgtggtagttggtagagttaatggcaaggagctcrggcctggtgttcaggtcaaggctcattttcaggttcagcgagataatgacaggcccagaaaggtccagttttgtcagcttagagaggttaccctcaggcctactagatggtgagctcagcatcctaaggacaatgattttttaatctccctgacatgaaagtttttcggagtagctgctgctggctgag

SEQ ID NO: 512474 - DNA, 566 bp, Homo sapiens
ggtagcctggagagcctggggaaggaagggagggagggagacaggcttgtactagtggcgagcatgcataggatcctcaaaggcagtgtgtgcatgtgtacacgtgcctgtggcatgtatgtgtacccatgcatgcgcgtctctgtgtggtggtaacgtgttgatggttggccaggaggtggttcagggttcttggctcttgctttctaaaatgtggcggctcactccttttatgaggcattgctgagagcaggtttgccctcattaatcaaagcaatagcaataagcaggcaattaagttctcccaaggatgcatgttcgagttcttggctccagcaaagctgtggtagttggtagagttaatggcaaggagctcgggcctggtgttcaggtcaaggctcattttcaggttcagcgagataatgacaggcccagaaaggtccagttttgtcagcttagagaggttaccctcaggcctactagatggtgagctcagcatcctaaggacartgattttttaatctccctgacatgaaagtttttcggagtagctgctgctggctgag

SEQ ID NO: 512475 - DNA, 623 bp, Homo sapiens
caacatattcttctgatgtccaaatcaaagtgctccagaaatatgtagaatatttattgttataaaaaatccatagtagatttgaattgataagatctcctataggcctttgtgattttttaaaaaatatatgctaccttatgaatcttgtctaagttattaaaacctccaaacatcccttgtcaaatcaggaactaggagggtatattagtcattctcatgctgctaataaggacatacctgagactggataatttataaaggaaagaggtttagtgaactcacatttccagatggctgggggggcctcacaatcatgatggaaggcaaaggaggaggaaaggcacatcttacatggtggcaggcaagagagcttgtgtagaggagctcccctttataaaaccatcagaccttgtgagacttattcactatgaagagaaaagcatgggaaagacccacccctaatgtcatgattcaattatctcccgcctggtccctcccatgacatgtgsgaattatggaagctacaactcaagatgagatttgggtagggacacagccaaaccataacagagggtgagtttttgtgcctgaaacatagagcagacaatgctgattttgtt

SEQ ID NO: 512476 - DNA, 617 bp, Homo sapiens
gatggtgcagttgtttctagaaaaggattctgggcaaatgtggtttttgaaatattttctacaggaaacaaaatgccacagaatgagaaatttttggtgaactggttcattttgtagcagcagttggatgatggaaattacccaccctgttctcaatttggatgttggatatgaaaattaaagttgcatttttttttcttttaccgaaagaatccctggagacagtgaagcaatttatagatgtgagagtttaaatagccatgacctcagagaattatagcaatgttgacacattgacagacaccttttctctcagactcagcaaggaagaacacactaaatacagagactattcagttttatggaaaatcatamtgtatgaatactgagaagtgtaactagctttgacagactagaaattttttcaaaatatattgctttctaacgaaatgattaaagaaaaactaaggaggtgagacaaagtgaatgatcctccatctttcaaagtgataaagcagcctgggtgacttaatacacgtttatatagggtggagttgggaaagaactggaattgggtccagggggcattgggctgaatcctagttctgccaccttca

SEQ ID NO: 512477 - DNA, 608 bp, Homo sapiens
ctaggggtcagatgacttgagtttggggtcattgctgcattattgacaagttgtactaccttggacaaatcacttcctatttcttatttagcatctaaacttaagtcacacaattgtgatgatcagatgagtgaatacaataaatcctcaaactgataatcaaaatcttttggagaatgtgaaaaaatgtgtggattcattggtccaccggaaattttgttcctctgtatttggagaatagttaaacatgagatatttctcctttaaagatttgcaagtgagtttgataattgcctgtttttgckgatttcatgcacaccgtagagagagagacctgctgtcagtatcaaggataataatatttcattcacagatttgtacatgacctcttacgagcactcacatctcagtaggcactttttctagaagagcagctctcaaattgttaggtgtagtagatggaaatatttgtagcctggtcactacctcatgtgtatctacaatcaaagagttgcccaaggttctttgttcatttgtttgcttttcttttgcttcttttctcttccaaaaagcaaagggaaaagcataaggttggaaatagaaaaatc

SEQ ID NO: 512478 - DNA, 594 bp, Homo sapiens
aagttgaacaaaatcaagtggcatctgtttcctcaagaaggtcagttatttagcataagagacacattaattcaattgtcastcaaacaaatgtaaaattatatttgtcatgtgttgcgaagaagtatgtggtgctatgacagcatagattagggagatttgatttaggggagcaaaggaatgtgagaaagtggttgggaaagacccccttggagagggatggttgagctgagacctggaatgagaaggagttaaattaggatacaagcatggcagagaagaacctgcctggcagacagaattatgagtgcaggagcctcgtgacagtgtgagcaaggtgtgcccaagtactgaaggaaggccatcatggctgggcacacagatgaaggcagtgagatataactgcaaaggtaggcaagatcgtttaggcagggctttctaagccatgatcaagatttaactcttttccaggaacaaagagaatttatcgaaggaatagcagagtcagatttgtatctcaaaagaccaatatgcctacctggcataggcttgggatacccagtgaggaagttttcattagtccaggtgagacag

SEQ ID NO: 512479 - DNA, 497 bp, Homo sapiens
gtaccttaaactggtgcaggagagtggacctaacaagaaggggaaaatgtgaaggtatttttaggaagcataatccattgaactttttgatgaattggatatgagagaagaaggtgtgtgactattttctatggttccggtttgcagaagtgaccagatggtggtgccctttaccaagctaagatacagcaaagatgaccacagttrgggttgaaaaccatgagttcaagaaaatcatgaattatgtttgagacaaccaagtggagttgtcaaattggcagttggatatgtaattctggcatccagaagcaaggtttcaatcaaggaagagattctaagaaagattttgctgatgataagatgttaatatacacatatgtatatattctatactggagacaattgcatatgttgttttttctgtatcctcaagtgcaaaaagaaattacaagtataatcatgtatctattgttttttgtattatagaaatcaggcat

SEQ ID NO: 512480 - DNA, 679 bp, Homo sapiens
ttgttttttgtattatagaaatcaggcattaaaggccaggcgcggtggctcacgcctgtaatcccaacactttgggaggccaaggtgggcagatcacgaggtcaagagatcgagatcattttggccaacatggtgaaaccccgtctctactaaaaatacaaaaattagccaggtgtggtggcgcgactgtagtcccagcttctcaggaggytgaggcacgagaatcacttgaactggggaggcagagtttgcagtgagcagaaattgagccactgcactccagcctggcaacagagcaagactctgcctaaaaaaagaaaaagaaaaaaagaaagaagtcaggcattaaaaaaataagtactaaaagaacgagaatggagaaatattttgaagggaaaaaggctgatcccacaaacatatgctggtgaggtcaacattaatcaccaaaagactctagaacagatgtggaatagtatgatttgtgagctcttcaaaaaggaaaacataattactgggccaaaattcagttaaactcattctatcccttttttaaagaattattattaaaatgtggtagacttaggatctagacttcagccaggcatttgataaacactctcaaaatgctgttatgaaaaatataataagctagatgataacattgttaggtgggttgaca

SEQ ID NO: 512481 - DNA, 679 bp, Homo sapiens
ttgttttttgtattatagaaatcaggcattaaaggccaggcgcggtggctcacgcctgtaatcccaacactttgggaggccaaggtgggcagatcacgaggtcaagagatcgagatcattttggccaacatggtgaaaccccgtctctactaaaaatacaaaaattagccaggtgtggtggcgcgactgtagtcccagcttctcaggaggttgaggcacgagaatcacttgaactggggaggcagagtttgcagtgagcagaaattgagccactgcactccagcctggcaacagagcaagactctgyctaaaaaaagaaaaagaaaaaaagaaagaagtcaggcattaaaaaaataagtactaaaagaacgagaatggagaaatattttgaagggaaaaaggctgatcccacaaacatatgctggtgaggtcaacattaatcaccaaaagactctagaacagatgtggaatagtatgatttgtgagctcttcaaaaaggaaaacataattactgggccaaaattcagttaaactcattctatcccttttttaaagaattattattaaaatgtggtagacttaggatctagacttcagccaggcatttgataaacactctcaaaatgctgttatgaaaaatataataagctagatgataacattgttaggtgggttgaca

SEQ ID NO: 512482 - DNA, 608 bp, Homo sapiens
cctcaaactactcagaaacctgtcttgtggaagagggaaaagatgatctcattctctttggctctaagatcaggacctaaatttaaggagaagttatagggaggccaatttagactccaaagcctcaaattttgattgatctgcttcagtggtgctagattgtccggaatctgagggatccacaagctgaaatgattgcctactgggggatattgtctgaaagattcatgcataagttggacgaggatgccccagggatccattcaaatatgattctgtaattctactgttattggtaggagaggagtaggtcaagtttctatcccacaacatttgaagatgtgttcctttattgcttagcctcctcttttccagaaccacaacccctccccaaaaaaatacacagcttcttttacccttactgctagtgttattatccaacattaaagcactcttgactttctgtgaaccgtgaaaattcttcatgacttcccctgttgcagtctagtataaaaaacaagccctgaatctaggcttgactaattataagcagaactacataatggcagcctayattctattcctactgaagtatccactgacacaaa

SEQ ID NO: 512483 - DNA, 573 bp, Homo sapiens
ataaacatctgcaaaatagccctgggaattgggtttgtcaggtgaggacactttggttagcagggaggagatgagggattcctcaggggctgctacttctggggagaaacccacaagctgtcccgtacgggagaccttgcttttcttgacaccaggagctcaggatatagaaaagatttgtgccaccaaaatgacatacagccaagatcattttctgtycttttacattctttcagaattctctcctgtgtctggcctctcttcatttgctgagctctgaatgtgattcatggaataaccttgagcaaatgataacctctcctggcctcctgttttctcacctgtgaaatatggatccctgcgactctcagttccctctccccatggaataactctctctgaaaagcattttgatctccatagggaaaggtgttctatggcaacacagaattatatttgattctgcaccacccacaagttcaatttgtgtggtcccaacctgactccataaacaatctaagtttttcttggggtatgtgggtaggaacacctgagaggggaaaccattcatgt

SEQ ID NO: 512484 - DNA, 613 bp, Homo sapiens
ggtgttcttcacgcacactttgcagcttttttccccccttctatttacttcagtggttcttttcgtttctttctgcatatctgtgtcctcatgtgctacctgttcttcaagtcctggcacaattgtcaccttttcaataaaacctttgatgtgcttcagtacaactctttgttctttgttttgtactcctaagcatctagtttcacctgtgttagggtactaacaggttttctttttcttttattttatattggaattattttggtatctgtttgctctccgatgttaggcttataagcatcacaaagaaaagacttgcccacaatttacctagtattccacgcaatgactagcacattgctttgtacaaattaagtacttatttttggyaaatgaataaattagcaaatgaataatgtggatctagagacagtccttgataggtgggtaagatttggatagaaggaggcgggaaaaagcatattatgacagctttagggcatgaaaagtacaagattcagcttgcaagctcaggtcccaggttcgttcctggaatccagggtgtgtaagaggaagatgggacagtggtcaagaaggaactccattcagttcc

SEQ ID NO: 512485 - DNA, 640 bp, Homo sapiens
gatacaaataaggataattatagaaataattacagatcaatctcagaggaagaagggaaggctcagctaagaaactgatacataagcttaggcttaaattagaaggcagccagaagtaaaatatatatgtatactttatatatttatatactttatatatatagttttatatacttatatataatttacatgtgtatacacacatatatttaagtattatataaaagtaaaaaacatatgcaaaatcctgaaggtgagaaataaaagtaatttgaggagaccaaaatggttacaggtgctaaagttgagagtggagggtgacaggcaagaaaggcaaaccacagaagacccacataggtccattctccatcgattgaagaaatcagactttatttgctggggttaaagtgctcttgaagttttcaacaaaggaattacttggaaattattttagttcartatctggagataattaaaagtgggcaagtctagattaacaagacaatttaagagattgttgcagtagtttaagtgtgaaatgtatcactgatttgaacaagtatactggcagttggaatgcagagaacgaaatatactaaaaacagaatttggtatagaggtcacaagaaaagaagtgagg

SEQ ID NO: 512486 - DNA, 589 bp, Homo sapiens
tataacaattcccacccacaatcaaggctgagtattatacaagtacaaaggaataggtaacgtgagggccattttagaattccgactacttcagtctattttctagcactgataatttagttctctcccattttcaaaatacattttctcccaccaaaacatgtcccagagtctcatcccattatagaatcaactcaaagtccaaaatctcattatctaaatccatctgtggacaaacccaaaggcccctataatttacagcatacagtgataagacaagcagaagataacgattagaaacatttgattcaaaaagagagaaaatgaaaggaaaaaataaatcacttgatcctaagacttctgaaatccaccaagacaagtgttggattgtccttgattagcttttaaggtctgggaataatccttcacagttcytgacttcacctctgggatcttggttccatcttctgaatcattgctcctttttcttttcatgaaaggtaatatgtgttttcagttaagcacttttatcaggtttctacctgccaaaataattctgtgagactgacagctttatttcattacacac

SEQ ID NO: 512487 - DNA, 517 bp, Homo sapiens
ttgaattaatatttatatatctgaggtaactttatacatgagaccaaaattgaatataacttttaaatttttggttaaaaaaacagtctctaaaccacatttcagggtcggtgtatcttctaaaaattttcaacatgtgcacccttgttatttgcacagtgtttgcagtttgaaattcattatcacattttattctaaattgcaatcaccataaaaaatgtataaacattattacatcacagagaaaattgagaccaaaggagaatgttttctttagaaaattaaaccatctaataagtgacaggaaagaagctgtatcttttgactataatccaggagggcatccgccttgttcactgccatctctctaatactagacttgaagctcagagtggggttcaagcaatagtgggtgaggtgaattttgttgaaatctcctgctctttccattataatgtgcttcctcattccaatagaaawttgtgtttgtgcatgcaatgtcacaatttcaagtata

SEQ ID NO: 512488 - DNA, 517 bp, Homo sapiens
ttgaattaatatttatatatctgaggtaactttatacatgagaccaaaattgaatataacttttaaatttttggttaaaaaaacagtctctaaaccacatttcagggtcggtgtatcttctaaaaattttcaacatgtgcacccttgttatttgcacagtgtttgcagtttgaaattcattatcacattttattctaaattgcaatcaccataaaaaatgtataaacattattacatcacagagaaaattgagaccaaaggagaatgttttctttagaaaattaaaccatctaataagtgacaggaaagaagctgtatcttttgactataatccaggagggcatccgccttgttcactgccatctctctaatactagacttgaagctcagagtggggttcaagcaatagtgggtgaggtgaattttgttgaaatctcctgctctttccattataatgtgcttcctcattccaatagaaaattgtgtttgtgcatgyaatgtcacaatttcaagtata

SEQ ID NO: 512489 - DNA, 645 bp, Homo sapiens
ctgccctttctcagtactccttgagactgcttcccyaggctacagtcactcatattggcccagaacaaagctctttaaaaagcactgtgcagagttaggtttttccacttgcaaatagaaatagcatcgtactctgggagtacacatcaatggtagaagctcatatgtaatgtcataatattcttcagataactactagggtttatcatttctacaacttcacagccttcggggcgactttctgcatttaaggacatgctcatgggactaagacagacatgtttaattagagataaccccagaagggcagcctaccttctcgtgctcaggcctaacatatgtggttaaaaatatcgaaaaaacaaactgattttcatgctaaagacaaatatgactcatataaggtgggaagtttcaaggaaatttcttgctcattatgtcagagaaaagagaaatttggtcatagctgctcatgttcagccctagaacggtgactagaaaaagtcaagacaggaagtagaaaaatttgaagaaacttaggtgtaatagaaaaacaagaccaaaataattataacccatgggaatgcaaacaaatctataattcatatataacaatataaagtgatataagaataaatttactga

SEQ ID NO: 512490 - DNA, 645 bp, Homo sapiens
ctgccctttctcagtactccttgagactgcttccctaggctacagtcactcatattggcccagaacaaakctctttaaaaagcactgtgcagagttaggtttttccacttgcaaatagaaatagcatcgtactctgggagtacacatcaatggtagaagctcatatgtaatgtcataatattcttcagataactactagggtttatcatttctacaacttcacagccttcggggcgactttctgcatttaaggacatgctcatgggactaagacagacatgtttaattagagataaccccagaagggcagcctaccttctcgtgctcaggcctaacatatgtggttaaaaatatcgaaaaaacaaactgattttcatgctaaagacaaatatgactcatataaggtgggaagtttcaaggaaatttcttgctcattatgtcagagaaaagagaaatttggtcatagctgctcatgttcagccctagaacggtgactagaaaaagtcaagacaggaagtagaaaaatttgaagaaacttaggtgtaatagaaaaacaagaccaaaataattataacccatgggaatgcaaacaaatctataattcatatataacaatataaagtgatataagaataaatttactga

SEQ ID NO: 512491 - DNA, 552 bp, Homo sapiens
ctgctctgaactccatcatctaccactggaacttataaggttacagtttgccacctgagggaagtcttgtacatagcacacacctgatatactagcaatctttcaacactaaattcttttcatattttgccctctggccattttcagagtgcttcaagtatctgttttaagtacatttttccaattttaattgtcttctacaggaataatcacctagtctcttsgtgtcccattaacagataatttctaccaacttttacaaatgtatttaatggtattgctgacataaattttaaaataaggtcatatattttaagattaacaaaattattattaccttaataccactattaccaaaaagagttagtcatcttaaatatgtaaggatattaacaactagtgtaaactatttaccagcataaaatttatgaacactatttgtaatatattatataatctattttgccggaaaattgtatttatgtaaaggcaaaaaaaaaagtagggtttaaacaacaaaaacaacacctaaaattctactattaattttac

SEQ ID NO: 512492 - DNA, 621 bp, Homo sapiens
gctgcatctctaacattaattttttcacattattactagtaaatatgagaacttatttacaaagtaacagttttgagttttgtatgtattggtgctgctccattactctattttgttgttgttgttttgatacacttaatatttaattaaaagaaattgtgttgctctatcccatgccattgaactttgattagagatctttacagtcagtgaaattagaaagaatgtgttatactagcagtaaaacacaggtttttttttctccagcaatattcaataccaaataacaatgaagcggcatccaaaattttcttaggaaaaaatgtagcttaaatgtacgctaccataatacattaaaaaaaacataaaataacaaagaacactctggaacataaaaaaagatgaaagatttcaaaatcacagcacctatgagtcggatatgatttgaatatgtgtaccctttaaatctyatgttgaaatgtggtgtccagtgttggaggtggggcctggtgagaggccccatcagcattcacatgtttactgcagcagtatttacaataacatgtatggaattaacctaagtggttatcaattgataactggattaaaaaaaaagtggtg

SEQ ID NO: 512493 - DNA, 594 bp, Homo sapiens
agaacttgttaaaggtctataaatatatamaatgtcaggtgggagtgaccaaaagttgcacttttggtgcaaacaagcaaacaaagaaaaatagaaactgatgacatattgtaaaaaccactaggtttctgttgacaaatatttatacaggtttctgatctcaattttgatgtttatacatagagtaacaattgaaatgtatgtttgtgaagtactaaagggtgcccagtgctaggttaaattccaagcagaacattatatgtctagattgaaatgccaatttactctctccctctctctctctgtctttctctttctgtgtgtgtttgtgtgtgtgtcggtgggagaaaaccatttatttatacaactacctactagcaagttgggataaaattgaaatataaacaacatggtatgggaatgaagaagcaggcaattaactatattgtgaggtttggtgaaaataatattagtcttaggtcttacaggatatgtaacatattaaaaatcaaggttaggacagtgctaatcatttcttgtaacatttataaaatctaatcagaatctagttaattaaacttgtactctcttgtg

SEQ ID NO: 512494 - DNA, 601 bp, Homo sapiens
atttaatacaatcagattttttgatccattttaccaacatcagaaactgtgacaaatcaagttatttttcgtgatcttcaagaagacagcttttgtttaatgtgttgccagtggcataaccaagcctgttttcttttgcctgagtatgtctcacactttgggactagtgtgaatatgaatgctgagggcaggataatcttccctcctcctttgaactaagatccatggtcaagagagtgttgtgggtaaagattcaagttcaactcccacctcttccaaacatacgtttataaaaaataaaatatttcttacacattaaaaaaataaagtaaaaaagacaaagatattttctaaaacaagatgagcattagagacgacctaacagggcaaacaaaagcaccaggtaagagggcagaaactataggctgattcaaagtctggcaccaaaaacgggaaaaagaggcctggagrgtaaaggaactgaaacacacattcacaatgaaggccttgaccgaggtgtggtgggaagaatggggctgagtgtggggtcccttgcctgggaaaaagattgaaaaaactgccgcttcttccttttatatgg

SEQ ID NO: 512495 - DNA, 652 bp, Homo sapiens
accagtttcccaaggggcaaaagaaacaatgttgtttgacatcttcagcaaacattccaaactgtagggaagagggatgatgggtttgtgttggtgataacagcaaagtattaaagcatgcctaaaaactttcaccataaagcaacaattattcttggtaatgctaccaggataacaagtttctacatgttgtcatgctggcaaagaaaatagggtgtatttagagattagatgccccatggacatgtggtcatggaaacaaaagcaaacagctaacgtggctatgtgttgaggtcagtatttgagggaacatccggtgtgtgttttattcagtattgtgtagtacagaaaagatcacacatgtatatgtcagaagtagatgcacatgttcttttggctttttttctttgttttattcttttttcattttttgtgttttttgttagtttgttttgaattttttttcttgatgcatatgttccttcaacttattcagtacttccatgtgcagggctctggactagactttcaggatctaaggctgaatcctacacagtcctccctctgggaaagtgatgaaacctgtgagytctcctagcaactctgcagtcttccttcaaggtatgtgttgcaatttggtggttgcacattt

SEQ ID NO: 512496 - DNA, 518 bp, Homo sapiens
tgagctctttgattctcagtccattctgactgggtcactgtggggaatcctttaaaaccaatgaggccataaagcttgagctttgcctatccctgttgttggaatattttgtctccagtctcctaaagatcagtctgagagactggaacacacctcacaatttcttcctgcaatctgaagttaagctcacccgggtctaccattcagcctggtgatgattccacttccttatgcatcaagatgttatcatgctaaactagctaaaaccactaaaaaaatatgggatgacttggaaaggtggagaaaagwgggtaaaaatacagtaatttttttggtaagtctccattaagctaataataggtaagcaccctcaatggctaagagccagtaccttagaccacgtccttgaataaaatagatggtcaaggctgaagtgaatgaaatggtgacataagcatcatgcagcacattttgaggcttatggcaacacatgcatattaatgcaaatatgtgcattg

SEQ ID NO: 512497 - DNA, 567 bp, Homo sapiens
tagccgggcatggtggaacgcgcctgtagtcccagatactagggagggtgaggcaggagaatcacttgaacctgggaggcagaggttgcagtgagccaagatcgtgccactgcactccagcatgggcgaaagagcgagacttcatctcaaaaaaacaaaaacaaaaacaaaaaaaaayaacgaagacaaaaagaagtccaaatattctgaggccgccaagctgtgagaaagcctcacccacaaggaggagccacacactcatggacctggcaacagcctcagctatagttccagctgacaaccaacatcaccgtcacacataactaaaaatgcctctaggtgattccagccaatagcctttgcatcttcccagctcaggctgcagatatcatggagcagagaggcaagccaagcccactgtgtcctgtctgagttcccaacccaaagaaattataagcataatgaaatgattatttcatgtcgctaagttttgggatagtttatttcattgcaatagtaattgaaatacctcctaagtaaaaaaaaaaaaaaaaaaaaaatctttct

SEQ ID NO: 512498 - DNA, 639 bp, Homo sapiens
atgccaaggttttccctgatgtgaaaaatggaggattaattagtcagtggctttcactcctccccctcttctgttttttaattctctctgtattctagcgttatgatcctgctacctgttttattctctaaaagggacaycctggtatagggggcgggagtcagaagaattggagatagtgtaaaaaaaaattattctttcctttaggcattaatctgacctccattttttttagaggtcttcttaactgtgagtattcagttaggactttcttcccccttttatcctataaaccctcacagccaagcatacctctgtgacgtctactggcctttcccatactgcacctggctagactatgttttattctctgtgtatacaaaggataggacttagagagttagatacagggattatggcccctaagcaatgcatgctcaattacaaatattaaattgagcacagaacagtgaactctatctacaaacagtaacagatcagtgttcagaatctgaatgttcatttgtctcacacggcctgcacaaagagtacaggcaaaacttaccttaaatatcttaaataggattttgacttggcttttctcctcttatggctaataaatgtcatcatcatcatcac

SEQ ID NO: 512499 - DNA, 639 bp, Homo sapiens
atgccaaggttttccctgatgtgaaaaatggaggattaattagtcagtggctttcactcctccccctcttctgttttttaattctctctgtattctagcgttatgatcctgctacctgttttattctctaaaagggacatcctggtatagggggcgggagtcagaagaattggagatagtgtaaaaaaaaattattctttcctttaggcattaatctgacctccattttttttagaggtcttcttaactgtgagtattcagttaggactttcttcccccttttatcctataaaccctcacagccaagcatacctctgtgacktctactggcctttcccatactgcacctggctagactatgttttattctctgtgtatacaaaggataggacttagagagttagatacagggattatggcccctaagcaatgcatgctcaattacaaatattaaattgagcacagaacagtgaactctatctacaaacagtaacagatcagtgttcagaatctgaatgttcatttgtctcacacggcctgcacaaagagtacaggcaaaacttaccttaaatatcttaaataggattttgacttggcttttctcctcttatggctaataaatgtcatcatcatcatcac

SEQ ID NO: 512500 - DNA, 550 bp, Homo sapiens
ttttgtagagatagggtcttgctatgttgcccaggctggtttcaaactcctggcctcaagcaatcctcccacctcagcctcccaaaacaccaggattacaggaatgagccagtaagcccggctcactcccccttaaacatatttcagttccagctttcatccccaccactttctgaaaccactctcttcaaggttatcagtggcctctccattgccaaatcctcagtcctcaccttattagcagcatctcacacaagtggtttctctcatcaccatataccactgackttatttgacctctatgacatcccatgatttggccaatatttttagttacagagaacagaatatattctggctaacaaaaggacttctaaggggcctacataattccagaattgattatgggaagttcctgaaacagaatctaggctcaatttctggaaagaattcccaaaaccacaccataaaactgagccgccagaggagcactggcccctgtctccatcagaacattaaggaatcaagactctgccatcacagctatcac

SEQ ID NO: 512501 - DNA, 423 bp, Homo sapiens
gcatatcttattcaggtatataattgttataaccactttttctcaaattccttgtaaaatcttactggaattttttttttttttgagacgtcctcattctttattagacaggtaaatacgttctgtggtgtgaatgtgttacccaaagctcatgtcttggaaacttaatccccagtgcaccagtgtagagaggtgggacctttgagaggtgagaagatyatgagggctctgccatcacaagtggattaatgcagttatttcaggagtgagttacctattgcaggaatgggttggttatcgtgggagtgggttagctattgcaggagtgggttggttatcatgggagtgggttagctattgcaggagtgggttggttgtcgtgggaatgggttggttgttgtgggaatgggttagctactgcag

SEQ ID NO: 512502 - DNA, 423 bp, Homo sapiens
gcatatcttattcaggtatataattgttataaccactttttctcaaattccttgtaaaatcttactggaattttttttttttttgagacgtcctcattctttattagacaggtaaatacgttctgtggtgtgaatgtgttacccaaagctcatgtcttggaaacttaatccccagtgcaccagtgtagagaggtgggacctttgagaggtgagaagatcatgagggctctgccatcacaagtggattaatgcagttatttcaggagtgagttacctattgcaggaatgggttrgttatcgtgggagtgggttagctattgcaggagtgggttggttatcatgggagtgggttagctattgcaggagtgggttggttgtcgtgggaatgggttggttgttgtgggaatgggttagctactgcag

SEQ ID NO: 512503 - DNA, 639 bp, Homo sapiens
ttgaaaaacttgcagaagaaaaaagtgatggtcaggggcagtggctcacacctgtaatcccagccctttgggaggcagaggtgggtggatcacgaggtcaggaattcaagaccagcctggctaagatggtgaaaccccatccctactagaaatacaaaaaattagccagacatagtggcgggcacctgtaatcccagatactcaggaggctgaggcagggattgcttgaacctgggaggcagaggttgcagtgagccgagatcgtgccactgcactccagcctgggcaatagagcgagactccatctcaaraaaaaaagaaaaaaagtgataactactttaatttttttgcatgtgaatatccccaaacatgtcttctttgtcattgctgttaagagcagcacatgtatttactgtaaagccactgagtgtcagaccccgtgctacgtgtttgacttccacactcattacaatttacatcaccctgtgaagtagaggcaccatcattatccccagtttgcagatgacaaaagtgaggtgcagaaaggtcatctacctcacccaaagtctgctcagttacagactttcaggccaggtatctgaattggccccatctgattcattccccagcaccagcatg

SEQ ID NO: 512504 - DNA, 623 bp, Homo sapiens
caggtctcccctgggggactggctgacattcgaatccagggatggagggcttggggatgtggccagcatagctattcctctggcaagtatcaggcagcccagaagttcacctccaagtcgaacgtgccggagacaggcttgtggtcgctgatgccgtacgtcatgtggctgctgtagcccctcagagacaaggagaagtgtgacgccggcggtatgggagtgtcggggccagcacagggctgccgcttcagcctccacaggatgcgatcggtccatgcaggcttgcgttttttctcactgcaggggcagggggcataaagaggaagaatggggaaagaagaaagggttggctaagagcagaaatgagcccacatgagcttgctggagcccctaactccagcaactactggcagccacagacccccggggccagagccggagggagcaaggcagcaggcaggaaggtgcctaacagaatccaaagtatgccagcmcttgtcagacttagccaggaccctctgtatgtctagctcatgtttttatggatcaaattgtgactcagaaacattccatttcaaagctttgcttctttcttgagcaaaagcagcagtggatcaaagcag

SEQ ID NO: 512505 - DNA, 613 bp, Homo sapiens
accgtcagcgtagtgtcttgcataaaatagacactccacaaatgtgaaaagctagaactgagcactgcattcaaacattctgcttagtgtcctgaacaatacagtccaaacaggaaagtactgaacattaagaacctttttatcttctttaagagttagaaaagcttgaataattctttcttatctggtataggaaaatttttgattttttatattagatacactggaaagtgaactatcaagcatgaagagacaaacatctactatttgaacttttgacaactaatttatagctccaggaccaataggttattacrtatgttgtccttgtttgtgcaagaccaatcaaataccgctttgtattaatacttttaaaaagattaaaattctgtttttttcatgtttaactctgtcttcagatatgagtcacctaatgtcttctttgagaggagattactttgaagtctgggggacatccccagctagaagacctgggcagaaatatgctcggatgatcatgatctgaattcaaagggaacaattaaggaattatttccattttgattctaatagcaagcttttctacttgttgcccttcaacctgtctgcatgc

SEQ ID NO: 512506 - DNA, 593 bp, Homo sapiens
aggttccttgggcttctgggaaagtgagttcaatagctgggtgtggaacatctgatgtcaaatgtgaggcctcaaaagagtaatttagaaggagtatgagagctaagaaaaggggtgataaagtctgttgaaaagaagtgttaatgagtttttggattaaattattaatacagggagggaaaacataaatcaagtgtagaaggttttgagaaatttcaagaaatattcaagaagacatgagagagccatgaagaagaatctagcctaagccaatggtggggatcacaaatgaagaggagtggaatgaaggcagatcagtggtttggtgattgtgagcctggtataggttaagctctagaacwtgtggttagaacctggcccttaactctgctttgctaccctctgccttcatgactgatgaccaataactgtacctttcctgagtatcagtttcacctccttcgtctataaaatgggaatataattcccaacttcaaagagtaattgtaagaaaataaagttatctgtgaaaaggctcaatgcctgccacacggtaagcatttagtcagtaatagccaaagttactattgaag

SEQ ID NO: 512507 - DNA, 568 bp, Homo sapiens
atattatctacattgtatataactatgtttctgttttgagatttaaaggaacatatgcaatagcaactttatatgagatttgatttttcatatcagacttcagcctcaagcatttagttgaagaatgaagatcttaaattttgacttttctgtttttagccagacatgttcaaaataaaagtgctatttaaaaagaggtytgtttccatgtcatctgaaatagggatgttttaatttatgttatagtttgagatacaccaaatcaaaggaacaagcctgcctcaataacccagtataattttcctatggctgctgtcacatagagagcacacttttttttaagttacagctttccatccctttagcacttaatcatgtagagatttgtatcgttgattatgcataaaataatttgactaaatactctgaggcagtgtcggtgacattttgttgctgttggtaccacctcttgtttcattgctactactattagtaccatcatctttgataattactacaatttactgagtgctcgcattgtttctaacatgaagaaaagggctttatt

SEQ ID NO: 512508 - DNA, 568 bp, Homo sapiens
atattatctacattgtatataactatgtttctgttttgagatttaaaggaacatatgcaatagcaactttatatgagatttgatttttcatatcagacttcagcctcaagcatttagttgaagaatgaagatcttaaattttgacttttctgtttttagccagacatgttcaaaataaaagtgctatttaaaaagaggtctgtttccatgtcatctgaaatagggatgttttaatttatgttatagtttgagatacaccaaatcaaaggaacaagcctgcctcaataacccagtataattttcctatggctgctgtcacatagagagcacacttttttttaagttacagctttccatccctttagcacttaatcatgtagagatttgtatcgttgattatgcataaaataatttgactaaataytctgaggcagtgtcggtgacattttgttgctgttggtaccacctcttgtttcattgctactactattagtaccatcatctttgataattactacaatttactgagtgctcgcattgtttctaacatgaagaaaagggctttatt

SEQ ID NO: 512509 - DNA, 619 bp, Homo sapiens
attttatcagcatggatagagaaggggtataatatgggttaaaagtacactggagccagaccatctggattcaaatgctgtttatgccacttattaggtgcataatcttgggcatattcaagatataacctcttcacacctcagtttcctcattctgaaaactgagaaaatgacaacatactacaactagggctgttgggaaaataattgagacatgtaaagcatttagaacactgtttggaacatagtgagaacttaataagtgttagttataattatactacactaacagccttatcaagtagaatccctaatgagggggcayagattgtgagttaaagtattagcaggtgttttattatcacacttaatcacatggggagaggagaaaagtagaatcactaatacttgtaaggcctgatttctagaacgaactttatgcctgggatgtgatgttttagggagcagggacatgtggagtgtggagtgtgaaaccgtgctccaggatagcagcagcctggtgcagcctcctgcctctacttcccagcacacacatccaccctgagcaggtaatgttctcacggaccttgacaaacatacttgctcttgttcctccagc

SEQ ID NO: 512510 - DNA, 643 bp, Homo sapiens
ttatgttgcctttaaaaaaaattcaacatttgctgtcttcagggaactcccattgaagagatggggacaccagacagcttactaatgcagctctgatctcatttaaggtaggagctcaggaatttttgtttgtcccctctctgttaccagcatattgtacaatgcctggtgtgcaaaatgtgttcagtaggaattcacttttttgtttggaaataatttcaggattttaaataagttgcaayataggctatagagtatacccatatactctttactcactgttttagtttgctagggctgccatagcagtgtatcacagagtgggtggcttcaacaataaaaatggattttgttatgattctaaaggccagaagtccaagatcagggtgtcagcagggttggtttcttctgagccctctctcctcatcttgtagatggctgttttctccatgtgtcttcacatggatttccctgtatatatgtctgtgtcaaaatttcttcctcttatgagaacaccagtcatattggtttagagcccactctaatgaaatcattttaacttaattatctctttaaagaccctatcttcaaatataatcacattctgaggttaggactacaacatgtaaattggggcaggagg

SEQ ID NO: 512511 - DNA, 643 bp, Homo sapiens
ttatgttgcctttaaaaaaaattcaacatttgctgtcttcagggaactcccattgaagagatggggacaccagacagcttactaatgcagctctgatctcatttaaggtaggagctcaggaatttttgtttgtcccctctctgttaccagcatattgtacaatgcctggtgtgcaaaatgtgttcagtaggaattcacttttttgtttggaaataatttcaggattttaaataagttgcaacataggctatagagtatacccatatactcttwactcactgttttagtttgctagggctgccatagcagtgtatcacagagtgggtggcttcaacaataaaaatggattttgttatgattctaaaggccagaagtccaagatcagggtgtcagcagggttggtttcttctgagccctctctcctcatcttgtagatggctgttttctccatgtgtcttcacatggatttccctgtatatatgtctgtgtcaaaatttcttcctcttatgagaacaccagtcatattggtttagagcccactctaatgaaatcattttaacttaattatctctttaaagaccctatcttcaaatataatcacattctgaggttaggactacaacatgtaaattggggcaggagg

SEQ ID NO: 512512 - DNA, 609 bp, Homo sapiens
aacatgtgcacctaacatgggcacctagcatgtgatatgtcaatagaagcgtgggtctccctgggtctggggaaggtgtttctccaaatctccatggataaccaaacccagaagggagaatcactttcctttctgtagggagagtaactccaggtgaagagaaggaagagggaaggaattcctggaggcttgctccaggcattccttcaatattttctctcaattccccatctccatgggcatccacaggaccaggaagtgacctcctggacttgggcaggcccctagactggtgccccactgctgttcttcctcctggcactayggaggtgcagccctgccagaatctcacgagtagaaagagtaaggcctattctggcacaatgcttaagattttgttccagttctacccaggagccatgcaaattgtgtctttgtttgcctgaacatatttacctgtaatgaatgaccagagctctgtgtccaaagcactgaatacataaaacccgtgtgaatctcaactttcatttactttttactttcccctgctggtgcccaagaccaccgtggaaggaatggctaaaggataaggtggaggagacaagtgag

SEQ ID NO: 512513 - DNA, 609 bp, Homo sapiens
aacatgtgcacctaacatgggcacctagcatgtgatatgtcaatagaagcgtgggtctccctgggtctggggaaggtgtttctccaaatctccatggataaccaaacccagaagggagaatcactttcctttctgtagggagagtaactccaggtgaagagaaggaagagggaaggaattcctggaggcttgctccaggcattccttcaatattttctctcaattccccatctccatgggcatccacaggaccaggaagtgacctcctggacttgggcaggcccctagactggtgccccactgctgttcttcctcctggcactatggaggtgcagccctgccagaatctcamgagtagaaagagtaaggcctattctggcacaatgcttaagattttgttccagttctacccaggagccatgcaaattgtgtctttgtttgcctgaacatatttacctgtaatgaatgaccagagctctgtgtccaaagcactgaatacataaaacccgtgtgaatctcaactttcatttactttttactttcccctgctggtgcccaagaccaccgtggaaggaatggctaaaggataaggtggaggagacaagtgag

SEQ ID NO: 512514 - DNA, 609 bp, Homo sapiens
aacatgtgcacctaacatgggcacctagcatgtgatatgtcaatagaagcgtgggtctccctgggtctggggaaggtgtttctccaaatctccatggataaccaaacccagaagggagaatcactttcctttctgtagggagagtaactccaggtgaagagaaggaagagggaaggaattcctggaggcttgctccaggcattccttcaatattttctctcaattccccatctccatgggcatccacaggaccaggaagtgacctcctggacttgggcaggcccctagactggtgccccactgctgttcttcctcctggcactatggaggtgcagccctgccagaatctcacgagtagaaagagtaaggcctattctggcacaatgctkaagattttgttccagttctacccaggagccatgcaaattgtgtctttgtttgcctgaacatatttacctgtaatgaatgaccagagctctgtgtccaaagcactgaatacataaaacccgtgtgaatctcaactttcatttactttttactttcccctgctggtgcccaagaccaccgtggaaggaatggctaaaggataaggtggaggagacaagtgag

SEQ ID NO: 512515 - DNA, 572 bp, Homo sapiens
  misc_feature (1)...(572): n = A,T,C or G
ggggctccttaggcatttgtggccagcatggtgcccgggagctccgtgactcacaggtcagggatgcggtagagggcttccctgaggaggcatttcttgactctggaggctgtgaggaggtccctggacagctctgccctgcagccgcccrgtactgatggtgatgtggtggaggcaagatagtcggccagggaactgggcagccgctgggaggagactctgtagagtagcggggcccgagcaccctctctccccgcagagancagccagcagcaatctcgtcggtcgcaatccccagcagcctcgctgctgctcgtcctcgacttcggcgcgtccagctgctctcgagagcctcttctgtaacgtgctgaagtggttcggcgctttcaccttcccattaatgttttccatacactcccataactaaggtaacctgaagataacctagtttcctgtagtttaaatggtcaaaaggttgaagaggcagcacacagtatgtatcgagtaaatggtagctgattattactaggtaaaagaagtgttataaacgagaaagaacagctattgtggac

SEQ ID NO: 512516 - DNA, 591 bp, Homo sapiens
cttgctacgtcctcatacggcttttcctaggtgcaggagacagagagagcgagcgagcctctcttcctatttttgtaagaccaccaattctaccagatgaggatcccacccttatgaacttaattaacttcaattacctcctaaaagctctatctccaaaatagccacattgagggttagagcttcaacctctgaattttggggggacacagtttagttcatagcaccctccaaaggatactcctctcctttgacatgtgtgatgttatccacaaccatcaaggggtggatagcgttcctgattataaaacttcakcatccaaaagcttggagctacccttggttctggaagcttccttacttttactttgaagttttcagttcccattgggagagaccctcatcccaactgtagatgaatcatttttcttcttggccaagctggagactgcatggaatcacttttattcttctgcaatatcattccaaagtcaggagagacagctttaaattacagcacctggctgagacctgggaagcttgccccatattcccgacattcctcactgtggccttccattgagtgactgc

SEQ ID NO: 512517 - DNA, 616 bp, Homo sapiens
ccaaaaaagccaacatacagtctttttttccctctcttttactctttcctggattctgaataatattggaatgagaaaacatcagaacttaaaattaactggcagcttaaacttccaaaggtggtacttaagggagaattcactcctagtaaatacattagtgrtcactgcaagtgggtgattattttggaaacagaaatgtatataaaaataacttggggaactgaggttttagggacactatttgagcaacttccctgaatctctcctgcctttacatttctccatcactagtttcagtgtcttccttaatccacagatttcactcttttttttttttcaaacacatctattcttttctcaccatgcttttttcctctttattgtctctccaattctttatgtgtcagttctaaattaattctgcttttaactttctattaggacatttagttagattcttggaaaatttttacttcttttttgggcgggcattagaaaaaaacacacactgatacttttctcaacatttttatgtttttatcttggccttagttgaaaacaaaagcttctggacagtgatgatgatctattctgtatcgacattccaaataaa

SEQ ID NO: 512518 - DNA, 607 bp, Homo sapiens
ctggcattttaaccatagcaataataatgtaataatgaacrtaaatattgatttattttaaatgtctggattcttgcttttgtgaatgctttatagcaaatatttatcctccaaaatgactcccttcatgaattctgaagaattttaggttacctttccattcacttgattccaattatacatatattaatatgtatatataacatatccacaaagttaaatgcattgctttgtatgatacttagaatctatctatatctatatctacatataatatttctaatctataatatagcacgtctctctctctctgcctctctctttccttccgcgtgtgtgagtgtgtgtgtgtgtattcaggggattgctgcattgccagagccactaataaatagaatagtttccaaagaaattagtgctttgctgattacttcaaatctttgctccaatattatcacttttaccttagaatcttaaatttgaaaaaattcatgagataattgtttaaaatcttaatgacaaaaatgagatcctgatagttcattgacttaagtccacacatcttcttagtaatagaattgggactgaaactcatgtctgcagagcc

SEQ ID NO: 512519 - DNA, 611 bp, Homo sapiens
attctattccatagcatctcatgtgaaaatgaaatcatgctcaaatcaaagaactaatttgattgcaaccagaccgaatagaacaccccagacacattttgctttaattttaacttccaaaaagtgaaaaggaaggaagaatttcactgaaacggttatccctaagcctctttcagattcgttcataaatcaaagaatactaggtaggtacagttttgctaatgtggggtaatctgatgaatttttgaatccttattgaatgggacacatccttccaaaaagtgtgtttgttaagacattgcatcctgcttttgagagcttgtttctcaaaattattttacaaatgaaagatattatttactttgtaaagatcttaaaagttgcrttttgttattttatcaacattcaccttttatctatattaccattgcactgaattcaaagtcataaagtatatttgtaaattaaaatatgccggattggataacaagaagatcagtctatgcatatttacttttccttttcaattaaccattttaatgcttcttagcatttatcaaatttaatatgagtcgttttaattgtttcacattttatgcacattgaccaat

SEQ ID NO: 512520 - DNA, 598 bp, Homo sapiens
ctgtgggatataatctcctggtgtgccattttctaagaccattggaaaagcacagtattagggtgggagtgtcccgattttccaggtaccatctgtcackgcttcctttggctaggaaatggaattctccaaccccttgcacttcctgggtgaggcaatgccctgccctgcttcggctcacactccatgggctgcatccactgtccaacaagtcccagtgagatgaacctggtacctcagttggaaatgcggaaatcacccgtcttctgcgtggctcactctgggagctatagattggagctgttcctatttggccatcttggagggatctcaggtttttctgtttaaaataaaaggtggtcatagtcttcagagtgtatatttggaataaaatgtattgaatctggaaaacattatttaatgaaaaattaatatcatttaagcatagaaacaaattttatatatacttgttgaattaatgccttcagaatctaagaaaacctcatttagttggtacatcctctttagtttctgtttatcttgagtttactgattttgtcctaaacagaatgaaatatcattatctgaagtatataaa

SEQ ID NO: 512521 - DNA, 577 bp, Homo sapiens
ctgctctgccacttactacctaagcatcaatatcttaagacaacacagagccttattttttattattttttttctacctgaaaaaaaaccagacagggaattcagcaggtgctatttctggagaaaaatgactagcattatgaacatcttcagttatttgcctcgcttcatgtaacttcctctttcctccctccaagttctcattattcaaaaatcatttactactaaattatagaaacaatagtttctcctaaagcagaagtgaagtgaagctgggtatgagtcaataaaaaattacgaggctctcaaatcatcaaaaagatgccacctatgacatatgacctatgctggtcttggcacccgtttatgaagagactagaaggggtaatattttttcttctgtggaackgatggtccctgtcatctcaacttgagggaaggtttgtctttgaaccaaaacatattcgtttttggaggatatacacatgagcatcttttcctaagaaaatatgtccgaaacgctcatcattatctcggcaaacagagcgctgagatcagtggcttgcaagcctcagta

SEQ ID NO: 512522 - DNA, 659 bp, Homo sapiens
tttttaaaaaaggtttaaaagtatgtatataatactttgcacrtgttatgcacagcagaagctgctgggtttccttactctttccttgcccatagaatcctgaggatatttgagtcacagagtacccagggccgggggattagtcctgactgtttttgtactatgtggcaatctcattttccattgccatggctgattttcaaatatgacattcagttatggccaatgatatgtagcggggagacctctggggcttctaggagaggtttttcaccttgaaaagacagaggggttggaggaaaagttctgtttggtgttggacttttgttatatgagaacttgaggcctggtgctgcagtagccaactgactgagacaaaactgagtatgaaaagctgagcttgagtttgaatgtgggtccccaggtcattatggagcaaccatgagacagcctcttccagccttttgttaaacacaataaatatcctgtgtttaaagcactctgggtagtatttcccattatttgtaaccaaaagcatccaacgcaaaaagtagactgttaataatatgtgttaatcagtatattttaaaagggcaaattggtatttattaaaatctatatccttgaattaatagaaaataatccccaactgaattcca

SEQ ID NO: 512523 - DNA, 656 bp, Homo sapiens
tttttaaaaaaggtttaaaagtatgtatataatactttgcacatgttatgcacagcagaagctgctgggtttccttactctttccttgcccatagaatcctgaggatatttgagtcacagagtacccagggccrggggattagtcctgactgtttttgtactatgtggcaatctcattttccattgccatggctgattttcaaatatgacattcagttatggccaatgatatgtagcggggagacctctggggcttctaggagaggtttttcaccttgaaaagacagaggggttggaggaaaagttctgtttggtgttggacttttgttatatgagaacttgaggcctggtgctgcagtagccaactgactgagacaaaactgagtatgaaaagctgagcttgagtttgaatgtgggtccccaggtcattatggagcaaccatgagacagcctcttccagccttttgttaaacacaataaatatcctgtgtttaaagcactctgggtagtatttcccattatttgtaaccaaaagcatccaacgcaaaaagtagactgttaataatatgtgttaatcagtatattttaaaagggcaaattggtatttattaaaatctatatccttgaattaatagaaaataatccccaactgaatt

SEQ ID NO: 512524 - DNA, 465 bp, Homo sapiens
ctggcttggcagatgtacaaagtcrttaatttttcccttcatactcatgaatattattatttttttttttttctttgagatggagtttcattcttgttgcccaggctggagtgcaatggtgcaatctcggctcactgcaacccctgcttcctgggctcagcaattttcctgcttcagcctcccaagtagctagaattacgggtgcatgccaccatggctggctaattttttgtatttttagtagagagggcgtttcatgttggtcaggctggtcttgaactcctgacctcaggtgatccacccacctcggcctcctaaagtgctgggattacaggcatgagccactgcgcctgacgtattatttcattttaatgcaaacccaggccctgagagtaaccttttctttttgttctattatgctccatcttcagcctagccgttgctgatattatattcttttttgaa

SEQ ID NO: 512525 - DNA, 465 bp, Homo sapiens
ctggcttggcagatgtacaaagtcattaatttttcccttcatactcatgaatattattatttttttttttttctttgagatggagtttcattcttgttgcccaggctggagtgcaatggtgcaatctcggctcactgcaacccctgcttcctgggctcagcaattttcctgcttcagcctcccaagtagctagaattacgggtgcatgccaccatggctggctaattttttgtatttttagtagagagggcgtttcatgttggtcaggctggtcttgaactcctgacctcaggtgatcyacccacctcggcctcctaaagtgctgggattacaggcatgagccactgcgcctgacgtattatttcattttaatgcaaacccaggccctgagagtaaccttttctttttgttctattatgctccatcttcagcctagccgttgctgatattatattcttttttgaa

SEQ ID NO: 512526 - DNA, 465 bp, Homo sapiens
ctggcttggcagatgtacaaagtcattaatttttcccttcatactcatgaatattattatttttttttttttctttgagatggagtttcattcttgttgcccaggctggagtgcaatggtgcaatctcggctcactgcaacccctgcttcctgggctcagcaattttcctgcttcagcctcccaagtagctagaattacgggtgcatgccaccatggctggctaattttttgtatttttagtagagagggcgtttcatgttggtcaggctggtcttgaactcctgacctcaggtgatccacccacctyggcctcctaaagtgctgggattacaggcatgagccactgcgcctgacgtattatttcattttaatgcaaacccaggccctgagagtaaccttttctttttgttctattatgctccatcttcagcctagccgttgctgatattatattcttttttgaa

SEQ ID NO: 512527 - DNA, 465 bp, Homo sapiens
ctggcttggcagatgtacaaagtcattaatttttcccttcatactcatgaatattattatttttttttttttctttgagatggagtttcattcttgttgcccaggctggagtgcaatggtgcaatctcggctcactgcaacccctgcttcctgggctcagcaattttcctgcttcagcctcccaagtagctagaattacgggtgcatgccaccatggctggctaattttttgtatttttagtagagagggcgtttcatgttggtcaggctggtcttgaactcctgacctcaggtgatccacccacctcggcctccyaaagtgctgggattacaggcatgagccactgcgcctgacgtattatttcattttaatgcaaacccaggccctgagagtaaccttttctttttgttctattatgctccatcttcagcctagccgttgctgatattatattcttttttgaa

SEQ ID NO: 512528 - DNA, 378 bp, Homo sapiens
ttgtttgtatatttcttagttattactaaatttgttcatttctcatgtgttgataaattgtatttttaattttaaaaaattagtacattgtcagtccaaatcctttgatataatttccaagtaaattttgtgtggtagtttaaaactatatctacaatttctttgatacttctcccttcaagaggtggatttttttttttttttgagayggagtcttgctgtgtcgcccaggctggagtgcagtggcacgatctcggctcactgcaacctccgcctcctaggttcaagcgattcttgtgtctcagcctcctgagtagctgggattacaggcacatgccaccacacccagcttatttttgtattttagtagagacaggg

SEQ ID NO: 512529 - DNA, 617 bp, Homo sapiens
cggagcccagcgtggaggcggctgctgggggccgggatgcacagcgccagagcagggaggtaccgtggaagccctgaggagaggtgggattctggatggatcttaaggcggggccgacatgattggctaatgggttgggtgtgggcatgagaggaagggaagagttggggggcctccagagttgctctccgcttatgctatagagggcgtgagggtttctgggcacgtagtgcgtgctcaatcactgtcactccggacctgcagcagaggccacctcctcacctttctgtctctcccaggaccatgggtcccctgccaccctttgctgtggcccagggcgcccagctcctgatccgtcctgtggacaaaccaatcaacacaactttaatctgcaacgtcaccaatgccytaggagctcgccaggcagaactgaccgtccaggtcaaaggtgaggaactccctgggtgggaagaacagggaccaaaggaagaggtcgaggcagggttccctgtctaatgctctctggctcccatccttctcctaagccttctcacaaaaggaccagtggggccagctttactcccctgttaactccatacctatatcactggtaccgt

SEQ ID NO: 512530 - DNA, 537 bp, Homo sapiens
attgagggacaacaaaacacctaccttcagccattgaagctgattgctcaaagaggaaaggacagattcttgcagatgtagcttaagcaggtgaagactagggagcagaagcccctaccagagctttgaacctaggagcataaatatcctagtcctcatagtcctcaatgagaagttttatagcttgaaccatagacctttttactaattttaacaataatttatcaaggtgaaattcatataccgcaaaattaaacatgaacaattcagtggcatttaaagtatggtatctagttccaaaaccatcatttccatcactggaaattaaaaccattacycatcaatcagtttctctccattccttcctgcactcagcccctggaaaccaccaatctgtgttctgtctctatggattcatcagttctggatatttcatatacatgaaatcataaaatgtgtaactttttgtgtcatgcttttttcacttaaccaattttggaggttcattcatgttacagtttgtaccatatatatcag

SEQ ID NO: 512531 - DNA, 629 bp, Homo sapiens
tgttcatcattctactctagctaggatattaatgcattgagggtaagatctatgcttgttagacattgccttctggaatggggaaattaagacctgagtgaacctgctgcacccctaaaggcaacaaaattaggcaaaataataaaaagcaagcatttcagaactgtggaaatcaatccagttcacagaatgaatggaaagcacccattcaagaactaccactaaacctcagtcagaatagcatggtctgtgacattttaacttggggatagacccatcctgccttactccccacatcagaggcatggtaggcataaaagctagcccacttacagccaagctcccatttggagctttgttgaaaaccccattatcagagcacagcctagagtatgacaagacaaaagcrtttctgaaaaaaatctttattcccatggcctcataattatttagtttggggttcagctctgcaaaacaaacagccaaaagccaatgaataaaaagcctttccccaggacattactgaaaacaatagtaatttgttggtgacatcacaatagcccaagacagtgagtgcagttgaggtagacaaaagcctgaccaaaaatgtaatagaaaccaccaagttg

SEQ ID NO: 512532 - DNA, 642 bp, Homo sapiens
agtgaggactgagtactgaccaatatatgttgccaagattgttacatactttcacctaaaacaaatatgatattatttttaaaaccccaatacagtatgagttctattgagacatgatcctaatgttttaaaatatgcaagagtttgagtaactggacaaattacgatcctgtaatatagtaatagcaaaaagggtataataaactaatcaagatgtccttttgaaaataattgtgcatagatgtgcacattttctctrtttaatgaaaacactgattgaacagctaaaagttccatatactagcataagccttgatgttatagtaataaatatgtggcttttgtccttgtgaagcttttactctaactggagccacggataagacaataaagactaagttttgattctggttcaaaaaacatgatcagctcaattacctatcagctacatggcttttcttggactattcttatgcttagagaagtaatgaagtggaaagaaatgccaaggccagaaaaatgtagggagacaagtgtgacttaaggcccatattgaaggagatgaagcttttgtgtgtggaaactttcaaacatatgcaaagaagacaacggtaaaatgaaaccctgtgaagtaattaccca

SEQ ID NO: 512533 - DNA, 614 bp, Homo sapiens
atgttgccaagattgttacatactttcacctaaaacaaatatgatattatttttaaaaccccaatacagtatgagttctattgagacatgatcctaatgttttaaaatatgcaagagtttgagtaactggacaaattacgatcctgtaatatagtaatagcaaaaagggtataataaactaatcaagatgtccttttgaaaataattgtgcatagatgtgcacattttctctgtttaatgaaaacactgattgaacagctaaaagttccatatactagcataagccttgatgttatagtaataaatatgtggcttttgtccttgtgaagcttttaytctaactggagccacggataagacaataaagactaagttttgattctggttcaaaaaacatgatcagctcaattacctatcagctacatggcttttcttggactattcttatgcttagagaagtaatgaagtggaaagaaatgccaaggccagaaaaatgtagggagacaagtgtgacttaaggcccatattgaaggagatgaagcttttgtgtgtggaaactttcaaacatatgcaaagaagacaacggtaaaatgaaaccctgtgaagtaattacc

SEQ ID NO: 512534 - DNA, 642 bp, Homo sapiens
agctccttttcttggttcataagccaaggaaatgcaaaatgcttttaagtttggcaactgactctgattttccaacagtgttttgtggaaacttgggttaattttggatctccacaagttgctgcagaggcaagtagaaaattacgtagcagaacacagccctctgacccattcagttcaagtctatttggatctttttcataaatgaggtcctgtgtaagattttggtgtaacagacatttctgctatttaaataaaaacacatttaacacgtttgccttaawaattttttgaaggaaaatctgatggagaatcaatagttaatagactccacagataaatttttaaagatatttgatgattatttctggtttcaaaaaaatgcatatgattatttcttatgacacaggcaataaaagcttatctttctttacaaagaatctgtaagttttaggaaaactgagacatagagaacaagatatgctctttaatatgcttagtatgttgataatgttgtccatttaaaataaattatacatgcatatgaaaaatttgaggaaatacaattcctgaaacatttttagcgcatgaaatgttgagagttttagcattctttctaaaaacatttctgagcaaagaatg

SEQ ID NO: 512535 - DNA, 642 bp, Homo sapiens
ctggcgggagtgcttgcaagagagaggaaaagagatggagagaaagagagctctccggtgtctcttcttgtagtgacgccagtcttaggagatcagaacccaaccttaagaccaaaatgaccttaattacctcaaaaggccttgtgtycagatgcagtcacattaggggttagggcttcaacagttccatccatagcaaattcctaaattaacattattactatatgcatggctatacatttttataattctgtacttttacttttggaattaccctgtggtatgttgtaagcaacttgatgggaaagggttctgacgactgaaagtagcaagcctgcctctagttttagctgccacttactaatctgtatgaccttaggccagttactttacctctcaaagactgttttttatttgcaaaatgaggctaataatattatacatactgcaaagtttcagataggcacgtacaataagcacagaataattaatatcttctaaaataaaatttcccttaaaatagagaattgtttttctttagatgacagcacttttaaattgctaatttaccccaattttttactaatattttggttccttctaaaccttaaaaaatatttataaaaagacatttaaaatatg

SEQ ID NO: 512536 - DNA, 642 bp, Homo sapiens
ctggcgggagtgcttgcaagagagaggaaaagagatggagagaaagagagctctccggtgtctcttcttgtagtgacgccagtcttaggagatcagaacccaaccttaagaccaaaatgaccttaattacctcaaaaggccttgtgttcagatgcagtcacattaggggttagggcttcaacagttccayccatagcaaattcctaaattaacattattactatatgcatggctatacatttttataattctgtacttttacttttggaattaccctgtggtatgttgtaagcaacttgatgggaaagggttctgacgactgaaagtagcaagcctgcctctagttttagctgccacttactaatctgtatgaccttaggccagttactttacctctcaaagactgttttttatttgcaaaatgaggctaataatattatacatactgcaaagtttcagataggcacgtacaataagcacagaataattaatatcttctaaaataaaatttcccttaaaatagagaattgtttttctttagatgacagcacttttaaattgctaatttaccccaattttttactaatattttggttccttctaaaccttaaaaaatatttataaaaagacatttaaaatatg

SEQ ID NO: 512537 - DNA, 640 bp, Homo sapiens
ggcgggagtgcttgcaagagagaggaaaagagatggagagaaagagagctctccggtgtctcttcttgtagtgacgccagtcttaggagatcagaacccaaccttaagaccaaaatgaccttaattacctcaaaaggccttgtgttcagatgcagtcacattaggggttagggcttcaacagttccatccatagcaaattcctaaattaacattattactatatgcatggctatacatttttataattctgtacttttacttttggaattaccctgtggtatgttgtaagcaacttgatgggaaagggttctgacgactgaaagtagcaagmctgcctctagttttagctgccacttactaatctgtatgaccttaggccagttactttacctctcaaagactgttttttatttgcaaaatgaggctaataatattatacatactgcaaagtttcagataggcacgtacaataagcacagaataattaatatcttctaaaataaaatttcccttaaaatagagaattgtttttctttagatgacagcacttttaaattgctaatttaccccaattttttactaatattttggttccttctaaaccttaaaaaatatttataaaaagacatttaaaatatg

SEQ ID NO: 512538 - DNA, 640 bp, Homo sapiens
gcactctcggtccccttttaatgagaaagggacaggttattgtgctattacacagtacagcctattcctggaagccatcttaagctgttcaggataatgtatctctacactgcatcagtctctttgttccatagatgctgttttttaaagaatgttatgaacagcaaatggctccttagaacattgtaatcactcaatctggattttccagcattcttggtataaggaaggataaaatgcccatgaggcagtgccaatttttaaaggatggttaactccagatttcacactcttggggcattgtgaatgcctggatcaaggtctgatatgttccagctaatgtgctagaataaataaatacttagacttccattagaaggaagactgggaacaaaagagtacatcattcattcatttagycaatcaacaaatatataaggagtgcctattctatattgagcactgttgaaggtgctgaggatacaaaattgttaccctcaaggtgcttacattatccaagagaagacagataataaaccaaaaatatattagattatatcagaaaaataaatcaagataaggaatgatacgagtgagacactattttatagaatgagcaggaaaaggcctctctaagtta

SEQ ID NO: 512539 - DNA, 643 bp, Homo sapiens
taaaccttttaacagaagtgataacaarctcagtaaagttttatcattttcctattgtcaactttaaactttaaatttaataatagctgtgtttagtaaccaattagcaaaatgcttaaaattttaacaattgtttctcattagctagtgtcatcagtacagcacaccactggactttttgttaacatattgtctacatgatatcacccctagacaaacaactagttttaagaaaaaaaaaagatatgtaccaataagctcccacccctagaattcctttatattatcaaaagcctattcacaataaaatggcttccagttgacccaagcagaactccatctgagtatgacaccttatgggttattgttctataggacacaatttatttcttaaagcagaggcaatatatagtgttgctttccccactgacaaaatatgaacctagaaactaaaggatataagagaaagagatctctttctctgttacacttaataatctacttgtggaaatattgcttcttttgactatagctttggacttaacagatttgcagattgtagtgcccaaggcaacagtcatggttccatcagactaggagttaaaactattttgaccaacataatgagtttgatactacccat

SEQ ID NO: 512540 - DNA, 599 bp, Homo sapiens
tggggaaatgcaatcctctcatagtctcagaagaagaggttttagcagaaatattggtgagtaactgcaacaatttactctgtttatttacctatacacaatatttaaagtaatatttcaagtaaatatattaagatccaaagaaataaaacagcataagaaaaatctcattgaccacccctggaagtgactattacacaaataacttctactgaaaattgataattaaaggtaaatattaaccacatctcctaacagtwcaatgagaactatattgtgtaatcaaaaaggccagagttgataaaggaagacttatttacagaagaatatcaactaacaattatagaagaaatatcattaagtaattgagagtttgcaaccctaacaaaatgattgactgaagcaaggaaggtcaacgggtgctaaaatcagcagaggaaaagttagtatgagtaatcttattactaacattagaaaaaaacagattatgagtcgtcattaaacattgtcacctgtgaattattctagacaaatttgtttagcctgtgtctgataactttttattttctgtttatatgacattcagataatagaggtaa

SEQ ID NO: 512541 - DNA, 600 bp, Homo sapiens
atgtgaacccacccgggacacgagagacacttgttycatctgatgaggagtcccggggcaggggaggtttgtgaaagtgtgtgaaagagacggttccgggagaaaccaatgtgaggagtgacatgcagggggctgcaggtctcttagtagaggctgtatgctccgagcaacatataggaccaactgggtctgatcagcctaaaaggaaaggaaaagggagtgtgctgagccttgaagggagaaagggaagactgaatgtgatgcattgttactgggaggaaatgggaggaaaatcctcaaaacccacccccttggaatgcatgctaaagaactttaaaaaaggcgttgcgggagattaaggagtcaagttaacccctcagatgctgaaaactctctgtgaattagaatagccctcttttagtgtggctgcctggcccaaggcactatagataaagaaattggccatgtgttttaaggtggtgactagggtgggaggacagccaggacattcagacaaagactttatatttactcatggctaaatagatgcagccctgcctagcagtttattgcagaatgctcgcagctcaagccaagaga

SEQ ID NO: 512542 - DNA, 353 bp, Homo sapiens
aggtcactagagtccttctagaaagcaaaaaattgcttagaatttcaaggggaccrtggagttgtccccttatgtatgcccctgagcccaggttaagaactcctacctgtggattccaaacagtcatctaacagggtaacctaactggattcaaagtattaattttctactctctcaatggcaagaaaaattgcttagctaactttaatgtcatttgaaactatgtgattttgtgtcccaggcaggctagaggttcaaagaaagaggttatattaatataaataaggcagcttctttatttgtccatcggaaagtctgttcgtctgcaatcatagaaagcattagataaatca

SEQ ID NO: 512543 - DNA, 586 bp, Homo sapiens
gaaaccacccatgaagacctttcagccaaaaccaaagttgcatcattatctgtgtgtgtaatcttgagtaaaatgtatttcttcatctgtaaaatataggggtcagacatgatagttctgaggcctcttagctcaatgattttactattatctgatgggggcccatatacrattcaatgtggaaaaaaataacaggaaatccactatttggatagtgggtacactagaagtccaatccccaatagtacataatatatctgtgtatcaaacatgcatatgtacccctgagtataaaatataataaaataaaaataaataaatatataacaaaaaataaaataaacaaaaaataaaataaaacaaaaattacagaaactgaatatatcacccaattcctctgtcccctttgtgctatgaaacaatggcaaaaccaagaaatttccttgtttattcctttgatatagcctgccattgaccagaatgaaatatatcaaatttctgtctttagaataaacctgagtctacggagtcagatatctgactgagggaaatattcaccaattcaattgaattcatctaacattag

SEQ ID NO: 512544 - DNA, 586 bp, Homo sapiens
gaaaccacccatgaagacctttcagccaaaaccaaagttgcatcattatctgtgtgtgtaatcttgagtaaaatgtatttcttcatctgtaaaatataggggtcagacatgatagttctgaggcctcttagctcaatgattttactattatctgatgggggcccatatacgattcaatgtggaaaaaaataacaggaaatccactatttggatagtgggtacactagaagtccaatccccaatagtacataatatatctgtgtatcaaacatgcatatgtacccctgagtataaaatataataaaataaaaataaataaatatataacaaaaaataaaataaacaaaaaataaaataaaacaaaaattacagaaactgaatatatcaccyaattcctctgtcccctttgtgctatgaaacaatggcaaaaccaagaaatttccttgtttattcctttgatatagcctgccattgaccagaatgaaatatatcaaatttctgtctttagaataaacctgagtctacggagtcagatatctgactgagggaaatattcaccaattcaattgaattcatctaacattag

SEQ ID NO: 512545 - DNA, 583 bp, Homo sapiens
cattttaacatgtgaattatagggtttcatgctggcttccagattttattatttgacyacaaacaatgaagtttgagctatgtataatatatataatatattatattattataattatatagaaatatgtaattaatatattattatattaaattatatatataatattatataacatatatatataatttgaaggagggaaatgttatccttctctgtttctataagagataaatacggtggatatttttctattcgtaatgattgagttcacctctttcagaagacattttctttctcttctgagtaattcaaaaaaaatctggcccttgtgaaaccctggaaatcttaagtctgttgaaatacaaggttaaacacattccaagagatctgttcaaactaaaattattttttataccttgaggtgcttgataaaaagactacattatttatgagaaaatgtggtttatcttggaaattgtgttcaaacattagcttactattttgtaaaataaatacttatgaagctaacactgttgcaggattcaggaggatgagaaagacctggggttgaaacaggaga

SEQ ID NO: 512546 - DNA, 578 bp, Homo sapiens
atgctggcttccagattttattatttgaccacaaacaatgaagtttgagmtatgtataatatatataatatattatattattataattatatagaaatatgtaattaatatattattatattaaattatatatataatattatataacatatatatataatttgaaggagggaaatgttatccttctctgtttctataagagataaatacggtggatatttttctattcgtaatgattgagttcacctctttcagaagacattttctttctcttctgagtaattcaaaaaaaatctggcccttgtgaaaccctggaaatcttaagtctgttgaaatacaaggttaaacacattccaagagatctgttcaaactaaaattattttttataccttgaggtgcttgataaaaagactacattatttatgagaaaatgtggtttatcttggaaattgtgttcaaacattagcttactattttgtaaaataaatacttatgaagctaacactgttgcaggattcaggaggatgagaaagacctggggttgaaacaggagaatctttattgagtgcactcaggc

SEQ ID NO: 512547 - DNA, 625 bp, Homo sapiens
cataggttatcccattcaaaktcaacaatctgtgcacctgttatttgtgatttttctctataaatatttatttccataaaatttctaattaaaaattttttaaagcagaagaagagttggtgaccagaataccacagattgccaaattaactaattaaaaaacatgtgcaactaattatttagaattcaaaatagaaaggataaagaactgaacaactaaaaggttaaaaaaaatggaggaaagatccaagaggaaaagtatgcttttagctgagattccagatgtagacaagagtcaagaaattgacatgtttagatatatgctgtttgaaattcagaattgcaaagataataagtgatttctacataggaagaacaaaaacagaaacaaaacaacagggtacctaagatgaaatatatatatctcttatttagaacagactttatgatgctcaattgcagaactaaataaaactagctacaacattttgaaagagagagaaaaaagttaccttatcatgtatatgtgaagacaatggaagtatattctcagatgtaaatggactcaaaagatacatgactcacttaactcactggaaacaaagtaggggaacaaatactccag

SEQ ID NO: 512548 - DNA, 639 bp, Homo sapiens
ccagctggtagcatataggatcaggcatgytgtgccaccagggtccctggtcaagcaggacccactgccagtgctctgtggctgagtggtgcccactgattgtgctctgctacctggcagaatcagctggctgggcaccatggtcagttggggctagttgggggaatgtccgaagttgagtatggctatctagggggatttctacagtcagacaaggtcagtggctgggctccaaagtcaggtgggaccagttggaagagccctgtagttagacagggacactggtggaactctacagtaagaagggacatctggctgggctctgtggtctgacagggctgctctctgggctctgcattcaggtgagcagggcttctagctaggctctgcattcagttggggctgctggtcatgctccctgattgagcagggtgctggaagtgccccctgatccggcagggctgctggctgggctccctggtatgagagggctactgtctggactctctggtcaggtagagccactgagtgtgctccatcattgggtagggccagttggaggaccttcacacttaggcagggctggatgagtggactctggttgggcgaggctgcctgtttgggtaaggcaactggtgg

SEQ ID NO: 512549 - DNA, 581 bp, Homo sapiens
gcatactcctggtaccaggtaaggaaaatgcaaataaaatccaacagggagaagtggagtatggacaatggagcattgtttttagcaatacccactagctcaggttttcacaaaagagatttgctagttgtttgatatctacagaaaaatggacaagtttttcttgatttctattgasaaatttcctccactaagtttttgttcttattttattaacttaatcaattaatttaataaaatgtattaatgcaataaaagaaactaaaatataacaaaatattatgtacttttttatatctatgcttctatatatctgcattttaaggtaataatttaaaatcattattttttcatctaatacttgtgtactctataaagagtcagattgcaacaagttcagacattgaggtttatacagtctccattgcaactctaccattgtatttcgaaagcagccatagacaatatgtaaatgcataagcattcctgtgttccaataaaactttactgaataggcagtaggccatagattgctgaccctggctctaaaacagcttaaatagctacttgtactaaagaaa

SEQ ID NO: 512550 - DNA, 549 bp, Homo sapiens
cataaactttcatccttgtacaattgtttttaattaaaatatctgaaactttctgaaatagttttaataatgatgagcacaaaacatgatttcagctattattttttattacatacatctccttttttttatatttataacaaagtcatttatagtggacttgccattcaacttgtcttggattgttttttataaagatatctactgacctttcagtattttcaagctttgttcatgaacgtttgttagtatagatacctattaagtatcctgtgttgtcttgaattatagaaaagaatatgtgtttagacaacaattaataagggcaaaatacaatgtttattttataatcttattatggtacttctgaaggataaaggcctatgaatgaatggtcctggcatttccccaaagggtacagtgtttagaaacctctggtaaagccatgtactatcagtcctacctactcagtgcccttccttttagtaggatctcactttagaactattctrgaatcagagcttctcaaatatttggaatataaatatt

SEQ ID NO: 512551 - DNA, 666 bp, Homo sapiens
tggctgtttttttatagttaactctttttattaagcaggagtacactgtaaaatagcaataacaaatatacagctatctaatgaataacatagatttaatatgtacatgtccagttataagcagatctttttcaaccaaacatggattaaaaatacagtatttgcaggatgtgaaatatgcatatacatggaaggccaactttttatatacacaggttctatagggtcaactgcaggacttgagtatgtgtgcattttggtatatgtgagaagtcctggagtcattcctctgcttatactgagggacaattgtagtacagtaaatactaggtgataagaatttttcamttccatcataatcttatgggactactgtaatacacacagaatgttattcactgaaatgttatatgatgcatgattgtataaacatgctgtatctctccatttattttgattcttccttaatgtctctcaatactttgttatttttatctttcatattttctttaaattcattcttaggtactttgtatatttgctgctattaaaaagtacattattaatttaacactaaaaattgatatataaaaatctaaagtcaccaaaattaagataatatgaagagtgaaaatgttctagaacaaataatggcttctctctttt

SEQ ID NO: 512552 - DNA, 666 bp, Homo sapiens
tggctgtttttttatagttaactctttttattaagcaggagtacactgtaaaatagcaataacaaatatacagctatctaatgaataacatagatttaatatgtacatgtccagttataagcagatctttttcaaccaaacatggattaaaaatacagtatttgcaggatgtgaaatatgcatatacatggaaggccaactttttatatacacaggttctatagggtcaactgcaggacttgagtatgtgtgcattttggtatatgtgagaagtcctggagtcattcctctgcttatactgagggacaattgtagtacagtaaatactaggtgataagaatttttcaaytccatcataatcttatgggactactgtaatacacacagaatgttattcactgaaatgttatatgatgcatgattgtataaacatgctgtatctctccatttattttgattcttccttaatgtctctcaatactttgttatttttatctttcatattttctttaaattcattcttaggtactttgtatatttgctgctattaaaaagtacattattaatttaacactaaaaattgatatataaaaatctaaagtcaccaaaattaagataatatgaagagtgaaaatgttctagaacaaataatggcttctctctttt

SEQ ID NO: 512553 - DNA, 666 bp, Homo sapiens
tggctgtttttttatagttaactctttttattaagcaggagtacactgtaaaatagcaataacaaatatacagctatctaatgaataacatagatttaatatgtacatgtccagttataagcagatctttttcaaccaaacatggattaaaaatacagtatttgcaggatgtgaaatatgcatatacatggaaggccaactttttatatacacaggttctatagggtcaactgcaggacttgagtatgtgtgcattttggtatatgtgagaagtcctggagtcattcctctgcttatactgagggacaattgtagtacagtaaatactaggtgataagaatttttcaattccatcataatcttatgggactactgtaatacacacagaatgttattcactgaaatgttatatgatgcatgattgtataaacatgctgtatctctccatttattttgattcttccttartgtctctcaatactttgttatttttatctttcatattttctttaaattcattcttaggtactttgtatatttgctgctattaaaaagtacattattaatttaacactaaaaattgatatataaaaatctaaagtcaccaaaattaagataatatgaagagtgaaaatgttctagaacaaataatggcttctctctttt

SEQ ID NO: 512554 - DNA, 612 bp, Homo sapiens
tactttcttccttacacaaaaatgaactcaaaatggctcatgaccacaaatataaaacctgaaaataattctgtaagaaacaggagaaaattgttacagccatgatttaagcaaattccatattacagttccaaagaaatcccacgtaaaaataaataaattgtacttaattaaaattaaagacactgctaagagaacaaaagacatcccatgctgtgagaaaaatatttgcaagcttctggataaaagggcttggatccagaatatatacagtcttagcaaaactcagtaagtatgtaatcaacccattaaatatgtgcaaaaggtttgaacagataattctcccaagaagatatacgaagggtaataaacacatgaasagttggctcaacatcattagtcttcagggaagtgtaaattattacatcactacctactaccagacaactaattgaatgacttaaaacacacagagagagagaaaataccaagtgcttcgtgtttgtgaggctgcagagcaacaggcactctcatacattgatgctggaagtataaaaagtacagttgctttggaacagagtgaggcagccaagtataacgcggtcccggaag

SEQ ID NO: 512555 - DNA, 608 bp, Homo sapiens
tgggtaatgacatcagtatattcctggtcctattgttacttcatcattaccaatttttttttttttttttttgctccttgtgttcatgtccatgagttatactgcattcaaaaaaattgtctagatttccgtttacctccccctctgacttcaacatggccaagtcaggttgagaacccctgatcccctatctttttgaggatcattggtttgccatgcctcagtttccaattttaatctccactgttgtttcctttctagctacagcagatttcctgacaaagctgattgaccgggtttcaatgtatggttcttgtttaagtctgaagcrtgatccctttatgtctctaaaccggggagctgtcacctataaccagacatcaaaatgattacgttaacagtaatgacaataactaaaatatattatgtatttgatatgtaccagtcactgtgccaagtactgcaccatgctttatctcatttaatcctcataaacatacagtttatattattatgctcattttatatgaggaagctgagtttcacagagtaagtagtttaaattgggtcacacagcaaataatgctagaaaaacatgacctgaatcc

SEQ ID NO: 512556 - DNA, 599 bp, Homo sapiens
cacacttaccatactatctctttctacctgcttttaaacattttttttctgattggatttttaagataagtgatttgtttaaacccctagtcattaatcccgattaacttcttcacartcttagtttccacagtgtgggggtgtatcaaatggcttatttaacagctagagctaccctcggtcttttgtcagttttaatgactattaggaatcaatgaaataactgaatcagaattattatcttaattattttaatgtgactactctttgtctagctactgtttctgggggaaaaaatctagcaaatctatgatttaggctcaatgccatattttaaaaatgagaagatctttgtaccaagaatagactcctcaatggtccatgccgttcctcaaattataagcagctcaaatctaaaactatgttctcaatcttagctcccagtctagttcctagtccttgtgattagtcttcatgaatattctctcattctcccttctctccttctttctcctaattgatccagaactgcaccccactggcctgccctctcaaatcaaaatatcttaaaggagtttctttcatcattatgtcagtgg

SEQ ID NO: 512557 - DNA, 599 bp, Homo sapiens
cacacttaccatactatctctttctacctgcttttaaacattttttttctgattggatttttaagataagtgatttgtttaaacccctagtcattaatcccgattaacttcttcacaatcttagtttccacagtgtgggggtgtatcaaatggcttatttaacagctagagctaccctcggtcttttgtcagttttaatgactattaggaatcaatgaaataactgaatcagaattattatcttaattattttaatgtgactactctttgtctagctactgtttctgggggaaaaaatctagcaaatctatgatttaggctcaatgccatattttaaaaatgakaagatctttgtaccaagaatagactcctcaatggtccatgccgttcctcaaattataagcagctcaaatctaaaactatgttctcaatcttagctcccagtctagttcctagtccttgtgattagtcttcatgaatattctctcattctcccttctctccttctttctcctaattgatccagaactgcaccccactggcctgccctctcaaatcaaaatatcttaaaggagtttctttcatcattatgtcagtgg

SEQ ID NO: 512558 - DNA, 543 bp, Homo sapiens
ttctgccaaagcttctgctccaaaagcttcctgtctccaccttgaaacatgccagcacaatgactgctttgtgttcagcttctttcccrcatcagaacactagctacacagaagtcaggaaaacacagtgtcagctgtttttgctgcttcgttacaagaagttatgcttgaaaggacttagaatgatggtggaactaaccaacacaaattatgtgtcacacccatgtgacccatatagaaaatcagactgttttaaataagatattacacagtgaagaaaaaaactctctgtgcatgtttctgtaagtatagattgagcgtgttggaaagtactacagaatatacactgaatgttaactaaggctaactggcttaaaaaggctcaaggagaggagagaagagaggaactgttttaaaaaagtaaaaaaaaaaaagagaaaagaaaactaaatgcattaacatgtgtgatactatgtatacctatttatgtacacaagggactagaaaatattgagttatgtctctatctactaacttatacag

SEQ ID NO: 512559 - DNA, 448 bp, Homo sapiens
ttaattcccatggctcaaggacttgtggatgctgaaaccctaaaccttctacaggagaaatgagagaacagatttctgactttggtgcaaggacaaatgttctaaacaagatctaaaaatccattaacaatacagagaaaatggacaaagttgactacattaaaaatacgaatttatcttttcaaagttctattgttccacaccactgtaggaagattatagtaaacaagaatagacagtttcaagtagctggaaggatactgagtgttccctacacaaagacgtggtcagtgtttgcatggctatgctaattaccctgacctgagtggcacaggcatgcatcaaagcatcactgtctacgccgtaaagatgcacaagaatcatgggccagttacaacaaaawctacatcttcaagtcatttgaaaacatagaaactggtagaaggtt

SEQ ID NO: 512560 - DNA, 606 bp, Homo sapiens
cttaatttggttcttttatccttcttgtgtttcgtggagtttgcctcacacattcagcgttcrgatgtcaactggagttctggatggaagttatacacagaatttggggttctccatctctgattctctccttccttctcaatttttagcaggcatattcccaatttcttcaggagggaaagaccaagggtttcctgttggtgttttggcaactccgcatggcatggcgtcagactcaccctaagctaaaaaccataaaagccctctttccctttgtttcttccacacatcacactcccctcccataatccatgcttttcatctccactcactttttatatttgctcattgtctagatattccctgcaggagagtgacattagacgggctcacttggccaccatgggaagcagaaatccagagatggacacattccctaaatgcttctatgctgccctgtaggagaggtgttactctactcacattgccgtgaggaaactgaggctcagaagtagcatcctttgtctgaaaggacatagctcgtgagcgctggaagcatagtttggtgtctgacttggccaattccaaagcttgtgtgatttgcac

SEQ ID NO: 512561 - DNA, 596 bp, Homo sapiens
ctgcttatgcctttttataagtttcctatctctcattttttttcattaccattcaatctcattatgtgtaacctttcccaaagatctattcagacttcagaaacaattcacaaatcctatttcaagtagatcgttgatctgaaatgtgtttttcctattgtgagtcaaactgaatggcttcttcggaaagaccttttatatcttaaataccctaagggaaatattttctctawggaattttaaaagaagaagtatgaaacagttatttgctgtgcatttgaaaaatatactgctggccatgtgcagtgatatttaaaacacatttaaattatgcctacctcttctctgccttattatatggaataaaattaatcatttattaaagttggagtgatggcagatcataccttgttctattaatccataaacagatctgagtatatttgatatatcatagaacctataccaaagacgtatttgaaactgaagaagacaatggaaattaaggcctttgtgtgctgaggaagagggagctcacgtaaatactttaagtgtcttccctgttgtactaaattttaatgacatctttggggtaa

SEQ ID NO: 512562 - DNA, 596 bp, Homo sapiens
ctgcttatgcctttttataagtttcctatctctcattttttttcattaccattcaatctcattatgtgtaacctttcccaaagatctattcagacttcagaaacaattcacaaatcctatttcaagtagatcgttgatctgaaatgtgtttttcctattgtgagtcaaactgaatggcttcttcggaaagaccttttatatcttaaataccctaagggaaatattttctctaaggaattttaaaagaagaagtatgaaacagttatttgctrtgcatttgaaaaatatactgctggccatgtgcagtgatatttaaaacacatttaaattatgcctacctcttctctgccttattatatggaataaaattaatcatttattaaagttggagtgatggcagatcataccttgttctattaatccataaacagatctgagtatatttgatatatcatagaacctataccaaagacgtatttgaaactgaagaagacaatggaaattaaggcctttgtgtgctgaggaagagggagctcacgtaaatactttaagtgtcttccctgttgtactaaattttaatgacatctttggggtaa

SEQ ID NO: 512563 - DNA, 620 bp, Homo sapiens
gtacccttggtggggagggtcaggaagacttctcacatggtaaatgggcacagataattgtaaggataacaattgttagattttgaatgtcattatgtatccttttgtakgggtgaggcggtcatgcagggtctcttttctcgtgtccctttcataattaccctctgactttcgcagcaataattttcatttgatgacctttatttgttcatcattctgtcaaataatgcactgtttctaaggaagaaagcagcaaagtattagtcataaaactcccgacaaagccctgtatctatccaagcatctatatatcatctatccagctattatctaactatttatgtatcttagaattagaattcagaattgaaattatcctcgtgggatgcaaattgacatatatttacttgaattggaaatgaattcaggctttttgatttcatgtttgttttctgagagagggtctcgttctgtcacccaggttagagtgcagtggagcaatcatggctcactaaaaccttgacctccaggactcaagcaatcttcccacctcagattcctgagaagttgggaccacaggtgtgcagtcaggctttttctgacaggaagaatgctactat

SEQ ID NO: 512564 - DNA, 621 bp, Homo sapiens
aaaaccttataaaaattggaacaaatatcttcaaaccaatatgttatttgaaacactattttacatggtacattcatttttgtctcaccctcacataactctgcaaatagctattcaattcaaactgtctcaagggtaaaagtataaagctcaatgtttctgttggatttagtggagctcatagagcgtctggatttgttggtcatggcattccctcttaaaccctcaagtgtctgtttgagccagtttataccagaacaattcaacaattcagggtttccttttgtgtgtagaaacatgtgtttacacrgcttcagtctgaatgaataagaacatgttattatttactgaaaaaaaatgacaagatgatatatagcttttgtacctagtaatctttattctactcatatattttaatactttaataagttgtaggatatggcctaaatctctttgctttaaactacttctaaaagtaaatactcattcagaaaacatatttcaagagcaatattttcacattttttaaaaacacaatttgttatttatacctaaagtttagtcctatagttaatactttgttgtccacttaaatttgttaagagaatagatctcatgtca

SEQ ID NO: 512565 - DNA, 621 bp, Homo sapiens
aaaaccttataaaaattggaacaaatatcttcaaaccaatatgttatttgaaacactattttacatggtacattcatttttgtctcaccctcacataactctgcaaatagctattcaattcaaactgtctcaagggtaaaagtataaagctcaatgtttctgttggatttagtggagctcatagagcgtctggatttgttggtcatggcattccctcttaaaccctcaagtgtctgtttgagccagtttataccagaacaattcaacaattcagggtttccttttgtgtgtagaaacatgtgtttacacgrcttcagtctgaatgaataagaacatgttattatttactgaaaaaaaatgacaagatgatatatagcttttgtacctagtaatctttattctactcatatattttaatactttaataagttgtaggatatggcctaaatctctttgctttaaactacttctaaaagtaaatactcattcagaaaacatatttcaagagcaatattttcacattttttaaaaacacaatttgttatttatacctaaagtttagtcctatagttaatactttgttgtccacttaaatttgttaagagaatagatctcatgtca

SEQ ID NO: 512566 - DNA, 621 bp, Homo sapiens
aaaaccttataaaaattggaacaaatatcttcaaaccaatatgttatttgaaacactattttacatggtacattcatttttgtctcaccctcacataactctgcaaatagctattcaattcaaactgtctcaagggtaaaagtataaagctcaatgtttctgttggatttagtggagctcatagagcgtctggatttgttggtcatggcattccctcttaaaccctcaagtgtctgtttgagccagtttataccagaacaattcaacaattcagggtttccttttgtgtgtagaaacatgtgtttacacggcttcagtctgaatgaataagaacmtgttattatttactgaaaaaaaatgacaagatgatatatagcttttgtacctagtaatctttattctactcatatattttaatactttaataagttgtaggatatggcctaaatctctttgctttaaactacttctaaaagtaaatactcattcagaaaacatatttcaagagcaatattttcacattttttaaaaacacaatttgttatttatacctaaagtttagtcctatagttaatactttgttgtccacttaaatttgttaagagaatagatctcatgtca

SEQ ID NO: 512567 - DNA, 470 bp, Homo sapiens
catccttgagttgttacctggttcatggtatggcagcaagcctgtaagcaagcacttccctggttcactttgcagcattgctctcagcttgtgaagcatcatcagcttatactccccaggcaggccagagagatagatgcaggcaagagcagtctataaaaagtgggttttgaccatatcgtgcaacgtaaagaacacatgttaatattggatcaagtccctcacttccccagaatctccaactgtttgactgaatgaattcagatcttcaagtttgtttaggggaaaggagtgctgaggaatggaatatccttttttgcctttcttacttggagaactmctaccctactcactctccacccaaaggtacctcccccaggaaaagtaccttgtctgccaaagagagttgaatttatttgtttttcccttcccctagcacctggcacacaactccggtacaacattgaccc

SEQ ID NO: 512568 - DNA, 604 bp, Homo sapiens
tacaggcccattgtcacagaggcatccaaatgcrccatccaaatcaggaaagtgccaaaggcaccaatcttccagaatttttcaggaacttgttaataaccttaacaaattagaaaaaaaggaaaacgtcatgattcatagtatatagtaagtaaagtttgccatagtatgctgagatgcttctttctgatgcactgcggctgactgttaagtcactcataatcctctaaccaactcttgaggctgcaacgctcacaatattgaatcagcactgcttctcagagagattgctcagcagatggcaaagacacaacttaatcagatgccttccttaaaaatttcgaggaaaaatggtaactgtatgtaagaatcagattttaaactccctttcatttaggtttctcctgcatgccttaagttttgctaagctttttgtaaagcttccctttttatggggttgtgttaacaacacacacagataaaaccatttatgtattagtaaatttatgtggtaacaactaaaaataaaaaaaaaatccaagaaaataaaagaaaaaccagtcagcagagatgccagccttagataaagataatttactagaca

SEQ ID NO: 512569 - DNA, 450 bp, Homo sapiens
tgcacatgcttccactcgggaaaatgccaggggccctttccttccctgatgccacgccctcccccctcaccctctcccaagctttcctcctcttgatgcctgctctgctgggccggcagaggtcagcagtccagttmaaaagaggtgggaaggtgagaggtcttgagatttaaggcaaaacatggttctgtggctctggggggctccagggagagagggagtggagctgtggggaagtgtgtggaggcagtggaagctggtagcgctggggcatggagcggagctggcagtttccttcctgcagaacctcaggtgggaacagaggagcagaaataagtctgcttggggtctggagaagactcagagctctaaggctgttgatcagagttggctttagttaagcacactgtgcctgcctcttgcaggggtcagatagcccattgggggtct

SEQ ID NO: 512570 - DNA, 583 bp, Homo sapiens
tggcagttagagaaatcagacaactcctggggcacaggaacatctctatttccattccccagaagccccctgacttagtgtctcccagarggccttcgcacactcaaatgttctggggatgctgtcacacaggcctgtgagggctggcccgggaagctggcctttgtttcactcagccctgccccaaacactcaggaatgtgccgggctgccttgcacttgtatctgcacctgcatatggatagaacagttggggatgggcaagagatacaactcccaagagaatgatgggggtgtctcccacctggaagaatcctcactccacaagtgtctatccctctggggaattgagggaggcaggagtggacggtgggactggagagccccctgccctctgggagccagctaagttatatcactgccctccaatactctcaccactcaagagtactgggagccagctaagttatatcactgcccacctgtactctcaccactcaagacatttgcctccagggtgtgttgacaatgcctgctgatggtaccatcatctcctgatggtgatgcaccagggaaccaccacc

SEQ ID NO: 512571 - DNA, 637 bp, Homo sapiens
  misc_feature (1)...(637): n = A,T,C or G
gtgtcacactaccgtgtgtcagatgctggaccaaggacctcatacagattaactcatttatttttcataacctccataggaagtggatactgacctcatcccacttcacagaggcacagataagaaatctttgaacgtattatcagtgcagggctagaaccctgtctccccacaacttctcctgtacttatgccacctccatagttgaacccaggaagtgtgaccccagtgtcggcactcaccactgcactaccctacygctgcggaggggagcagtaccattgtaggtataggtggaattgtgtcccctcagaaagatacagtgaagtcctaacccctagttcctcagaatgtgaactaggggtttatttggaaatagggtttttggcagatgtaatcaagataaggtcattagggttagcccaatccaatatgactggtgcccttataaaagcaggaaatttggacacagacaaatagacacacatgaagaagaaggcagagatcagggtgatgcttctaggagcccagccatgccccaaatgccagcaaaccaccagaagctaggagagaggcacgggacagattcaccctcaccaccttcanaaggaaacaaccctaccgacacctttgatct

SEQ ID NO: 512572 - DNA, 550 bp, Homo sapiens
tgacactcagagtgtcacactaccgtgtgtcagatgctggaccaaggacctcatacagattaactcatttatttttcataacctccataggaagtggatactgacctcatcccacttcacagaggcacagataagaaatctttgaacgtattatcagtgcagggctagaaccctgtctccccacaacttctcctgtacttatgccacctccatagttgaacccaggaagtgtgaccccagtgtcggcactcaccactgcactaccctactgctgcrgaggggagcagtaccattgtaggtataggtggaattgtgtcccctcagaaagatacagtgaagtcctaacccctagttcctcagaatgtgaactaggggtttatttggaaatagggtttttggcagatgtaatcaagataaggtcattagggttagcccaatccaatatgactggtgcccttataaaagcaggaaatttggacacagacaaatagacacacatgaagaagaaggcagagatcagggtgatgcttctaggagcccagccatgccc

SEQ ID NO: 512573 - DNA, 637 bp, Homo sapiens
  misc_feature (1)...(637): n = A,T,C or G
gtgtcacactaccgtgtgtcagatgctggaccaaggacctcatacagattaactcatttatttttcataacctccataggaagtggatactgacctcatcccacttcacagaggcacagataagaaatctttgaacgtattatcagtgcagggctagaaccctgtctccccacaacttctcctgtacttatgccacctccatagttgaacccaggaagtgtgaccccagtgtcggcactcaccactgcactaccctactgctgcggaggggagcagtaccattgtaggtataggtggaattgtgtcccctcagaaagatacagtgaagtcctaacccctagttcctcagaatgtgaactaggggtttatttggaaatrgggtttttggcagatgtaatcaagataaggtcattagggttagcccaatccaatatgactggtgcccttataaaagcaggaaatttggacacagacaaatagacacacatgaagaagaaggcagagatcagggtgatgcttctaggagcccagccatgccccaaatgccagcaaaccaccagaagctaggagagaggcacgggacagattcaccctcaccaccttcanaaggaaacaaccctaccgacacctttgatct

SEQ ID NO: 512574 - DNA, 637 bp, Homo sapiens
  misc_feature (1)...(637): n = A,T,C or G
gtgtcacactaccgtgtgtcagatgctggaccaaggacctcatacagattaactcatttatttttcataacctccataggaagtggatactgacctcatcccacttcacagaggcacagataagaaatctttgaacgtattatcagtgcagggctagaaccctgtctccccacaacttctcctgtacttatgccacctccatagttgaacccaggaagtgtgaccccagtgtcggcactcaccactgcactaccctactgctgcggaggggagcagtaccattgtaggtataggtggaattgtgtcccctcagaaagatacagtgaagtcctaacccctagttcctcagaatgtgaactaggggtttatttggaaatagggtttttggcagaygtaatcaagataaggtcattagggttagcccaatccaatatgactggtgcccttataaaagcaggaaatttggacacagacaaatagacacacatgaagaagaaggcagagatcagggtgatgcttctaggagcccagccatgccccaaatgccagcaaaccaccagaagctaggagagaggcacgggacagattcaccctcaccaccttcanaaggaaacaaccctaccgacacctttgatct

SEQ ID NO: 512575 - DNA, 575 bp, Homo sapiens
gtgagtggtcactttgatcttttaaagtctggaggggacattaagcatgcaagacaggaaaactgacagaaaacagttttgctgtcagcactttatcagctattcttttcctagttaaccccagggagagctagcagtatctcttcccatctcaacatataaccatgaagagwtaaaagatggctaaagtagattttggcattataagagaacttcaaagactacataaatttgttctttaacaaaaagtaatcacaataacactaataataatcaataacaatatggaacaagtagataatagagatcaggatactaatgaattcttgtagttttaggcataggcagtttacagtttacttattaatcttaccaatgctacataaagagaaacacaaaagtgtctgcaaacagcatttcagaattgatgtgaaaaattcttagcaagctccaacatggagtttctcatgaagaggatactgtaatgtgctataaagaaggaaaacacaaacatactagaactagaataaatcattccaggctgtagatactaccactagggagaaagaaataat

SEQ ID NO: 512576 - DNA, 574 bp, Homo sapiens
ggtgagtggtcactttgatcttttaaagtctggaggggacattaagcatgcaagacaggaaaactgacagaaaacagttttgctgtcagcactttatcagctattcttttcctagttaaccccagggagagctagcagtatctcttcccatctcaacatataaccatgaagagttaaaagatggctaaagtagattttggcattataagagaacttcaaagactacataaatttgttctttaacaaaaagtaatcacaataacactaataataatcaataacaatatggaacaagtagataatagagatcaggatactaatgaattcttgtagttttaggcataggcagtttacagtttacttattaatcttaccaatgctacataaagagaaacacaaaagtgtctgcaaacagcatttcagaattgakgtgaaaaattcttagcaagctccaacatggagtttctcatgaagaggatactgtaatgtgctataaagaaggaaaacacaaacatactagaactagaataaatcattccaggctgtagatactaccactagggagaaagaaata

SEQ ID NO: 512577 - DNA, 528 bp, Homo sapiens
gaaaattcaaggtgggtgcgcccgcgcccccatccagcgtccaccaaagtgtagctgccccaggactggggccccagactgggaagagagccgccgagagaaggggagcgggagcctgttccctgataaagtggggagggcgcaggggagaccccyggcggacctctaggcgtctgatcccagcacagagcgcgacgggcatctgagagtgcaggaagaactaactcagggactcggccagagaaatgggccgaaattactgccagacacatccgaccttagtaaaggcccctcatcctgaacaagcggcagaatgatattttatctgtaagaagatgggtggcttaaactttcaagcatcctggggaaagacttgggttaaatgcgcacgccgtttcccgcagcccttcacatctccagggctgaaccctgaatctgtctcctaatggaagtgaccctttgttcttgccccccagattcagactcggattgctaacgaaaagtacctaaggacccacaaagaagtag

SEQ ID NO: 512578 - DNA, 634 bp, Homo sapiens
atattggagagattagaaggaatgcyttctcagtctgagcagccagtataatatggctggggtcaggacagaagattcggtaagatattttgaagatgggatggaggtagaatccacaccaacagttgctggacagtttgagggtgcagatgttgatcactgaaaatgatttatgcaggtataagattctgctcctaattgtaggagagaacttggtgcctcttccactctgaagcaaagttgatgaaagtcttcttccttttccaaaacccaacctgaactacttctttcttgagacagactatattgagacaagttgttaccagcaaaagatagatacatgacctttattaacaaaaatgaattaaccaagaggatatttgtagtttattatttaccccaaactttctgtgtctgggtaccctctgagtaggcctataattcctgccttcactgtatgcattttatgtaagctagcagacctatgtggtgagaatgcacaggagcttggaggtataaatagacagggtgggaaagagagagctcctttcgccatgttttaccagcccgctctgttataacctcttaggttatattctttaatttccaaccttttaggttagtttctgtaaca

SEQ ID NO: 512579 - DNA, 634 bp, Homo sapiens
atattggagagattagaaggaatgccttctcagtctgagcagccagtataatatggctggggtcaggacagaagattcggtaagatattttgaagatgggatggaggtagaatccacaccaacagttgctggacagtttgaggrtgcagatgttgatcactgaaaatgatttatgcaggtataagattctgctcctaattgtaggagagaacttggtgcctcttccactctgaagcaaagttgatgaaagtcttcttccttttccaaaacccaacctgaactacttctttcttgagacagactatattgagacaagttgttaccagcaaaagatagatacatgacctttattaacaaaaatgaattaaccaagaggatatttgtagtttattatttaccccaaactttctgtgtctgggtaccctctgagtaggcctataattcctgccttcactgtatgcattttatgtaagctagcagacctatgtggtgagaatgcacaggagcttggaggtataaatagacagggtgggaaagagagagctcctttcgccatgttttaccagcccgctctgttataacctcttaggttatattctttaatttccaaccttttaggttagtttctgtaaca

SEQ ID NO: 512580 - DNA, 634 bp, Homo sapiens
atattggagagattagaaggaatgccttctcagtctgagcagccagtataatatggctggggtcaggacagaagattcggtaagatattttgaagatgggatggaggtagaatccacaccaacagttgctggacagtttgagggtgcagatgttgatcactgaaaatgatttatgcaggtataagattctgctcctaattgtaggagagaacttggtgcctcttccactctgaagcaaagttgatgaaagtcttcttccttttccaaaacccaacctgaactacttctttcttgagacagactatattgagacaagttgttaccagcaaaagatagatacatgacctttattaacaaaaatgaattaaccaagaggatatttgtagtttattatttaccccaaactttctgtgtctgggtaccctctgagtaggcctataattcctgccttcactgtatgcattttmtgtaagctagcagacctatgtggtgagaatgcacaggagcttggaggtataaatagacagggtgggaaagagagagctcctttcgccatgttttaccagcccgctctgttataacctcttaggttatattctttaatttccaaccttttaggttagtttctgtaaca

SEQ ID NO: 512581 - DNA, 550 bp, Homo sapiens
tgatgaaagtcttcttccttttccaaaacccaacctgaactacttctttcttgagacagactatattgagacaagttgttaccagcaaaagatagatacatgacctttattaacaaaaatgaattaaccaagaggatatttgtagtttattatttaccccaaactttctgtgtctgggtaccctctgagtaggcctataattcctgccttcactgtatgcattttatgtaagctagcagacctatgtggtgagaatgcacaggagcttggaggtataaatagacagggtgggaaagagagagctcctttcrccatgttttaccagcccgctctgttataacctcttaggttatattctttaatttccaaccttttaggttagtttctgtaacagaacaaatgagtctgggataaagtcctcaaagtacttcaaatggtaattgttttgtttttgtaacggcttaacaaataacctaggttttctgtttaaaaaaaaaagaaatactggcttagggcatggtggcgcaacctgtggttccaactacttggg

SEQ ID NO: 512582 - DNA, 602 bp, Homo sapiens
tatattaagacagggcatgggaaagagggaatcaaagcaagtgccccactgtcgccctcattactttcctgttgctacagatagatgatagctgcactcacacagcaaagcagatggctgagcaaactgaagcccagacttcagagtaagtagtcatcttcaaggttatcatcaccagacatggaagcagcttctattgaagataaataagaaggagaaagttagacactgccctattctagcaggcaatgccagygaggctcaaaagaaaaatggacctcttggtactcaatgacctgactaggaaccaagccttcaattaacctccctactctggaaagactgaatgagaaaagttaatctccaaagatgctctagggaggaaatactgcttgtacctgataagctgaggcaggacagggtatgtgttatctctccagagctctttttggtctcagtgagcaacgtgctgagagaggcatctgtttctgtggcctgagtggatgaaaacaggaaaaaaggaggaacatgttggcttttaggaaaaaagaggccaccctttcattcttctcataggacctggttaaggcagttgcatttgg

SEQ ID NO: 512583 - DNA, 601 bp, Homo sapiens
gtctcttccataggcagtcttggaattaaggatggaaatggaagtggcatcttttactattactgcaagtaacctaggaaaaactttgcttcccagccattaaactctgggttttgttgttctaaaagtcttagtttccaagaaaatagagcttccaccactaggtgamaaagtaaatgttttattacatttaaattggagacttctacctggacactttggattcatgtcatgaatcaacaagttaaaaaaggtgatgtcactgtaattggaaggttgattatttctgactaggaaaaattaggttgctgctacacaataaggagtaagtctgtaattcagaatatatttttgtatatacacacatatataagccactttttatccttcctcttctatttttattatctaacagaataaagaagtatgaatagtaattaaccttaaatatgtttttaagttacagactaccaaaggggaaatataactctgctacaagatgaaaaagaaaatgtatatcttccaatatggaagagtctttcagttttagaagggatagctatatcgtgttaggcagaagcattattttgcttgtgtcttt

SEQ ID NO: 512584 - DNA, 599 bp, Homo sapiens
ttaagaatggctaaaagcagtatatataaatgccatgttgcaaggggtagaatgtagataatttttgctgcaccaattcacctaagcattccagggttttcttatcttcatggttcctggttaatgtgggccacatagatataatgcatgatgtctcagaagcagaactgaaattcagaagcagccatgtccagtttatgctcagaaggtcaacgctggcactaggccctgttgccactcacacttgtcatccatgatctggctctcctgggtggtatggaaaagtagcagycaggctcatagcttttctagctccaactggacccctttatccctttatgcttctctaaatcttggccagtgcttgtttaactctgtgatgaagagtaccagcctttcttcaggtctcccatcattaagggcttgttgatggtaagagacctgtagaggtcctgttgtcctgtggattctgttgttctgtgggttctgttgcccatgtcctctgcttgtctatttttccttcctcactgtctgatctgctaacttcattcccagaaccagatgaagaaccaatagatgtacataaggtgtttaaccag

SEQ ID NO: 512585 - DNA, 548 bp, Homo sapiens
aggagggcaggcggtaggaagggagagggggagctgtttgtcacactttgctgtagagctgagagcagcctgacaagcttaaggaagtcgttgggctatgtggacaagaaggagccagctcccagcggtctcacaagctctatcggagttgaaagcgtggtcatggctctaaggagcacctcacgccctccctgtagctgttattgcagtttcaggcagagatccaggagctgcagaggaagggagaggcacaataacctacatggacccaagggagacatgtgttcctttaaaaatgtgaacagaaggaaaaacagaatgtgtgcaactgcggggtctgaggaaagactgttttgaaagaggctgtcagggaatggaaagggttaagcttttcatcctgaagaacctgcttcccaaatcaggccttcctcccatcactagaccctgagcagcagctggtcctagagacccccctcgtactgcgctgccacagtctcatcccatttccagctctgtattaacyaccaagctgcaggccctggggcaag

SEQ ID NO: 512586 - DNA, 586 bp, Homo sapiens
ggcgtcattgaggccggcagcattttgacatgtgggtcagggttctctgggtcatactgtcatgttttgaactcttttctgttggagaaaattttacyattttttcaaacccaatcaatagtatggtatagtcttgtttaaatgtcacataatcgcactgaagaaacatctaaaggagaaaaaaagaactacctttagcctcacaaccttcaccctataactgacttcccttttgctttttctcttctggcccttgtccatgtgcacacataattttgcttggttgtaatgagaagacacatacaattttgtattaaagcaataaagttttaatgatgtatagatatacaaagaaaatagctataaagcaatatttatgcaggtttgtaggggaaaaatccattttaaaggagacagtatggaataatagaacatcttagagtagtccatttgggatagtgcttataagactttaataacatttcttctctttcctttttatattgttccttaaccaagtcatgatgaaataaatgttatatatgttcagcttatatttgtgccatttgatttttaaaacaatcat

SEQ ID NO: 512587 - DNA, 603 bp, Homo sapiens
acagtgaatggtgaaagtggccttaagggcatcttgttttctttctagagctatcttagaaattctcttgtattatttccatgtaaaaggacccttgagtacaagactagtccctgaacagcacccaaccccctgctcatctcctaccttctatactgtgtgttcctggagaacagaaacggatctttttcatctctggagccacagtgcacaatgtccaccacaaaagtggtgttcaagaaagaaaccaggagggaggcagagagggagggagaaaacaagggagggaggagggattgagggaggagggaaggggcaggctgaggggaggaggaaatcagccctattcatcatgggtggacaattagcccatggtaatagaactgagctaataaattgctggataagatagatgagcactaacccactggagcaaagggtgaccccctctccgacccaccctcatgtcttcttggtccgagtaagctgctcccctgacccatccrtggactcttggccctcgggatgggggaggcccttgagttgacctccatgaagtgcatttatctacacagatgcctgggctgcagtagtgtgggcaaa

SEQ ID NO: 512588 - DNA, 519 bp, Homo sapiens
cctcatttatgattgacaagatttccatttcagtcatcgctactaattctgcttcaaatctgtatatttaatgaacacaccaatcggcacttcattattagtcaaggccattttgtcaagtgtaatcctctgattttataatgtatagtacatggtagctgcttctaaatgaaattcaaagaaagccttgtccagtttgcattataacaatatctggcatctgaatacgagcactccatcctctgcatggtctcatgctttatgcatatagaacatagttttcatgctcccatcagactcaaacacaagcaagtcttttctccttgtaaaggtatgttgaattgtatatctctgcacaaagaggaaaagaaaagcagtttgcctgcaccaaaacacagtccaagttctctaaggcaaacacaatctgacacatgctaaaaattgcctgaagcactggtgagttatrgttcgcctccctggggcagataattcattaagaaatagcctcatgccctatgt

SEQ ID NO: 512589 - DNA, 621 bp, Homo sapiens
tctagttaggaaaactgaaaccactctaggtatttcaaacagagggactttaatacaagaaattggtttcaaagatattggctgggtgtggtggctcatgcctgtaatcccagcactttggaggctgaggcaggcagatcacttgaggtcaggagtttgagaccagcctggccaacatggcgaaaccccatctctactaaaaatacaaaagttagccaggcttgctggtgcctgcctgtagtcccagctactcaggaggctgaggcataacaaccacttaaacctgagaggcagatgttgcagtaagccaagatcgcacagttgtgcactgcagtctgggcgacagagcgagactccatctcaaaaataaatacatatacacatacataaaaagtaaaaataaacaaagatattaagaaggttggaagagtaaaaggaaggaaatgggactggaggatccaaaaggaagaagctgtsatccttgaaaatcagaagctgttagtgcccttgagctcagtccccgagcctgtgcttgctgcagttggttccagatccatggaagaggtactgcctcagtctgggcagggactgctgaaagaggtgctgtctgctcaggctgct

SEQ ID NO: 512590 - DNA, 483 bp, Homo sapiens
atgaaactaggttcaaaggactcaaagtttctaaggtaagtggtgaaactgcatttgaatccaggtttattgaacattcataatgtcaagttgaatgctcatcactaaatataaggtatgagaatatcacaatcatcwgattattcataggtaaagtgaaagtgcatttgtataaaacatattacctttgatattgaacaaatgctggacaatatccacccttttcctggggtcatagttaggattatttgccattgttttacaaggtgtcccttctgaagctttgatgaatgaggtaaatcaccaactaaagcagctgagtcacaaagccaagggagttctagctccagcagaaactcccagcaggaacctcacctgctaacgggtggctcaccacgcgattagatcccaaccatcactctgcatcacacacacgtgcacatgcacacgtatgcacgtgcacgcatacacaacaccctccat

SEQ ID NO: 512591 - DNA, 404 bp, Homo sapiens
ggaagatcattccagaccttcyacacagctctataaggcaaaaagccgcacacattgcctcccataaattccgtttgaagtcctttcttctatgtctacatttgtgatgcaattaagtattgaatacattttctttaaaaaaaaaaaaaaagctgagatgagattgagaaagacttggcaaaacacccaatgaaagaattgtagatgggacttgggaaaaaaagtctttattaggtaccatcattctcattcttgttattattgacatcctcgtcactgtgaatcagccagcccagcctccaacacacataccaccagcacaactcctcatgttgactcgtgggccctgaaaccacccacagagtagatgaggaaagggaggctccatctgtcctagggagaac

SEQ ID NO: 512592 - DNA, 647 bp, Homo sapiens
tttggtaacagaagtaacttacaggagtttacctttgcctctgctagaaggtcaatctcttttccgcttaagaggagatctgggctgtttctggcaggggraagaagagtatcaccaatttttcctttgacacatttctaaatctggaagtatctggtagagttacctcaagaatcatataagcttgcatcacgatgaggactgtgatggcagtggtgcatatgagcccatcaggtccttcttcgcgtattcagtcagcaaactgcctcaaccgtgtcctactttttcttaagcatataattcccctttcatttaagccagactgtagctagaggggctcaaataggtaagagagaagatactaaagagttaaatgcactcaaaggggagaactattcagatttcttataaaattactggtggcataaataggccccaaatacagaagggaagggctgaccttcactcggacacctcatttgagcacagaaggggcctggcaattacacatggggccaagtggtctattcatctctttgccattttcagccattaaagccctacataaacatacatttcataatgagacccacccggtggacacaggcaaatgcccacacccatgcgcacagacctaatagacccag

SEQ ID NO: 512593 - DNA, 647 bp, Homo sapiens
tttggtaacagaagtaacttacaggagtttacctttgcctctgctagaaggtcaatctcttttccgcttaagaggagatctgggctgtttctggcaggggaaagaagagtatcaccaatttttcctttgacacatttctaaatctggaagtatctggtagagttacctcaagaatcatataagcttgcatcacgatgrggactgtgatggcagtggtgcatatgagcccatcaggtccttcttcgcgtattcagtcagcaaactgcctcaaccgtgtcctactttttcttaagcatataattcccctttcatttaagccagactgtagctagaggggctcaaataggtaagagagaagatactaaagagttaaatgcactcaaaggggagaactattcagatttcttataaaattactggtggcataaataggccccaaatacagaagggaagggctgaccttcactcggacacctcatttgagcacagaaggggcctggcaattacacatggggccaagtggtctattcatctctttgccattttcagccattaaagccctacataaacatacatttcataatgagacccacccggtggacacaggcaaatgcccacacccatgcgcacagacctaatagacccag

SEQ ID NO: 512594 - DNA, 493 bp, Homo sapiens
gaatctgtagataccaaactttctaatttttcagtagtttccaagcatcttttwtttttcttgtttcttcgttggtgtctttttttttttttttttttttttgagacaaaatctctgtgcccaggctgaggtgcagtggtgtgatctcagctcactgcaacctcgacgtctcacattcaacaattctcatgcctcaacctcccgagtggctgggactacagtgcccaccacacccaacttatttttgtatttttagtagaaacacggttttgccatgttggccaggctggtcttgaactcctgacctcaggtgatccacccgccttggctcccaatatgctggaattattgatatgagccattgggcccggtcatgtcattggtgccttaaccaagcctcttttaatttttcaaacggaagagcccctgtccctcagttacggctgctgagccctttcaaggtgagtcagtgaggagggagaaaagcggaagt

SEQ ID NO: 512595 - DNA, 246 bp, Homo sapiens
tcgaacctgcgccatgtgctctggaggctgtggcaaggcaggcgcggcttggaacccgcaccatgtgctctgggggctgtggcaaggcaggggcagcttggaacctgcgccatgtgctctgggggctgtgccagggcagggggagtcctcgtgtcccctgcgcacaacacagacagaaggctgggtccacccagtgggcggtsgggtgccaggccagtgcttaccccgccatgtttgcagcccgag

SEQ ID NO: 512596 - DNA, 456 bp, Homo sapiens
ttgaggaggccacgtcctttcagtctgccacgccctccattscatcctcttccttcctccaggaggctgggcctgggtttggggccactgttgcccaggtgggggagggcagtggctttgggaggaacagggacgatgtgtcaaacagcatcgcctctcccagtgagatggttctcctttgcctccgtctctttccccattgatttctccaagtggggagtcatggcttggtcctgatacgtctctagagctgcatcttccagcttcgagtgagcagagcagttggagtctgagggccttttcctggcaggattctccagctagtctttgttttagacagtcttgctccgttgcccaggctggagtgcacgatctcagttcatgcaacctccgcctcctgggttcaagcgattcacccacctcagcctcccaagtagattacaggattacaggagt

SEQ ID NO: 512597 - DNA, 623 bp, Homo sapiens
ggggcagattaaggaaggaaagatatgagaagcctgcagagcatgctttcccagactgtatgggccctgggaaaggagaagtggacagaaagggagcactaggtaccctggaagagaagattcatccaagtcatcagggaagttactaatgcaagggaaaaaatttagagacagggccagccacgcttcttccaagtcctttctgtctgctcagtcacctctatgcttatttttcttctttcctctaagtagtgtcatgcgttttcttcctattcctagtcgctcctagtcaactaactcctctctttaccatcttttcatcagaacttgaaacctcctctccttcatgtattagtgatcatgtttctccataatactgctagaaacaagaattgaaacctggaaaacctgcatttgagaaccagatctccctctgctagctatttgagaagttattttgttccattctttttgttgttgtcgaaacagggtctcactctgtygcccaggctagagtgcagtggttcaatcttggctcactgcagcctcaatctcctgggctcaatcaatccttccacatcagcctcctgagtagctgaaactacaggtgtgtgccaccacag

SEQ ID NO: 512598 - DNA, 616 bp, Homo sapiens
cagctggcggtgggctcggctggctgccagggtgggccaccagcaaaaagggaaaattggttgtgagtgagaagaagagataagaaagtccacagggctgataagaaagaccatgggcttccaggygcggtggttcacgcctgtaatcccagcactttgggaagccaggatggccggatcacgaggtcaggagatcgagaccatcctggctcacacggtgaaagcccatctctactaaaaatacaaaaattagctgggtgtggtggcgggtgcctgtagccccagctaattgggaggctgaggtgggagaatggcgttaaccccaggaggtgcagcttgcagtgaactgagattgcaccactgcactccagcctgggcgacagagccgagactgcgtctcaaaaaaaaaaaaaaagaagaaaaaaagaaaaaaaaaaagagaccatgggcttctgagagcaagaaagaggaattttggtttctgtaactgcagtttccattctctcatggcctctcatttgtttcttgtgcccatgagtttgcctgttagagataaggtgtgtttcttgtcctcaagctcatgcaaatgggtttctgtttcttacaatcattgttc

SEQ ID NO: 512599 - DNA, 552 bp, Homo sapiens
gctggggaaactgagttacagagcttgtctgcactgagtcatcaggagcaaatgctagatcaggtaattgaacccaagcaatctggttccagagccaaatagatgtattttttatgttatacaaacatatacatatatttttaggggaagggtgggtgtaggatgggatgaggattctgggtaattgcttggtaaataccaaatacctttcttgtctgtccttcttttcaaatgataaagtaatgtcagttgcaacacttttttttttttttttgagagaaggtctasctggagtacagtgatgcagtcacagcccactgcagcctcaaattcctgggctcaagcaatccacccacatcagcttcccaagtagttgggactagaggcccacaataccatgcccagctaattattttaatttttgtagagatggcaggtggcggtgaggggcgggcggttttgctatgttgcccaggctggtctcaaactcttgacctcaagtgaacctcctgcctcagccccacaaagctctgaaattataggcatgagcca

SEQ ID NO: 512600 - DNA, 609 bp, Homo sapiens
gctggggaaactgagttacagagcttgtctgcactgagtcatcaggagcaaatgctagatcaggtaattgaacccaagcaatctggttccagagccaaatagatgtattttttatgttatacaaacatatacatatatttttaggggaagggtgggtgtaggatgggatgaggattctgggtaattgcttggtaaataccaaatacctttcttgtctgtccttcttttcaaatgataaagtaatgtcagttgcaacacttttttttttttttttgagagaaggtctagctggagtacagtgatgcagtcacagcccactgcagcctcaaattcctgggctcaagcaatccacccacatcagcttcccaagtagttgggactasaggcccacaataccatgcccagctaattattttaatttttgtagagatggcaggtggcggtgaggggcgggcggttttgctatgttgcccaggctggtctcaaactcttgacctcaagtgaacctcctgcctcagccccacaaagctctgaaattataggcatgagccactgtggctggctacaatactatttatttatattttagaccaacaggtattctaccat

SEQ ID NO: 512601 - DNA, 609 bp, Homo sapiens
gctggggaaactgagttacagagcttgtctgcactgagtcatcaggagcaaatgctagatcaggtaattgaacccaagcaatctggttccagagccaaatagatgtattttttatgttatacaaacatatacatatatttttaggggaagggtgggtgtaggatgggatgaggattctgggtaattgcttggtaaataccaaatacctttcttgtctgtccttcttttcaaatgataaagtaatgtcagttgcaacacttttttttttttttttgagagaaggtctagctggagtacagtgatgcagtcacagcccactgcagcctcaaattcctgggctcaagcaatccacccacatcagcttcccaagtagttgggactagaggcccacaataccatgcccagctaattattttaatttttgtagagatggcaggtggcggtgaggggcgggcggttttgctrtgttgcccaggctggtctcaaactcttgacctcaagtgaacctcctgcctcagccccacaaagctctgaaattataggcatgagccactgtggctggctacaatactatttatttatattttagaccaacaggtattctaccat

SEQ ID NO: 512602 - DNA, 601 bp, Homo sapiens
ctgcaggtagccacacaaatgagcccaggttaaaccagccaggaagtccccatgcaactcacagggtcatgagcaataatggcttctggtggtttaaagtttctaattttaggtgcaataggtaactgaaacagcccacaagggtgtgagcctgtggagggtgcatttcccacctgctgaagcttctcaattcccaggatccaatccagataagactcttgttctcagtgtccttgatggaaatggcaatgaactttttgcagattggaccatctcgggaatcccaaagatcggaaactattttctttctcagaatcttccacaaagcattgagccttaggaatttctaagaaggatctkgaatgaaaaaaaatcttttgaaaaggtatttgtatagcttcagttcagcaagattcatggtgggtgttagagtaagtgctggtgttaagccaaaccatgtttttcaaagactcatctggcctcaacgttggcaggatcagagtggcctcccaggatctatcacatcctcagaagagttggttcaactggcatgtacccagatctctttgagctagtatgatactcccttgagtcaaaggct

SEQ ID NO: 512603 - DNA, 601 bp, Homo sapiens
ctgcaggtagccacacaaatgagcccaggttaaaccagccaggaagtccccatgcaactcacagggtcatgagcaataatggcttctggtggtttaaagtttctaattttaggtgcaataggtaactgaaacagcccacaagggtgtgagcctgtggagggtgcatttcccacctgctgaagcttctcaattcccaggatccaatccagataagactcttgttctcagtgtccttgatggaaatggcaatgaactttttgcagattggaccatctcgggaatcccaaagatcggaaactattttctttctcagaatcttccacaaagcattgagccttaggaatttctaagaaggatcttgaatgaaaaaaaatcttttgaaaaggtatttgtatagcttcagttcagcaagattcatggtgggtgttagagtaagtgctggtgttaagccaarccatgtttttcaaagactcatctggcctcaacgttggcaggatcagagtggcctcccaggatctatcacatcctcagaagagttggttcaactggcatgtacccagatctctttgagctagtatgatactcccttgagtcaaaggct

SEQ ID NO: 512604 - DNA, 620 bp, Homo sapiens
gcaggaacaggcagaagactcggggtctcgattttattctatgtaccatgggcaggaaaggcagggatgagactcaatggaagccttaagatcactgaagctgccaggtaggaaatggattgctgagcatggagagcaggtgcagagtaccagttaagaccagttaggaggctgctgtagcccagctgagatagtggtgtcctaggcaaagataatgacagtgaagctacagagagtggacaagttggataaagtttagaatcacaggacttgctgactgsagaagagggcaaaagcagagttagcacaacacatgagttatgaccaccttgagcagctcagcagggggtggtgccatttacagaacagagatggcatggacagagcccatggagaaggaggaggaaaaagagagtttggctttgtttttttttttttttaagacagggtctctggctgtgtcacccaggctggagtgcattggtgcaatcataactctttgcagcctcaaactcctgggctcaagtgatcctcctgcctcagcgtgccatgtagcaggactacagatcctacagatgcacatcaccatgcctagctttttttttttttttttttttttt

SEQ ID NO: 512605 - DNA, 620 bp, Homo sapiens
gcaggaacaggcagaagactcggggtctcgattttattctatgtaccatgggcaggaaaggcagggatgagactcaatggaagccttaagatcactgaagctgccaggtaggaaatggattgctgagcatggagagcaggtgcagagtaccagttaagaccagttaggaggctgctgtagcccagctgagatagtggtgtcctaggcaaagataatgacagtgaagctacagagagtggacaagttggataaagtttagaatcacaggacttgctgactgcagaagagggcaaaagmagagttagcacaacacatgagttatgaccaccttgagcagctcagcagggggtggtgccatttacagaacagagatggcatggacagagcccatggagaaggaggaggaaaaagagagtttggctttgtttttttttttttttaagacagggtctctggctgtgtcacccaggctggagtgcattggtgcaatcataactctttgcagcctcaaactcctgggctcaagtgatcctcctgcctcagcgtgccatgtagcaggactacagatcctacagatgcacatcaccatgcctagctttttttttttttttttttttttt

SEQ ID NO: 512606 - DNA, 620 bp, Homo sapiens
gcaggaacaggcagaagactcggggtctcgattttattctatgtaccatgggcaggaaaggcagggatgagactcaatggaagccttaagatcactgaagctgccaggtaggaaatggattgctgagcatggagagcaggtgcagagtaccagttaagaccagttaggaggctgctgtagcccagctgagatagtggtgtcctaggcaaagataatgacagtgaagctacagagagtggacaagttggataaagtttagaatcacaggacttgctgactgcagaagagggcaaaagcagagttagcacaacacatgagttatgaccamcttgagcagctcagcagggggtggtgccatttacagaacagagatggcatggacagagcccatggagaaggaggaggaaaaagagagtttggctttgtttttttttttttttaagacagggtctctggctgtgtcacccaggctggagtgcattggtgcaatcataactctttgcagcctcaaactcctgggctcaagtgatcctcctgcctcagcgtgccatgtagcaggactacagatcctacagatgcacatcaccatgcctagctttttttttttttttttttttttt

SEQ ID NO: 512607 - DNA, 620 bp, Homo sapiens
gcaggaacaggcagaagactcggggtctcgattttattctatgtaccatgggcaggaaaggcagggatgagactcaatggaagccttaagatcactgaagctgccaggtaggaaatggattgctgagcatggagagcaggtgcagagtaccagttaagaccagttaggaggctgctgtagcccagctgagatagtggtgtcctaggcaaagataatgacagtgaagctacagagagtggacaagttggataaagtttagaatcacaggacttgctgactgcagaagagggcaaaagcagagttagcacaacacatgagttatgaccaccttgagcagctcagcagggggtggtgccatttacagaacagagatggcatggacagagcccatggagaaggaggaggaaaaagagagtttggctttgkttttttttttttttaagacagggtctctggctgtgtcacccaggctggagtgcattggtgcaatcataactctttgcagcctcaaactcctgggctcaagtgatcctcctgcctcagcgtgccatgtagcaggactacagatcctacagatgcacatcaccatgcctagctttttttttttttttttttttttt

SEQ ID NO: 512608 - DNA, 696 bp, Homo sapiens
tgtcagcataatcaactaaaagtcttcagcaacagctttaacttaaaacatgtgggactttcaggtagagaatctctaactctgcattcagtgtgaaaatgtttttatttgcaatttattgtcaaataacatgagaaaactttacttggatgaaccctttatttgtatttttctgtgaatgaacattcagccaagcaccaggcttgatgttcacaagagaagagtgacaaaatgctgctaaaatggaaaataagagaggaaagccttcataagctaaataacaagggaaagtctttccaagggcaatgaattctcttggaataccaaatacttcttactggagaagttatgcaatgaaaaatcatgagaaatcctttcttcatagagcaacacatgtggcacatgtgagatttcacactggacaaaacagggttagcatcttgaaagaagaaaattctttagtggtaattcatttcttagttgacattaagtttctcacgttgaggagctatcaaacttgaaaatcactgtggagaaacctgatagatttctcatcagaaaagtgagtcaagaaggtggacctctagaaaaaactcttaacacatactttagcaaaataattcagaaatttgagaaaatatstattcataaaaatgtggcatgtaaatgcataatagcaaagtgaccaaggaataa

SEQ ID NO: 512609 - DNA, 517 bp, Homo sapiens
gactatgagattctgaagggcraaattcaggcctttacttttttctgtcctcagcacagggacccagcagacgattgactatgtaattggtgctcaaaaagtaattttagcttgaactgaattgagtcatattggattaagtaaaattaaattcattcactttattgatgaggctattaataaccttgacccttgtgcaaaccacacttatatgtaattgatatgcccccttcacactgaaaccacatgatcagtgaactcaaaaaacatcactgatgcccacaatgaatgcggcctctggaactatctatcattgcctcttataatttttggagttcataaaatgtactggaagaaaacatggctttggtgtctcagacacttggtttaaaatcctcacactactgcataaaactgtccaaacattgacaaagtgcataatgtctccaggcctctgtctttgaatccataaaaatggttgtaagatcacttacctatagggtcattgtataatttt

SEQ ID NO: 512610 - DNA, 613 bp, Homo sapiens
taatatggtatccagaggcacaagattgcagtttatgtgaaaaacaacttcataataagaatcataagcctgatgttcattaaaccttccagattatcatacatacagatggaatgtttgcctttgaaatgattttctaggaaagccaccactaaaatgtttccacattcctcttctgtgcatacaccatgtcgcagtcctgccaggatcaccccagcataaccatctgctgcactatatggccccagactggcagttccagtggcctcctctggactggccaactgcttgtcgctcaagccttgcccctggtgactctgcttttctcaaaaggcatatccactccagagggcttaggattactgtgaatttccttattggtgaggagaagatggctctagggttctagatgtgtttttcaagtaggatttccagcatttatttackcatccattgagtcaatcaatcatacattcacaagcatttttcatacacttctgccacagtttgaatgtcagcacaaaaactcacgctgaaatttaacagccatctatctatctcccccacgcaaattaatgtgttacatgaggtgttcattggcagaaaatgtcta

SEQ ID NO: 512611 - DNA, 625 bp, Homo sapiens
tttcctaggagcagattttttttttccttttaacagccttatctttaacacccagtactattccaggcatgtagtaggttcttaattaatatttttaagtagatgaattttaaagattgaaataccaaaattcactgaagagaagacactagctcaaggacatcactggagtcagggytgggaaacaggggcagaggccaccttcttaaaagcccaagatggcggttctttctattaaagcccacaccaggtttggggctcctctgcctccaagaaagaagtgtgacctctgcttgaactgagagaacttgagcttaaaataactgtgagtcacggccttccctgaaccttcttccttcctgcaaggcccgaggttgttcccatagccgttccctggaggacattagcaatgtggcatatatttgagggtccctgggaagacaagagcttgcattcctaagaatgtgagaggagcccaaccccagcgcctatcccatgtgattggaggaagtggcctggctgatatttcaagaaggaatgggtcatgggagtcatgtcactgctcgggtttgtcttctgctgacattgggacattgctggcaagaagcaggacttgcatgattca

SEQ ID NO: 512612 - DNA, 395 bp, Homo sapiens
agcccacaccaggtttggggctcctctgcctccaagaaagaagtgtgacctctgcttgaactgagagaacttgagcttaaaataactgtgagtcacggccttccctgaaccttcttccttcctgcaaggcccgaggttgttcccatagccgttccctggaggacattagcaatgtggcatatatttgagggtccctgggaagacaagagcttgcattcctaagaatgtgagaggagcccaaccccagcgcctatcccatgtgattggaggaagtggcctggctgatatttcaagaaggaatgggtcatgggagtcatgtcactgctcgggtttgtcttctgctgacattgggacattgctggcaagaagcaggayttgcatgattcacactgtca

SEQ ID NO: 512613 - DNA, 485 bp, Homo sapiens
tctgtttacctaaaccacttttttattgttgtttttagctttcttaagtgccatcaggtcttgtcttctttcatttctttctagctgtccccaacaaatactgcccaagtctgattgtaatgcagcctttctttcatagtgaatatttattaaagcacttaatacctgaattatgaaatgtagacaagtgcacattaacctggctgagttatttcctttcttgttctttttaaacacatattctagcccagtctatcaatgccagatggcaactacattttgatacrctgaatatttaccaagtcatgtggtatgcttttgaagtattttttaaaccctttccatcaaacgagctgactcatctctcattcatttattcctgcttttaacaagttgtatttttagaaacttgacctcagttttatcaaaatgataaatgatattgtaaaatgatgcatccgaagttctacaggcctgactacact

SEQ ID NO: 512614 - DNA, 656 bp, Homo sapiens
tgcctgtgattgaaagggagaaaaacaactttggcagcactaggggtgagcagtttcatgtttgggatctctctataccacgaaggctcttgtgagatccatcatgaatgacaggaatttggcccaaatcacaagatgcctgtgatttaaaaaaacagacaaacctggttcccttggttgtgaagaagcatatatatttgtttccattttggtgatgttttaacccttattattctataaataattttcttctggggtcctaaacatcaggacagatgtgggaaggatggggccttacctggatggattattcttcttaggacatttctctagagatgagacatgaacctaaaccctctttggaattatatgttgcataagtcagcagcctctttctcctgtggcctccatcatgcctctacctaatcccatcccctcttcctcaccagctcctctatccctctcccaatcttctggtaatactgctaatattgctcaaatactcaaacactccagcatgaagggcccacacarttggaaatatttgtgttaaaaagtaaaaaaaaaaaaaaaaacccacaaaaaaacccttagcccacaaaatctaactctgcccaatatccacaaaataccctccttcatcatccgtaagttct

SEQ ID NO: 512615 - DNA, 551 bp, Homo sapiens
ttttcccattcaaaacttatcccacctgtctcactctttcaaacaagtccaagtgactggctttctcatctctggtaagccaaatcccattgccaagttagtatgtcctgtcctcctcccccaacaagggatttgatacaagattatgactgttggatcttaacctaaaagaaactaatcacaagaggtaagtgtggcaagtatttaggtcactatgytagaaaaaataaaactaaatttcacatgaaaaaccaaaccatgagggcgcaaacccagcatatcttgcagcaagtaaaagatgcatcggtgccgcctgccattaaataagttttccagtttgagggaaggttaaataatcagacacaagtcaatactccagcctccttccaaactagcttgtacccacacacgtaaggccctgtttctcatggtagaagctgattgctcagaccaaaggtgaactaagcagttaattagaccactgtgtgaaaacttactagaataaatttgggcaatcttatccaagcaggagactcattagtgccaccaca

SEQ ID NO: 512616 - DNA, 682 bp, Homo sapiens
ttcagaatatggtaataggaataaaatgtttaatttttataaagtagaaaggcaccattacattctctccatagaataagagagagaactagagaaaggcaagatcaaagaaaaaaaaattgctgaaggagtgataaacttctgatgtgtgatttttytatattaattttatgatcttggagcttacaaaaataatgcatgtctactttgtactctttgtgcttacctctttgagctgagacaggtaacttgaactctggtctcttggctcttacctgaacttagagaccctggacagcctggtcttcatttggttcatgaagataattgtagttcactttcttaaagatagcaaccttgaggacctgtctcactctaggatgtaggtacttagatgtgactgagatgtgaaggatccactcacttgtgcaggatggaagacgtgtggtttgaggtgtttaacagatgcatattgtatttcctctcagggtcttctctagtccaggaaactgactggctctctggactgttgttggatctcaggcagtttctatgggtggcaggcccttctccctcctccatctggaaaagggaaaacttcagacttaactaaaaattttcgtctctttccaaatcatatgtatgttggaagcagaacctaaatgcaagtctatttacaaag

SEQ ID NO: 512617 - DNA, 496 bp, Homo sapiens
gcactagctccactgatctgagttcaggagctaaaacaatgcctgctgaaaggacaagagcaactgtaaatctggactccatcaccagatcaaggcccttggaccttggcctggaattggcctttcttgaaaattgggttgtgtagtttactgacagccagcatccatgagctcagggctgtccattttcagacagacagtcgtataatgacttttgattttttttctcctgagcttagctgaacagcacagaatgactgaccttatgtcttttcattactttcrtgtctttatcatttcttttcttacacagggaaggacgtgcagctctcgttacctccttttgcatgtttaagtacatggctctgtacagcatgattcagtatgttggtgttctgctgctctactgggtatgacttgggacttagcctcttggttagtgtgaactaaaacaagtagcggtgcactctcaatttacaatgcctctcaaagaaag

SEQ ID NO: 512618 - DNA, 447 bp, Homo sapiens
gttcagtgcctgtgaggactgtaggtgtccagggtgttgatgggggctgctggggtcctcttgcttaccttttccccacaaggagacatcctcttggttctaagctgatcctggctagagagtggggtgttggatgccagatatttcctgggatgtggagtactataatagaaaccagtatgtggccatactggttttctrtgctctacagggtttctgctactcctttgatgtattctgacactctcgtttagttattttcatcaaaatatagtgttgttttggttgtctttgtgggagagatgagtactaagggcttttagctggccatcttgctgacatccagttgactttaatttcttttttttttttttgagatggagtctcgctgttgcccaggctggagtgcagtggcgcaatctcggctcactgcaggctctggcccct

SEQ ID NO: 512619 - DNA, 652 bp, Homo sapiens
ctttctaagggatagagagatacaactgcaaccagagaacccctgtctttgtctcttcccttagcattttcctgactgtataggctatttgagtttatattccaatagtagcactagccagtaaacagagaatacccaattaccaaagctcacattgctcaaccctaagaaatagtgactagaatttcttattttgttcccaaacatrgagaaagagaaattatgttattcccaaattacttttcgaatgtatgtatccaatatacaatttacaatagaatatatacaatattaatgtattttggtagcagggacaggaatgcaagcagggggaaaaggtaattttaagttattttttaaatgaagacctatttcatttactgcagacttcaattcattagaacaaaattttgaaagaaaatttaatgttttctttaagtatataaacaggtatataaaagtctatttaaatatacagtatctttctcacagaaggaagtctggcttagtaacatccagaatttgaatttaaagcgactcatgccacaggagctggttcaactctgttggaaaaaagagagagagaggaaaaaaaaacacaaaactaggaatgcatcccagaagaattctgctctcttatttcctttttcgt

SEQ ID NO: 512620 - DNA, 652 bp, Homo sapiens
ctttctaagggatagagagatacaactgcaaccagagaacccctgtctttgtctcttcccttagcattttcctgactgtataggctatttgagtttatattccaatagtagcactagccagtaaacagagaatacccaattaccaaagctcacattgctcaaccctaagaaatagtgactagaatttcttattttgttcccaaacatggagaaagagaaattatgttattcccaaattacttttcgaatgtatgtatccaatatacaatttacaatagaatatatacaatattaatgtattttggtagcagggacaggaatgcaagcagggggaaaaggtaattttaagttattttttaaatgaagacctatttcatttactgcagacttcaattcattagaacaaaattttgaaagaaaatttaatgttttctttaagtatataaacaggtatataaaagtctatttaaatatacagtrtctttctcacagaaggaagtctggcttagtaacatccagaatttgaatttaaagcgactcatgccacaggagctggttcaactctgttggaaaaaagagagagagaggaaaaaaaaacacaaaactaggaatgcatcccagaagaattctgctctcttatttcctttttcgt

SEQ ID NO: 512621 - DNA, 632 bp, Homo sapiens
ctggctcttataaattcagattcctggctccttcccagatctcatcaataaactctctagaggagtctaggaatctcctccagggcctacttttgataggaaagtgtagcaaaaagacttaatgacctctcctttgtcatggatcattgatagccttatattattacttgcctgtttcctctrtattcctcctcattaagataatatattcctcaggtatggggactatatttatatttattctgtttgctacttcatgcctaacattatgctgatagtagatgctttacaaattcctactacatatatggatcacctggtaaaaattttgcttagacaaaccttttcaaaaaatgctatttgcaatgttggtccctagtagaaatatttatgaagaacaaaagctttttagtttaagatgctcttgtttatttggttaggaaagtaatagaaaagtaaattaacaacttcaatgttacaagtgaaaatgggcatgaaggattgtttaggagtaaattctggttaaatgcttgctcctccaagagcttctatatttaaacactggtgttggaaccaattcaagaaaaagaaaatccttcattaatatttaagtaaggcaggaataggaaatg

SEQ ID NO: 512622 - DNA, 605 bp, Homo sapiens
taatttttgtgtgtgacatgagacagaggcaaggttatttttgtttgaatatccaaatatctcagcttcatttattccaagaccatccttcttcagtgaattacagaggagtcaggtggccatttaggtttgtatctgtttcttcactctatttaactacactggtctagggacccatcctcgtgctaataccacactgccttttgacctgtgagatgtgtacttccctcagttttcttcttcttcttyttcctccttcctcctcctctttcttctttttccttcttccttcttcctcctttctcctcctcctctccctcctccttctttttcttcctcctcctccttcctctcttcctcctcctcccactcctcctcttcctcctcctcctcctccttcatcatctttgtcttctcctccttctccttcttgttcttccatccctgcttctggttcttcttctttcttacttttttttttttttttttttttgagatggagtcttactccgttgcccaggctggagtgcagtggcatgatcttggctcactgcaacctgtgcctcccaggttcaagcaagtcgcctgcctcagactcctaagca

SEQ ID NO: 512623 - DNA, 605 bp, Homo sapiens
taatttttgtgtgtgacatgagacagaggcaaggttatttttgtttgaatatccaaatatctcagcttcatttattccaagaccatccttcttcagtgaattacagaggagtcaggtggccatttaggtttgtatctgtttcttcactctatttaactacactggtctagggacccatcctcgtgctaataccacactgccttttgacctgtgagatgtgtacttccctcagttttcttcttcttcttcttcctccttcctcctcctctttcttctttttccttcttccttcttcctcctttctcctcctcctctccctcctccttctttttcttcctcctcctccttcctctcttcctcctcctcccactcctcctcttcctcctcctcctcctccttcatcatctttgtcttctcctccttctccttcttgttcttccatccctgcttctggttcttcttctttcttactyttttttttttttttttttttgagatggagtcttactccgttgcccaggctggagtgcagtggcatgatcttggctcactgcaacctgtgcctcccaggttcaagcaagtcgcctgcctcagactcctaagca

SEQ ID NO: 512624 - DNA, 626 bp, Homo sapiens
cccttaggtatggtaagctttagagctacttgaagactctcaggactcccttgtgggtacaaagaacaggwggctgccttcacagtaattatgccagcaataaattaaattagctagcattcattttccagctaggtgccaatcaccctctttgtgttacctcatttaatcctcaccacttacctataatttttattctattctaatccccatttcacagataaggaaactaaggtagagagcagtcatttccagaaccaaggcttttcaccattatcatgccacctctgacacaatcttgggaacccaaggaattcttcccatatttatttagtcatcaccatagataaacacatataggcttactatacctgaggcagtggtctaagtgttacatataagtatgttcatgtatttaattctcacaactctcagatgtagctagcattattattcttattttcaaatgacacacatgatgcacagagaggttagatgacattcccatggccacacagtaggtaggtgacaggattgttattcgaatctatatagtctgactagtagggtctgccctcttaatcactctgacgtattgcttctctagctgatgcatacagtactgg

SEQ ID NO: 512625 - DNA, 610 bp, Homo sapiens
cagacttcggtgtagatctcaccactcactgtcaaggggacagggaagcaaggaagattgggtaggaagagtctcaggctgcaacacagttttatggaagtgtccaccaggcagatggggagtccctgagccaaagtcacctgttaagggagtcccatgctttgcagaaataggcctgcattaggccctaaccctaaccctaattcctcatcactggctgggagcagcccaggggaagcttggtcttggtgcaaagcagtggtggatctacaggggaagcagcatggctttcagtcaattatgttccccacatcaggagtttgaacaacaaattttcaaggccactgcactggtattgccaagaaatgcttcaatagttcacattttagtaattcatcaacattagcatagtttgattatttattcctatraaatacaaatgacttacaggaataactttaaaaagttaatagttattagtatgttccaggcattgggtaagcttttatatgtattatttcgatctttacaatgaccctgaggtatttgtattattaatctcattgaacagtcaaggagactgaagctttagatgtttaataagattaca

SEQ ID NO: 512626 - DNA, 613 bp, Homo sapiens
atgatatatttgatggtattccatctctcttgttttatgctttgtattcattacatggtttggtcctcttttcatcccatttactgagatataaataattaaatcacatgaaatgtacagatttaaagtggacagtttgatcacatttgatatatgtatacatttgtaagccatattcaatcaagataacaaatatttctaacacctgcaaaagtttctttgtgtttcttaatattctctcctctcttcactcctgtctttaggcaaacactgttctgctttttgctaatatacattagtttaaatataaaattttatatgagtggaatcatatagtatgcactcttttttgcctgacttatttcaaagggcatatgattttgagactcatctattttgtgtgtaggtatagttcatttcttttatattccattttatggatatatcamaatttgtttattcagtggccaattgatgaatatatggtttttttccagttttgggagttcatgaagaaagctgctgtgaacagtcatgtagcagtccttgtatggacatgtgtttttatgtatcttgggcaaatatgtaggaataaaatggctgagttacatag

SEQ ID NO: 512627 - DNA, 604 bp, Homo sapiens
taaaattgtttgtattatttccttattgtctttttaatcagagcatgatctgtttttctccctcagtttctcattatccattttgcttytcttgccttcttgtgggttacttgaataacttgtaggattccatcttgatttatttatagtgtttttagtatattgcttttgtgtatatacatatgtatttttagtgtttgttctaggtattaaaacatggacacataatataccccagtctatttgtatcaatgttttaccactttgatgtgtggaaacttaattccatttacatcccttttctttcgctattttaaatatctttttctttagtataagatgttgtataatttttgttttaatgatcagggatgatttttaaaactgatgaggagaagtccagtgtatgcatccatacgtctgggtttattttgttcttccttccttcctgattgtctgagatttctttttctgtcatttcctttgaagaaaacccttcagccgatctttaaaagtagttatactggcaacaaattctattagtttttgtttgtctgagaatgtctctgtttccctttcatccctcactggatatcataatcat

SEQ ID NO: 512628 - DNA, 594 bp, Homo sapiens
ttactgtagctttgacctccctggctcaactgattctcccacatcagcctcctgcgtagctgggactacaggtgtgtgccactatgcccagctaatttttattttggagagatgcggtctccccatgttgccagggctgttctcaaactacttggcttaggggatcctcccacactggcctcctaaagtgctggtaktacaggaatgagccaccttgtccagcctcttaaactttttgaagttagccagattgtggcagtattcaaagagttgaatgttcattgtcctggggacttgacctctattcttctcaacttgccttcagcccttctcttccgtcccttgctctgttctgcaccatgagggcctggcttactaagtgtgggtaccctacctagcgtgtattcccaagctgcattccccttacctttttaaaaacaccatgtgcaaatgccttttgctcactcctcaagcccaggtgctctgttggaaagaaagaacaaacctgggaaaggcttatgtggctcttagaggaagtttggggctgtttgagcaggaattacaggtcctgagcctccagagcatggcctttgg

SEQ ID NO: 512629 - DNA, 640 bp, Homo sapiens
gaccctagaaatgcttaatttggctgtgtgaaagtaatgctaatttcagtcatttaagtaatcatttgccatttatactaaattgccgtgtaatattacagtgattatgcatatcattaaatatgtgtcacattagtcttgtggtgggttttatttgattatagcactaaatcatgctcaggattcttagacttcttagtttgttgcttatattatattgtgatcattacataacttaaaaacttagggagaatgttgccattgagggaaagtttgagagaacacatctatttcccttcctgcctcattataaccatgaaattgacagcattggtatcattcacatctttcaggtctctaaatttacctttttgatctcacaacgtggattgtctacacaaattcatccttttgaaacatttaatgaataatctgttttaaattgtgttttaaaaagcttatctgcatttcctattgaatcaggttattttctatgttcaccatgagtcttcacccatatgcataatrttaatgtataaaaaagaataattgctgtcctaagaatgaacatagcttctttttccatgggaatacaatcttaaatgatatacactcagtgttagcagtgcttatctacata

SEQ ID NO: 512630 - DNA, 513 bp, Homo sapiens
agccttcttttccctctgagaatagattgcaaaatcctcaacatgactttccatggtctattccccaatcttcagcttcacatgttccctgtcctcctatttcacattatacgttctggccatcctgaacttttcattccctgaatatatgatgttttcctttgcttctgagacttcacagactacttgctccaagagccttccttggtttttaaatctggattggttcattatctttttgctcttctagcaccctctacttcccctacactgaaactgtcatcctatattccaactgtttcattatctatttcctcactcttcttttgcaatagrtgaggactgtctgtcttgttcacacctcagagacgcattgtctgtgacatagaaggtgctcagtatagatgggggtgaatgatgaatggatgccaaaactgctctatagatactaacactttgaggacattaatgaattacttcttgtcacagccagaagacactaaaatatatgtt

SEQ ID NO: 512631 - DNA, 544 bp, Homo sapiens
ccagtagaagtagaaaagaaaacaccaaggaatggaaaggatggtaaattgagcacaaaaaaaagaaatgacaaaataagtccaaacttaccagtaattccccccaaaagtgaatgctttaaatttacctcataaaagacagaaattctcagatactgtactgttcatatgatataaagactcatttaaacaaagtaacacaaaagatttaagattccaagtgtgataaaaaccaacaaggaaatattagttaaaaaaatctgatgtactagcatttttagtagcaaaaaaaaagtagatttgaagataytgaaaaggacaaaaaggagtatttcaaatttatgaagggaataattcaccaagaaagaacaacagccaagtatagctgcaatatatataaatagagaaattgacaaatacaaaatcatgtgaggaaacttcctatgggaactctcaaacagaaaatatacttttttgttaagaggcagggtcttgcgctgttgcccagggtggagtacagtgacacagtcatagctcactgcag

SEQ ID NO: 512632 - DNA, 647 bp, Homo sapiens
acaaatataatcaactgtgacatgtgctatatggggctagaaagagtatattacagagactcaactccatcaagaccatgtcagagaaggcttctctgagaaagtgatgtttgggctgagatctgggagrtgactagaagttaatcagaaaaagtcaagcaactagaaggggtggaaagaagagattcagagtgacagcaatgttttggttgggcaaatattagactccacattgggagtctaatatttaagttagtatctaactttaagaccttggagataattatttttggcatgaatccattatcatacagatattactcttcaataatgaggtcattttaaaaatgcgcagtaaaaaacaagactaattcaagtccaggaagatggcctgtgttgtgtcactcggaggttcagcatatgagggcttgtgttattgctgtttaaggcagagacaccctagagacatgggagaaccatgttgcatactgcacaacactggtgatgactctgtgccctagcacagcaaaacatcttgacctggcaccatcatctcactcatgtatgtcattttctatgggcactacaatatttttcctcaagtttatgtaagatattttggaactcttctgaaaatttaatatact

SEQ ID NO: 512633 - DNA, 647 bp, Homo sapiens
acaaatataatcaactgtgacatgtgctatatggggctagaaagagtatattacagagactcaactccatcaagaccatgtcagagaaggcttctctgagaaagtgatgtttgggctgagatctgggagatgactagaagttaatcagaaaaagtcaagcaactagaaggggtggaaagaagagattcagagtgacagcaatgttttggttgggcaaatattagactccacattgggagtctaatatttaagttagtatctaactttaagaccttggagataattatttttggcatgaatccattatcatacagatattactcttcaataatgaggtcattttaaaaatgcgcagtaaaaaacaagrctaattcaagtccaggaagatggcctgtgttgtgtcactcggaggttcagcatatgagggcttgtgttattgctgtttaaggcagagacaccctagagacatgggagaaccatgttgcatactgcacaacactggtgatgactctgtgccctagcacagcaaaacatcttgacctggcaccatcatctcactcatgtatgtcattttctatgggcactacaatatttttcctcaagtttatgtaagatattttggaactcttctgaaaatttaatatact

SEQ ID NO: 512634 - DNA, 504 bp, Homo sapiens
cttagataaccattttcattttctgctctataaataattaatgtaaaagaaaccagactgcactttttcctgtctttctcaaacrtaagtcatttctgagtttcttacttttttttttttacaattctaattattagttatgaaaaacattgtcaggtcctacatttttctcaagatttattccaaatactaagttttgatatcagaatttctaaataatatactctgcaaaaagccaactacgtactttgttctttggtccccaaaagactttgctttctgctcagggctgccactctctctgctaacagctaacattcactgagctattggggcagacactgggcagagtgcttacatgtgtcacttcacttagtgaccacaactccatgaattaaaatgataatttatcctcattttacagatatgcaaactgagactcagagatgtcaagtaacttatccagagtctcacagctagcgcgtcactcattctagaaccaaa

SEQ ID NO: 512635 - DNA, 636 bp, Homo sapiens
tgaggggaccaaatgtttggggtcagtgtgtgtgtgtatgtcatgtttttgtaaaggtattttccttaagcagaaggtagctttgactgtaggttagaattctaagtgtgagtgggaggggaagttggggggtgaggaaaaaaagtcctgttctgacctttgcggatggggattccaagagaagtcttggtccttgcctttctgggaaccctcagtctatgtggggaaaactccaggtcagatggggtgaaccagagggaacaatgcacttcttcacaaaccaacatataaacacttgcgaatgaaatcacgcagagacattcatcagcttcaaaaggagagcggaactgggaaaggagtcggcagaattgagagaggagaatttgggaaagcttctccatgagagcggtgcctggagaggtgggttgggaaccgtcgctgagaataaggcacaggtcagccrcctttcccagcatctcctcctcgcaaaccccaagccaaggcaagctggatgaagcgctccctgggcaggcccggctctccgtgtccctccatcacctgaccccgctggctctcgcagaccccttcctccacactcactcctcccggctctccttctataatctcctgacatct

SEQ ID NO: 512636 - DNA, 414 bp, Homo sapiens
tgcccgcctcagcctcccaaagttctaggattacaggagtgagccactggaccagggtagaacagctggaattttgacttggataaaaccctttgctctttactcctctgctccttccaccaagtgtcaaaaatgcaatgagagatgtgagggcctgaarccaggataaggccctagctgggtggcaaccaggactggaaaacagttaaatcaagaaaatctccaagttgtatatgctggctgttgtttttctgttaaatgctggccacttagaaccatctattccacttttctgtgtttgtcttactgttttattaaggagttgcatctctggagaagaggaagaaagaatcattgaatataaaatctttaaaacatctgtccatgagcaatgactacttaaaacaccagtgg

SEQ ID NO: 512637 - DNA, 541 bp, Homo sapiens
tggagacgctgtctggggacagggtgaggctggactcggagctgaggagcgtgcgcgaagtggtggaggactacaagaagaggtgagcaggacgccactccaggctggtctgcctcccagggtgaggctttcccagcaggcactgggatgtttgcctctggccttggaggtattgggttcatctgtcccagcaagatgagagccttctatgggcaacgaggcagactagacagtggacaaccagcctcttgggcagcgtcagggctgtcctggcaggtgatcccctccttggcatgctccttcctgctccctgttcaagggagcctgtattgtgtgtgccgcagcctcttggctcctaagctcaccactgtgcccctgagttccaaagaaccaccccccacccacccgctgctctctgccacagggaaggaggtggagttcctgttgggcttcctctctcattgcctttcggtcctggacacgggccatgtgccttctttytcccctgggagatagttctggcttccttgggacccctgcc

SEQ ID NO: 512638 - DNA, 550 bp, Homo sapiens
gctcacagtagtaaagaaatgggttcaagagaaaccctgcaggagggaccttgggggtggtaatgttgttgggggttccaaagttgcaggtcccacatctctgcagtgggaagagtagattgaggagcgagagggagggcttatagacatgcaagggcagccagtgccatctggcaagtgtggggtgcgtgaaggctgagctggtctggctggggatccccagcctgtgtttaggcagtgagggccactatgggagtccacgtgattcagactctcctgtgcttttctctcttgcaggatgtccggagaatataccaactccgtgagcatttgtgagtatttcatgactctgagggaatacttttagtccatcaacaaacacaaagtgggtgggtgtccaccgcccrgccccctgaggaagagcttggctctgcctgttgaccacttggtcacatactcaccttccttgctgagacctgcggcctccccattcagagctacttcttccaggtggagctagtgcccaggacattctgatactgcacactag

SEQ ID NO: 512639 - DNA, 563 bp, Homo sapiens
acccagaaaatggcaagtgacacagttcagctttattctcagtgggatcagtctccagttgaattagctctgctgtatgccataggctactgcaactcccgggggcctgggccttgtttgctaaactgtggtctagttaatgatactagtgtgacatgtggctgtgtgttcccaactacagcaagtcttcattcacacagagaaagcctcaaagggtcgtctgtgaaaagctcttgcccttcccaggtgcagtcctcactccagccgaactgtttccccggaccacgttctccttctgctcttgcactgatattcatattttgtccatgatctgtgtagccacacaaatgtggaaggacaagacagctgtgaaatactccatcccatcctggtcatgatttcagaaaaatggagtcgcygtaatcataccactcacgccaccctcacagtgcagacttctccaggtttcaccagatttaatgctgcccccttcttacccaacttctccatctagaggagccttccaactaatgctatattgtgctgctgccactgacagctgg

SEQ ID NO: 512640 - DNA, 402 bp, Homo sapiens
ctggagcggattccagaattcaacatggcgaccttcacagcaacattaaagcaccataaaaatgaagtggctgatgacatattcaacatgctagtcayatttacagactttctggcatttaaagagatgtttctggactacagagcagaaaaagaaggccagggactggatttaagtggcgatttagtggtgacttcgttgtgcaaaacaccttccacgccagctatccaaaacaatctgtggcactagcttgcatctccaggcagtgggagacttctggacatcataggcccagtaggcggggagaggcgtctgttcttaatgacagaatatgtcttggaaagactgactgcagctcttcattaatgttaagcattgatgaatcaaaaagataattacctg

SEQ ID NO: 512641 - DNA, 597 bp, Homo sapiens
cagcgtgctcccgtggcttccgatcatgctgcgtgggaaatttggctgagtatcaccacgcttcaggcaaaggcaggggttagagggtttcactggagcaaggagtcactactcggaggtcacggctgggccaagagaggagcagggaggagaaagggctgggaaatgaccacaggccgctggcaactgacctcctgaggctcatctgattatggcccctgccatgaacagggtctgtccagttgcatggcatagggcagtgggcagaggctagggtgcaagagacctgggcctcctgtccttcgaagggcatggcctatgatgactatgaggagaggcttctcagccaggtgggctgtggcctggctggaaggaagaaggcttctatgacaggtgacttctgactctgctttccaaactggtcttcctgctttcacccttgaccctgtatagcctatwcttgacaccacagcagagccatcctttaaaagcatgtcacgacactcctccatttgaatcctccagtggcttcttgtctcgactgaaagaaaagcccaagtcctacaaggccctatattacttgcccttcaacccgca

SEQ ID NO: 512642 - DNA, 547 bp, Homo sapiens
gggttccaaagcctgagagtttcttgctgtactatcttatcttctgctttatggggcaatttaggagggctttgaggttaggccttctggagtttgaatcctggtgccatcccttctagttacatgaccttggataagttcatycatctctctgcgctttcatttcctcttttgtgaagcagaggccataacactgcctacctcacagggctgtgaagattagatgggttaattcagaaaagctcagcacatgtcaggcaaataacaagagatcatctactttagcaattattacattattacaaaagtaaatttctattaaccaaactgcattttccatccagcttcccttaaattagaaagtcaccataagcaggaaactgtggccctgtaatatattgtaaatcatataaaagacgcagacaagcttttctttaatcatctatttaaaggaagatggcaatttattgatgagtttgaaacaagccaaaagtatctcctctgtcattaagctaaagggcaatctctccaagctgcattcactgct

SEQ ID NO: 512643 - DNA, 443 bp, Homo sapiens
cacagctcccacacctggcagcacgctcaggcaggaaagccccaggcctctggcctcctgggaaccagacggactctcacctgcattcctcgccctccaggagggtccggtaggtggcgatctccacgtccagggccagcttggcattcatcagcgcctggtacgcacaaagcagcagggccaggtcctctttggcctgccgcagtccagacttgatgtcctgaagcttggcattggtgtccttgagggccacctcctagcgctgctctgcatcagcgatggtcrtctgcagcttggcgttcttagtgtggggagccaggagtccaatttagattcgaatgtcattcactgacggcccgtcctgtgtgcttggtgcttgcacgtgtgttacctgatgttgggcaagtgaggaaaccccaggcacaggggttaaaggctatgca

SEQ ID NO: 512644 - DNA, 645 bp, Homo sapiens
cctttttttctgttcccctcagccttctgcatatttcacaatgacagttacaattcagcactttaccattctcaagtcttttaaatgatagaccatctcttctgttttcaaggagaattctctccagctttctgataactccatattccagtctcacacagagtttaagcagaacacacagcatgccacttacacacaacataactagccttctagatctgggtttggatctcccctcaagcatcctagcccatcattcttcagtttgttgtgtattttaacatctctttgtcaactaaaacatagtgttcattccactaataggttcaattagaacctattcaattcaatagaactcaattcaatagaattcaattctaattgaacctattgmattgaataggttcaaaaggttcaaacttccattttcaaacaataagaaaaatgatgtcatgcccgatttcagcccttctcttttcagcatggtgccctgtagtggtcttcatccattggctacacttcttcacctcccttcaaatttctcaggcccattagcctaaatctgatctggaactgctctgtcaaagatatccaatgaggatccactaattgacaaatccaaacaatgcttgtttagtccctgtt

SEQ ID NO: 512645 - DNA, 606 bp, Homo sapiens
atacctttttttctgttcccctcagccttctgcatatttcacaatgacagttacaattcagcactttaccattctcaagtcttttaaatgatagaccatctcttctgttttcaaggagaattctctccagctttctgataactccatattccagtctcacacagagtttaagcagaacacacagcatgccacttacacacaacataactagccttctagatctgggtttggatctcccctcaagcatcctagcccatcattcttcagtttgttgtgtattttaacatctctttgtcaactaaaacatagtgttcattccactaataggttcaattagaacctattcaattcaatagaactcaattcaatagaattcaattctaattgaacctattgcattgaataggttcaawaggttcaaacttccattttcaaacaataagaaaaatgatgtcatgcccgatttcagcccttctcttttcagcatggtgccctgtagtggtcttcatccattggctacacttcttcacctcccttcaaatttctcaggcccattagcctaaatctgatctggaactgctctgtcaaagatatccaatgaggatc

SEQ ID NO: 512646 - DNA, 530 bp, Homo sapiens
gggagcccttccatggcaatgtgtagaaggtcaggtgtttctgttagcagtatgcaaaatcaatctgcctcttctttcctaggtattcatggtggtctccttccctagctctttcccataaagtttcctgcctgtctcagcacatagcaccctttgcttcctctgaactctaagcccttgttgttctctctgcttcctatttagtatccctgatcatctgtccatgtgcctttagactgcaccagattaagaatttcttgagggcaagtcttgaattaacacctctttgtcattctcatatacacagatactcataaacatttgtggtttggttggtagaaaaaaawttttttttttttttttttttgaaacggagtctcattctattgcccaggctgaagtggctcacaggaacctccgcctcccgggttcaagcaattctcctgcctcagcctccagagtagctgggattacaggcatgcgccaccacatccagctgatttttgtatttttagtagagacagggtttc

SEQ ID NO: 512647 - DNA, 620 bp, Homo sapiens
ttatgtggtgggaagaacatgggctttggaatccttggaattaaatttgtttgggtttgaatttcaaattaaaattttactctaagtttgtattcataaagcatatcatttggatatatgatgttttaatgaaagtccaagtgaaaacttctagtatttcygtaatgttcagaatataggcatttgcaattccatagagccaaataactcaattgttattttcaaaattaagaatcttgggtatttattatttattagttctaacaaaaaggttatatgactataagagtgatcaaagtcacagctgacacttgaaaatgcctttacacagcaatatacctgattctgttctcagtgaaaaaagttcaggaaatttaatttaggatgccaggtggcacaataggttatacattaacttgtcccctctggaaaattaaatttgaatttggccctggtcacaaatgaaatgagtcatttggtacatgccactaaggatactcacaaagccaaaatgacatttcattgaaaaatcacctgttaagaaaaatgtcttcagtcactggggagtttaaaaaaaaagaaaaagaaaaagaaaaagaaaagcaagtgatagagcaaaa

SEQ ID NO: 512648 - DNA, 618 bp, Homo sapiens
gatacgcagggagagaaaaatgaaagtagagattttgagtgtctgaagaaaaaaaaaaggataatggggaaactgaataatcaatttgatattatataacaaagtcaacttgagaagtcagattgcaggaactgtttttctcaattttctrtactgcaaaaatcatactatatggtttaatgagccaggtcttccttgtgcctagggaacaacctgtaggaaagactaagagctgcttagtaagcctgctgtgcagatatgtgaaatgttaggaatacaaattaaaatgttacacaaaaggcactggtgagtcagtgaagggatttaaaagaagaagtgaataaagtgtgattattttgtttgagatttaagctgattgaagtcagggataattaataatgtctcagaaaagatttagaattatcatggactctatcttttacagacgttaagaaaatgacagtattcatattcagatcaaccacatattaaactcctactgtatgtcagttcaactattgcttttctatattttacctttaatcttctcacaatcttatgagattcagataggtattattattattattattaccattttaaagatgaggaaattag

SEQ ID NO: 512649 - DNA, 462 bp, Homo sapiens
acaaatgttaaatataattaagagctaaagtaaaacaagaaaaatatgagcatgcagtcgtgatagggaaaatcccatttcttattgctatgatctgatcacatttcccatagagtataaaagacatgcaatttttgagcatgtcacagtaatattaataaatgatgttccaaagcttgtctcctgagaggtcattcagtctttaccattgaatagttttgcttttgccaaatgaaagcagattgttacatgattaggtgaatgtgtgtgcgtgcacccatgtgggtggtttatatgtattatgtttccagccttctgtgaatcctgtacataatagaggtctgataaaacatgctgtagtcccaytggacaatccacagtgctcagtacagatacttccctcttctaagaaacaagtacgccgtgggactttgatttgaaccatgtatttgacccttttac

SEQ ID NO: 512650 - DNA, 565 bp, Homo sapiens
  misc_feature (1)...(565): n = A,T,C or G
atatgataagcatacaaaaaaaaagcataaagaagactttaatggatacctgtgtaagcaccagattttagaaacaaaaccttacagtcaaggtgaagttctctagtcctctcctgattctcacccaktaaaagttggcatctgttgaatcngaatactttaaatacatatttttatatttctaagacatgaatgaatggtatgggtggcaaactcacaatctgttggtgtgggattttttgtattgtttaaggcttacaatgaattaaaccttaattataatgacttataaatgtcccattatttattataaatattccattggttcctgagaaacatctattttccaatgtttgaatgttctatacatgtttatgatatatgaatatatgcttttatcctagaaacatctattttccaatgtttgaatgttctatacatgtttatgatatatgaacatatgcttttatcctattcattttttccacagacctatcagctactgagaggaatgttttaaaatccatgtccacgtgcagaaactttcttcattttgaattagtgt

SEQ ID NO: 512651 - DNA, 580 bp, Homo sapiens
gtagttaagaaattgttccacctaataattggtagagctagaattttctttgatatatacacagtaataagacagagtccctttatttgagtaactctctaaaaggaaaasctataaaattgtggaaggtttatgctaaaagtaagtacaatcggtatatagcagagactcttggaaggaattgttaataaatgttaataatacatgaaaagattcaggaaagttttcatgaattttgtccaagacaatgggtctttaacagtgtactccaggcagagaagtgtgagagggacctagaatactcagacattcggttgagagagttcaggatttgtagagagcagttgtgggaaagccaaagcagattagagatacagcaagggaagaaggcacgctgcaacttgtgggggctgtactgaaggccaagacagcagttctcaaagtgtagtctgtgaatccctgtgtcccaggactcttttagatagtctataatatcaaagttggttttagaatactgaggtatatttggcagacactatcttgaaaataaatgcagtgaacttgtcaacggcaagaaaaa

SEQ ID NO: 512652 - DNA, 580 bp, Homo sapiens
gtagttaagaaattgttccacctaataattggtagagctagaattttctttgatatatacacagtaataagacagagtccctttatttgagtaactctctaaaaggaaaacctataaaattgtggaaggtttatgctaaaagtaagtacaatcggtatatagcagagactcttggaaggaattgttaataaatgttaataatacatgaaaagattcaggaaagttttcatgaattttgtccaagacaatgggtctttaacagtgtactccaggcagagaagtgtgagagggacctagaatactcagacattcggttgagagagttcaggatttrtagagagcagttgtgggaaagccaaagcagattagagatacagcaagggaagaaggcacgctgcaacttgtgggggctgtactgaaggccaagacagcagttctcaaagtgtagtctgtgaatccctgtgtcccaggactcttttagatagtctataatatcaaagttggttttagaatactgaggtatatttggcagacactatcttgaaaataaatgcagtgaacttgtcaacggcaagaaaaa

SEQ ID NO: 512653 - DNA, 628 bp, Homo sapiens
atgcatgattctctccatatatttctcatcataaatcaatccctaattccttaaagtattagcagctacctcaagagcttgtatkgaggaccaaattaagcataaatagaaagtatatagtgtggcagccagcacatacaaagatctctaccaatatcgactattattgactattattatctacgtgcatttctctttattccacccatatgatcattttttgaggatagggacaaatgagtctaaaaactggacctggcattctcaatgcaattgtacctaaaagactcaagagaaggactggctctccctcctccatgagacattccagccaaaatagccctgccctttcccccaggaggtcacattacacacatgcgtcttgttagcatttcgttcaccatgactattttgacatttctgttgttgtcattgcgcctagatgcttaatatatactttgaattactttccttgaaaacaaacaaaaaccctctttacacaggttttgattggttcaagtccttcactagtatttgcttctccttcagtttagcattaccaacaagttgtgatgtactgattatatttcttttttgaggattaaaaggtgctaattggagtaaatac

SEQ ID NO: 512654 - DNA, 260 bp, Homo sapiens
tttctacccaatgcatgcctcacagttggtttgtaagtacttccttgaagggagggatctcagtagcagcacagtacaacctgagttctggtagcattgttgagtctctkaacaaattccaggacacctatttctgatgttagtcaggcaggcaaggtgagttgagggtaggaatggtttgaggtagaggatggcagactaaccctgactgcagcttgccatgcaggatgggtgtcatagtaaaaggtaaacaaggctca

SEQ ID NO: 512655 - DNA, 574 bp, Homo sapiens
tgtacacatacaggtaattatagcataatgtcatatgcttgttcagtttgcatgctggatagagacatctaggcaaaaggttagtggggactgtgctttgatagactgcatgcacccagagggaaacatatcctaattcatctccacaaacggggtacctctttttaaaaatgcttcaaccaataataatgctttattatcatttagttcagtgaytaccaaacttattttagcagccattagccttctttgaaagaataataatacagaaacacaacttattagttcagatgtttttttgagagatctaactcagattagatctaaaagagaatttgctaggttaatttaaccacacttactgtaagagagttgggcacagcctgttaagggagtacatagcagggtttttagaaaaagcttcacagaggaagtgatgcttgaggtgaatcttgaaggatgattttaagaaaaggacaaaatgggaaacagcatactatgctgaggaaagatactatactttgcatgtgcaaagatatctaaaagagcacatcctgtttaagaagtgacaggt

SEQ ID NO: 512656 - DNA, 601 bp, Homo sapiens
ttattataagaacatcaaatattttccttccgtgttggtttttcaagctgttcttgttctagagtaaaagtttcatgtactctaacaaaaccttttcagttatacagacaggtaactatctcctatttcccaaattttcagaatgagtaaattccagaggcactgatgataccaatatactcatattacctcaagtgaagaaagaaaggaacacacgaacacagatagtacctggaatagtgattatttaatagtaagtgatggattagtaagtgaatgtgtaagtgacatcagcaaaattgagtgaagatcccagtgacatctagatgtgattagaaactcttaccatttcaacacttrtaagttcaggacattcatttattttatatttatttattgagtcacttgtcatttatgtgccactttctgttttctaaatgctttacaatattagaatctaggaagacagtggtgaggaagacagattcagtccttgttcttgtgaagtttacattccagtagaaggggcaggaccacaccctcccatcgcacacacatacacacagaacatgaacacggaccacaagagagcggcacattg

SEQ ID NO: 512657 - DNA, 601 bp, Homo sapiens
ttattataagaacatcaaatattttccttccgtgttggtttttcaagctgttcttgttctagagtaaaagtttcatgtactctaacaaaaccttttcagttatacagacaggtaactatctcctatttcccaaattttcagaatgagtaaattccagaggcactgatgataccaatatactcatattacctcaagtgaagaaagaaaggaacacacgaacacagatagtacctggaatagtgattatttaatagtaagtgatggattagtaagtgaatgtgtaagtgacatcagcaaaattgagtgaagatcccagtgacatctagatgtgattagaaactcttaccatttcaacacttataagttcaggacattcatttattttatatttatttattgartcacttgtcatttatgtgccactttctgttttctaaatgctttacaatattagaatctaggaagacagtggtgaggaagacagattcagtccttgttcttgtgaagtttacattccagtagaaggggcaggaccacaccctcccatcgcacacacatacacacagaacatgaacacggaccacaagagagcggcacattg

SEQ ID NO: 512658 - DNA, 440 bp, Homo sapiens
aagacctagtgagaggctggacaagtagaggagaaagaataaatcgaggatgacccaaagattttgacattgagataatagtggtcctaaaaaaaaaaggagaagtcaggtaggtgagatgggatgattgaatttataatttcatgatgyataattatacaaatttataaaatagatgccatattcaaaagatagaaatttctagatttaaaattatgacattaccatgttaacgaaatttcctagtctgaagcctgttaacattattaatacttttagccttcatgccaagaaacacccgtgttctcctgtctctctttgcatcctccccagctaattccttcttctcctgccccctaaagaacagccttccctggatttcaagccacaatccttctctttttctattaactgcctccctggggcgggaggttgggggg

SEQ ID NO: 512659 - DNA, 440 bp, Homo sapiens
aagacctagtgagaggctggacaagtagaggagaaagaataaatcgaggatgacccaaagattttgacattgagataatagtggtcctaaaaaaaaaaggagaagtcaggtaggtgagatgggatgattgaatttataatttcatgatgtataattatacaaatttataaaatagatgccatattcaaaagatagaaatttctagatttaaaattatgacattaccatgttaacgaaatttcctagtctgaakcctgttaacattattaatacttttagccttcatgccaagaaacacccgtgttctcctgtctctctttgcatcctccccagctaattccttcttctcctgccccctaaagaacagccttccctggatttcaagccacaatccttctctttttctattaactgcctccctggggcgggaggttgggggg

SEQ ID NO: 512660 - DNA, 656 bp, Homo sapiens
ctccttgcctttgcagggatccctaacccccaggtcatagaccagtactggttcctgttaggaactgggctgcacagcaggaagtgagcagtgggccagcgtgcattacggcctragctctgcctcttgtgagatcagtggcggcattaaattctcataggagcatgatccctgttgtgaactgtccacgtaaggaatctaggtatgtgctccttatgagaatctcattcctgatgatttgaggtggaacagttttatcccgaaaccatctccccacctccccaccctgtccatggaaaaattgtcttccacgaaaccggtccctggaccactgccttacagtgtacacctcaagtgacaactaagtgtctttctgctttctacccatgcatggctggcacagcccagcattgtgagggaattcatgctccttggggaaatccaaaaccaaggagaaaaagtcagtcagtaaacctcctgctgcacatctttctaacagaaatttgggcatctgtacccctcctgggaggaaccaagttcccattgcctgcagtggtggacttgctaacccacccataatttggcctgtgcttcttccctgattcactcttcctgcttccaactcttgatctttggatcagctccctaataaattg

SEQ ID NO: 512661 - DNA, 656 bp, Homo sapiens
ctccttgcctttgcagggatccctaacccccaggtcatagaccagtactggttcctgttaggaactgggctgcacagcaggaagtgagcagtgggccagcgtgcattacggcctaagctctgcctcttgtgagatcagtggcggcattaaattctcataggagcatgatccctgttgtgaactgtccacgtraggaatctaggtatgtgctccttatgagaatctcattcctgatgatttgaggtggaacagttttatcccgaaaccatctccccacctccccaccctgtccatggaaaaattgtcttccacgaaaccggtccctggaccactgccttacagtgtacacctcaagtgacaactaagtgtctttctgctttctacccatgcatggctggcacagcccagcattgtgagggaattcatgctccttggggaaatccaaaaccaaggagaaaaagtcagtcagtaaacctcctgctgcacatctttctaacagaaatttgggcatctgtacccctcctgggaggaaccaagttcccattgcctgcagtggtggacttgctaacccacccataatttggcctgtgcttcttccctgattcactcttcctgcttccaactcttgatctttggatcagctccctaataaattg

SEQ ID NO: 512662 - DNA, 656 bp, Homo sapiens
ctccttgcctttgcagggatccctaacccccaggtcatagaccagtactggttcctgttaggaactgggctgcacagcaggaagtgagcagtgggccagcgtgcattacggcctaagctctgcctcttgtgagatcagtggcggcattaaattctcataggagcatgatccctgttgtgaactgtccacgtaaggaatctaggtatgtgctccttatgagaatctcattcctgatgatttgaggtggaacagttttatcccgaaaccatctccccacctccccaccctgtccatggaaaaattgtcttccacgaaaccggtccctggaccactgccttacagtgtacacctcaagtgacaactaagtgtctttctgctttctacccatgcatggctggcacagcccagcattgtgagggaattcatgctccttggggaaatccaaaaccaaggagaaaaagtcagtcagtaaacctcctgctgcacatctttctaacagaaatttgggcatctgtacccctcctgggaggaaccaagttcccattgcctgcagtggtggacttgctaacccacccataatttggcctgygcttcttccctgattcactcttcctgcttccaactcttgatctttggatcagctccctaataaattg

SEQ ID NO: 512663 - DNA, 518 bp, Homo sapiens
ttattgagatgaaaagcccactcagcagttgagaatacatgatttcaggaaatgattcaaagttattttctaaaataaattttattatagaaatgtcaaattcactcataaacctagctttcagtgttctctaatatcgaagagcacaaatgtcatagaaaaaataattacaaaatatggttattatgtacttctaagtagtaaaatcttgattccccagtattaagccaacttacatccttttcacaagttcacttctgagtgtatattggaaaaaaattacaaactgcgtcttgtcctgtttaaatrgactagtgactaagcaaccagggcacagagcctcctggatcttttttttccaaagatttttccttctagcacttgagataaagaagatcagatggaagacaatcattatgataatgagttttttccttccttttcaaagagtttcagatttgggttttgtaattctctgaaatactcaataacatcatcatatttcagaggcaaagaca

SEQ ID NO: 512664 - DNA, 579 bp, Homo sapiens
tgaaactgtcacctttaaagtccataataatcaaaatatgtgaaccacctatccacagacacagttgcaaataaagaattgtcattaattagtgctggattgtcaatgttggtgaactcattgtggaattaagagcaaaatcacaatatagttccaaccgtgcattggataataacaattaggaattcaagttttaattgtaaccccaaagaacgatacatcmaatgctaatctgccctaatgcttgagactaatacctctaatactaaataatatatttaatacctgctaataaaatattgctatgctctgcaagcacactcatgcatcaacagccaaaaacataaatgaatatcacttccaatactgggtattacaatagtttagttccagttcttctgtgttttttttctttatcaaaatataaaaatagtggtcatgataggcagagctgccttgtaagtagacagaatatgttgccgacatgatgtcctgtcccaaaataccacttgaaagtctgcaatttcatcagatgggtcgattctcttgcatttcagaaaagtctctctcttttttttt

SEQ ID NO: 512665 - DNA, 584 bp, Homo sapiens
tgatttatcatccggaccacgtctctctgactaacaaatactgatttggataaacagcgaaccctgggagaggcaccatctccaattaagagatcacagtccatataaataaacagcaaccaaagacaacttcagtctgcctgggtaaatcccagtgatttccraggtgtgcattacagccactgaggtagagaaaggctacattatcacgcggcttcagggctccagaagggaagttgtagttctcaggtggatgggaaaaaggaaggaggttagctcttccgcataaaccaccaggcccaaagtaaaatggttgatctctgaacttttcactgggtttgcgttttgaccatgagggagtttcttgacgtggaaggagatgaaggaacggtatacaaactggtattgtgatttaaattagagcaaaattagaggcaatatggcaacagtgagcctgcagttctggttacaggcactatttctcagtccacaggggtgagaaggtaggagagggacagaacaaaatgtttagaggttgctttagcgaagagaccagtactgcctaaacacacaggtcctgtaac

SEQ ID NO: 512666 - DNA, 584 bp, Homo sapiens
tgatttatcatccggaccacgtctctctgactaacaaatactgatttggataaacagcgaaccctgggagaggcaccatctccaattaagagatcacagtccatataaataaacagcaaccaaagacaacttcagtctgcctgggtaaatcccagtgatttccaaggtgtgcattacagccactgaggtagagaaaggctacattatcacgcggcttcagggctccagaagggaagttgtagttctcaggtggatgggaaaaaggaaggaggttagctcttccgcataaaccaccaggcccaaagtaaaatggttgatctctgaacttttcactgggtttgcgttttgaccatgagggagtttcttgaygtggaaggagatgaaggaacggtatacaaactggtattgtgatttaaattagagcaaaattagaggcaatatggcaacagtgagcctgcagttctggttacaggcactatttctcagtccacaggggtgagaaggtaggagagggacagaacaaaatgtttagaggttgctttagcgaagagaccagtactgcctaaacacacaggtcctgtaac

SEQ ID NO: 512667 - DNA, 284 bp, Homo sapiens
atgtgtacttcatcctgggctcataccascctctctgcgtggggccctgaggctgacctctggactgcccagcctcagtttccctgccactggctgtgacccccaggaagagcacattccacccaaaagaaggggcagggtccaggctcgaggccttgaggtgagccccctcctgcttggccagctgcctccaccaccctcgggtaaccctgcagcaggatgcggaggagcccgaacaggcctggtgggaggcaaggcgacacagccctgcccctcactcccgg

SEQ ID NO: 512668 - DNA, 574 bp, Homo sapiens
attgttttgatttttagattctacaaataagtgagaaagtgatgtttgtctttctgtgcctggcttatttcacttaacataacaatctccataagagcgtttcatttaccttcaaacttaaagacattgtttgtgttatgtggactttcgtaaagttaaacaatggagtttggtaataactgcatttctaaaattggcttgataagtgacatcagcaagatggagggctaaaaagtccttgctcatttcctgtctaaaaccaaacaattttaacaactagtcagaaattaaaatagctctggaggagctccatagtacaaataaaatgctgcagcaactcagtggaacaacaacaaaacaagaatggtagcatagaaaatggcaggaagcattttacctgcattgccctataccctcatgcatcctttagatgcaatttctctacatgsagaaaaagaagggtagaaaaatttcaatagccttcaatgctgagaactaaaaagcccttgttatctcatggacacccacacatgccacaacagaggacccctgcagtctttgtgaatgctaaacc

SEQ ID NO: 512669 - DNA, 599 bp, Homo sapiens
cctgtgccttggggacatgtcctggggtctgactctctgtgccaatgagtcagggctgccctgggcctgagaatacccagacaggactggtgcccgtggcgaggtgtctgccaccccaggcagagcmcagtggcctgtccacgatccccctgtggagcactcctatgtggtctctggagggaatccatggagtcccagcagccaatggagacgacaaggtcagagatgtggagaccgagggctggaggtgagagaaggggtccgggggagtctggtggcctccttctcggggcctccagagccagacctccaggcagggccttggacaggactccccacaaggacagagctcgggagggagagggggctggggagcccgaaagaggcctggctgtcaccctgtctggggagactttgctgggacccctgccgtgctgtgggagctgggggagccacatgcgaggtgctggctcttggccaactctggcttgagcactgcagtctggcaggcgtgatgtttgctcctctgaggtggctgaaagggacctgagggcggatggtggtgtgtgtctggggggaccaggctcactgaacaggac

SEQ ID NO: 512670 - DNA, 599 bp, Homo sapiens
cctgtgccttggggacatgtcctggggtctgactctctgtgccaatgagtcagggctgccctgggcctgagaatacccagacaggactggtgcccgtggcgaggtgtctgccaccccaggcagagcamagtggcctgtccacgatccccctgtggagcactcctatgtggtctctggagggaatccatggagtcccagcagccaatggagacgacaaggtcagagatgtggagaccgagggctggaggtgagagaaggggtccgggggagtctggtggcctccttctcggggcctccagagccagacctccaggcagggccttggacaggactccccacaaggacagagctcgggagggagagggggctggggagcccgaaagaggcctggctgtcaccctgtctggggagactttgctgggacccctgccgtgctgtgggagctgggggagccacatgcgaggtgctggctcttggccaactctggcttgagcactgcagtctggcaggcgtgatgtttgctcctctgaggtggctgaaagggacctgagggcggatggtggtgtgtgtctggggggaccaggctcactgaacaggac

SEQ ID NO: 512671 - DNA, 566 bp, Homo sapiens
aggcctggcttcagagtgctgggtaaccagacactgtccagaggatgcttctggacgccatggttgttggatataggggaaggtttgggctgcagggacmtaagtcgttggttaggggttggccatggactaatgctccttctccagggcccggtagatgaggatcacccctgtgggttcctgtatcccagcaggcatacaggagaccaggagacaaatggggaatagatgatggggcctgaggccacatagtttatcttcattttcagataaggaacctgaggtaaagagacagagagaggaaggggaggaggaaggggagagcctggctgtgtcagggaaatgtggcctgccagcctgagccctggcctgctctggaggggacggccatgggtcttgcacgtgaacagagaatgcagaatgcatccgcagttcagaacgcatcaggactcctgcccccctcgggcacgggctgacgctgagcagactcgggggaggtgagtgcctcttcccagccacctggcctcacgtctggccctccttgcagcgcggggggcaccggggtg

SEQ ID NO: 512672 - DNA, 570 bp, Homo sapiens
tgtagcttcagggcagcccagtcatccttcggggtccactgaggacagggaaagccgagtgagagtaacagcagcccaacccttcccggtggcctgtcagccttggcccctacgggctcagtcggtgctccctgagcaccacgggggccctatcagaccgccctggtgcatgggtgtggggtgtctctggctgtgcgttctaagacccagatctaaggacgtggctctcagcacccgagttacctgcaggttcacgatgtaaagcttcggccgccggctagggggcttggtcatgcaccagaggcgtgggtacttctttagaacctgtggaagcagacagacagacaccgcacacacacaagggacaagtctgtacagtgctgggccgcagagctggacaccctcgggcrggcaggggctcggttcactcattgtgtcatcggcacgtaccttcaggctggaccctagacacaggatggtgtctgctctgctggcagcctcggtcgccgcttcccagttcaaaggctgccccaacgtccccctctccccaaagtgcacaatggtgtcccg

SEQ ID NO: 512673 - DNA, 570 bp, Homo sapiens
tgtagcttcagggcagcccagtcatccttcggggtccactgaggacagggaaagccgagtgagagtaacagcagcccaacccttcccggtggcctgtcagccttggcccctacgggctcagtcggtgctccctgagcaccacgggggccctatcagaccgccctggtgcatgggtgtggggtgtctctggctgtgcgttctaagacccagatctaaggacgtggctctcagcacccgagttacctgcaggttcacgatgtaaagcttcggccgccggctagggggcttggtcatgcaccagaggcgtgggtacttctttagaacctgtggaagcagacagacagacaccgcacacacacaagggacaagtctgtacagtgctgggccgcagagctggacaccctcgggcaggcaggggctcggttcactcattgtgtcatcggcacgtaccttcaggctggaccctagacacaggatggtgtctgctctgctggcagcctcggtcgccgcttcccagttcaraggctgccccaacgtccccctctccccaaagtgcacaatggtgtcccg

SEQ ID NO: 512674 - DNA, 582 bp, Homo sapiens
ccggcaagagacggaagcaggaagggcagaggagtaagtcactttcggtacaattgcaaaagatatcaaagaggacggccttctggtcggctcacggcttggcttttttttttttgtcttttttttaaactaagttttataaataatgtctgataactctgtgtatataaaaactaaactccaacagccacaaagaggtgtccgtaagtttacaagaaagggattttttttctttttttttcttttttttttaactagcaaagtttctattatactttcttcccttttccattcatatggtcaaatggtcttcttgcttgttttttttctaaaagacagttttataaatactctgcagctcttttttctttaacttttaaacatataattaatttaataactttgtaaaaggaacttctctcttttaaataaagggctatataaccacacaaataggtcatgtaaacagtgacacgggacccatcgcagggcacactggacccaccctcacgttaagcgcacaaccagmgatttggtcttgttcagtgcaacgggtcaggcctgagtgcacagcccctgggc

SEQ ID NO: 512675 - DNA, 418 bp, Homo sapiens
aacaagttcttatatacagctctcctccctgagaacacctgtgggaaaacaggttaggcactcgggtttagattttgctgccatttctgccttggttgaaaatgtattgaaaaggcaagacacttttgttctgaagacagcgagtttagtgccaggtaatgaggtgtcaggagagggttgacggtggagtgtatgtcacaaagtccttgtctcctgaatttctcagaagaatctcacyagccccagctttcctttgaggtcctaaactcagccgctgcagggcatgagggtcccaggtcgcagctcttcagtgacattagacttccagtgagctggcaatgcaaagagtggggacccttgcccagtggcaatcacagtttctcctccttcctttgctggtgcgtggataggcctgaga

SEQ ID NO: 512676 - DNA, 557 bp, Homo sapiens
gacacgctgtgcctggttccacgtacaaagggcagcagcctgcttggagtcaaagtggctggaagggatgacccaggacatcttgcacaagtcctagggcagtctctgagcacctcatggatagagagagcaggaaaatatgagggctccaacagagtcgtgcgtgtgtgagagagcgtgaatgtgaatgtgtttgtgtgagtgtgtatgagtgtgtaagtgtttgcatttatgtgagtgtgaatgcatgtgaatgtgtgaatgtgtgtgaccatttgtgtgtrtatgtgaatgtgagtgtgaaaatgtatataagcatgtggatgtgtacaaatgtgagtatataagtgtgtggccatttatgtgtataagttaatgtctctgtgactgtatgtgtgcaaatgcatgtgtgtgtgtgtgaccatatgtgtatgagtgtgcctatgtaagtgtaggtgtgtaaatgtgagtgagagtgtgtgtttgcgtgtgtgaatgtgtgtgtgttgcagggaggtgtctgagggttccaggaaggaatcacataaccagaggtt

SEQ ID NO: 512677 - DNA, 189 bp, Homo sapiens
tctctgtgactgtatgtgtgcaaatgcatgtgtgtgtgtgtgaccatatgtgtatgagtgtgcctatgtaagtgtaggtgtgtaaatgtgmgtgagagtgtgtgtttgcgtgtgtgaatgtgtgtgtgttgcagggaggtgtctgagggttccaggaaggaatcacataaccagaggtttccatggcag

SEQ ID NO: 512678 - DNA, 574 bp, Homo sapiens
ggataaagctcagtgatttctagaactccccaatcttgttggttctacagcagattggctctcagggaggcctctcccccatcctcactgcatcttctaaaaagatgccatgggtcaccttccccttgcttctccatagcctctggctcttctccatgagcccacctgctcactctgctagctggcttctttaaaatcctgctcatcatcttatcctgattccttactgcctccaggagaaatccacacatcttggcttcagatacattcaagatattttataattggccccaacataccttcttcttcctgctctctgccaccatggaacwgctcctgctgtaatgcctgtctcacagttccccagacataagagtccatttcaactctgcacccctggatatgattccttgtcaacttgaaaatctgctccctgtcttaatcaattagaaaactcctatgtacactcaaagcctggttcacagcctaggggtaataaatctattcttcctctgcccacctgaagcacactgttcatgctttcataacgccatcctacaagtcggtcctcagt

SEQ ID NO: 512679 - DNA, 574 bp, Homo sapiens
ggataaagctcagtgatttctagaactccccaatcttgttggttctacagcagattggctctcagggaggcctctcccccatcctcactgcatcttctaaaaagatgccatgggtcaccttccccttgcttctccatagcctctggctcttctccatgagcccacctgctcactctgctagctggcttctttaaaatcctgctcatcatcttatcctgattccttactgcctccaggagaaatccacacatcttggcttcagatacattcaagatattttataattggccccaacataccttcttcttcctgctctctgccaccatggaactgctcctgctgtaatgcctgtctcacagttccccagacataagagtccatttcaactctgcacccctggatatgaytccttgtcaacttgaaaatctgctccctgtcttaatcaattagaaaactcctatgtacactcaaagcctggttcacagcctaggggtaataaatctattcttcctctgcccacctgaagcacactgttcatgctttcataacgccatcctacaagtcggtcctcagt

SEQ ID NO: 512680 - DNA, 621 bp, Homo sapiens
tgccctaacagtgtgcttggaatgttgattgcaacttggaatcagtggaattacagtaaatgatgaagccacatttcttcggcataatatagaggaagaaatccaacctctgaaaagacatgggcaaattggagtggatgtgtcgcatgtgagacccactcatcctcactgtaatatctccctggaggactcaggggacactttcttcaccaaaaagcaaacaaagaaataaaaaccaaacagctacaataaaacaaaacaaacacactgggaaatagattggtgaaggggaagccagcctctttgaaaagctctataatgcctgttctctgtaggaaggatgggtcatgatagatggttctgtaattttgatggggatgatggtacccagtgatgccagaagccgaggggcagcccttaaccaacaaaaccacagtgggcacctttgctgaaaaaaatgcagtagggcctaatgagcagctaatatcaatgaatatttgttaagcatttataatgcactaagcsttctgaaaaatgctttctgtgcatcctcctcattgcattgtcacagtgacaatcagagggaagcgctacagtattttcccattttacagatgaagc

SEQ ID NO: 512681 - DNA, 596 bp, Homo sapiens
tatcaaggaactgccaaactgtgtgccaaagtggctgcactattttacattcccaccagcaatatatgagttccaatctctccacatttttgccagcactagttattgccttttttattacagccatcctagggggtgtgaagtagtatctcactgtggtttcgatgtgcattttcctgatgtctaatgataatgagcatctttattggccatgtgtgtatcttctttggagaagggtctattyaaatcctttacccattttataactggattatttgtctttttattgttgagttataagtgttctttatacattctggatactagacccttatcagatatttgatttgcaaatattttctcccattctgtgggttgtcttttcattttcttggtagtatcctttgaagctcaaaagtttttaatcttgaaatagtctaattttaaatgttcttttaaaagcaagatgttatttgtatattatatttaaaaagtacatacatacttcgttcaattgagcacctactaggtgttgggttagggtatacagggagaaataaggcataccctcaagaaaggcataccctcatggagtc

SEQ ID NO: 512682 - DNA, 596 bp, Homo sapiens
tatcaaggaactgccaaactgtgtgccaaagtggctgcactattttacattcccaccagcaatatatgagttccaatctctccacatttttgccagcactagttattgccttttttattacagccatcctagggggtgtgaagtagtatctcactgtggtttcgatgtgcattttcctgatgtctaatgataatgagcatctttattggccatgtgtgtatcttctttggagaagggtctatttaaatcctttacccattttataactggattatttgtctttttattgttgagttataagtgttctttatacattctggatactagacccttatcagatatttgatttgcaaatattttctcccattctgtgggttgtcttttcattttcttgrtagtatcctttgaagctcaaaagtttttaatcttgaaatagtctaattttaaatgttcttttaaaagcaagatgttatttgtatattatatttaaaaagtacatacatacttcgttcaattgagcacctactaggtgttgggttagggtatacagggagaaataaggcataccctcaagaaaggcataccctcatggagtc

SEQ ID NO: 512683 - DNA, 391 bp, Homo sapiens
caggatttgggtaggcagagaaccagagaagggaattccaggctgagggaatggctggagcaaacgcttcgaggtgggaggatgccttttctgttgggggccggtgagaggcctgttgtggttggactacaggatgccacatcagagctatggtgggggtagagaaaggacaagtggggtggaggtcccctctcagccacacagcagcctggaggaaggggagaggagagaagaactgatgggctgggatccccagctctccctgtcccccaggcgcctggggactggcaccctgtctaaaactgtaayatcctcttcattgacagtgttttcatttcttgcttagcagtgatcagcactgacatgctgtccatttactcatcacccccac

SEQ ID NO: 512684 - DNA, 592 bp, Homo sapiens
tggagcttgcctctgtttgtcttttgttcgattacatgatatattacttttcccaacaggccagtgctagcatattggaagagtgatttaataaagctggcaaccttgaygctatgccaccagtccaaccttatttgcctcatttaccatttccattattgtggcagccctccattccagccacagcagcccctcaccataccccagtcacaccacccacatttctgcttttgtctgtgtgtttgtccatctaaaatgcccttatttcactctgcctgtgggagtcctatgcatctcccaccagaaactgctatcataccagagattcactgtgtatttaacaacataggcatacaatctggcaaatttgaaaaactcttaacatacaccccaaatccctgcccaaatttaagaactagggtggacacagtgcttttttccatgtcgcatcttctgtgatggggctacgatatgtgggagcagagaatggggagggtggagcgcatgccagatgaggatctatcagcaatgggagggggcctccactttagcatctccaccctgctcctctcagaggaccgcctttcattgc

SEQ ID NO: 512685 - DNA, 592 bp, Homo sapiens
tggagcttgcctctgtttgtcttttgttcgattacatgatatattacttttcccaacaggccagtgctagcatattggaagagtgatttaataaagctggcaaccttgacgctatgccaccagtccaaccttatttgcctcatttrccatttccattattgtggcagccctccattccagccacagcagcccctcaccataccccagtcacaccacccacatttctgcttttgtctgtgtgtttgtccatctaaaatgcccttatttcactctgcctgtgggagtcctatgcatctcccaccagaaactgctatcataccagagattcactgtgtatttaacaacataggcatacaatctggcaaatttgaaaaactcttaacatacaccccaaatccctgcccaaatttaagaactagggtggacacagtgcttttttccatgtcgcatcttctgtgatggggctacgatatgtgggagcagagaatggggagggtggagcgcatgccagatgaggatctatcagcaatgggagggggcctccactttagcatctccaccctgctcctctcagaggaccgcctttcattgc

SEQ ID NO: 512686 - DNA, 331 bp, Homo sapiens
tgaaggttcagagagctgaagtgacttgcccaaggccttatgctggtgagtggtagtggttaaagagctgagactgcggtcagacaagaacraccttcacaaagtgacgtgaaaatgacaggagatacacacgggaagtgatcagcacagtgccgggcttatatctacagctcacatgccaagaaacagccgggcttatatctacagctcacatgccaagaaacatgagccccatcatcatgatgctattaacactatcactatgcagggagaggaaggctaacagggaaaaggcagagaccactcagggtcactagctggggaaaccctg

SEQ ID NO: 512687 - DNA, 331 bp, Homo sapiens
tgaaggttcagagagctgaagtgacttgcccaaggccttatgctggtgagtggtagtggttaaagagctgagactgcggtcagacaagaacaaccttcacaaagtgacgtgaaaatgacaggagatacacacgggaagtgatcagcacagtgccgggcttatatctayagctcacatgccaagaaacagccgggcttatatctacagctcacatgccaagaaacatgagccccatcatcatgatgctattaacactatcactatgcagggagaggaaggctaacagggaaaaggcagagaccactcagggtcactagctggggaaaccctg

SEQ ID NO: 512688 - DNA, 331 bp, Homo sapiens
tgaaggttcagagagctgaagtgacttgcccaaggccttatgctggtgagtggtagtggttaaagagctgagactgcggtcagacaagaacaaccttcacaaagtgacgtgaaaatgacaggagatacacacgggaagtgatcagcacagtgccgggcttatatctacagctcacatgccaagaaacagccgggcttatatctacagctcacatgccaagaaacatgagccccatcatcatgatgctattaacactatcactatgcagggagaggaaggctaacagggaraaggcagagaccactcagggtcactagctggggaaaccctg

SEQ ID NO: 512689 - DNA, 517 bp, Homo sapiens
ctgccccctgaacggcttgcaccactcaccggactggtgggtgaggaaactaccagcttcagaccagctccgtcatgagcctgggccttctgcaggccattcccttggcccacttctctggctgtctcgctgacagtactagaaggctgctggcctgaggtgctctctacaggctgctgtaagtccagggggctgggcgcctggggacgcggctcctgcacgtggacaccatcttgagttccagaggctgcctgggcaggaaggggctctgcaggtgcctcacagtgcaggtatgtgctggtgttgaggccatggagggagagcgaggcctgtggtgtggggatctcygtttcttggctcagtccgttggttggcacagagtttacctgggctttgctgaattccaacaataccctagaagttttaaacaaagaaacctgtgtgacaggttgtctgcgataatgcccaaggcaactggggcagagggaagaatgcaaaactgctgttttatgattta

SEQ ID NO: 512690 - DNA, 582 bp, Homo sapiens
ctgaagggactggctggtaagtggccagcacataggaatacaggctgagctcagggaagggtgcacccagaggtggggaggaaggtgggaagtgaaaaaggaggctgggcacggtgggtcatgcctgtaatcccagcactttgggtggcygaagctggtggatcacttgaggtcaggagttcgagacctgcctggccaacatggtgaaagcccatctctactaaaaatacaaaaattagccaggtgtggtggtgtgtgtctgtagtcccagctactaaggaggctgaggtatgagaattgcttgaacccgggaggcggagattgcagtgagccaagataatgccactgcactacagcctgggcgacagagtgagatcctgtctcaaaaaaaattttttttaaataataataaaaataaataaaaataaaaggaagtgaaaaaggaaagggtaaggggagagggccagaatggaaggggagctgaagactgagcaaggcaaagttggaggccagtgcagaaagggctcaaaccatttgcaaggatggttcacatcccactggtctgtcagcttggatttaaag

SEQ ID NO: 512691 - DNA, 582 bp, Homo sapiens
ctgaagggactggctggtaagtggccagcacataggaatacaggctgagctcagggaagggtgcacccagaggtggggaggaaggtgggaagtgaaaaaggaggctgggcacggtgggtcatgcctgtaatcccagcactttgggtggccgaagctggtggatcacttgaggtcaggagttcgagacctgcctggccaacatggtgaaagcccatctctactaaaaatacaaaaattagccaggtgtggtggtgtgtgtctgtagtcccagctactaaggaggctgaggtatgagaattgcttgaacccgggaggcggagattgcagtgagccaagataatgccactgcactacagcctgggygacagagtgagatcctgtctcaaaaaaaattttttttaaataataataaaaataaataaaaataaaaggaagtgaaaaaggaaagggtaaggggagagggccagaatggaaggggagctgaagactgagcaaggcaaagttggaggccagtgcagaaagggctcaaaccatttgcaaggatggttcacatcccactggtctgtcagcttggatttaaag

SEQ ID NO: 512692 - DNA, 655 bp, Homo sapiens
ctgggtgcagtggagaaagtaatgtctggaggcgaggaggtcaggatgcagacgaggcaccgtgtggatgttagagtcattttgaatgaggctgggtggaccacaggcagtgagccaggagctaaaggtgccccagtgaggggrcgtggctgggaggtggggggcacagcactggcaggggcatgggtggttggtgtgttcagaggaaccgaggggctgggcgaggtggcttacacctgtaatccaggcactttgagaggcggaggtggaaagatcccttgaggcagaagttgaagaccagccttagcaacatagtaagaaccccgtctctacacatggtttaaaaattagctgtagccgggcgtggtggctcccgcctgtaatcccagcactttgggaggctgaggcgggcggatcacgagattaggagatcaggaccatcctggctaacacggtgaaaccctgtctctactaagaatacaaaaattagccaggcatggtgacacacgcctgtagtcccagctactcgggaggctgaggcaggagaatcgcttgaatccgggaggtggaggttgcagtgagccaagattgtaccattgcacgccagcctgggcgacacggcgagactccacctcaagaaaaaaattaggtgagt

SEQ ID NO: 512693 - DNA, 503 bp, Homo sapiens
gagagcagcccctggagccagagcagttcttggcttcacagcaggatttaaaggacaagctgagtccacaggaaagactccctgtttcgcccaagaagctgaagaaagatccagctcagcgttggagccttgctgagattattggaattrcacgccaattatccacacctcagagtcagaaacagactttgcagaatgaatattccagtacagatacaccgtatcccagtagcctgcctccagaactccgggtgaagtcagatgagcctccagggccctctgagcaagttggaccttctcaattccatctagagcccgaaactcaaaatccagagacccttgaagacatccagtcctcttcactccagcaagaagccccagcacagcttccacagctccttgaggaagaaccttcttcaatgcagcaggaggccccagctctgcctccagagtcctctatggagagtctaactctaccgaatcatgaggtgtcagttcaacct

SEQ ID NO: 512694 - DNA, 646 bp, Homo sapiens
ctggagagcagcccctggagccagagcagttcttggcttcacagcaggatttaaaggacaagctgagtccacaggaaagactccctgtttcgcccaagaagctgaagaaagatccagctcagcgttggagccttgctgagattattggaattgcacgccaattatccacacctcagagtcagaaacagactttgcagaatgaatattccagtacagatacaccgtatcccrgtagcctgcctccagaactccgggtgaagtcagatgagcctccagggccctctgagcaagttggaccttctcaattccatctagagcccgaaactcaaaatccagagacccttgaagacatccagtcctcttcactccagcaagaagccccagcacagcttccacagctccttgaggaagaaccttcttcaatgcagcaggaggccccagctctgcctccagagtcctctatggagagtctaactctaccgaatcatgaggtgtcagttcaacctccaggtgaggatcaagcttattatcacttgcccaacattacagttaaacctgcagatgtggaggttaccataacttcagagcctaccaatgagacagaatcttcccaagcccagcaggagaccccaattcagtttccaga

SEQ ID NO: 512695 - DNA, 654 bp, Homo sapiens
cgctgaggagggtgagtcttccctaacccatcaggaggccccagctcagactccagagttccctaatgtagttgtagctcaacctccagagcattcacacctgactcaagccacagttcaacctttggatctggggtttaccatcactccagaatccatgacagaggttgaactttctccaaccatgaaggagaccccaactcagcctcctaagaaagttgtaccccaacttcgagtatatcaaggggtaacaaatccaacaccaggtcaggatcaagctcagcatccagtgtcacccagcgttacagttcaacttttggacctgggacttaccatcactccagaacccactacggaggttggacattctacasccccgaagaggactatagtttctccaaagcatcctgaggtgacacttccacatccagaccaggttcagactcagcattcacacctgactcgagccacagttcaacctttggacctggggtttaccatcactccaaaatccatgacagaggttgaaccttctacagccctgatgactacagctcctcctccaggacaccctgaggtgacacttccaccttcagacaagggtcaggctcagcattcacacctgactcaagccaccgttcaacctctggacct

SEQ ID NO: 512696 - DNA, 555 bp, Homo sapiens
tgccactgtcgctcctttttatagctctccccatccagacggagcttcaagagggaagacaccacttctacattctttgtgtttcagaacaatccaattcattccaaacctattcgatgcacacctacagtgctcaccatgcatgtgctcagggctggggacgtatgactgagcctcggacttctggtgaggggcacggtaggtccctagactgtrcaaatgaagctctgggccaggttctgccaccaacctgccatgtggctgcaggtgatttatgatgttctctctagaggtttcctcattggtggtaggtgatttctgaagctccccttcatgacaaaaatgtgataattctaggacctctctgcctgctgctgtattatttgcccactgaggccttggcagggtcagaagcctggggtggtgaaggagatggtgagcggacacctttccaagatctccctgcctttcagctccttgtcttggggacccaatgtccttggccttaaggccccacatgctctgtcccttacagctctccagcctcacctcata

SEQ ID NO: 512697 - DNA, 594 bp, Homo sapiens
tgggcatggtgtctcatgctgtaatctcagcactttgggaggccaaggtgggtggatcacttgagctcagaagttcgagaccagcctggccaacatggtgaaaccctgtctctactaaaaatacaaaaattaaccaggcatggggacgggcatctatgatcccagctactctgaaggctgaggcaggagaatcacttgactccaggaggtggaggttgcagtgagccaagatcacaccactgcactgcactccagcctgggcaacagagtgagacttcatctcaaaaaaaaaaaaaaaaaaggaaaaaggctcaccatttcagattctctagwttttgcccctgaaaaagcatttacatgatgcagtccgaggtcttgtatggaggagcttggtgtggggagatgtgtggctcacgaacctatgtaggtgaataaaggaaagaggttactttctccccaagtacatcgcgcatattgggtgagggtctaggtcatctgcttatttctttgactaccttcttccatggaaccagttttccctgacagccttgggattctagcatagatcattttggagtttgtcatttaaattta

SEQ ID NO: 512698 - DNA, 186 bp, Homo sapiens
ggtttgtggaaaagagttgctgtagagtcctcaaacttgagccrttgagccagttcccactcagtctctccatggcccaggcacaaccttagtcaagaaaagaatgccttagaacaggaggaaaagaggataatatcgaatggccctatattttgatttcattagggacaaatgcaaagatcctaa

SEQ ID NO: 512699 - DNA, 594 bp, Homo sapiens
ttgtattgccattgtaaatgggatctttcttccattttctaattagttattggtggtacatgggaaaagtatttgaggtttgtgtgctgatttcttgattttgtagatagccactgtattgaattctcattacttccagtaaaatcttagttgattctcttaggcttctttggctaacatttwtcatttaatatgcaaataatgatagttttgtctcttcctttccaatacttctactctttccttcctttcccttttcctttttcctttcctttcctttccttttttttcccttctcagggccttgttgtcacccaggctggagagcaatggtgtgacctagctcactgtaacatcaaactcctgggcttaagggatcctcctgcctcagcttcctgagtggctgggactacaggcaggcagctaatttaaaaaatgtgtttgtagagacaaggtcttgctatgttgcccaggctagttttcctgccacttcagaggaaggactcaggtttcctttttctcctacttttaagagtttttattaggaattatctgttgaatgttatctaaaacagtcaataaaatgtattaagt

SEQ ID NO: 512700 - DNA, 594 bp, Homo sapiens
ttgtattgccattgtaaatgggatctttcttccattttctaattagttattggtggtacatgggaaaagtatttgaggtttgtgtgctgatttcttgattttgtagatagccactgtattgaattctcattacttccagtaaaatcttagttgattctcttaggcttctttggctaacatttttcatttaatatgcaaataatgatagttttgtctcttcctttccaatacttctactctttccttcctttcccttttcctttttcctttcctttcctttccttttttttcccttctcagggccttgttgtcacccaggctggagagcaatggtgtgacctagctcactgtaacatcaaactcctgggcttaagggatcctcctgcctcagcttcctgagtggctgggactacaggcaggcagctaatttaaaaaatgtgttygtagagacaaggtcttgctatgttgcccaggctagttttcctgccacttcagaggaaggactcaggtttcctttttctcctacttttaagagtttttattaggaattatctgttgaatgttatctaaaacagtcaataaaatgtattaagt

SEQ ID NO: 512701 - DNA, 398 bp, Homo sapiens
gttcagagaacagaacatccatgtagatccttcttgtattacagaatacaaaggagcggaaaattttgcctcagtaactgccaggtcattctaattaaagtacctatacattgtaatataattcctccattaaggtaacagccaatcaggtggtacagagtctgtgccattcagtcaagaaattcactcccttaacctagactgtgctggaaattcattgacaaattttgttctttggttctccatttttcttcagaattcatgcagaccacttgacttccttagcaktttcttttgtgggcgtatattaatgtctttggttaagcttcagcttccgtttgcatcaatcctgttgtaatcgtgcctcctgaggcatctttttgcttcccttgcatcag

SEQ ID NO: 512702 - DNA, 398 bp, Homo sapiens
gttcagagaacagaacatccatgtagatccttcttgtattacagaatacaaaggagcggaaaattttgcctcagtaactgccaggtcattctaattaaagtacctatacattgtaatataattcctccattaaggtaacagccaatcaggtggtacagagtctgtgccattcagtcaagaaattcactcccttaacctagactgtgctggaaattcattgacaaattttgttctttggttctccatttttcttcagaattcatgcagaccacttgacttccttagcattttcttttgtgggcgtayattaatgtctttggttaagcttcagcttccgtttgcatcaatcctgttgtaatcgtgcctcctgaggcatctttttgcttcccttgcatcag

SEQ ID NO: 512703 - DNA, 505 bp, Homo sapiens
ctggtggagttggcaggcgactctgcactaagttctcaggttgaatgggagtkgggtcgagggaagcaatggacgcagagttggggtgaagagttgcggtgggtcagcgggggtgaaaggacatggagatgtcatttttaacaagattgggtgagggtggtaggaaaggaggcagcaagagttcgggacagtttggcaaagacttagggatgggctgtcctcagtacggcaggagacgcaaaggaaggtatacagtggctaggagactaaggacgagaagacacagttaagacttggaataaggctgagatcggagttatccagaagaaagcggtgaggtcaacagggcacctactttgggggtgggtcttagatgagagggcggaggtagaatgtttgggatgagcagatcttggggagctagacgggggatgggggtgactgggataagaaagctgagccagaaaaggggaaacctgaatggtgggtctcggggaggtaagcg

SEQ ID NO: 512704 - DNA, 407 bp, Homo sapiens
ctggtggagttggcaggcgactctgcactaagttctcaggttgaatgggagttgggtcgagggaagcaatggacgcagagttggggtgaagagttgcggtgggtcagcgggggtgaaaggacatggagatgtcatttttaacaagattgggtgagggtggtaggaaaggaggcagcaagagttcgggacagtttggcaaagacttagggatgggstgtcctcagtacggcaggagacgcaaaggaaggtatacagtggctaggagactaaggacgagaagacacagttaagacttggaataaggctgagatcggagttatccagaagaaagcggtgaggtcaacagggcacctactttgggggtgggtcttagatgagagggcggaggtagaatgtttgggatgagc

SEQ ID NO: 512705 - DNA, 504 bp, Homo sapiens
tggtggagttggcaggcgactctgcactaagttctcaggttgaatgggagttgggtcgagggaagcaatggacgcagagttggggtgaagagttgcggtgggtcagcgggggtgaaaggacatggagatgtcatttttaacaagattgggtgagggtggtaggaaaggaggcagcaagagttcgggacagtttggcaaagacttagggatgggctgtcctcagtacggcaggagacgcaaaggaaggtatacagtggctaggagactaaggacgagaagacacagttaagacttggaataaggctgagatcggagttatccagaagaaagcggtgaggtcaacagggcacctactttgggggtgggtcttagatgagagggcggaggtagaatgtttgggatgagcagatcttggggagctrgacgggggatgggggtgactgggataagaaagctgagccagaaaaggggaaacctgaatggtgggtctcggggaggtaagcg

SEQ ID NO: 512706 - DNA, 498 bp, Homo sapiens
ccagagcccctcaagggtgtcagtgagctgtgctcctgccagcctcttgctaccggtctcttagccaggaaagccaggttctccyctgccctttctactcttttctcatttttctaagccccagttcaacagacacacaatgccactggtgtggcaacatgtgtgtgtggatggagtgaggtgcagaaacaggtggtggtgggctctgagaagggctgattgaatggtctgctttattccctttcataaattttcctcgcttggaagattgacctttgtaaagaagaaaaacattttagaaggaaaaaggaaaatatctctgcatgccctcagctcagatgccatctcctctgggagctcctctggcccctgccaaggctggatcaggtgccctcaggcacacacgatgctgacccagggccatctgtggcccagactctgggtccctcatgcagctctcaccactgctcaggaggccacaggaacagaggaatcact

SEQ ID NO: 512707 - DNA, 498 bp, Homo sapiens
ccagagcccctcaagggtgtcagtgagctgtgctcctgccagcctcttgctaccggtctcttagccaggaaagccaggttctcctctgccctttctactcttttctcatttttctaagccccagttcaacagacacacaatgccactggtgtggcaacatgtgtgtgtggatggagtgaggtgcagaarcaggtggtggtgggctctgagaagggctgattgaatggtctgctttattccctttcataaattttcctcgcttggaagattgacctttgtaaagaagaaaaacattttagaaggaaaaaggaaaatatctctgcatgccctcagctcagatgccatctcctctgggagctcctctggcccctgccaaggctggatcaggtgccctcaggcacacacgatgctgacccagggccatctgtggcccagactctgggtccctcatgcagctctcaccactgctcaggaggccacaggaacagaggaatcact

SEQ ID NO: 512708 - DNA, 289 bp, Homo sapiens
ggtacctggctccttgaccaaggagggtgataaggccccacctgaccccagagatttcrccacctggttaggtgggcaggaggatagtctctctggagccctgggtcatggactctcagaggtagggagtaagtcagcgcttgccaagaggtggagacccagtcacccacgatgcttgggatgggcagagcctcctggggtgaagtcttctagggtctagggtcccacatggtggtccctggaaggctttctgttcttccaggccctacagaggagaccaaggctcagc

SEQ ID NO: 512709 - DNA, 289 bp, Homo sapiens
ggtacctggctccttgaccaaggagggtgataaggccccacctgaccccagagatttcaccacctggttaggtgggcaggaggatagtctctctggagccctgggtcatggactctcagaggtagggagtragtcagcgcttgccaagaggtggagacccagtcacccacgatgcttgggatgggcagagcctcctggggtgaagtcttctagggtctagggtcccacatggtggtccctggaaggctttctgttcttccaggccctacagaggagaccaaggctcagc

SEQ ID NO: 512710 - DNA, 299 bp, Homo sapiens
ctgagtgatccatctcagtctctcctggctgacagggtgttgaaggttctacccttggccctgatcctaataccaatgccaataatcragcgcctactatttgcaaaacactgggtcaggaacttgaccacatcctcccgtcattctcagaacaacacgttagggagggtgtccctgtccccgttttctagataaggaaacggaggcttagaggggctaacgtagcttatacaacctgcctgcagaacctgccaggtttgagctgaggtgtcatctctgaacaccaggctgctgcacta

SEQ ID NO: 512711 - DNA, 299 bp, Homo sapiens
ctgagtgatccatctcagtctctcctggctgacagggtgttgaaggttctacccttggccctgatcctaataccaatgccaataatcgagcgcctactatttgcaaaacactgggtcaggaacttgaccacatcctcccgtcattctcagaacaacmcgttagggagggtgtccctgtccccgttttctagataaggaaacggaggcttagaggggctaacgtagcttatacaacctgcctgcagaacctgccaggtttgagctgaggtgtcatctctgaacaccaggctgctgcacta

SEQ ID NO: 512712 - DNA, 299 bp, Homo sapiens
ctgagtgatccatctcagtctctcctggctgacagggtgttgaaggttctacccttggccctgatcctaataccaatgccaataatcgagcgcctactatttgcaaaacactgggtcaggaacttgaccacatcctcccgtcattctcagaacaacaygttagggagggtgtccctgtccccgttttctagataaggaaacggaggcttagaggggctaacgtagcttatacaacctgcctgcagaacctgccaggtttgagctgaggtgtcatctctgaacaccaggctgctgcacta

SEQ ID NO: 512713 - DNA, 299 bp, Homo sapiens
ctgagtgatccatctcagtctctcctggctgacagggtgttgaaggttctacccttggccctgatcctaataccaatgccaataatcgagcgcctactatttgcaaaacactgggtcaggaacttgaccacatcctcccgtcattctcagaacaacacgttagggagggtgtccctgtccccgttttctagatraggaaacggaggcttagaggggctaacgtagcttatacaacctgcctgcagaacctgccaggtttgagctgaggtgtcatctctgaacaccaggctgctgcacta

SEQ ID NO: 512714 - DNA, 596 bp, Homo sapiens
tatcaaggaactgccaaactgtgtgccaaagtggctgcactattttacattcccaccarcaatatatgagttccaatctctccacatttttgccagcactagttattgccttttttattacagccatcctagggggtgtgaagtagtatctcactgtggtttcgatgtgcattttcctgatgtctaatgataatgagcatctttattggccatgtgtgtatcttctttggagaagggtctatttaaatcctttacccattttataactggattatttgtctttttattgttgagttataagtgttctttatacattctggatactagacccttatcagatatttgatttgcaaatattttctcccattctgtgggttgtcttttcattttcttggtagtatcctttgaagctcaaaagtttttaatcttgaaatagtctaattttaaatgttcttttaaaagcaagatgttatttgtatattatatttaaaaagtacatacatacttcgttcaattgagcacctactaggtgttgggttagggtatacagggagaaataaggcataccctcaagaaaggcataccctcatggagtc

SEQ ID NO: 512715 - DNA, 308 bp, Homo sapiens
tgaaatgtttgcatgaatgtgtaaaataaaggtaaggtgaatttactaattgttaagctatttttgttagtgtcatctaatgttttagataatggatgattttcctttcactaaaatcactttcacttctatatgactacataattctgattttttcaggttatatawgtctttatttccatttaattaaatatgctttaaccttttatgattcatcccactcctccattctcaaaataatttggtaattagcaatacagtttccccacagtttcaggaatttgtctcttccatttcccattgctgat

SEQ ID NO: 512716 - DNA, 308 bp, Homo sapiens
tgaaatgtttgcatgaatgtgtaaaataaaggtaaggtgaatttactaattgttaagctatttttgttagtgtcatctaatgttttagataatggatgattttcctttcactaaaatcactttcacttctatatgactacataattctgattttttcaggttatataagtctttatttccatttaattaaatatgctttaaccttttatgattcawcccactcctccattctcaaaataatttggtaattagcaatacagtttccccacagtttcaggaatttgtctcttccatttcccattgctgat

SEQ ID NO: 512717 - DNA, 483 bp, Homo sapiens
cctggatgttacacatcaaacaaccaagactaaaagtcagagggaagaaggcagaaatcttgaaaccaagaaatgacataaaggtgagttcctgaggtttctttagcctcatatatgccagactgagtgcttgagaagtgggcaagtcagcaataccaataggcacagaccaaaggaaaacacaacaaaagcagctctcttcagccaaagsgccaggactgggcaacctcacaagaagaaaacttccagacaataacttacctactccaggccagagacactgaaaactctgtgccccaaccccacccacaccagcaaagcgccaagtagagaggccagacctccacccccaccccaggctgtgaaggggcccccaatcaacccacccactcccagagtgagccaagccttccctctccacctgctggtaacaagcatcccccaactctgcagagtcagtgggaaccaaggggatctcattct

SEQ ID NO: 512718 - DNA, 483 bp, Homo sapiens
cctggatgttacacatcaaacaaccaagactaaaagtcagagggaagaaggcagaaatcttgaaaccaagaaatgacataaaggtgagttcctgaggtttctttagcctcatatatgccagactgagtgcttgagaagtgggcaagtcagcaataccaataggcacagaccaaaggaaaacacaacaaaagcagctctcttcagccaaagcsccaggactgggcaacctcacaagaagaaaacttccagacaataacttacctactccaggccagagacactgaaaactctgtgccccaaccccacccacaccagcaaagcgccaagtagagaggccagacctccacccccaccccaggctgtgaaggggcccccaatcaacccacccactcccagagtgagccaagccttccctctccacctgctggtaacaagcatcccccaactctgcagagtcagtgggaaccaaggggatctcattct

SEQ ID NO: 512719 - DNA, 398 bp, Homo sapiens
ctgacaggggcaattctggaagctttttatgttaaagttaactgcccttgaggaaggataagcctgggggtgaagggaaatggaccaggggaccacccacccctacgagaaaaacaaaaatgggggcgaggggggaagggggaagggggggacggggcagtttccaggggcatggwtgtcccctgctgttgctccctaaacactaaacacaggcctgggggcaatctggagctggaggaagcagcgaggctgccacaggactgaagccagagtcaggagcacactgtggggggccatgcccaggacagcagcaaaactgacctcaggaagagtgtccagccaaggacaaggagactaccttcaggtcgccaggccaccacacagcaggaggcagggaa

SEQ ID NO: 512720 - DNA, 432 bp, Homo sapiens
acctcagtacacagcctaacagagagccattgccccagagaaaagcagcctggctggaggagatgctgggcagaagcaggaaggaaggaaagatgcctggcgtggagaagacttagaagtgatgaccatcacctgttctctgaaaggatgggatgttatcacagcatatcatatatattgtatgttgcatctcagatgacatcatacatcaccttacatcatgtatcacttgtatatcatatgtcatatgttacatgccacatcatgtttcatgtaatatatatcacatatatcacatatcacataatctaccatataacatatcacatattatatatcacacgtcatataactgtctttcgtatttcttaatggatcacatcatatcacattatgtcataaatracattatatcacatcacatatcatatg

SEQ ID NO: 512721 - DNA, 659 bp, Homo sapiens
gagagtacaaaaaaatagtgattatcagyaaatgaataaaaatcctttttcctactagcattttatataggtataaataatgtgtttgcctcaggtggagaagaggttgaaaaatcaaaaagtcttcctgtgaaactgagggtggcctatgggactttaagaagaaggagcatatgacttgatgaggttgagaggatttttttcttcccatcaccaagaccaaatatatgcttttcttggggatcagcctaggggaaggaacaagcttctgacactaatgagattttgtgtgagtctgggagaagatggaaattagcctatgcatggcattctgggaaaacttgaaggttgtatggaaaaatgagcacatctaaaagatgcttggaagctcccaaaggaaggaagcatctgtgtttgggtgaagctaatggattatgcagctcaggcttctgtgccactatgtattctatacccacaacatttaatatctgtattaataattttttaggttcattaaacttcttaatataatgttatataaatttattctataaatcagatgttttaaagaataccaatttaaaagtggtgaaaatataccacacgttattaattgacaaaactaattacctggacaaattcgtgtaaatgaatgtatt

SEQ ID NO: 512722 - DNA, 659 bp, Homo sapiens
gagagtacaaaaaaatagtgattatcagcaaatgaataaaaatcctttttcctactagcattttatataggtataaataatgtgtttgcctcaggtggagaagaggttgaaaaatcaaaaagtcttcctgtgaaactgagggtggcctatgggactttaagaagarggagcatatgacttgatgaggttgagaggatttttttcttcccatcaccaagaccaaatatatgcttttcttggggatcagcctaggggaaggaacaagcttctgacactaatgagattttgtgtgagtctgggagaagatggaaattagcctatgcatggcattctgggaaaacttgaaggttgtatggaaaaatgagcacatctaaaagatgcttggaagctcccaaaggaaggaagcatctgtgtttgggtgaagctaatggattatgcagctcaggcttctgtgccactatgtattctatacccacaacatttaatatctgtattaataattttttaggttcattaaacttcttaatataatgttatataaatttattctataaatcagatgttttaaagaataccaatttaaaagtggtgaaaatataccacacgttattaattgacaaaactaattacctggacaaattcgtgtaaatgaatgtatt

SEQ ID NO: 512723 - DNA, 659 bp, Homo sapiens
gagagtacaaaaaaatagtgattatcagcaaatgaataaaaatcctttttcctactagcattttatataggtataaataatgtgtttgcctcaggtggagaagaggttgaaaaatcaaaaagtcttcctgtgaaactgagggtggcctatgggactttaagaagaaggagcatatgacttgatgaggttgagaggatttttttcttcccatcaccaagaccaaatatatgcttttcttggggatcagcctaggggaaggaacaagcttctgacactaatgagattttgtgtgagtctgggagaagatggaaattagcctatgcatggcattctgggaaaacttgaaggttgtatggaaaaatgagcacatctaaaagatgcttggaagctcccaaaggaaggaagcatctgtgtttgggtgaagctaatggattatgcagctcaggcttctgtgccactatgtattctatacccacaacatttaatatytgtattaataattttttaggttcattaaacttcttaatataatgttatataaatttattctataaatcagatgttttaaagaataccaatttaaaagtggtgaaaatataccacacgttattaattgacaaaactaattacctggacaaattcgtgtaaatgaatgtatt

SEQ ID NO: 512724 - DNA, 593 bp, Homo sapiens
cgaatacccatgatccaattcaatagagttcattttaygcttcctttctccatattagtgaaaatttggaagatagactgaactcaggaatgacaaatatgtttttgttctgagcaattacataaatttaacttactctttttatgtttttcctggaggagctgttggtgtggaaaagattgagaattggaaatctatttttggacattggcatgtttcatgttagctgactattacatggccaagcagaattgttaggcagggagcaggctattaatcaaattctcagggggagacattaaggctgcagataaattttggaatttgcagaatataaatggtactaattgtaggactagatgacattacttagggaggaagagctgatagacgaaaagaaaaaaaatttagattaggcccttggcaacccaacatgttaaggagctagggagagtaagaagacaaaaaaaaaaaaaaaagatgctgggaaagaattgccagtgaagcagggatgaaataaagtatgtctgatgtaccagagtaaaaggaagaaaggcttttaagaggatattattagtcttttgtcaaatgca

SEQ ID NO: 512725 - DNA, 593 bp, Homo sapiens
cgaatacccatgatccaattcaatagagttcattttacgcttcctttctccatattagtgaaaatttggaagatagactgaactcaggaatgacaaatatgtttttgttctgagcaattacataaatttaacttactctttttatgtttttcctggaggagctgttggtgtggaaaagattgagaattggaaatctatttttggacattggcatgtttcatgttagctgactattacatggccaagcagaattgttaggcagggagcaggctattaatcaaattctcagggggagacattaaggctgcagataaattttggaatttgcagaatataaatggtactaattgtaggactagatgacattacttagggaggaagagctgatagacgaaaagaaaaaaaatttagattaggcccttggcaacccaacatgttaaggagctagggagagtaagaagacmaaaaaaaaaaaaaaagatgctgggaaagaattgccagtgaagcagggatgaaataaagtatgtctgatgtaccagagtaaaaggaagaaaggcttttaagaggatattattagtcttttgtcaaatgca

SEQ ID NO: 512726 - DNA, 541 bp, Homo sapiens
aaatatagggaaataaaaagaagataataaaatcatctataatttcattactcaaactattatttttatgtatatatgtgagagaggcagcagaaaggtacagagtgtggggtctggataaaactaactgggctggtttcaattccagcttcttcactcagtaactgtatgaccttggagaagttatttaatctcctcacacctccatttcttcatctttacaatgggaagtattaatagaattcatttaattactataatatgacaagttatcacatgaaactgttgagaactgtttctggtacatactaagtggccaatacatgttaactgcattataattmtatttttagtggaagtatagttaacattgtcttataggagtaaaaagttattaagaatttaggagtgagagaagtgggttaaaggaatagctttgaaacatattctgaggaaaaggctgataagacttggcaaagagagtcaggagttgagtctggtgttgtgctgtctgttgaggatttgacatgtggccagtgca

SEQ ID NO: 512727 - DNA, 580 bp, Homo sapiens
agggaatagagatgccagggagaagaaacctccggggcatgcatgttaacatacaaaatagagaagtatgatcttccagggacacttcaccagaaaagggaagaaagcctcagatgggcatacgagcaacttcctaaacacactaccgcatgctcagttcccargggcaaagaggagactgcgcatgcgggaagcccaccctaagggaagaatcatggaaaagaagtgagccaaaaagtcctaggagaccaaggttaaatgctctctttgaccttcagacgcctttttggatctcttccaagtgaactttcctttctttcctattctacagcctttaaaaaaaaaacttccactcttgctctgaaactcacttcggtcttgttctgccttgtgctcctcagtagaattctttcttctcaggaggcaaaaattgaagttgctgcagacgcattaagatacactgctgataacctggggaaactctgataccagccaccagtaacatatagtatgggaaaatatagtggtcaaagaacatgacctctgacaacacattgcacagtcctttgatatcatgagt

SEQ ID NO: 512728 - DNA, 520 bp, Homo sapiens
atcttccagggacacttcaccagaaaagggaagaaagcctcagatgggcatacgagcaacttcctaaacacactaccgcatgctcagttcccaggkgcaaagaggagactgcgcatgcgggaagcccaccctaagggaagaatcatggaaaagaagtgagccaaaaagtcctaggagaccaaggttaaatgctctctttgaccttcagacgcctttttggatctcttccaagtgaactttcctttctttcctattctacagcctttaaaaaaaaaacttccactcttgctctgaaactcacttcggtcttgttctgccttgtgctcctcagtagaattctttcttctcaggaggcaaaaattgaagttgctgcagacgcattaagatacactgctgataacctggggaaactctgataccagccaccagtaacatatagtatgggaaaatatagtggtcaaagaacatgacctctgacaacacattgcacagtcctttgatatcatgagttcacttgaca

SEQ ID NO: 512729 - DNA, 580 bp, Homo sapiens
agggaatagagatgccagggagaagaaacctccggggcatgcatgttaacatacaaaatagagaagtatgatcttccagggacacttcaccagaaaagggaagaaagcctcagatgggcatacgagcaacttcctaaacacactaccgcatgctcagttcccaggggyaaagaggagactgcgcatgcgggaagcccaccctaagggaagaatcatggaaaagaagtgagccaaaaagtcctaggagaccaaggttaaatgctctctttgaccttcagacgcctttttggatctcttccaagtgaactttcctttctttcctattctacagcctttaaaaaaaaaacttccactcttgctctgaaactcacttcggtcttgttctgccttgtgctcctcagtagaattctttcttctcaggaggcaaaaattgaagttgctgcagacgcattaagatacactgctgataacctggggaaactctgataccagccaccagtaacatatagtatgggaaaatatagtggtcaaagaacatgacctctgacaacacattgcacagtcctttgatatcatgagt

SEQ ID NO: 512730 - DNA, 520 bp, Homo sapiens
atcttccagggacacttcaccagaaaagggaagaaagcctcagatgggcatacgagcaacttcctaaacacactaccgcatgctcagttcccaggggcaaagaggagactgcgcatgcgggaagcccaccctaagggaagaatcatggaaaagaagtgagccaaaaagtcctaggagaccaaggttaaatgctctctttgaccttcagacgcctttttggatctcttccaagtgaactttcctttctttcctattctacagcctttaaaaaaaaaacttccactcttgctctgaaactcacttcggtcttgttctgccttgtgctcctcagtagaattctttcttctcaggaggcaaaaattgaagttgctgcagacgcattaagatacactgctgataacctggggaaactctgataccagccaccagtaacatatagtatgggaaaatatagtggtcaaagaacatgacctctgacaacacaytgcacagtcctttgatatcatgagttcacttgaca

SEQ ID NO: 512731 - DNA, 551 bp, Homo sapiens
ttatctatcactttatttgttttaattatatcatgagccatcttgttgtgatgaatatgtggatttcagagtcggataaatcaggctccactaattccatggagtgagattttgggagggttatcttaacctgcctgagcttcagtctcctcaactgaraataatatctacctcataggtctatgaggattaagtaggatgatgtttgcaaatcatgcaggatatgctcagtaaatggtacagataatcttagtgatgaagattgtgatcaaggaacagtggtaagtttcaaataatcagaagtgaaacttgtttttgacttttattttaggttcaggggttgatatggttttgctgtgtccccacccaaatctcatcttgagttgtaactcccacaattcccacatgctgtaggaggaacccagtgagaggtgattgaattatggggcgggtcttttctgtgctgttcttgtgatagcaaatgaatctcattagatctgttggtttaaaaaacaggagtttccctgcacaagctctctctttgcctgcca

SEQ ID NO: 512732 - DNA, 551 bp, Homo sapiens
ttatctatcactttatttgttttaattatatcatgagccatcttgttgtgatgaatatgtggatttcagagtcggataaatcaggctccactaattccatggagtgagattttgggagggttatcttaacctgcctgagcttcagtctcctcaactgagaataatatctacctcataggtctatgaggattaagtaggatgatgtttgcaaatcatgcaggatatgctcagtaaatggtacagataatcttagtgatgaagattgtgatcaaggaacagtggtaagtttcaaataatcagaagtgaaacttgtttttgacttttattttaggttcagggrttgatatggttttgctgtgtccccacccaaatctcatcttgagttgtaactcccacaattcccacatgctgtaggaggaacccagtgagaggtgattgaattatggggcgggtcttttctgtgctgttcttgtgatagcaaatgaatctcattagatctgttggtttaaaaaacaggagtttccctgcacaagctctctctttgcctgcca

SEQ ID NO: 512733 - DNA, 551 bp, Homo sapiens
ttatctatcactttatttgttttaattatatcatgagccatcttgttgtgatgaatatgtggatttcagagtcggataaatcaggctccactaattccatggagtgagattttgggagggttatcttaacctgcctgagcttcagtctcctcaactgagaataatatctacctcataggtctatgaggattaagtaggatgatgtttgcaaatcatgcaggatatgctcagtaaatggtacagataatcttagtgatgaagattgtgatcaaggaacagtggtaagtttcaaataatcagaagtgaaacttgtttttgacttttattttaggttcaggggttgatatggttttgctgtgtccccacccaaatctcatcttgarttgtaactcccacaattcccacatgctgtaggaggaacccagtgagaggtgattgaattatggggcgggtcttttctgtgctgttcttgtgatagcaaatgaatctcattagatctgttggtttaaaaaacaggagtttccctgcacaagctctctctttgcctgcca

SEQ ID NO: 512734 - DNA, 661 bp, Homo sapiens
ccatgtctcagttctctaatttataaaatgaggataggcagtttctaacatgtggttttaggagggttattacaaagaaatcagttagaacattacttgtcatactgaagaaaatgagttctcttttttatcaaatttaacattctttcatataggaagaggtccctgaaaatatttcatgttcttgtccttttttgcactaaaaaatacatagctttagttttcaggaaacttcaagtaattacttttttaaaaattactttcactacttgtaatttgtaaaacaccaggccagcacctgaaatacaactgccacttttctgccatctcctagcaccacactgtaataactctgaattatataggattggaattatatatgaagtgttcctcaataattaaactttgtcctgtagttaaaacagacattcaggtgaattggagtgtgaagaattgtctggtccaytaaattagcctggtgctatctgtttcttatcctctttacttgaaattttctatgtgataccccttgactaagaaataatcattcctagtaagaggaaattgatcacaaacatgttctacttgtgaggaaaacaatagaaacaaaaactcagttaatagtgaactacatcttggggaaaatacattcaattgcttt

SEQ ID NO: 512735 - DNA, 621 bp, Homo sapiens
ctgaaaaaatagcagcgtttatttaaggagacagtacactctgaaagatgagacagagtgcacagcttgagagaatgagccaggtgtagctagtgctgggggctctctttatgagaaatttacattattattcacatargggcatgagggagtgtcacttgaaagcatgtttagggagattcctttgggaatgcatgttctgtggttgtgcatgctagtacacatattgtatgtctcattagcttaaaatctccacccaggggtgtgttttttactattataatgagcagaagactactctaggatgaggttttggaggatcacacatacttgttagtgggaaaaacctctagcatggttacctccagctaggacctgagaagtccccttcagggatagaagaacctaactgcaaggccagatgtagctactgtaaccattgtcctttttgctgattgtcagtgggcagcatctccaggacttattttcccagagggctccctttcctgctcatttttggctacctgcctactctaacaccaccacatgggagataaagttattactcaaatcaatctccctgaaggctcagaggttaggggtttttgagaatagttaggt

SEQ ID NO: 512736 - DNA, 623 bp, Homo sapiens
atataagaaatgtaattgcaatgagatacacagagtgatattacttatttcttgctcagtattgcctttgaagatatgtagagttgctaacaaatgactgactctggacctgaacaatgaaagccagagaatgaatgacatatccgagcaagtcatgctgatcaggtacagttatttggttttcttttgatcactctattgtgcaattaatggatagggctcctaaagcatggaacatagaaacaggaaatattttccttgtttcctagctttacgtcttttctccgttttcagaaaactgaagataaaacaaaataaaatgcgccatgcygattttataacttagttaaagcagtcgaattgattttcagaaaaaaattattttattccacaatacactgttgtttggcaaatgactaaagttttcacatttctcagataatcattaaaattggggctgtagctgtcatatgatcaccatatactggaagaaataaacccaggaattgtgatgggaacaataagatccaggaatattcttctaccccttcatccagggtgctgtctggggatacttactcaaatctaagatggatctctaataacacttcctatgcatccag

SEQ ID NO: 512737 - DNA, 576 bp, Homo sapiens
gctgggccagtcatctgatatttggagttaaatatgcatctaatagggctcattctcatggccattaatgctagggttcaccaaggaattcagcttaatctggtgaccaacgaggctacacaagtcctctccatcatagcaacctcttggcattcagatattttacataatggctggattcccaggagaaccaaactaaagttctccaatatgtcacaaaattcagtgagtgcctggaaggtaaaagctttttttgttgttgtttgctggttttttgtttttgttttttttttataagactcctaatcctctattaccttcttccaagtcttcagctcctgtttcaaattgtttttgacattcttgaacacacaccaataataatgataataataataatactattagtagtagtaataataacagctaaaacagataggaagacatgatttaggtgctattaggagcgctttactctattaacttccttaatcctcaccacaatcctattaggtaggaatgattgttatcygtctttcacagttgaagaaactgagtcacacagaggttaaaaaa

SEQ ID NO: 512738 - DNA, 320 bp, Homo sapiens
gcctcatgtatcccagcctctctctctctctcaggtagtggtgatgaatttgaactaccatttctatactgaggtaaaagctgtctgcttattacagcagcgagaggacccccatgggtgcaatgaatggcacttacatcatatattttccttgggtgtagcagaacttgttcagagtggatgctcttggtacatgtagcatgactgatagttttatgctcagcctttataggtccacaaartcatataaataaataattctattaactgccaggacttccttggaaatcactgggtatgtttctatgggtctttacaaa

SEQ ID NO: 512739 - DNA, 581 bp, Homo sapiens
tatatgataaaattagtgatgtggaaccaaaaaaacgccagaggttagatttaagattaatcgagttcttgttcagagagagagccaataattttttttttttttttggtgagctatcttcttgtggagtccctgggacaagatttgtctagtgtagcagcataattaaagttctgccctatcaaagaacaagtgtttagatacattctcttctgaactagtttaatgcttgttcatacccaggcacaagaacaaaactgttacaaaacaaaatmaccccagaataaaagaaaatgaaaggctcctcttccattctgggatgttggggggcaggtctggaagataagcaggaaggggagtaaagtcactgtttttatgtctggcattggcttgggttgtttgccaaatggaaactgggggagacctcaggaagcttccagtcatggtggaagttgaagcgggagcaggcaatttgcatggtgaaattaggagcaagagaattgagaggtgggtgccacacacttttaaatgacatagtattagtattactatctgaatagacctccttctcttgagcagga

SEQ ID NO: 512740 - DNA, 506 bp, Homo sapiens
ttcccagtctgttgtcatcgtaccagactctaatgaaccccaagccaggcctccctgctgtggcttccgaaaggggtggaggcagcaactcctctattaaatcagacttccagttagtgcatgggaatattgttgctggagtgctcttatcaactgaaaaaactgaagaaaatctctcccaccatgtcaactggcttgattatgagacaacattgatctcatttgtataaatgcaaaaatacaaagtagcagagctgtattttttaatagatagtggtagttacatgaaagacaaaacattgattaccgagttgtgtacacaytttcttcacaactggaacaatttaattaagcacaatctattagggtaatgatcagaaacattaataatttgtgtttcagcacattccttaagagattactataaagactaaaataaaatatcacataattttcagaatatgatcatgaatttgatatatagttctcagagttaaacaaaatca

SEQ ID NO: 512741 - DNA, 617 bp, Homo sapiens
caaagtaaattttaactctcccatccagtaatcttccatctggactcccaggtgattatcttcttctggttataacctgtaaaatgactatcagcctcctccttgtctcttctctttctattatactacaagctctctgaaaacagtggacatatcttgtttactatttagtccccagaattatagttttcagtttctcctttgccagttgtagcagactatattttctaaagacagattcaccagtatatattccagactgcctggtcttattgcatggaacactgacattcctttagaccctgtcattccttgacacttgagagktgtgtctgtctactcctatcccctaacctgagtgaacatttgtaattgcttcaatcagtagaatatggcaaaagtcatagtgtgtgagttttgaggctaggtcataaaaggcattgccttggtatcttggattgctctctctgaataagaggcctccatggagggaaatgagaccctctgccaacagcacctatttgccacatgagtgagctaccttggaaatagatcctccagtctcagtcaagactcaagtaactattgctccagccagcacctgactacaatctcat

SEQ ID NO: 512742 - DNA, 521 bp, Homo sapiens
tctaggattcctagttgagctggggctacaggtatcagcttgtatttcataggcaagagaaaagatgcaggtgaaaaacacgagcttgaaaagcaaagttcaactggggcaccactggaggcattggggtaggctctctcttcaacctaaatggagttttacaagatttcactagcaaaacagctcctgcccatggargcatgtggaaagcaaaatcctaatatcccttgttgctcccaacactgcagcttcagagtgacactggtctgttccctggttctaccacatgctgtgagactataagtgattgagtcaactcatctgaccatctgtaaaatgggtataataatacctctcaaagttatgaggtttatatgaaataccaggtgttaagtacttattgtagggctgaagactgaatatggtcaataaatattaactcccttgttgacttccttcccctttcactttttccactgaagtaatttaactcatgatccgacgtcagggatcactgccag

SEQ ID NO: 512743 - DNA, 454 bp, Homo sapiens
aaaaatcaaataccacatgttctcacttataaagggaagtcaaacattgaacaagcatggtcacaaggaagggaacaacagacaccagcgcctgcttgaaggtggaaggtggaaggagggtgacaacggaaaagctacctatcggatactgtgttcattacctgggtgacaaaatagtctgtactccaaacccaaacaacatgcaaattccccrtgtaagaaacctgcaaaagtatctcctgaacctacagtaaaagttggaaagaaaaaaatcacaataaaaaattttaaaaattctcgtcaggaattaagagtaccaatgatagctcctgtgagtagcaatcgtacagccacagccaaaacaaatgacaataatgataactaatatgggctgagcatctaccaggggccaagatctttatgcgcatggtcttcataatcctcacaatcattt

SEQ ID NO: 512744 - DNA, 454 bp, Homo sapiens
aaaaatcaaataccacatgttctcacttataaagggaagtcaaacattgaacaagcatggtcacaaggaagggaacaacagacaccagcgcctgcttgaaggtggaaggtggaaggagggtgacaacggaaaagctacctatcggatactgtgttcattacctgggtgacaaaatagtctgtactccaaacccaaacaacatgcaaattccccgtgtaagaaacctgcaaaagtatctcctgaacctacagtaaaagttggaaagaaaaaaatcacaataaaaaattttaaaaattctcgtcaggaattaagagtaccaatgatagctcctgtgagtagcaatcgtacagccacagccaaaacaaatgacaataatgataactaatatggrctgagcatctaccaggggccaagatctttatgcgcatggtcttcataatcctcacaatcattt

SEQ ID NO: 512745 - DNA, 522 bp, Homo sapiens
gaggtgacctgagagagaacgttactgtaactttgatgttggacacttacttcaaatctcaaatagatgaaaaaggctctgttacacattgctttagaatatttacttgtaggaactagcaagaccagctccttatcagtagaatatctggccacccagaggtcagctttggccaagaaatgacccctttgagatggccctagaacacactgggagattctgactcatacaaaacttctgagcaacaatatctagaacccaaacgccagtttattcatgtatcaggagaaatcgaactggcaggtagaacagatacacatgtctgtctaaccagcttcttctatcacttacagaagagctacagagggaagcaaatcatcagaaggttgtttggtgcacatgcaatcagaacaagggrgttaatggtgtgaatttgtaatgagatcaggctgcaatagcctgatgtgttcctcacaatcgggaggggattgccaagcagactgtacatccctctgtcccatc

SEQ ID NO: 512746 - DNA, 626 bp, Homo sapiens
cattccaaatgcaaaaaccttaaatggcatatcctcctcacatgctacacaaaatacatccctggtgaattttattatatttaacaagaaaaatgggctgggcatggtggctcacgcctgtaatcccagcactttgggaggccaaggccagtggatcatgaggtcaggagattgagatcatcctggctaacatggtgaaaccctgtctctactaaaaaatacaaaaaattagctgggcgtggtggtgggcacctgtagtcccagctactcaggaggctgacgcagaagaatggtatgaactcgggaggtggagcttgcagtgagctgagatcacaccactgcactctagcctgggcgacagagcgagactctgcctcaaaaaaaaaaccaaaacattttttagragaaataggagtttatgatcttcaggtagaagttcttaaacaaaacattaatacataatccattaaagaagatttgtaagtatggttacattaaaataaaaaatttctgttcaccaaaaggtattaagaagagtgaatacataagccaccaaatggagatattacatttataaatgacaaaggataagtatcatgaacacataactgataaaaattaagaaa

SEQ ID NO: 512747 - DNA, 626 bp, Homo sapiens
cattccaaatgcaaaaaccttaaatggcatatcctcctcacatgctacacaaaatacatccctggtgaattttattatatttaacaagaaaaatgggctgggcatggtggctcacgcctgtaatcccagcactttgggaggccaaggccagtggatcatgaggtcaggagattgagatcatcctggctaacatggtgaaaccctgtctctactaaaaaatacaaaaaattagctgggcgtggtggtgggcacctgtagtcccagctactcaggaggctgacgcagaagaatggtatgaactcgggaggtggagcttgcagtgagctgagatcacaccactgcactctagcctgggcgacagagcgagactctgcctcaaaaaaaaaaccaaaacattttttaggagaaataggagtttatgatcttcaggtagaagttcttaaacaaaacattaatacataatccattaaagaagatttgtaagtatggttacattaaaataaaaaatttctgttcaccaaaaggtattaagaagagtgartacataagccaccaaatggagatattacatttataaatgacaaaggataagtatcatgaacacataactgataaaaattaagaaa

SEQ ID NO: 512748 - DNA, 525 bp, Homo sapiens
tgcctatgttctaagaacagggacaatttatcttgtatcatgtgaaacttatctctctatacccaacatctatacccacacacaaattccccttccatcttatagatgaaaagaaaaaaaaatggaaaaaagttaaaatccattggcattaagatttctctatgtgtagtggatgatatggtgtgccmcacacaacccccttttggactaagctatacagtctcccacgttttgaacatgttggctactaacagccattctttgctcagcaatttgcatttataaaagacagcttttttttttaagttcatgctgtctccccagtagtagctttcattcagtaactggttgattcaggggtacaaacgtctgttccctttgacacaatgtggtttaactgaactgtcacactagcttccatgatctctctgggagcccctatggtgtctgttaccactgcattacaattcaaattcttccccctcgtcctaccagcttcctccccttaagatggctgtttctaag

SEQ ID NO: 512749 - DNA, 525 bp, Homo sapiens
tgcctatgttctaagaacagggacaatttatcttgtatcatgtgaaacttatctctctatacccaacatctatacccacacacaaattccccttccatcttatagatgaaaagaaaaaaaaatggaaaaaagttaaaatccattggcattaagatttctctatgtgtagtggatgatatggtgtgccccacacaacccccttttggactaagctatacagtctcccacgttttgaacatgttggctactaacagcmattctttgctcagcaatttgcatttataaaagacagcttttttttttaagttcatgctgtctccccagtagtagctttcattcagtaactggttgattcaggggtacaaacgtctgttccctttgacacaatgtggtttaactgaactgtcacactagcttccatgatctctctgggagcccctatggtgtctgttaccactgcattacaattcaaattcttccccctcgtcctaccagcttcctccccttaagatggctgtttctaag

SEQ ID NO: 512750 - DNA, 525 bp, Homo sapiens
tgcctatgttctaagaacagggacaatttatcttgtatcatgtgaaacttatctctctatacccaacatctatacccacacacaaattccccttccatcttatagatgaaaagaaaaaaaaatggaaaaaagttaaaatccattggcattaagatttctctatgtgtagtggatgatatggtgtgccccacacaacccccttttggactaagctatacagtctcccacgttttgaacatgttggctactaacagccattctttgctcagcaatttgcatttataaargacagcttttttttttaagttcatgctgtctccccagtagtagctttcattcagtaactggttgattcaggggtacaaacgtctgttccctttgacacaatgtggtttaactgaactgtcacactagcttccatgatctctctgggagcccctatggtgtctgttaccactgcattacaattcaaattcttccccctcgtcctaccagcttcctccccttaagatggctgtttctaag

SEQ ID NO: 512751 - DNA, 555 bp, Homo sapiens
caaatttttgttattttaagacacctagtttggggtacattcttatggcaaccacaggaaattagtgyaattagttgttaggaaaatgtatattaagacgacggtaaagtaacattttgtagctattagaatgtatatctcttttaaagcttgcagaaatgtatactgggaaaatatggaacagccagaaccctcatccttggttgtgatgtctgcgcaatgaaacaatttttttttttttttttttgagacggagttttgctcttgttgcccaggctggcgtgcagtggcacaatctcggctccctgcagcctccacctcccaggttcaagcgattctcctgcctcagcctccagagtagctgggattacaggcacccaccaccacgcccggctaattttttgtatttttagtagagacagggtttcactatattggccaggctggtctcgaactcctgacctcaggcgatccacccacctcggcctcccaaagtgctgggattacaggtgtgagccaccacactcggccataaaacaacttttgaaaatgctt

SEQ ID NO: 512752 - DNA, 555 bp, Homo sapiens
caaatttttgttattttaagacacctagtttggggtacattcttatggcaaccacaggaaattagtgcaattagttgttaggaaaatgtatattaagacgacggtaaagtaacattttgtagctattagaatgtatatctcttttaaagcttgcagaaatgtatactgggaaaatatggaacagccagaaccctcatccttggttgtgatgtctgcgcaatgaaacaatttttttttttttttttttgagacggagttttgctcttgttgcccaggctggcgtgcagtggcacaatctcggctccctgcagcctccacctcccaggttcaagcgattctcctgcctcagcctccagagtagctgggattacaggcacccaccaccaygcccggctaattttttgtatttttagtagagacagggtttcactatattggccaggctggtctcgaactcctgacctcaggcgatccacccacctcggcctcccaaagtgctgggattacaggtgtgagccaccacactcggccataaaacaacttttgaaaatgctt

SEQ ID NO: 512753 - DNA, 663 bp, Homo sapiens
taacgtctatctctatgtgtctatatttatacacataaaagtatttacctagataaattggtaaatcaagagacaaagaaaaaataaaagggagacagagcaaatcctaattatctgtcgagttacacatatttattttaatctgaaaaaaatagcacttagaagaataaccaaaactatacaaatgtttacgtataaagaaaaagaggaaacagtagacaagaataaaaacatttatatattttttataataaaaaatagttcacatttttaaaaactataataaaatccaaatgaaactgagcaagttctaaagttaaaatgaaacctagaaaacgtgagccagactatcaagtyggtcacatcatcaacgacaacagccacagcagaggagggatttccaggaactttacgacacagtattttgagtgcacccccatagtgggatatattctaaagtcaaatagagtttcacatacgcttaaaattcatgtagcagttctccttgtttatagtaatgttagtaatatactttaaagctattttatatatttgaggaataaaattaatattaaattacaatacacattgttgggaatgaagccatgttttagaaggtgcagatatcagcaaggtaagtggagagctcgcatgttaaagcag

SEQ ID NO: 512754 - DNA, 619 bp, Homo sapiens
cattgtgtgacagcccctctagaccaccacgacatcttgccagaggtgcttgcaaaattggctcacagtttttttaagctctcactggctcactatgtatcttcatagatcagggaaagcaactcagtcaayaaggtgaggccaccacatctagggccatggtgctggaggcgaagccttggctgcaagtcagcttcatcctgtaccggtgacataacttctctgagcttcattttacttctcttattaagtggggataacaaaagtatctcagggaacacagtatgccttacatggtatagttagaataaatagaacattatgaacaaatagaaatgaccacattatcatgatactctgggttacataaatgcatatgatttgtacaaagccactgggaccagttatacaacaactgactggttctaatttaccaaaggccagatgctggaacaagcactttgcatgtggacggctttggctcccatttgtttctcaatattaacaactctgagatgtttttattaccccactgctctttgtcactttataatcaagagatactggtatgcatggactaaatataaaatatgctacacgcagaggaaaactaccacct

SEQ ID NO: 512755 - DNA, 619 bp, Homo sapiens
cattgtgtgacagcccctctagaccaccacgacatcttgccagaggtgcttgcaaaattggctcacagtttttttaagctctcactggctcactatgtatcttcatagatcagggaaagcaactcagtcaataaggtgaggccaccacatctagggccatggtgctggaggcgaagccttggctgcaagtcagcttcatcctgtaccggtgacataacttctctgagcttcattttacttctcttattaagtggggataacaaaagtatctcagggaacacagtatgccttacatggtatagttagaataaatagaacattatgaacaaatagaaatgaccacattatcatgatactctgggttacataaatgcatatgatttgtacaaagccactgggaccagttatacaacaactgactggttctaatttaccaaaggccagatgctggaacaagcactttgcatgtggacggctttggctcccatttgtttctcaatatyaacaactctgagatgtttttattaccccactgctctttgtcactttataatcaagagatactggtatgcatggactaaatataaaatatgctacacgcagaggaaaactaccacct

SEQ ID NO: 512756 - DNA, 431 bp, Homo sapiens
aaagccccactaagtgttgacrtttagaagttgggggtagtgaaacagtcgtcaaaagaaacagatacaggaggaatgcaggaaccagagaatagtgtcacaggagccaggaaataagagggctcaacaatagcaaatgctttgaaaagaggtccgctgctttagttgcatttggagacagttacacaaatgaagggatggaaactggggagttggggatgaagaataaagaacagctaatgcagacaatttgaaaagagagcagagaaatggggtagctggaaggggatgtggagttatagaagggtttttatttaaaagatactagctttagagtagataggcagatatgaacagggcaggacagcgccacaaagactgtgagggctggtgacagggaagggaaaatctaacaggagacatcttgagct

SEQ ID NO: 512757 - DNA, 557 bp, Homo sapiens
taataagagcagttaaaataattttgtgtagatccagaatacaacaggtgactaagttaatgactaacacaatttacagacttcaaaatgataatactgaattccaaatttcacagcataacagatgactataatatactaccctaatcaactcttatttagtgtctatacagcatctacagagctcttcatccatcatatttctcctcttagactttctgtgttcatgactcattttcatccatttctgtcggagaactgctttgggaggagcagagcgartaagtgccatactccggtatgggcctgtgtggtggccagttgttttcttgcaagagtgatcttggagataaaataaattgagtctcaaaaaattccaatgactcgccatcttccttctccatcagaaactgatactctccgaatctgaccatgcacctgtatggcaggtccattttatttaggtagcccagctctctgctgtccacgatcagattggtctttttactcatattttttatttcaaaggagagaactgagctgttgaattttttaaa

SEQ ID NO: 512758 - DNA, 584 bp, Homo sapiens
ttagaacaagaaaaaaagtagtctcttttcgaatcgacccagtccacaattcaccagatggttgcctctctttgcctatataaacacagttaaacaggaaatgcacataatatattacccaaattgagacactattgagggtgaaagaggtactgacaataattacagcaagacaacaaaactatgatccatataactatgatctatatatatcattaaatatttggagagtttattttttaaatgtatcagatccctattgtctagatgactgtcccatttttctgctttccttaaggggctaatacccattatcataattagcccataaaaagcaatgatcaaattcatggctttttcttccttttgtacttcaacttggagtaagtcagttaaactttacagggctcagcctcctaccaataaatgcacaggtggaatacatgtgctcttaaggtttttttcaagctccaccgtcctatacattcaatttgaaaatgaagattttttatcagaaatctgctaggtaaaaaggtttctaggccmcctacttagaaaaaaagaccttcaaaatcacagtgttt

SEQ ID NO: 512759 - DNA, 553 bp, Homo sapiens
tacaagtttacagcttgaactttgcctagactgtaccttttttgggaaagagtttgcaaagcttttaagcctgactcttgtctttagatcaccagcatcaccatggtgcctggcatcagtggagcctcagcaagtgtttatggtggaaacctcagaagctgtcactttctctggctgtaacagttgtcatctttgtttacagggaaaatgctcttgagaaaatggaggtcattaaacactccagcttcagcaatatcatcagagctttccgtcacgtgagttatctcacmaaagggtcagattctggtaaaaactcttgccttcacacttacttctgttttattttgccttatttgacatttcaccagaattgatccataggttcaataaggctccattctgttgggacaaatcaagctagaaagacactgaactctgggggttaccagaaatatctgaaagcaaagcagtgactgtgaggtgggaatctctctgagaatcctttgcagaaccatgtaacagctctgcatcactagacgagccaagcgaagtg

SEQ ID NO: 512760 - DNA, 575 bp, Homo sapiens
gtctgcctcacctaatctaaccctcagattgcagacagtgctttatttagacccaaagcttatgagtcctgattgtgttttcctgctggtcccatctgctgtctgtctttcagtgggcatccaccgttgtggacccagggatggttatgggaagcaaaacgtctcccttaatcataaacagtgtctaccagtggaagcccatcgaccgagggatcagaggcctctcagtagtattgtttattgcagttccttggcaacattgcagagaggcagtcaggttctgaaatacaactgaggttattggcaggctgaggccctggcacaggcaccttctagaatatcagctagtgtcttggctttcctctggggggatcccgttgctgttgtgttacagaaatggtagttgtttactccaacagtctggatgaccgcatagaggaactatttcartagtgactgacatcattttttttttaacctcgtaaacctttcacagttcaggggccttggatcttattttgaagacaggtgcaaattggaaatagcatttgaatatgacccggcaaagcatgatt

SEQ ID NO: 512761 - DNA, 549 bp, Homo sapiens
ccttttccttgagggagttatgaggattaactgtgcctggccctgaattcgtgccttgcaggtacttaggaagtgagttattacaagcagtgctttttatcatccatagatggagatgttatctaygctataggactgcagaaagaattacagagaattatgtagaatcactagggacttgattaatatttgtttacctttcccccacatggattgatgtcctttattatacttttgtacccccgcttggcaagcccttgacaaatattgatccaacaaaaaattagctctttaatgtatacgtttagaacctgttgctttgtcagtagtggtttttatgaaaatgaatgcttataggtcagacttctggaaaccctaatctgagggaattgggccaaataggaaagtgagccccttaaaggcagttgtctgaccagtacttggagcacaacaggttcttgctaaagcactgtgtttttaaaacagtggagttattaggttgaaattctgaatagcaagaaaaagaataatggaagtgctgccagcccc

SEQ ID NO: 512762 - DNA, 486 bp, Homo sapiens
gcagttatgtgtatgaactttttttttttttgagaatggctttagtgttcagaccaaggatggaatgaaagatcacgtgtgctttccactgtagagctgccctgcttgttttgattttatagttattctaagtgttaagttccttcatctttcaaagcaaattcctttgatccctgaaaatcagctaatgtttgggaggcaattaaaagatgaggctgtggggttggggtgaaggcttccccagcaggaagagaggagaagcccactggatctgggagcacggtgctaggactctctaagcgtgacctccttcagtttggcccagagtggtcagatagtttgccggggcataggatggatgacaggcytcatacgcatcacgtctgaagggaaagcccttgaattttccacgctactttttagtaacagtaggctttgtcataattggcttcatgttccagctttcctaaaactgtaagtgatgtt

SEQ ID NO: 512763 - DNA, 571 bp, Homo sapiens
ggcactcggggtggcagcactcattgttctcggtgcacgcccgcttcccacacgtgcttgggcacactgtggagagagaggagagacggagatgagaccgggcaggggaggcaccgccttctctgggcctggccagcatccttctgggtcattcactgctaccaccagcaccagatcactcattgaggagacaatgcaaaaacacactacgaaatcctcacccccaccactgtcctttcatccacttagacctgcagagagtygatatctttaaagttcagtctctcctaggaactccttgtttggtctgggacaaaccattagcttctgtgatcttgatcctctctcttcccatctgtaaaatgagggggataatacccacatttgagggttgcctcaggcgtgggtcagccagtggaagccctacaggaactctatggtttatcagtaatttaaaaggcattgtgctctgctcactttccatttcaaatatgttccttactgaaaactcttttaaagccttagtgtgcagaaatgcttactttgaaaatgattaaactacactatagta

SEQ ID NO: 512764 - DNA, 497 bp, Homo sapiens
ggcttactgcaacctccgcctcctggattcaagtgattctcctgcctcagccttccaagtagccgaaattacacgcacttgccaccatgcctggctaatttttgtatttaagtagagacggtgtttcaccatgtttgccaggctggtctcaaacttgcaaccttaagttatctgccagcgtcagcctcccaaagtgctgggattataggcctgagccaccatgmctggcctgtccaatttctgaagaaagcctagataagaatttgtggaagcatgtagtagtagccacagactctccacgaagatgaataagttattctttcaatgaagcttttctaggcagctttagctttgtggtaagagttagactgtctaggtttgcattctgactccgccacccacgggccagttgaccttgagaacattgtttgatcttctcaactgtcaaatgagatagcagtataacccagtacaggattgttctgagaactaaatga

SEQ ID NO: 512765 - DNA, 497 bp, Homo sapiens
ggcttactgcaacctccgcctcctggattcaagtgattctcctgcctcagccttccaagtagccgaaattacacgcacttgccaccatgcctggctaatttttgtatttaagtagagacggtgtttcaccatgtttgccaggctggtctcaaacttgcaaccttaagttatctgccagcgtcagcctcccaaagtgctgggattataggcctgagccaccatgcctggcctgtccaatttctgaagaaagcctagataagaatttgtggaagcatgtagtagtagccacagactctccacgaagatgaataagttattctttcaatgaagcttttctaggcagctttagctttgtggtaagagttagactgtctaggtttgcattctgactccgccacccaygggccagttgaccttgagaacattgtttgatcttctcaactgtcaaatgagatagcagtataacccagtacaggattgttctgagaactaaatga

SEQ ID NO: 512766 - DNA, 497 bp, Homo sapiens
ggcttactgcaacctccgcctcctggattcaagtgattctcctgcctcagccttccaagtagccgaaattacacgcacttgccaccatgcctggctaatttttgtatttaagtagagacggtgtttcaccatgtttgccaggctggtctcaaacttgcaaccttaagttatctgccagcgtcagcctcccaaagtgctgggattataggcctgagccaccatgcctggcctgtccaatttctgaagaaagcctagataagaatttgtggaagcatgtagtagtagccacagactctccacgaagatgaataagttattctttcaatgaagcttttctaggcagctttagctttgtggtaagagttagactgtctaggtttgcattctgactccgccacccacgggccagttgaccttgagaacattgtttgatcttctcaactgtcaawtgagatagcagtataacccagtacaggattgttctgagaactaaatga

SEQ ID NO: 512767 - DNA, 551 bp, Homo sapiens
tctctctgtactctgagatatgctcaaattctcctacgtttctatttccagccttgccttctccctcacccccaactcttactggaagcaactttttcagcaactggaactaacttgcagtctctgtctgccttggctgactggccaacggtcttaataaatagcaaccactaaataaatcaaaatttttccaaagaaaatatgaaacttggatcttaactctacttagccttaaatttacctgtctgtgcacatttcattttcccacccactaaacagtattcctatagctctggttgtatccatgtagatttagattgatggttctagaatcacagaattggaaatgatcgtagatataatttagttcaacccactcattttcaaagacaaggcaagggaagctaaaagaggttaagtgcccttttatcacagttagtgataaaattcaggcaaaattgaaagtggctgctccagcctatctttgtagyggatgacctgtcttagaatttgttgaacctctagcattgaatgtagactgattttaacct

SEQ ID NO: 512768 - DNA, 553 bp, Homo sapiens
gtgggtgagggacatatatgtaacttcaggaaaggtaaagtgcccctaaaaatgactgagtgtagatgctctgttgttctgataaaatgaagtttcagtgtcagatttctttgattcgattaaaataaagtaatgtgatatttctttgtcaccacccagtttgcagagtgagatttacccctgtaaaatgaattaagtaagattatacatatattagataaagagatactggctattaggaagacatatgcttgagatatcatggagtgctgggaagyttacaatgtgtgtgggtatgagaaatttaaattcttacattgatgctgttgaaaatgacttgatgtcaggacaacttttggcacacagcattctccttctcctataccttatcttcctatttcctattccaaaacttacttgcatctgatctctgtgaggtcagcccattctgaattcctagattcatatcattttctttaaaactactgccttatattgagtcaaatggctttgtagataatttttgaaacaacttagaatgatgtcccagaaa

SEQ ID NO: 512769 - DNA, 576 bp, Homo sapiens
actagtacagttatgtgcaaaccatcaggaaatggaaatgagaaaacagcatgttttgtgtaagaaaaaaaaggggtggcagggtgtggattccaacctggtagtgaatttcccgtcacatgtaagctcctcagtgtggtgctggtgtctaagttcccccgggttagaatccacatctcatcccactataaccagctatcccctataaccagctatccctgagttgctgttgatctttctgttgccatctctcccttctcacaccacacacccgccaggctgctgtgtatttctttcttctgcagggttgagaccaagtcgcagggctgtccctggggtatgactacccagatcaggagctacatactggagctgatggaccacttaaacatcatgtaccagacccctgggaaaaaggggacctatagcatccactccaaccgtttcctattaagacagagaaagatgaactaagacatctattagcagctcacaaagatgatagaaattaagatttgaatggctattccmagaacttagtgcttctgttttccaatgcctatcaaaaacaacaac

SEQ ID NO: 512770 - DNA, 598 bp, Homo sapiens
ttagactttgccatgagtacttaagccttctaaacattttattctaatataaattgctatatgagtgtcagttatgtgtttatatrtgggctgacacttttaaatgatttttttgtttaaggattttgggctcgtgaagtaggtaaaatgattggactagaacatcctctcattccggttcaacatcaatatgttgttacatcgactatacctgaagtgaaagctttgaaacgagaactccctgtgctccgtgacctggaaggatcatattatctccgacaggaaagggatgggcttttgtttggtccatatgaaagtcaagagaaaatgaaagttcaggactcctgggtcaccaatggagttcctccaggtgggttcagcaaatgaaagtgtgtgctagtcagacatgaatggttcatcctctccatggctgggggatggctgtagaataagacaacaacataatactagactttcagatacctgggacattggaggtgacaggtttgaggtgagctctgttctcgtatccctttgaacaatcacagcagggagtaggggaaaagaaagatgtagttgatggtagagaagctgaagt

SEQ ID NO: 512771 - DNA, 598 bp, Homo sapiens
ttagactttgccatgagtacttaagccttctaaacattttattctaatataaattgctatatgagtgtcagttatgtgtttatatgtgggctgacacttttaaatgatttttttgtttaaggattttgggctcgtgaagtaggtaaaatgattggactagaacatcctctcattccggttcaacatcaatatgttgttacatcgactatayctgaagtgaaagctttgaaacgagaactccctgtgctccgtgacctggaaggatcatattatctccgacaggaaagggatgggcttttgtttggtccatatgaaagtcaagagaaaatgaaagttcaggactcctgggtcaccaatggagttcctccaggtgggttcagcaaatgaaagtgtgtgctagtcagacatgaatggttcatcctctccatggctgggggatggctgtagaataagacaacaacataatactagactttcagatacctgggacattggaggtgacaggtttgaggtgagctctgttctcgtatccctttgaacaatcacagcagggagtaggggaaaagaaagatgtagttgatggtagagaagctgaagt

SEQ ID NO: 512772 - DNA, 598 bp, Homo sapiens
ttagactttgccatgagtacttaagccttctaaacattttattctaatataaattgctatatgagtgtcagttatgtgtttatatgtgggctgacacttttaaatgatttttttgtttaaggattttgggctcgtgaagtaggtaaaatgattggactagaacatcctctcattccggttcaacatcaatatgttgttacatcgactatacctgaagtgaaagctttgaaacgagaactscctgtgctccgtgacctggaaggatcatattatctccgacaggaaagggatgggcttttgtttggtccatatgaaagtcaagagaaaatgaaagttcaggactcctgggtcaccaatggagttcctccaggtgggttcagcaaatgaaagtgtgtgctagtcagacatgaatggttcatcctctccatggctgggggatggctgtagaataagacaacaacataatactagactttcagatacctgggacattggaggtgacaggtttgaggtgagctctgttctcgtatccctttgaacaatcacagcagggagtaggggaaaagaaagatgtagttgatggtagagaagctgaagt

SEQ ID NO: 512773 - DNA, 511 bp, Homo sapiens
tgcacgaccacgccttgctaatttttaaagttttttgtagagatgaggtctccctacgttgtccaggctggtctcaaactcctgggctcaagcagtcctcccacttaagcctcccaaaktgctgggattataggcttgagccactaagcctggccgcattgattttttttttttttttgagacagagtctcactctgttgccaggctggagtacagtggcatgatctcagctcactgcaacctccatctcctgggttcaagtgattctctgcctcagcctcccaagtagctgggactacaggtgcgcaccaccacacccagctaatttttgtatttttagtagagatgaggtttcaccatgttggccaggatggtctcaatctcttgacctcgtgatctgccctgctcggcctcccaaagtgctgggattacaggcgtgagccaccgcgccaggctgatattaagaatttttaacaccgagatatttgtggagtagatctgagaataagga

SEQ ID NO: 512774 - DNA, 543 bp, Homo sapiens
cttaaataacccatgcataatagagagaaaaaaaccacccgaatatgatgtttcctctcccttttgtgatctttcctcagttcacaaatatatactgaagaactactctgttcacagaacttggactttgttactttgaaacactggaattatttatttatttatttatttttctactttcaatctaaagcatatgatgataagggaatagttctgaaagtttgtcatttgaactaaacatgaagatataaccgaatttctgtatcattttcccaagggggaagaaagtagcttttaaggcagttagtaaaagaagctacyggcagggtatacactgtgtttctcttggaaattaacttttctttttccatgtttataccccaaaaattgctagtctgcccttcctctgtggcttgaaagtacagaaaagatgaagctaataatgccctgtgtttgttcatcagggatgctgtacatccctgtacactgtattcaggaagatggtccatctcgcagaccaatgtcttactgctgtgtcagcca

SEQ ID NO: 512775 - DNA, 497 bp, Homo sapiens
cagcatattaaaagcactcaatacatattgctagaaattgctttattttaagagtttcaaaatttggaacattaatcaataacagaatgcccaaagtaggatatgtaggagtataagaaatagttacattcctggcagggaggggacgaggtaggggcacagcagttggaagctggagatcccaggttcctggaatactcgggctgggaccttccggtttctcctgtctgctccctacccctgtgcctcgagtttctccctaaagaagtggttttcaagcttcagtgaacragagtacagcttttgtgtcaggacctcttgggtaagaagccccaagcatgattccaatacaggtattctgggcatagggttgccaaatttaacaaataaaactatataggaaaccaagttaaacctgaatttcagaaaagccatgaatatattgcatgtgacatactgatacaaaaaaaatctaaataatagactgatttatatct

SEQ ID NO: 512776 - DNA, 618 bp, Homo sapiens
gagttctatgatacagttcaacaaatatttattatttttaaatttttatttgtaatgggtacatagtaatcgcacatatttgaggggtacactgtgatgtttaatatatgtattcattttgtaatgatacatcagggtaattagcttatccatcactcaaacatgtatcatttctttggtgagaacattcagaatcccctcttctagttatttgataatatacaatacaatattgttaaccataggccaggcatggtggttcacacctgaaatcccagcactttgagagaccaacctgagaagattgyttcagcccaggaatttgagaccagcctaggcaatatagtgagacaccatctctacaaaacaaaacaaaacaatattcttaactgtagttaccctaccgtgtaatagaatgccccaacttattcttcctatttatctataattttatatgcatttaccaatctaacaaatatttattaaatgctgactctgcaccaaacactgttctgggtactggaggcagctataggaaaaatatggataaagtcttacagtgtacaattatttctaaaagggtggcctcacaaactttcagatttctgatgaaccgca

SEQ ID NO: 512777 - DNA, 618 bp, Homo sapiens
gagttctatgatacagttcaacaaatatttattatttttaaatttttatttgtaatgggtacatagtaatcgcacatatttgaggggtacactgtgatgtttaatatatgtattcattttgtaatgatacatcagggtaattagcttatccatcactcaaacatgtatcatttctttggtgagaacattcagaatcccctcttctagttatttgataatatacaatacaatattgttaaccataggccaggcatggtggttcacacctgaaatcccagcactttgagagaccaacctgagaagattgcttcagcccaggaatttgagaccagcctaggcaatatagtgagacaccatctctacaaaacaaaacaaaacaatattcttaactgtagttaccctacmgtgtaatagaatgccccaacttattcttcctatttatctataattttatatgcatttaccaatctaacaaatatttattaaatgctgactctgcaccaaacactgttctgggtactggaggcagctataggaaaaatatggataaagtcttacagtgtacaattatttctaaaagggtggcctcacaaactttcagatttctgatgaaccgca

SEQ ID NO: 512778 - DNA, 519 bp, Homo sapiens
tagtagaaatttagtatggacaagtttggttaatattaagcatggctggctgggctcagtggctyatgcctgtaatcccagcactttggttggctgaggcaggatgatcacttgagaccagcctgggcaacatagtgagacctcatctctacaaaaaaatcaaaaaatttgccaggtgtggtggcgcgcacctgtggtcccagctactcaggaggctgaggtgggaggattgcttgagcctgggaggttgaggctgcagtgagccgtgattgtgccactgcatgccagcttggttgacagagcgagaccctgtctccaaaaataagaaaaactaacttaattcagtagcatcatagggattaggttctaaagtcactgtatggcaaaaatctgcttcaaaattaccctaaaaaatcacttaaacctcccagcattggaactgacagttgtttctttagttaaacaagagccataccttatctggtatttaagggccatgctgtcttttaacaaattaaa

SEQ ID NO: 512779 - DNA, 573 bp, Homo sapiens
ggactgaatttggttgtgtgtttagtggggaactaattattaacatgcttattccagagattgggggtgaatatttcataccctttcacagataaaacaaaagtcctcttaatttctaaaatgaacaagtattattcaaataataaaaatcaaaaaaagaatcctacatttccttccctacccccacgacagagtcttgctctgttgcccaggctggagtgcagtggagcgatctcggctcactgcaacctccgcctcccaggttcaaaagattctcctgcctcagcctcctgagtagctgggattataggcgcccgccaccacgcctggctaatttttgtatttttagtagagacggggtttcactatattggccaggctggtcttgaactcctgamttcccactcgcctcagcctcccagagtgctgggattacaggtgtgagccaccgcgcccggccaaatgctacattttcatagcaggaaagataatttacacgtggaacaaatcactctagatagagtgcaccaggggacataaacacacacagactcagcgctaaggctaggacaa

SEQ ID NO: 512780 - DNA, 644 bp, Homo sapiens
tcctctaaactgcagctgtcacataagcaggtattcttgggctctctctccttagctctttcttgtggtccagccagaatcgtgccaggtgtggaaactggaagtctagaaagaaaagtttcccactgctctgatgcaggtcctcctcctgggtgaggaaaacaacaacatccttgaacctagggcagcaccttggtgtccatctcctcttgcctgtgcctggtcttgggatattggtgctgggccttcattttattgggtgcacctttgagagtagatgaagagctaccaaattataaatccctgattgggtgtctctctyaataatgaacagcttaggaacccttctaccttgtttctggggccaaggctactcttctcacaggagtttccagagttatgtttcattcttataaaattatgcttcagaagccataatacatgggtgcccactggtgaggatttcttaagataaagatcctgggctctaccccttgagactgaatcagtaggtctggggtaaggcccagaatttatactttaaaaaagtaacacaccaactttcagttccagtctggcatgtaagaagcttggaagttgtcactcagccctaacaacaagtaaaaagctgaataaaccaggca

SEQ ID NO: 512781 - DNA, 601 bp, Homo sapiens
atatctgggaacaatgattgtaagaaacaaatccatttgcatgagctggagggaaaggagcataccttatctctaacaggcaaactcatgagcacgagaaataaatgagaggccatgagagaatggaaacagcagttacagaaaccaaaatgcctctttctggctctcagaagcccatggtctcctttttttttgtttttgtttttgagacgcagtcttgctctgtcgcccaggctggagtgcagtagtgcgatctcagctcactgcaagctccacctcccggggttcatgccattctcccgcctcagcctcccaactagctgggactacagacacccgccaccacacctggctaattttttgtatttttagtagagatggcgtttcaccgtgtgagccaggatggtctcgatctcctgacctcatgatccgcccrtcttggcctcccaaagtgctgggattacaagcttgagccacagcacccggcagcccatggtctttcttttcagccctgtggcctttcttatctccgcttctctcactcacaaccaattttccctttttgctggtggcccatcatggcagccagcagaacccacca

SEQ ID NO: 512782 - DNA, 601 bp, Homo sapiens
atatctgggaacaatgattgtaagaaacaaatccatttgcatgagctggagggaaaggagcataccttatctctaacaggcaaactcatgagcacgagaaataaatgagaggccatgagagaatggaaacagcagttacagaaaccaaaatgcctctttctggctctcagaagcccatggtctcctttttttttgtttttgtttttgagacgcagtcttgctctgtcgcccaggctggagtgcagtagtgcgatctcagctcactgcaagctccacctcccggggttcatgccattctcccgcctcagcctcccaactagctgggactacagacacccgccaccacacctggctaattttttgtatttttagtagagatggcgtttcaccgtgtgagccaggatggtctcgatctcctgacctcatgatccgcccatcttggcctcccaaagtgctgggattacaagcttgagccacagcrcccggcagcccatggtctttcttttcagccctgtggcctttcttatctccgcttctctcactcacaaccaattttccctttttgctggtggcccatcatggcagccagcagaacccacca

SEQ ID NO: 512783 - DNA, 601 bp, Homo sapiens
atatctgggaacaatgattgtaagaaacaaatccatttgcatgagctggagggaaaggagcataccttatctctaacaggcaaactcatgagcacgagaaataaatgagaggccatgagagaatggaaacagcagttacagaaaccaaaatgcctctttctggctctcagaagcccatggtctcctttttttttgtttttgtttttgagacgcagtcttgctctgtcgcccaggctggagtgcagtagtgcgatctcagctcactgcaagctccacctcccggggttcatgccattctcccgcctcagcctcccaactagctgggactacagacacccgccaccacacctggctaattttttgtatttttagtagagatggcgtttcaccgtgtgagccaggatggtctcgatctcctgacctcatgatccgcccatcttggcctcccaaagtgctgggattacaagcttgagccacagcacccggcagcccatggtctttcttttcagccctrtggcctttcttatctccgcttctctcactcacaaccaattttccctttttgctggtggcccatcatggcagccagcagaacccacca

SEQ ID NO: 512784 - DNA, 367 bp, Homo sapiens
acgcctggtttcctgacccacagaaaccacgcagtgataactgtgtgctgtctcaagccacaaagtttgcagtaatattgttgcacagcaacagataactaatataaaaactgtcttacatcatgtacattwctgagggaaatgtagaacctggatttgagctctgatttcagagttgtggtctcagtctccccagggagacctgtcctgggagacagttatgccaggctgtgatgctgtgatgattgttctcttcctacccagaagctttcaataggcatgtcaagcatgtgaccccagctacatataccaaatgtatttctgacaaatgccaggacatcgtgaactttcttgttttactgagagc

SEQ ID NO: 512785 - DNA, 224 bp, Homo sapiens
ttgtcgtgtttatcctgtagacaaagggagacagtagatgtttttakgcaggggagtaatgatccactttgtgctataaaaagagcagtctggctggaggagagtgggaggtgagtagaccaggtaggaggctgcaatacgccaagtgagacaagatggttggctggaccaaggctgtggcagtgaggatggagaggagacagtagactaacttgactgagaaa

SEQ ID NO: 512786 - DNA, 224 bp, Homo sapiens
ttgtcgtgtttatcctgtagacaaagggagacagtagatgtttttaggcaggggagtaatgatccactttgtgctakaaaaagagcagtctggctggaggagagtgggaggtgagtagaccaggtaggaggctgcaatacgccaagtgagacaagatggttggctggaccaaggctgtggcagtgaggatggagaggagacagtagactaacttgactgagaaa

SEQ ID NO: 512787 - DNA, 224 bp, Homo sapiens
ttgtcgtgtttatcctgtagacaaagggagacagtagatgtttttaggcaggggagtaatgatccactttgtgctataaraagagcagtctggctggaggagagtgggaggtgagtagaccaggtaggaggctgcaatacgccaagtgagacaagatggttggctggaccaaggctgtggcagtgaggatggagaggagacagtagactaacttgactgagaaa

SEQ ID NO: 512788 - DNA, 224 bp, Homo sapiens
ttgtcgtgtttatcctgtagacaaagggagacagtagatgtttttaggcaggggagtaatgatccactttgtgctataaaaagagcagtctggctggaggagagtgggwggtgagtagaccaggtaggaggctgcaatacgccaagtgagacaagatggttggctggaccaaggctgtggcagtgaggatggagaggagacagtagactaacttgactgagaaa

SEQ ID NO: 512789 - DNA, 375 bp, Homo sapiens
aggagctgtgggtcagacacaccctgggatcattcacaagcggtcaataaagrcttggcgagggccaggttttctaggccttctcaatgggatgggtgtttgtggatacacaagaagcctgtgaaacttctgatattggcaggaaatcaatgtcccccaccctccacccccccacatccccaacataaacacatgccctgcagcaggacttggcactcaggggctcctggggtcccgatttatctgctaaaacgtcctctagccaccaccgaataaagcaaccccttgccacccaaccacaagagcacagcctgggagccactccaagggacaccaagtcacagtaaaacctcagccatccagagcaccaggcct

SEQ ID NO: 512790 - DNA, 547 bp, Homo sapiens
gcccaggcccaagcagtcgctgtcccytgcctgtggccaggcccgctctggccaggccctgcacctcctccccgccccagccaggttgcaccccgatggtctccctgcccaaggaggagagaagagaagggacgccccgagagggtggacatcggccacagccaccttgtctttgctcttaccctgcgtcttccatgatttggaggtggtgggaaaactgaggctgctcaaaactcgtggagaattccgcctgcaggatgacatgaatgcaccttcgcattgcctaccaacagatcttttttgagcatctctgtggaccaggcgtggtgatgggggaggggatattgtggtgaacatgacaggcgttgccttcacccagtggggctcagtgctgggtgagaaggcattgagaatggacattgtcaattgggccaaaggaggccaagaagaagtgctgggggcatgggaactaaaaaagacaggaggctcagcaggtcttggagctgggagagggccagcagcagcggctattccaaaggaaacaaca

SEQ ID NO: 512791 - DNA, 547 bp, Homo sapiens
gcccaggcccaagcagtcgctgtcccctgcctgtggccaggcccgctctggccaggccctgcacctcctccccgccccagccaggttgcaccccgatggtctccctgcccaaggaggagagaagagaagggacgccccgagagggtggacatcggccacagccaccttgtctttgctcttaccctgcgtcttccatgatttggaggtggtgggaaaactgaggctgctcaaaactcgtggagaattccgcctgcaggatgacatgaatgcaccttcgcattgcctaccaacagatcttttttgagcatctctgtggaccaggcgtgrtgatgggggaggggatattgtggtgaacatgacaggcgttgccttcacccagtggggctcagtgctgggtgagaaggcattgagaatggacattgtcaattgggccaaaggaggccaagaagaagtgctgggggcatgggaactaaaaaagacaggaggctcagcaggtcttggagctgggagagggccagcagcagcggctattccaaaggaaacaaca

SEQ ID NO: 512792 - DNA, 547 bp, Homo sapiens
gcccaggcccaagcagtcgctgtcccctgcctgtggccaggcccgctctggccaggccctgcacctcctccccgccccagccaggttgcaccccgatggtctccctgcccaaggaggagagaagagaagggacgccccgagagggtggacatcggccacagccaccttgtctttgctcttaccctgcgtcttccatgatttggaggtggtgggaaaactgaggctgctcaaaactcgtggagaattccgcctgcaggatgacatgaatgcaccttcgcattgcctaccaacagatcttttttgagcatctctgtggaccaggcgtggtgatgggggaggggatattgtggtgaacatgacaggcgttgccttcacccagtggggctcagtgctgggtgagaaggcattgagaatggacattgtcaattgggcmaaaggaggccaagaagaagtgctgggggcatgggaactaaaaaagacaggaggctcagcaggtcttggagctgggagagggccagcagcagcggctattccaaaggaaacaaca

SEQ ID NO: 512793 - DNA, 522 bp, Homo sapiens
ctggaagaacggagagttcgggggatgtagttcctacctggctttccaacagtgtgtaagcccagaattcttacataagcccatggagaagtggaaggaatgctggtaacgacaagattgaattctccacctgccaggcatccagggactcagagcagatttaactgaagttacagaaataggaatgtgacatttcctacatgcgggtgtgctggagcaaatgtattccctctcaggtttgtggggaaggagaatgctaacagacaagactccaggttttcgctcttaaacctggtgcctacatatgcattttctactggatgcagacagaagctccatatagacatatccatcgctgcatctctcatgccttgtgttctccctaattttccctttttaacccrcagaggaagagagttccagcatcacttctggcctctcaagagtgagttaggtggccaggtggggttattcatgcctgtaatctcataatgaatgggtggcctgccgctccacacctgt

SEQ ID NO: 512794 - DNA, 557 bp, Homo sapiens
gggatagcagtgccctaggcaaagataacracagtgaagttaaagagagtggacaagttgggtaaagtttagaatcacaggacttgctgactggagaagagggcaaaagcagagttagcacaacacatgagttatgaccaccttgagcagctcagcagggggtggtgccatttacagaacagagatggcatggacagagcccatggagaaggaggaggaaaaagagagtttggctttgggtttttttttaagacagggtctctggctctgtcacccaggctggagtgcattggtgcgatcatagctctttgcagcctcaaactcctgggctcaagtgatcctcctgcctcagcctcccaagtagcaggattacagatcctacagatgcacttcaccatgcctagctaatttttttttttttttttttttttggtagatagggagtctcactgtgttttccaggctggcttcaaactcctggcctcaagtaatcctcctgcctcagcctcccatagcactggggttacagccatcacctaccactccaagccatgagt

SEQ ID NO: 512795 - DNA, 557 bp, Homo sapiens
gggatagcagtgccctaggcaaagataacaacagtgaagttaaagagagtggacaagttgggtaaagtttagaatcacaggacttgctgactggagaagagggcaaaagcagagttagcacaacacatgagttatgaccaccttgagcagctcagcagggggtggtgccatttacagaacagagatggcatggacagagcccatggagaaggaggaggaaaaagagagtttggytttgggtttttttttaagacagggtctctggctctgtcacccaggctggagtgcattggtgcgatcatagctctttgcagcctcaaactcctgggctcaagtgatcctcctgcctcagcctcccaagtagcaggattacagatcctacagatgcacttcaccatgcctagctaatttttttttttttttttttttttggtagatagggagtctcactgtgttttccaggctggcttcaaactcctggcctcaagtaatcctcctgcctcagcctcccatagcactggggttacagccatcacctaccactccaagccatgagt

SEQ ID NO: 512796 - DNA, 557 bp, Homo sapiens
gggatagcagtgccctaggcaaagataacaacagtgaagttaaagagagtggacaagttgggtaaagtttagaatcacaggacttgctgactggagaagagggcaaaagcagagttagcacaacacatgagttatgaccaccttgagcagctcagcagggggtggtgccatttacagaacagagatggcatggacagagcccatggagaaggaggaggaaaaagagagtttggctttgggtttttttttaagacagggtctctggctctgtcacccaggctggagtgcattggtgcgatcatagctctttrcagcctcaaactcctgggctcaagtgatcctcctgcctcagcctcccaagtagcaggattacagatcctacagatgcacttcaccatgcctagctaatttttttttttttttttttttttggtagatagggagtctcactgtgttttccaggctggcttcaaactcctggcctcaagtaatcctcctgcctcagcctcccatagcactggggttacagccatcacctaccactccaagccatgagt

SEQ ID NO: 512797 - DNA, 543 bp, Homo sapiens
cccattttctctctgccctttcagacctcctcctcctattcctcaggtagctactgccatatascagcccttgttccccaggaccagtccagactgggtggcacagaagaggcaggaagaaggagagtaaactgcagagctgctacttttccagtttcccacacctggtctatttttccagacatctcaaaatatccatcccttagattatttttggttactcacctaaaaatcattacctcagcctcaaatttgagcattggccatgaagactctcagtcctgatttcctctgaatatgcttggactttattcgaatcatccctcctcgccttggagcattcatggatgtatttgtcaacacctcgggccatggccctaaaggtttagaaattatgttgttgttgttgttgctgttgttatagttgtttttctttaaataaatatttttttcagttaaatattgcttatttaaatactgcttttaacattctcttttttaaaaattcctttgatgataaggctatttataaaagttaaatta

SEQ ID NO: 512798 - DNA, 543 bp, Homo sapiens
cccattttctctctgccctttcagacctcctcctcctattcctcaggtagctactgccatataccagcccttgttccccaggaccagtccagactgggtggcacagaagaggcaggaagaaggagagtaaactgcagagctgctacttttccagtttcccacacctggtctatttttccagacatctcaaaatatccatcccttagattatttttggttactcacctaaaaatcattacctcagcctcaaatttgagcattggccatgaagactctcagtcctgatttcctctgaatatgcttggactttattcgaatcatccctcctcrccttggagcattcatggatgtatttgtcaacacctcgggccatggccctaaaggtttagaaattatgttgttgttgttgttgctgttgttatagttgtttttctttaaataaatatttttttcagttaaatattgcttatttaaatactgcttttaacattctcttttttaaaaattcctttgatgataaggctatttataaaagttaaatta

SEQ ID NO: 512799 - DNA, 513 bp, Homo sapiens
tttcattattgtatttaattcttataatacctrtagtaagctaaataatggccctaaagatatcaggtcctaatctctagaacctgtaaatgttgccttatgtggtaaagcctctgcagatgtcattaaattaaggatgttgaaatggggggaatatcctggattaaggtaggacctaaatccaatcacatatatccttttaagacagaggcaggtgatttaacacagacagaagaggaaaagcaatgtgatcagggaagcagaggttcaagtgaaatcatcacaagccaaggaatgctagtagccaagagaagctgttaacgggcaaggggtggaatctccctaaggttcttggaaagaatgtgactctccagaactgtgaaagaatacatttctattttttaagccaccaaatttgtaatttgttacataagccttaggaaatcaatataataatgtaataagcaagttatagttccattttacagatagaaacagaggttcagaatagcc

SEQ ID NO: 512800 - DNA, 601 bp, Homo sapiens
tgaagtacacatactattacaagtgaaccatctatggcattaaattagattggatttaaaaataccaaatgttatattttaagaagttttcaattcaaactattttctaagcatgctatacattttcattgtgccttcaaatttgcttccccctctgccaaagtcacccttctctgattctatccctgcatttaaagcctcagctcaaaagattgtttctctttctagaagttttctttgccataccctctactcaccttgttatggttacttcctcttctctgtgtttatatactactgtaatggccaggaaagagcttatatttaatcatttctcctcccatgctaaccagtgagctcttctgtgtaaccctatgtgcccattcatattgtaattcttgatatgtcattactgaattttaaatgaaaagaaaaatactggaaggtaattggatttataaatttaccctgcrtcattttgcatagttcagcaagtcatataatacaaaactcaatgtgagttttgaaacaaattggctgaaataaaaccttcatgaagcactaaggaagagaaatggttttatcattctcaacaaaatat

SEQ ID NO: 512801 - DNA, 550 bp, Homo sapiens
cagttataaatacacatttttcccccttaaagttgctccacaccccatagcacaatgctgtgaggtgctcagtttttccactccctgcacagagatgtcccccggatttgctcctccctcttaactggggctgcggagtcgggaggactctckgcagagggcaggatgttcagatgggtgggacagaaggagaggctgtggggcctccacagggcttggggtgcggaagaaagagccctgggggagaggtcagggcctggtccggccccagtgtggccttgggatctgtgtgatcttcagcaggtcatccttctttgggggtttcctgtgggttcctgggtcaagtagtgatgggaacaccttgcccacacactctgcaggctggccttgggatcaaatgcaattatttggggggagcgttgagacaggaaaaacactgtgcctgtttgagggatcactgcatcaccatggagagaaagcaggcgtcgccgtatagatgtgcgcagggcaggacagggcaccagggcctcagctcctgttctggtttccc

SEQ ID NO: 512802 - DNA, 535 bp, Homo sapiens
cctgccctgaggtgtggatgctagtttgcagggcagcagggtcctgcccagagcctctctcactcccatattcttgggaggccaaagagcactccagccccacctgccacccaggcccagcagaatcctcccctgagtcctgtgtggggcaactgctggctgaggagtcagccctggccgggtgcggtggctcacgcctgtaatcccagcactttgggaggccgaggtgggcagatcacgaggtcaggagatcgagaccatcctggctaacacggtgaaaccctgtctctactaaaaaaatacaaaaaattagccgggtgtgttgacgggcgcctgtagtcccagctactcgggaggctgaggcaggagaatggtgtgaacccgggaggcrgagcttgcagtgagccgagatggcgccactgcactccagcctgggcgacagagcaagactccatctcaaaaataaaataaaataaaataaaaagtaaaataatgtaaagtaaaataaagtaaaataaaaagtcagccctgaggg

SEQ ID NO: 512803 - DNA, 668 bp, Homo sapiens
ggggcaggaagaaaggcattttcagggatagggatgccattgtttagcacctgctgtataccaagcgctctaacacataatggagattgatcaccacaacggcccaagggaggtatccttacttcccccattttaaaaagaagaaacaatagctcagagaggctaagtctcatgcccaagggtgcagatagaaaatcatggagcttgaatttgaacccagatctgaggctgattccaaaagtggtggcttttaattgtttcatgctttttctctcactaaatgcttgctggaaaaaaggcagaaaagaagagaaggaaggaagggaggagggtaggaaggggagaagaggcaggggtaagtgcagggggcacctccccgccgcctggctgactttccccccactgccagtgctcctgccaggccaccctcagcaagccacatcgccactcagggcctctgtcttctttcgtgcaaggcgagcacataattcctgccttgcagagagctgtaaggatgaaatgagatcacacacacaaaagggttttgtgaaccataaaagttaaatcaatattggttttgaaaaatccatttaagtaataactatgrtggagcccccttgggctcagaggcttggggagactcttgccctggcttcaaaaaggactcg

SEQ ID NO: 512804 - DNA, 485 bp, Homo sapiens
tctctcaacttagagcgcagctcctccgggaaggggctggtgtttactcctctcttcaccacccccagccccctgagcaggcactcccttcagctcggcaccaagcctctctctccctcctacccctgcgtgaataatttctatctaaaggaatgccctgcacatgtgcacagtggcatctgacagcttctgaggtcctttcaggagcctcttctcatctgatttgagggaggtggggagtctcaccctccygtgacagaggaggacaaggaggccccaagaagtagagtgacactttcccaaggtcgcccaggtggaggggtcaggagtgtctcagcggaactcccgctagggtcaaggagactgacggacaaggaccgctcctgggctggccgctctggattgcgccccctgaacagaatgtctttttccatctgcccctgcggaggtggccagaaactccgtggcccttgcgccaccgtcag

SEQ ID NO: 512805 - DNA, 480 bp, Homo sapiens
gcacaggaccaggcgcttccattgtggtccacgcccgtctcactccctttcgcaagcctscgggaggcagggacattttacagaggaggaaacagaggctgagggatgacttgcccacgaccgccaagccagcttaggctcccgggtcttggtgcgctcgccccatccaggggaccccaaaacgccctccgccgccccagtccccggcctgtgcgcgtggacgcggggtccctactcacagccacttgatgccatagcacacgccggtctggagcgccagggcgaagagcagcgcctcgcagacctgcggccgcgccctcatcgtcgcgcggcgggcgcgcccggggtcacacccaggaggagccgcgccgaagtcctccgcctgcacggccgccgctggtcctgcacgccgcctgcagccggggagagcggaggcggcgggttaaggcggcgcgcgggcgggggaggcgttttattcaa

SEQ ID NO: 512806 - DNA, 480 bp, Homo sapiens
gcacaggaccaggcgcttccattgtggtccacgcccgtctcactccctttcgcaagcctccgggaggcagggacattttacagaggaggaaacagaggctgagggatgacttgcccacgaccgccaagccagcttaggctcccgggtcttggtgcgctcgccccatccaggggaccccaaaacgccctccgccgccccagtcccyggcctgtgcgcgtggacgcggggtccctactcacagccacttgatgccatagcacacgccggtctggagcgccagggcgaagagcagcgcctcgcagacctgcggccgcgccctcatcgtcgcgcggcgggcgcgcccggggtcacacccaggaggagccgcgccgaagtcctccgcctgcacggccgccgctggtcctgcacgccgcctgcagccggggagagcggaggcggcgggttaaggcggcgcgcgggcgggggaggcgttttattcaa

SEQ ID NO: 512807 - DNA, 556 bp, Homo sapiens
tagtgagcgagtccccctttgtaactcgacagagtactaagttctctggagcggcgggcgccgccggtcagtggcgtccgcggggaccccgcccccgccccccgcgcgcggccggggccacccggtggggttgcgacgcgctgacgtgggcggatcaaagckgccgcccgccttataaagcagtttgggaggctcgcgccggagatcgcgccaggcgaggaggagagctccggcgagcggcgagcacaggccacgggagctgagcgcagcagagagcagccggagtccgcgcctgactccgcgcgggtcctgagccggccgcagcttgccaggatccccggcgtccttctcgcgccgcttcacgaagagggcgccttcaccgctcgcccagccggagtgcgcacgggcccgctggaaaccgcactcgccgctccctgggcaggccggggcacccgggcacgcagggcgcgcctggcgagcgccccgggaggtgagcagtggtcgcgggcagcgggcagccgctcagcggggacccgccagggctgggggcgcccga

SEQ ID NO: 512808 - DNA, 446 bp, Homo sapiens
aaaagcaaataatgatttgaaaaactgagctaaagcgttttttcgtataactcaatatgatggagcaagtaaatagaacaacatgaacaaaagagatacagagaacacaaggyaggagaatagtgtctggagccagggaacctaacagccaattcgtgctgacttcctagaactaaatggaatggaaaacaccacctctctacacccaagtaacaaaaggatcagaggctacaccctttacaatccccatctcctccccaccgtattgcacatgaaaaatattctaagaaataaaataataaaaatattttaaaacatggaatatgatgaaacttttttgttaaatgattaaacattaacttgaatgatactagcgtattaatcgacctgttccacagcccagtccagaatgttcccatgattgatagggcaaagtggtccagtgt

SEQ ID NO: 512809 - DNA, 667 bp, Homo sapiens
gcaaataatgatttgaaaaactgagctaaagcgttttttcgtataactcaatatgatggagcaagtaaatagaacaacatgaacaaaagagatacagagaacacaaggcaggagaatagtgtctggagccagggaacctaacagccaattcgtgctgacttcctagaactaaatggaatggaaaacaccrcctctctacacccaagtaacaaaaggatcagaggctacaccctttacaatccccatctcctccccaccgtattgcacatgaaaaatattctaagaaataaaataataaaaatattttaaaacatggaatatgatgaaacttttttgttaaatgattaaacattaacttgaatgatactagcgtattaatcgacctgttccacagcccagtccagaatgttcccatgattgatagggcaaagtggtccagtgtgcaggtttaggaaccaaaaagactaggattcttgttctaactctgtgactccctggccagatgaccttgggcaagttatatattttctctaagctccagtcccctcaacgtatatgcaataaaagtctctatatcctagtgtcatttgtgaagattaaatgagataatctacataaaacaggtagtgaatacactgcaggtcttccataagtacttgaataatgt

SEQ ID NO: 512810 - DNA, 667 bp, Homo sapiens
gcaaataatgatttgaaaaactgagctaaagcgttttttcgtataactcaatatgatggagcaagtaaatagaacaacatgaacaaaagagatacagagaacacaaggcaggagaatagtgtctggagccagggaacctaacagccaattcgtgctgacttcctagaactaaatggaatggaaaacaccacctctctacacccaagtaacaaaaggatcagaggctacaccctttacaatccccatctcctccccaccgtattgcacatgaaaaatattctaagaaataaaataataaaaatattttaaaacatggaatatgatgaaacttttttgttaaatgattaaacattaacttgaatgatactagcgtattaatcgacctgttccacagcccagtccagaatgttcccatgattgatagggcaaagtggtccagtgtgcaggtttaggaaccaaaaagactaggattcttgttctaactctgtgactccctggccagatgaccttgggcaagttatatattttctctaagctccagtcccctcaaygtatatgcaataaaagtctctatatcctagtgtcatttgtgaagattaaatgagataatctacataaaacaggtagtgaatacactgcaggtcttccataagtacttgaataatgt

SEQ ID NO: 512811 - DNA, 537 bp, Homo sapiens
tcactgctatgaaatttaatcaaaatcaaattaaaacaattaaatctgcttcaatgatatatatgattcatgccctgctatttgctcttttctataactataaaatatatatatttatttttcrtcttgtcaatgatatcaaatatcatttacattataaaaatcagttgtacaaaaaatcatatccaaaataaaaccagttttagccaacaagtccgaggcaacatctacaatggctaagctaaaaagaatttaaactcagggcaagcatctaaaaataaattatgtatatatgacttacacgttgcaagaaaagagaataaacagactgaaggagtaagaaaatatcagtttctatctgtgtgatcttagaaagttgcttaattccactgtaaaataaagatgttaaatagtgcctatacatataaaaatgttaatgacatctttatgtaaatatgatttaagatggtatgattgtcaatacaatcaagaagaaagggaagaagatgcaggaagaggtatattccttacaaaacc

SEQ ID NO: 512812 - DNA, 455 bp, Homo sapiens
ggggtgagccctacagttctccctggacatggcctgttcagaytcaaacccaacccacaccccaggtgtatagaagcctggtgagggcaggagggggcagagagggtccacagaacgttcaagtccaccagatgtggcccaccctgagggccgggatcccaacctaggcacttggtggctgaggaaaccatggtgggtatttggatgactctgcctgggcctgtgtccaaggatgcaaatgaccaccctcagtgattccaccaaggccagggagtcctcacctcggtcggggagcagcaggtggcaaattggagccctggctgggcaaacaggagccttggctgagttagtgtgacccaggatgagtcaaggctgaatgagttgggtgtccaatcctcttgctggtgggtggaggtcacatcccctcaactggaaacagggcgggctctgagaca

SEQ ID NO: 512813 - DNA, 671 bp, Homo sapiens
cttcaggaaatttgcatgagaaatggccaatgattatctcttggaatgagagccagaggtgatgaatggcattttattttgattttacacactcttcactgtatgatcattttatactaaatatgcataatagaaataaaatcttctgataattattcacataaatatgagatycacaatacgagagataaaaacatctaaaaacaaaagagacccaggaaattgcatcatatgtgatccaatcctatcactttaaaattatccaaaggaattatgcacatttgctaagattttaaataatgtgactcttctcagttctctataagtgtgacaaattggaagtatgacattgatctcacactgaatcttgtataaaaaccacgaactctaatgcaatgatttttatattaaatttacttacataattaaacatatcaaggaattaaaggcaggagtattgtcatctggaatcagaagagctcacagccatctccactgttgattgaagatttgagtgaggggacttagagactgagtcagtgggctggggtctaggcttcactcctttttggatcaggtaactttaactttgtgtctgtttcattgtttatttagcactgctgatacaaacacagaagagcaattgatcctcactggtgttcttcagggac

SEQ ID NO: 512814 - DNA, 507 bp, Homo sapiens
caggcacatgtaggctgcattctgcagggtccagcccctgagacagctcctgtgggtcccaccagcctgccagaggccagcagcactayccagcccagcccaccaaaagggaatggcatggcccagagactcctgcattgggcaggtggcagggggcagggaagctagtccacagcctgcactgcagtgtggggcttagccctggaagcctgccccatgcctagcagggggtccctgctcaacctactctagactactgccctgctcaacctattctagactactgatgtttaaatctcccaagagtccccatccctaggtgtttccatcccaataatagatttagaaaaatgggagttgggaagggaagatgaaagcctactgcttcagtgggcagcccttgggtttcattatctgatttgggtacttgttttttccaaactggcaaatgtggacaccaccgaatgcagtcagatagcagaaagatgatcccaactccatacaaat

SEQ ID NO: 512815 - DNA, 537 bp, Homo sapiens
agaaataatccctttgccatactgtagcactggttcaagtagttatcctctattatcagtggtcaatgtcttaactcctgttgctgaaccctttttattattcagttttatctaagtatctgctaggacaaaaatatttaacttaataataatggttatttttctaagtcttcattgctagatcttttgcttaatatgaaggaggagatgatagtaaaccatagacactacagtcatatgattacttgattttgactgaatgaaagtacattaacatggtatgattatactcataatgaggattacagttggactccactattaatatcatgccatattatcccccttgaactacactaaactaccattccttgaacatatcctatgaatctgatacacagacaaggatgttaaatacatttcttcacttactgtatgagacactgtatgaggtaaaatatcaccatctccattattaaacrtgagttacttatgcaaagtccctaaaagagtttacctcaaagccattaattttac

SEQ ID NO: 512816 - DNA, 628 bp, Homo sapiens
attctttctttcaggtgtgggatgtcctacaagatggcttccttgacagcagaaagaacagaatagtttaactaatctattattttctccagcatttgacttacctccactagagcagagactaggccagtaacttccttagaccacttctacgtgttcacaacaccaaatatctgctggcaaaacttttcatccctcagttctttgcaaaaataaaaatcatacctggaggtgaaatgaaaaacaacaacaamaaaaaagcctacaaagagtcattgtgagaaatgagggttagccagaaaatattgggcaagcatattgtcagttgtatgaactcccctccactagccacacccactctgggaagctgaagcagaagaggtgggatattatctctcagccttcatctgcacactgcattctgccagcacactagaggcttgttataggtaagtatacagagtaactctacaaggcttaaatttttctcaagtctatgctattttgacatttcaaggtattaatctttaatagaaaagataaatcaaaggcaggttacctcggaagtattttatttagcaatattcttaaattacatcttacaactttgatccttctctttaagtct

SEQ ID NO: 512817 - DNA, 550 bp, Homo sapiens
gctgtctgatgttttacattgctaaagttacacaattcagttttcatcctcagtgatatcaaagaaagcaactggatatttaaagtgctgatttaaatagtgatatttatgtctgtgtacagaaattagcatttaaaaatcatatctttctattgaatcataagcttctttattggatttaaaaaaaaaaaaacgtaaactgatttttattgaacataccagagggcatttatatttttgggcctggctttcccagkgagcaaagagaacaagttgaacaccagggtcactccccgtattgacatgtttaaaagagcattaaactaagaaagactattaacaaatgacttggaaggttattagaatttttatcctctataataaaagtcgatcttctcaagtgtttattttgagattcaatttcaaagggttttatataaataatctagaaagccggttcgtttcttgctggaaacattattgttatcactagagggagctggttttacataaaattaatgtatgtaggcctgtatctagaaaaagacag

SEQ ID NO: 512818 - DNA, 618 bp, Homo sapiens
tgtccttttaaactaatgagttttacttttctcatggctaaaatttaaaaatcaaagctataaaacctttttattttatgtatacatgtgtacaggtctatgtttgcatattgtcttcatggtactagtctgagggacccagaggcagacaacagcggaagcttggggcacagtgtaggtgagcatgactaattcctgctgattaggctctcccactttgtggttggaggtcwcactcatatgcatggcatagatgaggtctagggaactcaaaggttaatgacagtgggaggctttggcactatgtaggagagtgaatattcctgccagctatgccttcccgcttcgtgagtgaaggttgcattttcacccatggtcagcatctgcaatggtttattaccagtatggtactaaattgacttataaataaataagcactcataaattaatatgcccaaatgcttttcaggttcacgtgagttgaataactcttttggtaaatacggttgctattaaactaaagtagtttagtattgttattttaataaaacaactacgtcctctgagttatccagaaaatatacatatttaacttcaaagttctcgcttttttcatac

SEQ ID NO: 512819 - DNA, 556 bp, Homo sapiens
ttttccgaactttcagctatcactgaaagtctcatacaaagaaatacaaatatttatgtacaaagaccctatcacggtgttttcaatagtaagaaactataaataatctaaatctctaatgaaaattaataaatagaatagttacataaaatgaagtaaatatgtaaataaaatataatgtaaatactaaaaataaagattttaaattttttatagaaaatrccaaacatacaaaagtatggagaataaacatataaagatctcacatgtagtcatcattcagcttgaacagatatcaactaaacactagcttatttttattattcgcttatccattggcctccccctgcttccaccttgattattttgaaggaaatctcaagcatcgtattacttcaccataaatatgaatgtaaagtttttgaagtatttatgataaaagcagaacattttttataatataacaagagaaaaagcaaattataaaatggcatatgaaatagtatttcaattacttttaatgtgtgtgtgtgtgtgtgtgtgtgtgtgtgtgtgt

SEQ ID NO: 512820 - DNA, 417 bp, Homo sapiens
ttgctcattttcccagtatttctttataagaaaatacaattatatattcttgtttttcttatttatttcttataagtaagctattatctgcataattctccacattttattttttacctaattatatactctgaagaaatttttaaataactacctagcttccactttgtttgaatatctgcacaatatcctattgcgtggaggtgctgtagtttctttaaccagtcacccataggtgggcatttgagttacttattacgtttttctactaaaaagaatgtcacgaagtaaaatttagttatatrtacataatttcataatttagatttgtataacaaattctcggaaatgtgttgtttgtatcaaagtggaatatatatttacattattaggtgttacaattgtctttcctatggt

SEQ ID NO: 512821 - DNA, 557 bp, Homo sapiens
ccagcctgggcaacagagtgggactccatcataaataaataaataaattaattaattaattaattaattcagcacttggttaattgatagctggtacatttacacattaacatgttggtttttgatctttacagctttagtgtttttattatattttaatatttaatttttgcaattaactcaaatactttaaagaggttcattatattattataatactctgaattctaacaggaggtacaaatgctaaaaattaaccctctttgaatactcatacagctatgaatacattattacccaagaagatataaggtaaaaaaataaataggtcagtaaatrtatttcttagtttcaaaaactcattttctacagttggaattcaaccaatggctgtgaatctaaatgaacttcaggtaatcaactctgggggaagcgtctctctctgattgcagtgggaacaagtctcacattaagacttgatgtctttccttttaagtcaacatcaaaatgcacattcatttttaagttttatgtctaacccaggtgaacaaagtcaa

SEQ ID NO: 512822 - DNA, 536 bp, Homo sapiens
ttatgttaaatagcataaattcaatgtcagctttggatttttataggtgaaggggaaggattgttyattatccacatgtgtctgagctttaatgatactgataattcaaaaatatcctggcaattttcaagtacataaccagattgacatgaattaaagttacagatcacttggtgttaacgagtcctgggatggctgattccttgaagaggagggaccatgggaacgtccgactttcaggaaagaagcgaggctgcctggatgtctgtgaccacagcgaaaaggtgagtctgggaaagtagaggtttctctcagaatgcaagaggcacttttgaatctttagacttgtaatgaaatcctcattttgatctcacattagtacccactaggactgatcactagatatgctatttctgccttttgagtacacagtaaaattataattcttggccctctcccacttcttgggttggggtcatgggaccagttcaagatcaagcttttaatggctgatttgagaccctccagagctcttt

SEQ ID NO: 512823 - DNA, 257 bp, Homo sapiens
gaaatatgataattaactgaggtttcaaagtttttactgtatttgaattkgagaatttatatgacatttggtccaaagagttcagtgttggatttttgcctaccaagggatatgaaattgattagtacttaaaattttatatgactagctaagtggaaaagagggattaaatggtgaaaagtaaattatatgtaattattatgatactaatcaaatactattctaaataatttaaataaataatattactctaaagc

SEQ ID NO: 512824 - DNA, 622 bp, Homo sapiens
tctcaaactcctgggctcacgtgatcttcccacctcagcctcccaaagttctaagactacaggcatgcactactgcccagtctctctgctttttttttttttttcaagtgcaagatcttgtctttgagaagagcattcatcagaaaatgttctatggatattaccaagggaacagtgccatggtccaggaagtgaagaagggcatacttsagagaaattatcaagtcctcaaaaactaatttccctattttcaggatatttgatctaaaataaaagacagcttccttccccttattctgaagaaggggcaaggcaacattacatgtggggaagcaacaatgttattcatttatttgttttttaaaacactctgaattatcaactaccatgtgccaggctctatactggacacatgggatatagagataaattagtctcactcatttcatgtccagtgaacatcaatagccaggtgacccacactaacccagagcctttggcttaggacatgaagactgacccttaagcatgttcctgttgccaagcagccactattatgggaacgtatcttcagactgtacccccaagagattcttcctgaagcagttttggaaagatatgc

SEQ ID NO: 512825 - DNA, 608 bp, Homo sapiens
acccttaagaaggttctttgtaattctccccacccttgagaatgtactttgtgagatccacccctgcccaccagagagcaaccccctttgactgtaattttccattaccttcccaaatcctatcaaacggccccacccctatctcccttcgctgactctcttttcggactcagcccgcctgcacccaggtgaaataaacagccatgttgctcacacaaagcctgtttggtggtctcttcacacggacgcgcatgaaagtggaaaaacaagmgcctatcatagggttgatatcagaagaaaatgtaaatctttagcagggtacctgcttggcatatagtaagtgctcattaagtgctagcaatccttataaatgctgtggtatggaaaatgtgggctgctaaagagagtatagaaacttgcctcctcctcagcccaagtataggagagaataggagagaagaacaccaggctggataaaagaatgcgccatgaagaggggaatgagacattttaggtagaagaaagagcaagaacaaagaaatggaggtgggattatgcagccttttgtgggaaaggaaaagcatccgctatgtctgttgagaaacgct

SEQ ID NO: 512826 - DNA, 592 bp, Homo sapiens
attggaggacatatagattcgggtaaaggtatagccaagaactgtctagatcagggagtggttataactttggacattacaaaactggaggaggcttgtagatagccatcatttcatatttattctgaaaatatttaataaggaaaatttatgagcacagcaatactccttcatggggaaaatagaaagtagctccttatatatgtttctgagtatctaagaggtttgggagagggtcattttgcctttaccaaagctataggtgtttcatgtaattgtgacccacaaattgctagagcaggaaggaaactttgagatcaggtaatatggttctactgattttaagtacacagaaatgtagaagcagagaggccacgttctttggtcacatggcaagtctcagcagtgacagaatgcagacctgtcatttctccctttcttgttctttccacacaggtcttgctaatactatctctctcctrtagtttctgagagttatcaatgtagaatgtattaactgagtttcatatttacgcctgagacagacctgcatagatatacaggggtataggtcaccattttatcacaccag

SEQ ID NO: 512827 - DNA, 523 bp, Homo sapiens
gtgcgtcccatggtgagacttcactatcacgtgycactcatgcttgaacttatcaagagatgcctataggccaagccctgctgtatgtaccacttaaatcgatttaaactgcccctcctcctgtctgcactgtcacagccctatgggtggtgggtctgcaccatccctcatcaggacagttgcagaagttgcataactgctttcctagctcagccccttcctgtccactttccacaccatgctgcccaccctcagacatactgaattcaaattttccagtgggtgagacccagccatctgcatttttcaccagcaccccaagtgattctcatataccccaaacttagagaatcactcgtttcaggacagttcaaatagagcatgccctttaaaactcttcccactcaatgcccactgctctcactttaaccatggccagctttcatgcttttttccactctgccccttccctcctatctcccacacatcctttgaagcctctgcaaagctattccaagcccct

SEQ ID NO: 512828 - DNA, 400 bp, Homo sapiens
acatggagtggagaagaatattattttacagcaccctctctgctccaaaattagacagatgacctctgggcataacagagaagtagtctacttgaggcaacttagggactgagctgcctacctgaagtgccctacagtccttgcatctgtgagtygggacaattttccagttcctttcaaagaagagattaacatggtggcggcgggaggtgagatagacttctccacttgtgcttgcacagctgactctcttccagaaggccaccctaatgtcagcattagccttctgcagaggttccaacagccgtggggcaccagcaggcctcccctctgcaggatgctgcatgctagttggctgactactggtgctcatgtggaaaccaccctgtgcccctgccta

SEQ ID NO: 512829 - DNA, 594 bp, Homo sapiens
gctcccagattaactaaactggcaacagggtaatccagcatactccctaaatgtctgcctaaattaagtctgcaatgctcctcaagggccctgagcagatttcagaaaggctccaggagatagctcgggaacattgacaaacaaagtcatgaggcatttgggttataagacagcctttgtttatttgcctaatgtcttgaggagcactggctagggaatcaggatgctgcaattgtggacctggatccaccactcactagattcayttatcatgagattcattcaccactcactagattcaccagtcaccttgcccaatttgttcaaattatctgggcttcaatttcctcatctataaaaggagagcaatcccccctgggctgctttctctatacattgctttgaggagccagttggtagctgtcaatgcatttgtttagctgatgtaatgaatttatggacatgcagagagcagccatacatagcgagagtagctgtccttccctagagtagctgttcttctatagagtagctgtcttcccatagagtagctgttcttccatagagtagctgtccttccacagaaatttggcc

SEQ ID NO: 512830 - DNA, 594 bp, Homo sapiens
gctcccagattaactaaactggcaacagggtaatccagcatactccctaaatgtctgcctaaattaagtctgcaatgctcctcaagggccctgagcagatttcagaaaggctccaggagatagctcgggaacattgacaaacaaagtcatgaggcatttgggttataagacagcctttgtttatttgcctaatgtcttgaggagcactggctagggaatcaggatgctgcaattgtggacctggatccaccactcactagattcacttatcatgagattcattcaccactcactagattcaccagtcaccttgcccaatttgttcaaattatctgggcttcaatttcctcatctataaaaggagagcaatcccccctgggctgctttctctatacattgctttgaggagccagttggtagctgtcaatgcatttgtttagctgatgtaatgaatttatggacatgcagagagcagccatacatagcgagagtagctgtccttccctagagtagctgttcttcyatagagtagctgtcttcccatagagtagctgttcttccatagagtagctgtccttccacagaaatttggcc

SEQ ID NO: 512831 - DNA, 659 bp, Homo sapiens
taacataccctggagctgacactatccatctttttaatacgtctaataatggaatagtcagacatactaaattrtaccattttatgtatttgtgaaactgtagactgatttggctgtgcaagtctttctctcttgtaaattttttttcaacccttatccgtggtgaatttgaatgtggtatccctggaagaaaagctgtgaaagcaaaggacattttttttgcatatgttattaaaatagaaatagcaagaattatttcctttgatgtttctaagcaaaaagaattgatggaaaattatttatggtagatttgataataaaaagaggtcactacagtttagtaatttaatttttggtcttcaaagttagcagccctgaatttgctttttagttctaacactggctattttaaaaaaattttggatagtgcatttaaaacacttcgtgcagtatctggcactgaataactacccaacagatgttacaaatgtgtgcatctgtttatctacgtgtattctcattgttgcagtgaattcttttagcttcatcatcaaatattcatttaacaaccaccgagttcctagcaccaggtcataaattaagattacctctttaggcctattgcagggtaccttacacctacaatcccagcacttttg

SEQ ID NO: 512832 - DNA, 509 bp, Homo sapiens
atagtcagcttaagctgaataatggcagtagcctttaaacagtgtactttgaagtttttaattgcctcttctgtctcatgtctgtttcttcatttgtatcataggacaggactcaccagcatttgaatttgtgatgtctgatttatataacrttgatttaccgtgtagatgacaaggaactattgtcctgtgccaagaaatttttaaggctcatagagtcatttcatttcagagctctctgacgctaataagacaaaactctcactttatagtgtactaactggtaggaagagttcattattgttgttagaggtactattatttagcattctggttttagtgacactttggagaaattttctgggatttttaaagtatttgtcaatcacttatctcagtgaatgaatttgattctctgggatttaccaaatttaaaattggtaaaagtgtaatagtgatcagctacttgtcttttaagtagttttttatatctgaccatagactccacc

SEQ ID NO: 512833 - DNA, 509 bp, Homo sapiens
atagtcagcttaagctgaataatggcagtagcctttaaacagtgtactttgaagtttttaattgcctcttctgtctcatgtctgtttcttcatttgtatcataggacaggactcaccagcatttgaatttgtgatgtctgatttatataacattgatttaccgtgtagatgacaaggaaytattgtcctgtgccaagaaatttttaaggctcatagagtcatttcatttcagagctctctgacgctaataagacaaaactctcactttatagtgtactaactggtaggaagagttcattattgttgttagaggtactattatttagcattctggttttagtgacactttggagaaattttctgggatttttaaagtatttgtcaatcacttatctcagtgaatgaatttgattctctgggatttaccaaatttaaaattggtaaaagtgtaatagtgatcagctacttgtcttttaagtagttttttatatctgaccatagactccacc

SEQ ID NO: 512834 - DNA, 509 bp, Homo sapiens
atagtcagcttaagctgaataatggcagtagcctttaaacagtgtactttgaagtttttaattgcctcttctgtctcatgtctgtttcttcatttgtatcataggacaggactcaccagcatttgaatttgtgatgtctgatttatataacattgatttaccgtgtagatgacaaggaactattgtcctgtgccaagaaatttttaaggctcatagagtcatttcatttcagagctctctgacgctaataagacaaaactctcactttatagtgtactaactggtaggaagagttcattattgttgttagaggtactattatttagcattctggttttagtgacactttggagaaattttctgggatttttaaaktatttgtcaatcacttatctcagtgaatgaatttgattctctgggatttaccaaatttaaaattggtaaaagtgtaatagtgatcagctacttgtcttttaagtagttttttatatctgaccatagactccacc

SEQ ID NO: 512835 - DNA, 509 bp, Homo sapiens
atagtcagcttaagctgaataatggcagtagcctttaaacagtgtactttgaagtttttaattgcctcttctgtctcatgtctgtttcttcatttgtatcataggacaggactcaccagcatttgaatttgtgatgtctgatttatataacattgatttaccgtgtagatgacaaggaactattgtcctgtgccaagaaatttttaaggctcatagagtcatttcatttcagagctctctgacgctaataagacaaaactctcactttatagtgtactaactggtaggaagagttcattattgttgttagaggtactattatttagcattctggttttagtgacactttggagaaattttctgggatttttaaagtayttgtcaatcacttatctcagtgaatgaatttgattctctgggatttaccaaatttaaaattggtaaaagtgtaatagtgatcagctacttgtcttttaagtagttttttatatctgaccatagactccacc

SEQ ID NO: 512836 - DNA, 403 bp, Homo sapiens
cttggacctactccaggcagtatacaacaggaatgtgtgtatggtggcgggggtgtggagggcctacagaaatgcttacaagacttgtcatgacttaagctgttctttagatatttttccgcaaaatctctttataatgcatcttgatatacttggataatataacgcttatgcttttcaagagcaattttaaaaatctatcagttgtttgatgttgatggaatctaatggcccagttttgaaaacattttttttgaagacctaaaaagattatttttattgaattgtatacttgtagagctgagagaaaacttagcaaattttaatttcacctttataaytttatatacttttcaaaagatgcatttggtgacaaaatggaatttgccagaagtattgtaag

SEQ ID NO: 512837 - DNA, 566 bp, Homo sapiens
ggactggaaaaactgtggtctggggagaagccagaacctcaagccagtggtacaggttgattgtggagcagaagggcagcctggcttctgtcgtggaaacagatagcagagaactagtgcattcaacattctacctgtggggcaggaggggctccacaggcaaggtgtcytgtggtgtccccacctacatctacccagcttgcctgtcatgcaaggagcttacacttaaatgccacctttggttaaaccctcaaagaaacaggaaggtagaggactccacagaaaacagttccaagggtaccctttgctcatctctgccaaagaaaccacaaagaccttcctggggcacacagggaccctggtctgtatatgtgacttgggagttatgcaccaattatcattcttttcttaaaacaaccataagacacattttaaatgcttttgggaagcttgtcattcaaaagagttactccagttaactcactttaagcaagaaataattttaagcaacaaataatcttttaccaatttaacagttttataaagttggggttttatgtatcagg

SEQ ID NO: 512838 - DNA, 443 bp, Homo sapiens
cacgggacctgactgcatcagctccaggatccaggagatgtggggaagtgagaaagatcctgtttggcctcgcctgctggaagccacagaagagctggacatgcccgcaaggcctgaagtgcgcgcgcaacctagcaggcggaggcaagcagctcttcgcctcaggccgcccactgaaccctgcccaccgacgtcgcgccctgtaggccctcccaggccctcstgattcgtggagagcgcgcgcgagcctcctggccccacccccgagcccgccctcctgcggcactaccccgcccccccggcttacggggctgcagagtgtggcctgcaagttggaagcgcaggacgcgggcgtccaaaggccccgacgctcccaggctgaggaggcactttgtcgtctctcccacgctctggccgtcgtgctaggcgcgacagtggccagc

SEQ ID NO: 512839 - DNA, 613 bp, Homo sapiens
tgcatggggctggggagggagaactgcagggagtatgggaggggaagctgaggtgggcctgctcaagagaaggtgctgaaccatcccctgtcctgagaggtgccaggcctgcaggcagtggctcagaagctggggaggagagaggcatccagcggttctactcasggagtcccagcatcgccaccctcctttgaaatctccctggttgaacccagttaacatacgctctccatcaaaacaaaacgaaacaaaacaaactagcaaaataggctgtccccagtgcaagtgcaggtgccagaacatttctctcattcccaccccttcctgccagagggtaggtggctggagtgagggtgctggccctactcacacttcctgtgtcacggtgaccctctgagagcagcccagtcagtggggaaggaggaaggggctgggatgctcacagccggcagcccacacctggggagactcttcagcagagcaccttgcggccttactcctgcacgtctcctgcagtttgtaaggtgcattcagaactcactgtgtgcccagccctgagctcccagctaattgccccacccagggcctctgggacctcctggtgcttctgctt

SEQ ID NO: 512840 - DNA, 568 bp, Homo sapiens
ggtgcagcaagccttgttttcggaagttctacaatgaccatgattggttttatgtggacaaatataaaaaagcttcactctccgtagtgatgtcgggtgacggcaggggtctgggtcggttcctggtccacctcgccagctacgtggctaggtgctggggctggtcccacctccttcaccacaaccccccggcaccccaggtccccgattccaggccacagccgcggcggctgggtgctgcgcaggtaccggctcgcgccgggagggggcgctgttccctaacctgctccgagtcagccccgrgcccttaacgccgcccgcgtgcgttcacgctgcaggtgcggagttctcgcggtgggtccgggccgcgtgctcggcgcagagtggggagggcgaagccagccgccctcgggatgggcagagtcggccgtcctcgcagcccgccgcccggggcgtcccgcggccctcacctaccaccccattcgggagggtcaggctgcacgcagttcggtgcccccatggccgaggccccaaacctgctggaggtggaaagaggcgcgcctggatc

SEQ ID NO: 512841 - DNA, 654 bp, Homo sapiens
ctgggctaggtggtcctagctcaggatctcttgtgaggttgccatccagttggtggctggggctacagtcacttgagggggctgcaggatctgctgcccgtgtggctgccttgcaaggctggcaagtttgtactggcagttgacagggagcctcagttcctctccacatggaatcttcccaggactgcttgataacctcmtgacatggcagccggcatcccacagtgagtggcccaagaaagagcaaggcaaaaaggtgcaacgtattttatgacccagcctcagaagtcacgctccatcactgctgcaacgttccaatgcttacacaggtcagccctcttcggtgtgggcgtgtgagtcacagagagccacagtcataagggagaccgtggaggctggctcacacatttcatgaagtgtcttaaggatataccgtaaaagtaaggaaaggtcccagaaagaagatcaaggatagaaaaataaatgatggacaaagaaaactgtaaaaatatagggaaatttaaacaaacattgcttttataaaacaagaatggcaatgtctgatttacgcacagtaaacggtacggcaagcgtggtgggaggaactgactgaattaaagcattttttagggcctttaattgtttcagaagaga

SEQ ID NO: 512842 - DNA, 517 bp, Homo sapiens
gttgcagatgtttgtactgtcaagagcaccagggctggagaaagctgatatttttctcctctaacactgtccagtgtccctgaggctcaaggacttgctaaagtctagagctcagcagcaggccaggaaacaaacataaagggcccctgagtagccaaaaggaacaccactagtgtccatgtactcccaagctccgttgttaccagagttaagccccctaggtcatagctcattgcctccgcgtttacattatacagtgccttttagtgaatctggtgatgcggcytcctagtacattttggattgggcacgaaaaactcataggtgagtgagccaaacatgtggttgacagtaagtgaagagaaacgtatctaagccttcaatgagcccagaggatagagtatcatgcactagtgcaatcatcagtacaaatttgtgctggacagctcccatttgccactccagacctgctctccactcttctccactctgctgtgtcccaggaggctggtatcag

SEQ ID NO: 512843 - DNA, 579 bp, Homo sapiens
tgacctcccaaatggtcctgggtgacaggtcttagggctacacacattttgcagatgaggaaactgccatccagaaggacacatggctggtaagtggaagggcttggccaagcccaccttttgggggtataacacgtgctccaaccaccactcacactacaggggttggcagagcctgatggacttggttgactgtctcttcatctctggatcccaagccccaggcatgatgcctggcacatggtgggcttgcaatcaatatttsctgaataagaactccaaagaccagacgtgcacagacacatagccccgccctccaccagatgcagccttttagagattcaagcttgtgaattacctccccaacatgaggagcaattggtattttatgcaaatgtctgacacctgaatctactcctctgactgcattcaccttctttacccagactgtaagtcagcgataacactgtctcatagtaagggtcctcagacactcacaggcacctcagccttaaggcagtgagctctggatggggattcagagacccagttcaaacctaggtttcaacatgagtgatc

SEQ ID NO: 512844 - DNA, 629 bp, Homo sapiens
ctgcacagagtagagacaagctattcccaagccctgccgaaatttcagctttgtgaacaaaataaatgagtattggcatttaagccactaaattttacaacagttagttacacagaaacagcgagaacaatgaagaaacaaaactcagctaaaataggtcagagaaggataaattagcaatacttatgaaaagctctcaaagatatacatgcccttatacccaactattccacttttgggaattgaatcctaaagaataaattaaagatatgcatccaagatttccctacaaaagtatacttcaaaasagcaaaaagctgaaaaacaacctaaatgttcaatagagaattgagtaatttaattatggtacacctaattctgttggtctaaaacctgaccatcagaatcacttgaggatctttctaaagaaaaggaaaatgaatagtccctcctcgagttactttattgatgaatattaagactgtttccagtttggggctattacagtcttgtaatgtattatacttctattcttaagtactgttgcttttattctcattcctagaagtgggctagctgcatcaaaggtaggcacaacttcaattgtaataattttccactaaatctat

SEQ ID NO: 512845 - DNA, 433 bp, Homo sapiens
tatgatcactatgcataataaaagatttttccttacagtaatacaaataccacatataacgtccaaattagcagaagaaaaatagtgaggtaagaaaaaaagaaataatagaattaatccaaaataaagcaaagaaaaactacataactctatgcatctgttctcatgctgctaataaagacatacccaagactgggtaatttataaaggaaagatgtttaattgattcacagtttagcatggctgggcaggcctcaggaaacttaaaatcatggcagaaggagaagcaagcatgtcttcttcacatcatggtaggaaagagaatgagtgcaaagtaaatggggaaaakcctcttataaaaccgtcagatcttgtgagaactcactcactatcacgagagcaggatcaaggaaactgccccagtgattaaatt

SEQ ID NO: 512846 - DNA, 482 bp, Homo sapiens
ttctactgctgttgggtgctcagaagtactcatactggcctctgccctggctaatctgtgtgctccccatcccgtgtgrggttgagagctgagggctgaataaatgagccaaccttttcacaagtctcttgaaggagtcaagagaactattctgtttcaattttattcccaacttgagactgaattacactaatacattttttgaggctacttttcatcccacttgggataaatgactgactacaaagtctttgtatactgaagttggattcagagactgctgcttctgtgttttaggaacacttttaacctacttgtttgcttctggaaagaactcagtgtggtgaatgggtgagtggtccccattgtgagacccatgaaagtatttatgcaattcaatggacctgtatttaataagcatattcataaactagtaaacagtaatgaatagaaagcaattagggcagccctggactcctata

SEQ ID NO: 512847 - DNA, 643 bp, Homo sapiens
tttatttataagatatgagaagtaacacctgactcaaattgggatatcaaatgagatragacatgtggatgcttttgaaatgcatgtgcgatcaagagtgcaatagattataaaaaagataaaaaagaatagaagaaggaaaagaagaaaaagaaattctaggaaaacgactgttctcaatgtcatggtctctaatttcttcataatatatcatttttccctggtcatcaagaccatgaaattagccaatcatagttttcagggaattttatgaattgtatttttagagaagtcccaaaggtttgagattcagtggcttctatggtgtaagtttaaatgtcttgacattaagaaaaaagccaaggtggttcagactgcactctgtagaaaataaaatttttagtaaatagaaaaaaaaaatcattccttaaataattaagaatgtctgcaataaattacacaatgaatcccaagtcattaaaatgagtttcgataatccaattgcattttatcatcaaggaatgtcaatattgtacaatcagaatatttaatcagtagaaggaacaaaattaccctaaataatctcattagtgcctttgaagtagtcaataaagaagaagctcttctgtttaacatttatcca

SEQ ID NO: 512848 - DNA, 530 bp, Homo sapiens
tatctttgtgtcatcacccaccaaagcttcttaacatctttgcaagttcaaatgttatttaacccttaaaactgaggttaaatgtgttcattcattcaacaaatattaattgagcaaggcattttatattagagacttagaagaaaaaaaaagacatgaaactttcttccaaaacaaaagggcagacaatttaatttgaagsagacatggagagaatttgttagtataagaagctatgtctctagagggtagccagggtaaggctaggcagacaacatatgtttgagtaccagtttccaaaggaaaaagaaggaaacggttcgatttctcaccgtgacaatctattgtcatcagaacacatcaagtacattcagaggtaatttaaacagacccattaaaacataagctccagaatcataaagaactagtttcaaattcaagtttaaaatactggtcattttgttgagtcttgatagtttttataatttaattaagcttccgtatattaatttataaaatgagattacaag

SEQ ID NO: 512849 - DNA, 530 bp, Homo sapiens
tatctttgtgtcatcacccaccaaagcttcttaacatctttgcaagttcaaatgttatttaacccttaaaactgaggttaaatgtgttcattcattcaacaaatattaattgagcaaggcattttatattagagacttagaagaaaaaaaaagacatgaaactttcttccaaaacaaaagggcagacaatttaatttgaaggagacatggagagaatttgttagtataagaagctatgtctctagagggyagccagggtaaggctaggcagacaacatatgtttgagtaccagtttccaaaggaaaaagaaggaaacggttcgatttctcaccgtgacaatctattgtcatcagaacacatcaagtacattcagaggtaatttaaacagacccattaaaacataagctccagaatcataaagaactagtttcaaattcaagtttaaaatactggtcattttgttgagtcttgatagtttttataatttaattaagcttccgtatattaatttataaaatgagattacaag

SEQ ID NO: 512850 - DNA, 518 bp, Homo sapiens
tgctagaatcaatatgaatgatcatatgctcaagagactcatgtaattactaagcattaaatgaatatgtaactttcatcaatatacattgtatttctttagcaacaaggatgttcttgttaaaatttacattcaaaaattgctatgcttgccatttggcagatccacaaagagaagtataaaatcagagacccayacataaggtataggtatcagtcacctaatggtatggcagcagtcaggtttgggaatacagacatctcactgagtttcagaaaggtgaatgtaactttcctccaatagctttatttatgccaaagacatagataaatatactgtatcacttaacatcctcatttaaaggtcctccccctgttgccatgaagatttgctgagcaaagagggaataacaatctgtgcctgtcaaaaacaaaatattcctgggaaaaataatccatttgaaaatcttatcctaaattttatcataaaattctttgcttgtttagttttcctcttct

SEQ ID NO: 512851 - DNA, 518 bp, Homo sapiens
tgctagaatcaatatgaatgatcatatgctcaagagactcatgtaattactaagcattaaatgaatatgtaactttcatcaatatacattgtatttctttagcaacaaggatgttcttgttaaaatttacattcaaaaattgctatgcttgccatttggcagatccacaaagagaagtataaaatcagagacccacacataaggtataggtatcagtcacctaatggtatggcagcagtcaggtttgggaatacagacatctcactgagtttcagaaaggtgaatgtaactttcctccartagctttatttatgccaaagacatagataaatatactgtatcacttaacatcctcatttaaaggtcctccccctgttgccatgaagatttgctgagcaaagagggaataacaatctgtgcctgtcaaaaacaaaatattcctgggaaaaataatccatttgaaaatcttatcctaaattttatcataaaattctttgcttgtttagttttcctcttct

SEQ ID NO: 512852 - DNA, 563 bp, Homo sapiens
acaatgaagaaaaacacattgaaaattaaaatgtaaataaagctggaaaaagatttgtaatatttatattgagcaatgggctatttttaatgtaaagaaaatggttggctgggcacgctggttcatgcctgtaatcccagcaatttgagaggccgaggtgggtggatcacctgaggtcactggttcgagaccagcctggccaacatggtgaaaccccgtctctaccaaaaatacaaaaattagctgggtgtggtggcgcatgcttgtagtcccagctactcgggaggctgaggcaggagaatygcttgaacctgggaggcagaggttgcagtgagccaagatcatgccattgtactctagcctgggcaacacagcaaaactccatctcaaaaaaaaaaaaaggaaatgattagagataaataagaaaaaaaaataacgattttaattttaaaaatagaaaaagaacacgatgatccatatgactggctaagggttggatgagaccctttttcatcagttgatctatccagctctgagcatggaagggtcttgcttggcaagta

SEQ ID NO: 512853 - DNA, 649 bp, Homo sapiens
aaaatatttaaagatcagttcatttctctatattgaaaactgtcagaaaataaaatttaacaaatgcttttataataacatcacaacgtcatatacctaggaataaatcttaactgaagttgtgttaggcctctatacagaaagccacaaacattaagagaaattaaagaaaacttaaacctacactgtgtgttataaaatatgaatggattataacactccatcttatatcaattatcctcaaaatgatgtgattaaaactcttataggcttaaatcttttgtattttggcaagctgattctaaagtgtgtaaggaaattcagacgaattaagatagccaagaccatcttaaagaagaaatgcaagatgaaaagacttatttatcagacaccaaaacttatcataaagctacagcaattaaaatagtgtggtattgtcacaygaataggcaaatatatcaatgtatattagaaacaggccagagaaaccagaaatcatctgctgcctatgagaacagctgacactgcaaaatacagcttctcagatctggctggactccaccttgcactggagtattctgattgattaggggttctggggaccaggagcagctgtgttgggatatgctacacctacttctgctcagtt

SEQ ID NO: 512854 - DNA, 555 bp, Homo sapiens
cagtggatctcaaactgtgccatgacttgaaatcacctgagagagttgatagaagagtttgttggtcccctgctcccagtttcagattcagtagacctggggaaaggcctgctaattcacctttctaaccagcttccaggtgatgctgatgctggtggagaacccctggcccagaggaaagtatttctaaggtgagcaggacaagtagtcacttggtttttgagggggccaaaattttgaattaaaaacatgaaactatgatagaattatttcaagcacatatcagctagtgtgcgacagagattttggtgccataccaatatcctagccacactctgacaatcatttactactttttaatgtgagaccagcccttggttttccagttagactttcttttcctaaagggcaaatttccatcttaaacatttttttaattccccatagttatttgcacaggtaraggatcagtagagatatgcttctgaactgaatttataaatcaaacataccctgaaaagagagaatccatagaaagttttggggttgtagcca

SEQ ID NO: 512855 - DNA, 661 bp, Homo sapiens
tgcagttacttgtattcatctgtctcttcagatttcgaggtggtggtctgtcttgtgagctcaagtctctggtgattctaataaatgtctgattttttaagtcttctcagatttatttcttgtttttaggatgggagtggtgacttccaagctttttacatgtgaaaggtaaaccaaagtcaacgtgaatctcctcttcatgtctacaactgagcaacaggtttttcaaaccttgtagctcaacccctactatctgacagtctttcagacacagctaagagtctatatatctttctgtttcacaacctcgctctgatactctctgtgtgtttcatcattctatcttttagcatggttaggatgatcmtcacctagaatggagaaacctccagagatttgaatctgagaaaactaagtttccttgattcttcagtgttttttctgactactcaatagcagcaatgtaatttttcgcttctctacagtctgagaaacatcacaatataatccaagaccatcatgatgagatctggtggctgacatgaggaaagttgtgctctgttttctaatgcttcagctactcagctcttcctgtctctcatccctacttaaaacctacttatagggactatctgagatcagtgaacttgcaccagccaca

SEQ ID NO: 512856 - DNA, 563 bp, Homo sapiens
gacatttgtaagttgtgtctttttaaaaatgacagttttgatttaggatgtgtgtccagaagaactgaacactgaaaaaaaaatctaaatctccttgccttatggttattttgcatgtttggaaagtaccaaataagtttctcccactgcattgtaagattctcaaagacaaaacagggtatttgtcatttctaccttctgatatactatgtacctattacacatagaataacatattcaaaagcagatcttcataaaataaaatattttgtacaaaatctctcatttcccaactcactcaaaacttgagaccaaggtgayagagttattggctggagttccaaatagatatccagggccatagaatattttgtgcacactcttaaaatagcacagaatggataagaaatcagtagtccattagcaccttctccttagtgcactcctcctgcgagggaaagcacacctcaggcatgtgaatactggggatccaggaacactaaggcatccctgtgcttgctggtatcttagaattttatctccattacaggcaattcacagca

SEQ ID NO: 512857 - DNA, 611 bp, Homo sapiens
ctgaaactaactttgaaatagggcacagtattcacagatactcacataaactaagcctcttttgctctatttcaatagttttgaaccttttctatataatagaatcagctaagctaaataatactgatgccccgttttcactccactagtgactctggggatggaactaaagcatcagtgttttatattttttgtagacatgaggtctctccttgtggcccaggtcgttcctgaactccrtgcctcaaaggatcctcccacctgggcctcccaaagtgctgggattacaggcatgagcagtatttttttaaaaaatattcccaggtatttctaatatgcactcaggttatgtccctttgttctattcaaagccaagcacacaggtctggcttgtttaaaacattctaagggtagtcatgtgagaaagtagccaaagaattaaaaaaagatcaatttcctatcttccagaatgttacaaattttttactgtcacggatattattttctgccttctgacttattcttaaaaatgtaatttgaaggctccttgaaatttgacttaatatttaagagtaataatgggaaaaggatatggaaatgtaagatagagt

SEQ ID NO: 512858 - DNA, 627 bp, Homo sapiens
accacacccctacagactttacatttatttttcggagggcaacattaagagattaccttggaggctttatctgtataataagacaaccttttggtccttgtgcttctcttcccattgaatgtctgcctctcacctcctcctcccagatccattcatcctccccatccccatgaaaaagggtattggtatataggcatctgttctgctctggattattgaatagttattctgtgattctctcctgctatgtacattaaaataaaattttgtaatttttctcctattaatctgccttttttcagttgattttcagtggactttcagaggacaaaggggaagttttcccttggtccctacactaccttgagcctatagaggaagaaagtgatcagacatgctatgacttgccacagggtaaaattaaatcagtgaagtcattaacatatcctaagacaacacaacctatgactatattttcttgtaacaawtaaattttgataggtcaggtgcccattaaaaatatcatttttcctttttccaattatttctgaattttccagtggatggagtttgtatattggtgtttatattttcttcagtcacttagagtgaagatgatgcttccac

SEQ ID NO: 512859 - DNA, 608 bp, Homo sapiens
tggggattgaaggactgtgcgtacaaaagaaaaaagcacagtgcctggaatacagaaaccagtcaacaaaagcatttcctttcccttgacctgttcagaactttttttttcttttttcttttttttttttttttgagatggagtctctctttctcacccaggctggagtgtagtggcgtgatctcagctcactgcaacctccgcctctggtgttcaagtgattctcctgcctcagcgtcctgagtagctgggattacaggcacccgccaccaagccaggctaattttgtatttttagtaragatagggtttcaccgttttggccaggctggtctcgaactcctgactgcaggtgatctgcctgcctcagcctcccaaagtgctgggattacaggcgtgagccaccgtgcccggccgaacttttctttgcctaataccaatgcattgtaaacgtatgggaaaaaagattaattgggttgcaaggagacttgagtgctagtcttgcctttaccacataatgagctgggtggtctggggtggataattttggtttgccattgttgctttctctttgaaatgaagaggatagccaggaactccaagattcct

SEQ ID NO: 512860 - DNA, 609 bp, Homo sapiens
gtgtgaagaaaaaaagaaaatggttgatgaatttccactttccacagagtaaagaaatatttttatgttatttgtttccagcctgagcggggggcttttcatgcatgaccaaggaactctcctcccacaggtggggatacactgccacctgctggtcctctgcttctttacacaaaggaacaccttcccaaaccaaagcaatggtgactttctcggacagcatacttagatatatcagaaaatattgatagttactaacctattaattgtgaatgtctgattaaatgttgagggtcttgtagagttaaatttcaagataattcctctgtgtatactcaagctcacgcaactaaaagagatcttgactaaaattggcagccaagattcttaaggcttccttcagcaattcaawaattcacttacgtgtacaaggaatctttcaacatgtggaagtattttcaatacattatatcatgtggggttgttaaaaaagctttatacttggaacttactacttagtatttgtatatatgccacatgaaaataataaaactgcattcttgttcaacacttttggcattggtattctcagtgattcagattttccct

SEQ ID NO: 512861 - DNA, 469 bp, Homo sapiens
tgaatcaagtgccactcaattcctaaatcagtcctctccaatttcatttaaatctggttcaatcccatctcatttgtgtctcatatgcctcctatttgcctaatcttgcactatagcctgtggggaaaatggcacacatgtgaaaggtgatttctgctytcaggtaccctgagcacaaacagagagtcaggaagcaaaggggccaggccagctctgtgaccagacctcagactactctctaccatgcagcagcctgcaggcccactgaccattgtccaagcttaacctcacctgagaagttttgtccctgcattccatgacctggaaaacccttcccccaaaattgtgcttgctaattccttctcaacccagaagtcacctcctcagcaaaccttcctttaaatgtttaatataatttgccctcaccccaccctctgtttactgtgttttgctgtcttattttctttac

SEQ ID NO: 512862 - DNA, 181 bp, Homo sapiens
gtaagcagagatgcaaaacctcttccacttcttttccatgaagcacaggtaattcatttacatttgactatattctaatagctstaaattcatccagctaagaaaatgagatgaccagaccatgccccctttactttggtgtctgagcatgatttgctgaaagctgcagtattagacaaaa

SEQ ID NO: 512863 - DNA, 181 bp, Homo sapiens
gtaagcagagatgcaaaacctcttccacttcttttccatgaagcacaggtaattcatttacatttgactatattctaatagctgtaaattcatccagctaagaaaatgagatgamcagaccatgccccctttactttggtgtctgagcatgatttgctgaaagctgcagtattagacaaaa

SEQ ID NO: 512864 - DNA, 580 bp, Homo sapiens
aattttttcacactaatttttttctatgtagaagaatttaaagattatgaatcatacaaatttaagtataaatgcaaattacataggatggatactgtttgtgaggccttgtgagtgtgatatgcaygtttgtgtgtttggtaggatgtacacaaaatacacaaagtacacaaagtgtgcatgtgtatttgtgtacacaaagatattaacagtaattatttctgggtattgagattactggtaatatttgctttctattaaaaaataagatataattagttatttgatttttaatttctctttactactaacatctcttaaacatatcaaaagttgaattgcaacttcaaaaatatgatttgtatattttctttaataaacacacaatgatcaatgttttattaagtatagtccctatatacctaaatatttattaaatggatgaaaagagttaaaagaaaaattagtaacaaaaaactttaaaccgccagtaatacccaaaggcttgaaagaacatctaattttactgttgctcaatataaaaagatttttttgttatttaactgaaagacaacaggca

SEQ ID NO: 512865 - DNA, 601 bp, Homo sapiens
aggaatgataattggaaagaacwtaagaattttgtaccatctgtttagtttgagtttgttgatttttttttatcatgtgcatttattatttattgtaaaagtcagagtcctgtcatgaagtgaaggcatattcaaactgagtaaacaatggagcatttaattaagggattatttattataattttggtttctccatctctacaaacagtagatagtgttgtatcctggcttagtaacagtaggggccattacacttcctaggtctgaaggatgggagggagtggtcaccagaactgggaatattatataaggtacatggatagaacagcctgacaagaaggtggcatgtgcaagagaaatacagccaatctatagtgacgtggaagagaggaaagacaccaatggaataattaccctgactccattctcctttcactcgtcatattttgcaggttcctcgcatgactgacagcttagaagccagaggtcaagggagcctatcgatcaatgcactccacgcaaatatgtcccaggagcaggatagaacaaggtgtaaaagggtgggactctatctagaggggcaaaatgaagatatcgaaca

SEQ ID NO: 512866 - DNA, 601 bp, Homo sapiens
aggaatgataattggaaagaacataagaattttgtaccatctgtttagtttgagtttgttgatttttttttatcatgtgcatttattatttattgtaaaagtcagagtcctgtcatgaagtgaaggcatattcaaactgagtaaacaatggagcatttaattaagggattatttattataattttggtttctccatctctacaaacagtagatagtgttgtatcctggcttagtaacagtaggggccattacacttcctaggtctgaaggatgggagggagtggtcaccagaactgggaatattatataaggtacatggatagaacagcctgacaagaaggtggcatgtgcaagagaaatacagccaatctatagtgacgtggaagagaggaaagacaccaatggaataattaccctgactccattctcctttcactcgtcatattttgcaggttcctcgcatgactgacagcttagaagccagaggtcaagggagcctatcgatcaatrcactccacgcaaatatgtcccaggagcaggatagaacaaggtgtaaaagggtgggactctatctagaggggcaaaatgaagatatcgaaca

SEQ ID NO: 512867 - DNA, 658 bp, Homo sapiens
ctggggccgcctgtcagttatgcttccacttggaagagctgagtggcacatttccatgcctgtcacagagactttgttcaagctccttctctgtgctgtgccagtgatgagattgccacctttccactggctttctgcctggcatagcttttagcaaatcttggcagcatcattcctttcaaatgctacttattctccctagcaaagtggaagtccaaggaggctgtcttgatgtcctggggttgcttttgtgtctttaccaccataatactgcacctttcatgatgctgtcggagaaggaaggttagagtagtggctaagagtttttgatttcaagtaaagaagccctaggttcaagccctaactcttccatgtacaagctactgtgaccttgttcaagtgatgtcacctgtctaamcttcataatctttgtggccaaaatgggtcataaaacctcttagagttgtaaggatgaagtgaatacatgtattagcacctcatgaagaataaacattcaataaatattacctattattgtttcctaatgctgctgctttactcaggatgatagattctaaactggtctttagttctttctttccacatttttacttgtactttatctattagaagtcccaacctctagaagcaattacct

SEQ ID NO: 512868 - DNA, 548 bp, Homo sapiens
atcagaactgggtaacaagtgaacccttaatctaataagaatgagaacccatgtgttatttagaagtgttgtttaatctccaaagaattagggattttccagctatctttctgttattgatttctagtttaattccactgcggtctgagagtagacgttgtatgatttctattcttttaaaytttccggtgttttttatgacccagaatgtggtctatgttggtgaatatcccatgtgaatctatgaataatgtgtattctcctattgttgcataaagttgtctgtagatgtccatcatgtccagttgatgaatggtgttgttgaatttcactgtctttattaattttgtgtctgttggatctgttcttttctaataggagtgtattgaagtctccagctataatagtgtatttatatatttatcttcacagatctattagttttctttcacatattttaatactctgttgttaggcacatacatgttaagaattattatatattcttggagaattaacccctttataattacgtagtgctctttttt

SEQ ID NO: 512869 - DNA, 548 bp, Homo sapiens
atcagaactgggtaacaagtgaacccttaatctaataagaatgagaacccatgtgttatttagaagtgttgtttaatctccaaagaattagggattttccagctatctttctgttattgatttctagtttaattccactgcggtctgagagtagacgttgtatgatttctattcttttaaattttccggtgttttttatgacccagaatgtggtctatgttggtgaatatcccatgtgaatctatgaataatgtgyattctcctattgttgcataaagttgtctgtagatgtccatcatgtccagttgatgaatggtgttgttgaatttcactgtctttattaattttgtgtctgttggatctgttcttttctaataggagtgtattgaagtctccagctataatagtgtatttatatatttatcttcacagatctattagttttctttcacatattttaatactctgttgttaggcacatacatgttaagaattattatatattcttggagaattaacccctttataattacgtagtgctctttttt

SEQ ID NO: 512870 - DNA, 548 bp, Homo sapiens
atcagaactgggtaacaagtgaacccttaatctaataagaatgagaacccatgtgttatttagaagtgttgtttaatctccaaagaattagggattttccagctatctttctgttattgatttctagtttaattccactgcggtctgagagtagacgttgtatgatttctattcttttaaattttccggtgttttttatgacccagaatgtggtctatgttggtgaatatcccatgtgaatctatgaataatgtgtattctcctattgttgcataaagttgtctgtagatgyccatcatgtccagttgatgaatggtgttgttgaatttcactgtctttattaattttgtgtctgttggatctgttcttttctaataggagtgtattgaagtctccagctataatagtgtatttatatatttatcttcacagatctattagttttctttcacatattttaatactctgttgttaggcacatacatgttaagaattattatatattcttggagaattaacccctttataattacgtagtgctctttttt

SEQ ID NO: 512871 - DNA, 653 bp, Homo sapiens
ggctgtgttaaaatttcagacttgcattgtgtaaagctcacacttttctgcaggatggcagacagattggaggggccagaatggatgcaaggagaccaattaggaggtgactgtagtctcccagggaaaagatgatgatgggtagatggagagatggagatggatctgaagggtgaggaagaaatgcagagagggtgtgaagaatgacttcgttggacttgctcagttatgtatggggtgcctggtcttaaagatgggaactactgagaaccacttctctgtgttgcccagcccatctttgaattaacaacgaaatatcttcctgtgttaagtagaaatatttcatttcctataagttccatcactaggagtacagatagatcgattttaatatctctcccacaagataaatcctcaatcattgaaaaataactctcatatatccctggaggcatctcttttcctggtcagtattttagctctttgaccatttttcatatggaatggtttcaagcttccttattgtcctggctgctccccctgaatgactgccattttgyctatatccttctttatgtttaaagagtctaatttatttatttttttagtgaaagtacagagacttgttgcaaagtgaaaagtacacactcaag

SEQ ID NO: 512872 - DNA, 473 bp, Homo sapiens
tggcagggaaggtcttcctggtaaaagggatctggtcacctcaatcctatctcttttgcttgcaacacttatcccagagaaaatcmtgaagttccaatacccataccaacatttctctgtcattttacagcatatacatcatgaccactttggtatctcttttgatacttgagactcagtactgtaattactcccattttttgaaagacgattttttagagcagttttaggttcacagcaaaattgaacagaaggtacagagatttcccatatactttcatcctcacgtatgtgtagcctcctcctttgtcaacatctctcaccagagtgttacatttgttacaattggtgaacctacattaccaaatcctaatcccccaaagtccatagtttacattagggttcactcttagatgtggtacattgtatacgtttgggcaaagttataatgacatgtatccaccattatacag

SEQ ID NO: 512873 - DNA, 473 bp, Homo sapiens
tggcagggaaggtcttcctggtaaaagggatctggtcacctcaatcctatctcttttgcttgcaacacttatcccagagaaaatcatgaagttccaatacccataccaacatttctctgtcattttacagcatatacatcatgaccacttyggtatctcttttgatacttgagactcagtactgtaattactcccattttttgaaagacgattttttagagcagttttaggttcacagcaaaattgaacagaaggtacagagatttcccatatactttcatcctcacgtatgtgtagcctcctcctttgtcaacatctctcaccagagtgttacatttgttacaattggtgaacctacattaccaaatcctaatcccccaaagtccatagtttacattagggttcactcttagatgtggtacattgtatacgtttgggcaaagttataatgacatgtatccaccattatacag

SEQ ID NO: 512874 - DNA, 553 bp, Homo sapiens
ttctatattctaaaagagattgtagagaattggtatgatttctaccttaaatgtttggtaaaattcacgagtgttttctcttakgcctggtgctttctgttttggaaagttattatttattaattcaatttctttaatatatatacaggcctattcaggcctattaaatacatatataacattcaaatatatcaaatagatattcaaatattcatatctatttcttcttgtgtgagttgtggcagattatatctttcagggaattagctatttcatctaggttatcaaatttgtggtcataagagttgttcatattatattccttggtatccttgtaatgtctataggctctggaattatgtcttctcttttatttttaatattgtgtcctctttttcataattaacatggctagccacctatcaatattattgatctttcaaagaaccaactttttcattgattttctctattggtcttgggacttctttttttatttttcatctacctgggttaagtacttaattcaatattccatattttagtaaatgtg

SEQ ID NO: 512875 - DNA, 652 bp, Homo sapiens
ttattatctaccaagataaaataagaaatctcaactttataaaccttgaaggttttacaggcatattcatatgtagtaataattttagggcactgttttatsaacatttggagagcagaataaacaagaaagctacttatattatgaaacttttgatgattacattgcacagttgatcgagaatttactatgtgttatgctctgttaaacaatgcagatacatgaattaataagtaaatttttaacatgttaaccatcaatcaagacctgtaattgggctttaagttatatcttcagtagcaaaaacgtaggaaaacaattcttttgagaagtgtccagaaatgaactcttattagactagagaggggatttggtactcacagtaagagtttgcctatctatagtttattgtcaatgattgctgcttgaaatgatagttcagagtcacattgtggctaaatgatctaatcacctcaatatgttctgcagacatcatcatgttccagtgtcgtgttacaataatagattaacactgttttgcaacctaatgaatatactgatttatcagaaatgcattaatttatgttctgtgttgtaccagtggtatttagccttttatgagatctggatctctttgagaagctgattaaaa

SEQ ID NO: 512876 - DNA, 592 bp, Homo sapiens
gttatttcattcaatcttcaaaacaactctagaaggcaggttttcttctcccctgttctatagatgaagaagtggaggctcagagaggttaagtgacatgcccaaggtcacacagctagaaaggcatggagccagattccaatgcaggtctttctsatgctaccttctcccagtggcagaggcctgcttcctcatgggcaaacgcggaaagacacacccttaagcaggtctccctgttcctgcaaggctggaagccatgcaggcactcagatggtttcctctctcttccccaggcctggcgtaaaggcgtgcagggaggcctagctctgtctcccagacttagagatttccccaagaaatgtgtggttcaaaccagggacgccaaggagttcaaaccaggagacgccagggccacaagtcttgggcatgtggcctccctagaggcatgttttccttcttcgatctagactccatattttccacaggaacaaaccaggaaattcctgcaggaaatagtttttagaaggaaaacagatttttcacttttttacagccccacccagctttcatcaaggacatgcatgtaatacag

SEQ ID NO: 512877 - DNA, 378 bp, Homo sapiens
gccctggtcaggactgtcctccagtttgcccgggactagggctacagtgaagttgtcctggacaccagcaacatccagctctctgccatgggcctctaccagagcttgggcttcaagaagacgggccagtccttcttccacgtgtgggccaggctggtggatcttcatacagttcatttcatctatcacctcccttctgctcargcagggcgtctatgatttctttccttctgtattggtcagaatagaatccattcggctgtagcagcaagcaatccccaacctctgactgcaatgacctttctgtgcaataaaagcttattgtccattaacatctgagtcccatgcgattgcctgtggggtagcttctgggtttct

SEQ ID NO: 512878 - DNA, 447 bp, Homo sapiens
ctgctgacactgagaagcctggttgcacaaggtgttatctcagactgaggaaacacagacttttcctctcaatccccctgaactcccccttcctcactctctagctgcataaaaacattctgctgctgcttctttgttgaactgaagttgagagatcttgctctcctgccttcttgctttggccaaatcgaatacaactttctctatctccaagcacccatgtgtcagtgtttgggatcagctccacgtcgggtacaagagcatgaatttgggcctccccaacatctgcagtgcaaaatatttaacaacgggtgtggcacagcctctgaccaacagccagaacacacacaagccacacacagccatgcctgtcaagccgaatgtcaaccttgctcatggctgaaatgaccccmggacacaggaagtgcatgacacacaactgttgac

SEQ ID NO: 512879 - DNA, 612 bp, Homo sapiens
tagcagcaagcaatccccaacctttcactgcaatgacctttcaatgcaataaaagcttattgtccattcacatctgagtcccatgtgattgcttgtggggtagcttctgggtttctgcttcattcagtcttyttgattcccatctgtttcatttttctagtgccagcataatgttgcataagaacaaccaccaaatgaaacaaatatttatttagttcatgagtctgaagtcagcaattttgcctgagcttggctgggcagttcctctggtgtcagactgcattgtacaaatgcagtgggattggctgaaagactaggtcaatggtgctgtttcgttttcccacaggctacctcaggcatggtttcaaggaaattgcagaggagcaaaaacaaaagcagaaacaaacaaatgtgttttcaaacccctgcatgtgttgcatcttccccaaactcaaggagaggaacctgtctctgcagtgagaagggctgcaaagtcacatagcaaaagggtggaatgcagcctcgggagaagaattggggccagagacacaaccaatccactctaactccagggtctctgcagagggaagaaggtggcctcagaggggagtg

SEQ ID NO: 512880 - DNA, 612 bp, Homo sapiens
tagcagcaagcaatccccaacctttcactgcaatgacctttcaatgcaataaaagcttattgtccattcacatctgagtcccatgtgattgcttgtggggtagcttctgggtttctgcttcattcagtctttttgattcccatctgtttcatttttctagtgccagcataatgttgcataagaacaaccaccaaatgaaacaaatatttatttagttcatgagtctgaagtcagcaattttgcctgagcttggctgggcagttcctctggtgtcagactgcattgtacaaatgcagtgggattggctgaaagactaggtcaatggtgctgtttcgttttcccacaggctacctcaggcatggtttcaaggaaattgcagaggagcaaaaacaaaagcagaaacaaacaaatgtgttttcaaacccctgcatgtgttgcatcttccccaaactcaaggagaggaacctgtctctgcagtgagaagggctgcaaagtcacatagcaaaagggtggaatgcagcctcgggagaagaaytggggccagagacacaaccaatccactctaactccagggtctctgcagagggaagaaggtggcctcagaggggagtg

SEQ ID NO: 512881 - DNA, 612 bp, Homo sapiens
tagcagcaagcaatccccaacctttcactgcaatgacctttcaatgcaataaaagcttattgtccattcacatctgagtcccatgtgattgcttgtggggtagcttctgggtttctgcttcattcagtctttttgattcccatctgtttcatttttctagtgccagcataatgttgcataagaacaaccaccaaatgaaacaaatatttatttagttcatgagtctgaagtcagcaattttgcctgagcttggctgggcagttcctctggtgtcagactgcattgtacaaatgcagtgggattggctgaaagactaggtcaatggtgctgtttcgttttcccacaggctacctcaggcatggtttcaaggaaattgcagaggagcaaaaacaaaagcagaaacaaacaaatgtgttttcaaacccctgcatgtgttgcatcttccccaaactcaaggagaggaacctgtctctgcagtgagaagggctgcaaagtcacatagcaaaagggtggaatgcagcctcgggagaagaattggggccagagacacaaycaatccactctaactccagggtctctgcagagggaagaaggtggcctcagaggggagtg

SEQ ID NO: 512882 - DNA, 612 bp, Homo sapiens
tagcagcaagcaatccccaacctttcactgcaatgacctttcaatgcaataaaagcttattgtccattcacatctgagtcccatgtgattgcttgtggggtagcttctgggtttctgcttcattcagtctttttgattcccatctgtttcatttttctagtgccagcataatgttgcataagaacaaccaccaaatgaaacaaatatttatttagttcatgagtctgaagtcagcaattttgcctgagcttggctgggcagttcctctggtgtcagactgcattgtacaaatgcagtgggattggctgaaagactaggtcaatggtgctgtttcgttttcccacaggctacctcaggcatggtttcaaggaaattgcagaggagcaaaaacaaaagcagaaacaaacaaatgtgttttcaaacccctgcatgtgttgcatcttccccaaactcaaggagaggaacctgtctctgcagtgagaagggctgcaaagtcacatagcaaaagggtggaatgcagcctcgggagaagaattggggccagagacacaaccaatccmctctaactccagggtctctgcagagggaagaaggtggcctcagaggggagtg

SEQ ID NO: 512883 - DNA, 568 bp, Homo sapiens
aaaggcaggagtgagccagaccaaatagcaagatctgagccaacgaagaggcagaatgaaatatgcagattatccacagacccaaaataggtccttgggagttgaaaaacagggctacctagttgcatttgagcagggttcagttagatttgttcattaataaatctgcatagctgctgaacaaaatccattgagaaattgacctttttgtgcccctcttatagcatgttgtaagggtatataaaacatttggtaaaaagagaccctgttgaatttaatctggtgacattatacaagcaattacttgtactcacataggtaaatcccaaatcttgagtacatgatgcctgaaagcacaatatatcttttgcagtcatcayttggattggttttctatactttggtaatgatcaggttattaattgaaacagttaaggcagggtgtggtggctcacgcctgtaatcccagaactttgggaaaccaaggctggcagatcacttgaggccaggaggttcaagacaagcctggccagcatagcaaaaccctgtctctacaaaaaattcaaaa

SEQ ID NO: 512884 - DNA, 410 bp, Homo sapiens
tgggctgcagatgaggattcaaggttatgcaggggtcactctcctgctccatccctggcaggtgggacctcacctactgcttctttctgctccagagaagagcacgtccccctcatctcaaaagtgcctgtgctcctccttcctgagtggaacctacacttttgacagtttggtttctgaggcaaggctgcctcctcctcctgtcccaggtacctcccctcagaaaagcaatggracttgggatagaaggatctagccaattcattccagatgaatctagaaataatcctttagcctttctcttagacccagtcccaaccaaaatctgagcttcatcaccaccacccagcacccaccattcaccacccagcctccagcccccagcccccagcccccagcccccagcaccc

SEQ ID NO: 512885 - DNA, 410 bp, Homo sapiens
tgggctgcagatgaggattcaaggttatgcaggggtcactctcctgctccatccctggcaggtgggacctcacctactgcttctttctgctccagagaagagcacgtccccctcatctcaaaagtgcctgtgctcctccttcctgagtggaacctacacttttgacagtttggtttctgaggcaaggctgcctcctcctcctgtcccaggtacctcccctcagaaaagcaatgggacttgggatagaaggatctagccaattcrttccagatgaatctagaaataatcctttagcctttctcttagacccagtcccaaccaaaatctgagcttcatcaccaccacccagcacccaccattcaccacccagcctccagcccccagcccccagcccccagcccccagcaccc

SEQ ID NO: 512886 - DNA, 651 bp, Homo sapiens
cttggtgacttgcacaagtatttagcctacagaatgagctttccttttccctgttctgcaatgttttctaagaccctttagttttctttcttttttttttaattcttatttgaaatagtagagatgtctgcaggtctggtgtttcttataaacacgccatgttgactgccccatccttaattcactgatatcatatagatttttctagcacaactaaatcaactaagtcattgtactatctgatattagtatgcacaactcctagcccaattctgaataaaatcttatctttagaataaatattagattgcaaagcaatgggatatataaaaattacatccacttcttaaaaatttattgagaattttcataccatctacaaatcttagcttggagggttacattttctaaaatgtcataaaatcactccaatcttttttttaaacacattgtattctcytcctgtttactttctttctttaggctttattttccaaaagaatgaaagaagtatgagtgtgtgtgtgttgaggtgttggggtggaaggtaggattagatttagattaagaaagagggtgctttggatcaattgaatgcaccatctgttaagtagtggggtaactggttttcttgttggtatgtatcttgcg

SEQ ID NO: 512887 - DNA, 604 bp, Homo sapiens
ctcttcacggtaccaagttcctgacagtttattaaggtagtcctggcaaactcatgtagatgaaaagcatattcttcctgaaaggcaacttttgactctaaagagcacaggcaacacttttccccctcccagtgrctgtgaattatcaaacttgaaaaagacagcatgcctaggaataacatttggcacatttagaaaaagatatccatttagtggactgtgtgaacaaatctctgagctcagaaagagaagcctcggtttgaatcctgctcctcaggattactgtaaatttggaggcttgttacttgatttcttttagcctaggatcgtttctaaatatgagtcccagttgtatctatttccatagcagtgctttaaggaataagtgagaaaaaacaggtaaaaggactagcatagtgcaaacacaggataaagactcaatgaactgtagctaatattgttatcagctattatcaatctctcttactgttttaagaatcacacatcagaacgttaaagttacacattatacattaaacccttaggactgtaacagttttgactttgctttttttggggtcaccattgacttcttacaacatac

SEQ ID NO: 512888 - DNA, 604 bp, Homo sapiens
ctcttcacggtaccaagttcctgacagtttattaaggtagtcctggcaaactcatgtagatgaaaagcatattcttcctgaaaggcaacttttgactctaaagagcacaggcaacacttttccccctcccagtgactgtgaattatcaaacttgaaaaagacagcatgcctaggaataacatttggcacatttagaaaaagatatccatttagtggactgtgtgaacaaatctctgagctcagaaagagaagcctcggtttgaatcctgctcctcaggattactgtaaatttggaggcttgttacttgatttcttttagcctaggatcgtttctaaatatgagtcccagttgtatctatttccatagcagtgctttaaggaataagygagaaaaaacaggtaaaaggactagcatagtgcaaacacaggataaagactcaatgaactgtagctaatattgttatcagctattatcaatctctcttactgttttaagaatcacacatcagaacgttaaagttacacattatacattaaacccttaggactgtaacagttttgactttgctttttttggggtcaccattgacttcttacaacatac

SEQ ID NO: 512889 - DNA, 575 bp, Homo sapiens
attgcaagctctgcctcccaggttgaagcaattcttctgcctcagccttccaagtagctgggattataggtgcctggcaccgcgcccacctaatttttatatttttagtagagatggggtttcaccatcttggtcaggctggttttgaaaacctgacatcatgatccacccgcctcagcctcccaaagtgctgggattgtcttgttttattgagtaggttgggatggatgaaatagtagtgagaagagaagcaaatgcttccttgttaaaacgtactgatgtccagtgtcattgggatgtagcaacttgtctgtttatgaygaaacgatctttggattttgtatattttgtgaagtttcttgacactttgctcattaaacaaatgcacattgtcaagactgaagtgaaccacatttaatcttactagtgtgagtgaagtctatctccatgtctgcagctttaataaatgaaatatttttgaatttttgtttcattctttaaattggttttcaaagtttgtggaaatggtgcttttcattaaaaacaaaacagaaaccacaccactctaagtactg

SEQ ID NO: 512890 - DNA, 628 bp, Homo sapiens
gaacacattaatttggagtgaagagagcttgcctatgtaagagtatattggaaattaaagacaacacttgtaatagaagagaaattttgatgaacactaaattcactttttcctcacaactgcaaataagccttttctgtttctgattcaaaaagcttccaagagtttaattttaactttataactttctagatttgtatttccctagttaacagtaaatcctttccaattgtcttcctttttacataatcctctaacaaaatgtacttataaytgcaaaaatttgcagtaatgtttcatggtggtatacatcctgagtaaagtggctactgctgaatttattatttatattaaaccatgaattgttttcccagtgcttatgggtagcccctttccctagcaattaacataaatttttggtgaacaaagagcttatggaaatggaaaaagcaaaattcatatttgctggactttctagaatggcatggggatgtggaaggaaaggaatgtgactttgcctttcttttgacttattaatgattctgcatagtctgtgtgcctggagactttaatagcagacacatttttataagcaaaatagcatgctttatattggcaatgctatcat

SEQ ID NO: 512891 - DNA, 606 bp, Homo sapiens
ttttttttttttgttgttgttstttgcattaatgaaggccttcagtagcatgcttaatgaaaaataagaaggctttgtttggctttgcttttactgaatgttgagtcagtttgaggaactctgaatactgccatggtgtagtgtggctgaaatggtagaagaaactcatggggaggaggagcctctggggcgaggtacttgccattggaaaagaaactttggggcaagagaagaaatgcttataggtgatttgagggaaagatagtccagtaggcagtgtgaaatatctcttttcctctctgtgaaacatttagtaaactgtacattcttctttaaaacatttggagttaaatttgacttagagagaaagtgagatactaagacctgcttagagcagctcacaactactgaactcaggttaaaataaactaagaacctccctttcattagtgagagatgattaaataaacaagatgcctagtaagttcaagtgggaaagaaaaataaatcaaaggtatcctttgaaaaataaagtgcatgcattggtcatgacaatgtaatcaggagcattttagtagccaaaggaaggaggtaaattaatttgta

SEQ ID NO: 512892 - DNA, 576 bp, Homo sapiens
atagatgtagatgacctgatattccaggatagatgtttagaagtggtaatattagtctatcctagagacagagatccaaatctagagatagagatagagagagaaaaacatagatctagamagactttacaaatgatattaaagcaatattaggcctatcatataacgttaaaatttgacctattaatatactgttttatgtatttcatatattgtattacatatatgatgtactatatattatagttttatatgtgcattttaagttcagattgtgatatattttaagtaggaaccatacatgaaactgttcatttaacgagacttttttctggcactgatttgttacgccagcaagatttcagcattcttaaatatttagataattagatgaggacttcttttttctttgtaacctcatgctgagcctcatgggagtactaggaaaaaaaaaaactacagagtatgtggataacaaatcagtttcaaaaccaataaacccaaatttatatactttatgcagtgatcatttatattccattcatcctttggatacttgaaacgatcccccaacaa

SEQ ID NO: 512893 - DNA, 496 bp, Homo sapiens
acagccagtaggtggagcagtaagaacacccacagcatttatcgactaagttcaccaccttgcattagtgtggttcctagtgactcaaaataattataatagtaacatcaaagatcatcataacagatacagtaatgaaaaagctggaaatattgcaataattaccaaaatgcgacagagatagggagtacatgctgttagaaaaatgacaccaatagacttgcttaccaccgagttgccacaaattttcaatttgtaaaaataaatagcaccttgtaaagaataaagtgaagcaccaataaaatgaggtatgtccgtatatatataataacaatgcttttcaaataagtgaattactttaattgtaattattttaactctcatgccaaaattatttcttcagttcactgctaccttcttagaaacaaatttttgtagttgaaagggatamcttaattttatatgaataaaaacaaaggccttcataggtttttac

SEQ ID NO: 512894 - DNA, 421 bp, Homo sapiens
tcacccagcagctatgggaacacaaagaaatggaagctttttctgaatggaaaatctgattcaggcttcctagagaaagtgacrgcatatgggagaaacaaaggctctcttctgatgatggagaaaaaggaattcctggcagtagaaatagcaggcaatggtgcaggaaagtactttggggcagagtacattcagaaggtgctgaaactttgatgtagctataatgagatattaatggaaggtaatgatgcaagatggggcttaaaagggtaatttatacatgatgaagaagggtcttgctgccaggctaagggttttaaaccacattccaaaggggaagagtgccaaaagcataaagactaattctgaaatggctctagactgctgcatggagttgaggtggggaggtgggtaatggggt

SEQ ID NO: 512895 - DNA, 656 bp, Homo sapiens
cttccctagtgaacccagaactgatatatgaagtttttggaagtctgctgttcaagaattgatggattttcagaagcaggagtatttagagattaatggactttagctatgttagagtggtcactggattaaagctcttattgatggctggatctcagaagcctggtcaccggagtgagacctttgctgatcagctcttgtgtagaagcatgtggctgtcactggtaggttgagtttcagaaggttgagatttttactaacttgctaactttcagaagcacggttactggagtgatgccattgttgaatgactgattttcagargcatggccactggagtgagactgtcctgattgactgaattttacagcttgcgaactgattagaagttatctcagatttgagtctttggtcaaacaataatctttttctttctcgaatatgaaaaacacttttaattctcaatcctcctttttgattttctctcaaactactagagagaccataaggaattatccagatatttacttgtggaagcatgattttcagcttgtgttttcatcaaagtcatttaagcaccttgagaaatagccattttaaaataatttatcaataaaaagcagaatataggatatttaaggtagcctgatgagctc

SEQ ID NO: 512896 - DNA, 577 bp, Homo sapiens
gggcaacaagcatttcaattacattttcggattggttttgttgcttttcagttaaaaacctttctggtgggcccagcgtctgcaactgttgtgtcaatgaatgatcctagaatgtgtgccctagtctccctgtggcgtttctgtcttgaacatgctgtggctttatggctgtactgattggtgcacgggaaatcggtgacagattcaaggaggacgtgacaagctgagtctcctcctcgccagtgtgctctgccagttgccttccaagtattgggaggcctactgagtttttcctctattcctttgaaaatctgacagattacaaatcatttaacatcaaaactaatttttatttttgtgactgaattcaaagagcagtagaaacaatagcaactatttgctcctcaaactaatatactagcaaagatgccattagtaattcaaagtrgtttctgaaagacattctatgcagtggaaataagggatgagattttagatagtacttaggacgccaacaaggcttccaagattaaattgtgctttctgaatacatgctattgccttaatcaagagacct

SEQ ID NO: 512897 - DNA, 677 bp, Homo sapiens
ttttccctgccgtggggctttagaatctttagtggctggtggaatttgtgtttcacactttcctgcatccgattttataaactgccgaagaaaatgtgaaccctttgctctctaggttttgagacagtgttggagtaattttagtaataaaacattgaatgtattgctagaggtattataagttcaattctatttacaggamaagctaaggattaaaaaaattaagtcatttctacaaagtcacagttaaactgaggaacgggtatatatatatacatatatatatatacacacacacacatatgcacaaataagttcttcacattacactttttgagaaataatagtttctggatatagtaggttattgctatatttggtttctagtattatatccaagatttggtgctcttaaatttagtaatgaaaatttatatttcattaaaattgcctgagtttttacattaatatttcagttatttaaaatcaatggggcagttatctttagaataatttctagttcactgacttttgtttaacttctcttcaacagagaaatattttcatgggcttattcaggcaggattttcatacactctttaaccttctcagaataacagtggattcaaatattctccatttgtcttcagcaagtgctatctaattatacatatcag

SEQ ID NO: 512898 - DNA, 609 bp, Homo sapiens
ctttaacagagaaatggtatggttgggagggttcctatgagacataggaggagcaaataaagacacccgtgtctgagtattctgtgccatgtgttcatgttttaagttcatcttgttgttgttaggagagagaattgttcaaagataacaaccagcctggcatgtacctagggaccgacactcattcaattttaggcttcagcaactacctactagttctagtttttcttaacaactttgtaattaatgatgtagttgattctgattcttcttatgaaatggtttttctgtttatcacaaacaaactttataaataaaacaaaagaaccaaagcaaattccagtgccgcaagtgtatggagaccgatggtgrccccaaattttctgggtagatagtgtctccattgtgcagtgggtcttaggaaacctctagaggctaagtgagccatcacctcaacttggaggtatctctgagatctatttcaagggcattgcccatttttcttgtcttctgcagccttagtcatatgaattcaccaaagccacaaagggcaaacctctctgaagttacataagaaatgcactggtaggcctgatcgtcaaaatgtgc

SEQ ID NO: 512899 - DNA, 508 bp, Homo sapiens
ccacgaaggaccttctctgccctgccaaggaatctacactttatctgaggccacagagagccattaaataccacttaagtgatactatgtgtaktgttaaatgatccacctagaattgagttcctaacgtttattgttcaaataatgcttctgctagactccactaacagtacaatgtagatttcccatttctcagtcatgctactaaatagaaattgactcctccaaagatagtgaccagcattattatttccttcattgcagtgggagagctctgagttatgcctaatgatagattagagggaattcttcagagtagacttttcacacagttaaagaaatccatctgtttaccagggaagtaggataattggaatggtgcttttgaaaaattactcataggcaacattgtgtgagataggtatcagagtctcaaggcagggagatcagtaaggatgctgatgaatggaatggatgaaaaacaataagaatttcagtgagagtcttg

SEQ ID NO: 512900 - DNA, 383 bp, Homo sapiens
acgtttattgttcaaataatgcttctgctagactccactaacagtacaatgtagatttcccatttctcagtcatgctactaaatagaaattgactcctccaaagatagtgaccagcattattatttccttcatkgcagtgggagagctctgagttatgcctaatgatagattagagggaattcttcagagtagacttttcacacagttaaagaaatccatctgtttaccagggaagtaggataattggaatggtgcttttgaaaaattactcataggcaacattgtgtgagataggtatcagagtctcaaggcagggagatcagtaaggatgctgatgaatggaatggatgaaaaacaataagaatttcagtgagagtcttga

SEQ ID NO: 512901 - DNA, 601 bp, Homo sapiens
aaactattctgaagtgttagggtagattttgttttgtttggtttkgtttggttttcagagaatagagaaggcggctgaaacataaattagtttagattaagtttagaagcctgactggaggagtctggtcaatcaaaaagcagcataaaacagagtcctcagagggttgcagaagagggatggtaaccaatcttaaaagttgcatacctttctcagagggtagggataagatccaaaaaaaaaaaaaaaaaaatacagaacattcctcctcccaggattatttagacttaatgcatgtcggctgtgcctctcaggtctcaatacaatttcccctaggcaaggacagaggtgtagctaggtcccattaggtctatgctggaaaccatacactttttaaaaaagatctgtatcaatcactttttcagttaggatactaaggaagagaaagaatgagacttcaactaataaattacacaatacacaataagtaccaaatattattctaactattcaaattcattttttaaaatgccctcagtaagtaaggaggtttttaaatggagaaagactcgcccccattcccataagttatgaagaaaac

SEQ ID NO: 512902 - DNA, 440 bp, Homo sapiens
ccacccaaccttggcattgcctttaagtgcttgtgacctcctcatgtaatagtgcatatattgaactttatgctttaaaaggtcttctccatgggttttctcattcattcacttccacaaacctgtcagcaagatgagtactcattttacagatggacagatttcacagtccatcagtcttatggtggtccagcatggagcctcctgactccgagggccatgcttctgctcctgagagagtgagactcgggtcaggcargggcctctgagccagtcagtgcagaccctctcaggtgaggagaggggcctcccacccacttcctgaagcactcgtgaggggcaaagagctctccaaggtgctcatcctgcccctgggtgcaaggccctggtcttgccacagaaaggggtccccaggccagtgacccagaaggccttgcatc

SEQ ID NO: 512903 - DNA, 382 bp, Homo sapiens
gagccaagctgcctctagcggcctctgatggatgctcactcacaccaccctctgaacagaaccccaggcaccggtgatctggcctccctcctccygccccccaccccacccccaccttcctttctcccgccttggtttccccgatatgcagccggggcctctccagtctggcgccaggaggtggaggaggaggccgatctgggagtgggtggggactggctgggcctggttcctccacagcactttccgagggccagagagaggtgttagtgtcagaaaaatactgcagtcccattcgcccccacggccccagccccctccactcgtggcgtcatccatggccgcaaataggacctgggggtaatgagttacacatgctcct

SEQ ID NO: 512904 - DNA, 532 bp, Homo sapiens
tgcctccttccaccctcctgagttatctccccacaggaatcaccatgacagtgtgtgatgccttgcaaattcctaatttccccaggacccacagaggcaagtagctgatcagttctcagatgggtgcatgggattcacaggtgccctcttcaggcttttccagtcccaagaaccagagactcatccgggtcatttcaagtaatgaggatatgcaaggagatttgggataaccaggacccatagttcaggtgggccttgtggatcctggcatgagaaggtcactcggaatccaaggccgttctgggggccactgccctttggctcagcttttcactgggaggcctcttctccaacatggcttattgattccaccatccctgcctctcagtctctttgtgtctgctcagctctctccgtattccccagtgtgaactgctgggagaggtggccctgctaatcttcatcagagaggctgggacagarcttctgagtcaggccaatgattcacggtctttcccacgtggaaggcaat

SEQ ID NO: 512905 - DNA, 484 bp, Homo sapiens
gtttctgaaaaacacctcagggacatatgttaagatgttctctttagtttctatagagagtcatcagaggttgactctaacttctttgactattgctttaagctactatttctttctttcttaccaagttgctcatttacttcttggggctagcctagaatttcccttgaagatactcaagattttcttttatttccatgtttgggggcctagcagcccctaagtccctgctccatctcgggcttgtggtccccagttctggggmagcagggaaaagatgaacagagatgagccctgtggatatctgggtgtctctgctatggggggcaggggtgggcattacaagaaaaagctctgccaaagccttgtgggatggggattggaataagctgtcaagaacagcctctccttgtttttagtaaggaatagctcttggtgtttcccttcagcttgggttttccagccaagtgatgctatgtgccgg

SEQ ID NO: 512906 - DNA, 484 bp, Homo sapiens
gtttctgaaaaacacctcagggacatatgttaagatgttctctttagtttctatagagagtcatcagaggttgactctaacttctttgactattgctttaagctactatttctttctttcttaccaagttgctcatttacttcttggggctagcctagaatttcccttgaagatactcaagattttcttttatttccatgtttgggggcctagcagcccctaagtccctgctccatctcgggcttgtggtccccagttctggggaagcagggaaaagaygaacagagatgagccctgtggatatctgggtgtctctgctatggggggcaggggtgggcattacaagaaaaagctctgccaaagccttgtgggatggggattggaataagctgtcaagaacagcctctccttgtttttagtaaggaatagctcttggtgtttcccttcagcttgggttttccagccaagtgatgctatgtgccgg

SEQ ID NO: 512907 - DNA, 484 bp, Homo sapiens
gtttctgaaaaacacctcagggacatatgttaagatgttctctttagtttctatagagagtcatcagaggttgactctaacttctttgactattgctttaagctactatttctttctttcttaccaagttgctcatttacttcttggggctagcctagaatttcccttgaagatactcaagattttcttttatttccatgtttgggggcctagcagcccctaagtccctgctccatctcgggcttgtggtccccagttctggggaagcagggaaaagatgaacagagatgagccctgtggatatctgggtgtctctgctatggggggcaggggtgggcattacaagaaaaagctctgccaaagccttgtgggwtggggattggaataagctgtcaagaacagcctctccttgtttttagtaaggaatagctcttggtgtttcccttcagcttgggttttccagccaagtgatgctatgtgccgg

SEQ ID NO: 512908 - DNA, 574 bp, Homo sapiens
ctgatgagcctggcctggagccagcagtacagtcaaaaccacccccagaaccatgctaaccacaggccggctgacagggtagagtggctcagcaaacrgctccacttccagtaccctcaagtcaccagggcctggattctgagcccctatcacctttacaattgtgaggtctctttttttcatcatttaaggcatctctctgtgaccctgagaagtggacaaggcaggcactgtcagccccatttcacagccgaggagactcaggcccagaaaggtgctgggactgcccttgctaccgtcctccgagcccccaatggagggtggtgggcggggctgggggcaactccacccacttcccagcagagtccgtgtggaaggagatatgagagcttggctcaccatacaacgtcccagggacctcagcccaggccatgctcctcagccctcagtagaacagaaaggccactttacctgtcactccactcagagatgttccccactttcagcaggtccctactacccagaaaccagagtcccagcattagcctggaatccaaagccccactctgtgacg

SEQ ID NO: 512909 - DNA, 509 bp, Homo sapiens
gtgttagattctgcctcagaccaggaggctcgggtgggagaagccctgaattcacgccattcccagctgcagtccaggcacccattccccagctgtggggccgtgggccagagyaggcaatgcgtctaagtctcagtttcctcatttataaactgagctattttctggattccttaggattgttgtaagaattagatgacacaatgtatgcaaaaatctctgaaaactataacttgcaatccagggaggaaggattaaagggctaattagtgatcagtgaagcctagcatggggttggcaaatggttttcttgtgaagggccaggtagtaaatattttaggctctgcaggcacacagactactgagccctgctattgcagcacgaaagcagccaagcagtacacaaatggatgagcgtgtctgtgttccagtaaaactttataaaaacaggtggtggctggatttggctctttgcctagaaggattgcagtgggatggagctgagagat

SEQ ID NO: 512910 - DNA, 584 bp, Homo sapiens
ttctcccactgaagtctcaaatagctgagaatttagtgctttttctatcctcaggcttctcaaaacctgtatctactagaaactygtataaaaaaagaaatagacagaaccctaatttgtatcagtgttaagtgctttgatatattacctctgaagcaaatttcctttttaaggtagaaaagtcagaggaaaatcaaataggcaccttaaataaaaggttagtaaggaaaaataaaataaaagacagtaagttagagttgaccaaaactgctgcagggcttcccattcgtattccagtggcttccttaaaggagcctttgttaacagatgactgacatggatttgcatttcatttccttggaggcacagaaaaatcctaaaccatcagttattttagagtgtagtgattgatcaattaataattgaattcacaatgacataacataatctcagttcattggaatacttgatgaacagtcaaaatatttttccagtggatttttagacgttattgccaattacccacagtagcacagggactgaggagctttcgcagggatatttcagtgagcaattggctgttt

SEQ ID NO: 512911 - DNA, 602 bp, Homo sapiens
taaagatgtatatttttaaactcgcattgcttaataagagtaagggactcattcacagtttgctaaattaatgagaaaagaacaatttatttcctcttgtttaagcaatttttatttttaaagcatgttatgcattatttattgttctaagtacagtgttaaagagaaatgatcacctgtttagagaccttccaaaacacatcggattcaataggctaagtgaaaggtgktaatcacatgcaagcaacctatttccctttttaacctttacatttccattagttttgaagttattttaatagtgacaagattggcttaactggtatgttacagtatttctgaaagatgggaaataataacagcagaaatgatacaaagtcaagcttggaatagaatagtaaataatggtgcctgctataataatcacgaaaacaatgcaatgtattctatatttatgttatatctttcatcatatcagtattcatttttatctataaatatgacaatatacatgtgtactgccctggcctggtataatatttatccttactttgactgaaccgcttattcaaagaagtctattttttgttgcatttgcatac

SEQ ID NO: 512912 - DNA, 638 bp, Homo sapiens
agaatatcgttcacacacttcccaaagagaggtggaatgctgccataacctagtcttcatcaaggcacccaggaataatctgtgagaagcatgcaatgaagtgtggattcaaactgacgaattgcatatacataaaatccataggtaaatcctygacagtgagtgaaatattttggatgaaaaaaatgggtaaagtcttcccgtaaaaaaaaaaatagttcattggaaaagggccctgaatgtcctcagagaaaagcagcctctcaaagatgtgaagaacagtctcattctctctggtctctgaggcttatgccatgataagtgatggaatgagaaagggttcactactttctgttgtccttattccccttcctggatcactttcactttaatcattaagtaaattttcagaagtaaattagctgtagttcgagaaagtttcaatgtgattagattaaaattaaaagaatccataaaaatggaacaaagaagaagaggaatgaaattacttttactttaaatagcattgttatcacataaaacatgtatcttacaaattcatgggatagcccataaatgggactacagcaacaatggtaggagagtccatccttcttcaaaagcaacccagcaggaat

SEQ ID NO: 512913 - DNA, 645 bp, Homo sapiens
agggacagcatgttttaaaactgtttcaattgtaaaacagcaatagtgtaaaacaacaaagawgcaggatcactgttttttgttacaaaaccacataagccgttgtagccaaaagtacaaatcaatagttcagaaattggcgttaagattatatgggaaagagttcaacttcccttaaactgaaaaggaattatagcaatcatagtcaaactatgtctgggaaagatagacagaattaggaaagagaaagacacctggaatgtatttgtttttaccagaaggagttgtcaaagggttgtcacttcaggaaagggtgacaatggcaatagcaatggtatttctcacttatccacaattagaggcgagaaagcagaggcattgaacaattattatttcttaacatcaggcagacttggcaaagtcaagattcaaaagcaatgctaactccacattctacatgcttttaagaaataacacattcaaaaaactggttctccagagacacacctcatccatatgaaccagaggacaaaaggaaagaatagacatcatgttgggaagctttatgttgggtgatttaaaaaaaaaaaaagttccagaattgagctgctgcagcctctatttcatctgatgtgatttttgaat

SEQ ID NO: 512914 - DNA, 600 bp, Homo sapiens
ttctttaacttcggacaaaaactacccttattaacatgtttcctaacatgtgctatattctaaagacatagaaattatgttttagcatatcagtattaatagttactctagtaagagtaggcaaaaagagaaaaaatatggcttcacagttttcttaataaggtggagatgagaggggagaagcctacagtattttacccagcaaagtgatgaataggaatcatcgtgctagtcatattgaaccatgatacgttccaaagggactgaaactccttcatgaatgacaagttattcttaaatatttttctccttgaatttttataatcactgtaccaagagagtagatataattaaggttgaaatgaaatttgtattagaaaactgatggctgagatttaatatttatctcagttatatggtacatgactcagtcatatcccaagtccattcgggtttaaattttcctgtgtaaaaattttatctttaagactkttttattattttatttgatgtatattgtttcttcattaaaaaattgtttattatttagacaggaaagacgtttgttaagacataattggggtatatttggaaaagtac

SEQ ID NO: 512915 - DNA, 648 bp, Homo sapiens
tgcttgttgaatctgaggtatgtaatatgccatttataaagatatatgtaaatatccacaactctgtatgtcgatagctgttyaaaaatggatactttcattccctcatccaagcacatgcagtagcatgctgactatgtgccaacaactgtactagtttctatagggaataaagaagaaaggaaagtttcaaggtacaagcaccctcgcacactgttggtgggactgcaaattggtatacgttttgcaggcaagatggacagactttcttgaaatctgaaatgtgtatagtttttgatcctgcattgccacttctgagagtttctccgaaaggaaaaaatgtggctgtgtgtttgtgcatgcatatgtgtgaatgcagaagttgcagtgagctgagattgagccactgtactccagcctgagcaacagagcaagactctgtctcaaaaaacaaacaaacaaacaaaaagataaagtggaacatagtttacaaaataattggagacttcttagtaaatatttttatgattgtgatctttttggagttataatttcactttaagatttcataattggcacatatgaatcacttcaaaggatgaaatccagaaattgagttcagtattcaacgaaagcaacatagtgatg

SEQ ID NO: 512916 - DNA, 648 bp, Homo sapiens
tgcttgttgaatctgaggtatgtaatatgccatttataaagatatatgtaaatatccacaactctgtatgtcgatagctgtttaaaaatggatactttcattccctcatccaagcacatgcagtagcatgctgactatgtgccaacaactgtactagtttctatagggaataaagaagaaaggaaagtttcaaggtacaagcaccctcgcacactgttggtgggactgcaaattggtatacgttttgcaggcaagatggacagactttcttgaaatctgaaatgtgtatagtttttgatcctgcattgccacttctgagagtttctccraaaggaaaaaatgtggctgtgtgtttgtgcatgcatatgtgtgaatgcagaagttgcagtgagctgagattgagccactgtactccagcctgagcaacagagcaagactctgtctcaaaaaacaaacaaacaaacaaaaagataaagtggaacatagtttacaaaataattggagacttcttagtaaatatttttatgattgtgatctttttggagttataatttcactttaagatttcataattggcacatatgaatcacttcaaaggatgaaatccagaaattgagttcagtattcaacgaaagcaacatagtgatg

SEQ ID NO: 512917 - DNA, 658 bp, Homo sapiens
tgttcacctactattttcagacatattagaataagggctcaggtaattaaagttccaccttcaatttaattgccaattactctatctaagtgaatctggtagatgctgtataagaaagccaaggagtccaagcgcccaaaatacttaattatcaattgggaattgtacatacaaattgtctgtgggggaaaaggaggattctttctagagtaatcgcgtttagtacctatgatggactctaccaatgtcaagaaggaaaaatgttattcaggaaacaaatttcctttccttcattccacatgtctttcagaaatactattttatttcttattttttgtttttgcatttcaaacactacatccacaataatttttcmactcacctcaaataaggtgaagtgtaacatgttacaacttccaggcatgatattcaagcataaagggatttgtcacccatgaacacacatgtaagttctaaagtgactcaggaaaatttagttaacatttattttgttttatataatctcctagcactattcaaattatttatatcaatcatctgctttaattctctcagatatgttaatttagttctctcagatatgttatcaatatacgcattttacaaatgagaccaagactcagaaaagaggaaagtt

SEQ ID NO: 512918 - DNA, 639 bp, Homo sapiens
aaaaatatgtacatacctattttattttcccctgaatgtctttgcagtatgctgttcggatgttttcatttcagaaaatcgttcttgattattaatttcactatatttttcagagaagagtaaaaggttgatctgttcatttttaactaaaaacaaacaaacatattttaatgtttcagcaattctggtattgctagaattttcaatccaaatctgccagtatccttaaaatattacttcagatttttatctgccagcagaggaatggtgaaattcaattggttttaccagcattgttaaaaaaaaaaaaaaactaatataacatgtatgactcgtactttttattaagaaacttggacctacagaaaaagcagtgttttggagacatttttatagactttatgatcttttgtattttcctcttgctcaccatatatttgtctctctacccttccttcaytaaaaagactcattttttagagcaattttaggtttatagaaaaattaatcagaaagcacagacagttcccatatgccccttcctcccacactttagttgcccctaatattaacatctggcattagtgtggtacatttattgcaattggtgacccaatattgatacatttttattaacac

SEQ ID NO: 512919 - DNA, 632 bp, Homo sapiens
tatatacaacacggtgggaggtctttaagactgttcccttgaaggaataatgtctttattttgaaggcttggatcaaagaaagggacactgttatgatcaattcactatattttcaattttgtttactatataacttgtggytgattttaatattggtctggtattaacatattatttttcttttagcttcttcccagaagctacttttttagacttgcactaccacttgatcccttgataatcagttgactctaattgtgatacatattacacgttatatcaatatactctggtttctcttcagatcgtataaatatttcaccttttatatattacactttatgtcaatatatgacactaattttagtccctgatatacttcataccagttacaagatattgtaacatcttttcattgagaaatcatattcagcatgtgtgaaaatttgtatttcagtgctctttctctctgagacttaaccaattttcatctaccattttcctttctgtgatcttctcttactcctcaaaactcataagactttaaagtaagtgttggtggaggtggggtgggacaataagaacaataatttgtaatactggctaacaatgagtgtctgtctactctgtg

SEQ ID NO: 512920 - DNA, 469 bp, Homo sapiens
aagtatgggtgccaaggtgattcaagaatgtagctctgagatctttcagttcagaaaaaggtattccagtcagaagactaaagccagaatactcaaggggaaatagtggactaaaggtactagggtaaggattttatagcatgaggaagagaatgctttgttatgagtagatattccaagttctcaggaaaggagaggattgatagtataaaaagagctattatggctatattatttttagagctgcctgttattcattttttttaaggtacagaactttctcgtagcaatgaacctctcaggggtakgtgcttataagatgccttctggttaactttgaaaaacatatggtaatatcatatctagatatcttctttccacccctatttctcccaccaagacaacccctttcccccaaaatatggtagtatgttttctctgaatatttttgattgacagctacagcaag

SEQ ID NO: 512921 - DNA, 666 bp, Homo sapiens
ttgcttgaattcgggtaatataggtgaaaacagagaagcatgggtggatttaaatactatttttgttctataattgataggttttggtggctgacttactttaatgagaaagataactcatttatgtttccatttctctagtgtgaacaagaaattgtacatcacagagattataaaattccctttcgtagacacttcagaggaaaagtaatagggcaccatattcaaatcttagtgcttcttgagtcatgataggtatcaagtaacattattcatgagatacatgagatcagtggttatygttgtctttgtgaatagtgttgccagtaataattaacataacttagggctttatggtttgtaacatgctttaatgtatattatctcacccgacatatgctttgtagtcacacaaatatgcccacttctctcttacacattgtattgttcaagctgttctttttgctgggaatacctcgactgttctcttttcttgcttaatctacttatctgtaagtcttggcttaaatgtcacttcctcatgaacacttttcattttctcccaatctcaattatgtccacgtataccccatatataggttggtgtaaaagtaattgcattttttttgccattacttttaattcccttaaaacttccaccattgc

SEQ ID NO: 512922 - DNA, 466 bp, Homo sapiens
ttgggatacaaatggtcctgtcacccaggtactgagcatagtatccaagagttactttttcagccctttccccgctccttccctccaccttctcttagtccccagcgtctactgttgccatcgttatatccctgagtacccaatgttaagctcctacttataagtgagaacatgtgatattcggttttctattcctgcattaattcacttaggataatggcctccagctgcatccatgttgcaaaggacatgattccactcttttcatggctgtgtagwattccatggtgtacatgcaccacattttctttattaacaggattttatgagcactaaacaatggcaagtaagttctaggtgcatcataactattaaacagtgtgatttttctttgttattttgtaattgttagcatccttctaatgagacaaagctgaatggaaagtcaaaataacctggtaatcca

SEQ ID NO: 512923 - DNA, 466 bp, Homo sapiens
ttgggatacaaatggtcctgtcacccaggtactgagcatagtatccaagagttactttttcagccctttccccgctccttccctccaccttctcttagtccccagcgtctactgttgccatcgttatatccctgagtacccaatgttaagctcctacttataagtgagaacatgtgatattcggttttctattcctgcattaattcacttaggataatggcctccagctgcatccatgttgcaaaggacatgattccactcttttcatggctgtgtagtattccatggtgtacrtgcaccacattttctttattaacaggattttatgagcactaaacaatggcaagtaagttctaggtgcatcataactattaaacagtgtgatttttctttgttattttgtaattgttagcatccttctaatgagacaaagctgaatggaaagtcaaaataacctggtaatcca

SEQ ID NO: 512924 - DNA, 509 bp, Homo sapiens
tgacacccagcatgcattggcttgctgcgcctgaacataaagcactcaagcagtctattttgttttggcgagagaagcagaaatattattcatcttgattggatcctttctgttgggtcttgctgtttaattaaaccagatctgtgttttagctctttggtaacatggggttcaaatagacagggatattatatccttatgtaaaacaagggcaggttggtgtccaagaatcatggctatgyaagtaaagatttctacaggcgtgctattattacacaatttcccctgtaattttatcatctacttgatattattgcacaaattctgaggtcaaacttcaaagtaaaactctggatgggatcaatctgagtaccaggaattcaatttccaattataaattaaaatataggtataatgggaaaatttctcatttataatagtagcaaaaatgcatttaattgtgcttcatagtgattttattcatgaatatggtcacttaaacttaattt

SEQ ID NO: 512925 - DNA, 562 bp, Homo sapiens
tgctcttcagcaatgctgacaacagactttggtacacatggtgagtttacactggctgacctagagcctccgtttgcctactccagcctggataatgattctcccagatgccgcacagcagttatcctaagatttcctccactggccacctgagaagtccctacacttctcttggtttggataacatttgcctggcccaagctcttcttccttcctttattccctaggtgaaacacatcctctaatagctccttaagaaatggtactgaggaacttgggttttgagactttgcttgactggacatatttttattccatcttgacaactgattgacagctttagtaggtatagatttctaggttgagaatcattttccctcrgaattttgaaggtatttccccattgtcatagaactaagtcatttctatctctgctcctttcttagtgtgtgaccatgtgatctatttatttcaatgcttctctctggaatctgttaggatttgctgtctatctctgctgttctgaatttcataaaataatattggatattttgtattctta

SEQ ID NO: 512926 - DNA, 611 bp, Homo sapiens
tgcacactagctatagctatatgccactagagctcttgacacatttcctatcttaacacttacatcagaatctaacagcatgtgtattctttaaaacatttcggtctaatatagtaaacacatacacactcatactcttcccattacacaaaggcttgggagcaaattatttagcagttgaaatgacagtgccacagtttctagggcctgggcccaagatggtaggcaaagcccatttaggtcatgacctattaatatttgcaaagagtttaagtggaattgctgctgctctttctgtagtacatgagcagaatctgaattctgcatgttctatatcccactcctcacttcccattggattatatagccctgagagggcaaggatcatgactatgctatttagtgttgtgtcttaccatttagtacactgcytagaatgtataaagtgcttaataaatggttgttgaaagggggaatcaatgaatgaatgctgatagaaaatcaactcctttgggtgaatttcacacatgcagaaaatatgtgagggtagaatactaatttagcttccagcagaaatgtggtcattataagtaacaaaagtagattctgta

SEQ ID NO: 512927 - DNA, 530 bp, Homo sapiens
ttctcttgagaaataagacttttgagaataagttgagagtgagaatagagtatgcagccatatcaatgcaccatatatacaccttctggcatccttccccaaagcacctagtgtaacactcagcatagagagagatwaaaaaaaaaaatgctgttgattatttgcctagcccagttctatgtggccagaaaaggtgggaagccattggaaaggattcaaaaatgtctttcactgcctgaaaccataggattgagtcccttgagaaacacagatgttcagtccacaactgcccaaattttactatggtgaaggtatgaatcactttttatgtttctttctttccacttactaaagccgtctgagtctgcataagtgtttaagattgagaatattagtggatatttcaaaaactctttcccttggtgatcagcgtggcattcacttttgatatacctttagcacaaagtcttaagatataaaaagttaaagaaatcgtcacaaagatacgtcaggatggaatgggttaaaaa

SEQ ID NO: 512928 - DNA, 530 bp, Homo sapiens
ttctcttgagaaataagacttttgagaataagttgagagtgagaatagagtatgcagccatatcaatgcaccatatatacaccttctggcatccttccccaaagcacctagtgtaacactcagcatagagagagataaaaaaaaaaaatgctgttgattatttgcctagcccagttctatgtggccaraaaaggtgggaagccattggaaaggattcaaaaatgtctttcactgcctgaaaccataggattgagtcccttgagaaacacagatgttcagtccacaactgcccaaattttactatggtgaaggtatgaatcactttttatgtttctttctttccacttactaaagccgtctgagtctgcataagtgtttaagattgagaatattagtggatatttcaaaaactctttcccttggtgatcagcgtggcattcacttttgatatacctttagcacaaagtcttaagatataaaaagttaaagaaatcgtcacaaagatacgtcaggatggaatgggttaaaaa

SEQ ID NO: 512929 - DNA, 591 bp, Homo sapiens
ttttcttttttgagacagagtcttgctctgtcgccctggctagggtgcagtggtgcaatctcggctcactgcaagctccgcctcctgggttcatgccattttcccacctcagcctccagagtagctgggacaacaggcacccaccaccacgcccggctaattttgtttttgtatttttagtagagatgggktttcaccgtggtagccaggatggtctccatctcctgaccttgtgatctgcttgcttaggcctccaaaagtgctgggattacaggcatgagcaccgcgcccagcccctaatacgtgttctatagtgattttacaacaatttggaaaatgtggataacccacatttccttgaagcaataaactaaatttctttttataaattgtgagtgcaggtgaccaaaaatattgctgaggagtagcatacttgacatgagtaaaatgtcttaactttggatttttagtgggaaaatgttataaataggaattccttttaaataactttttaaaaaatatattaaggatgtcttgctcatggagaagtcaaatttcattgcaaatgcattgcccccttcacacccactt

SEQ ID NO: 512930 - DNA, 532 bp, Homo sapiens
tgggtatgccctctctagttcccttgggcccctccctaccctgtcttgtcgcatatctgccagagtgttaagtgtgtcctgcctctgcaggcactcacttgtgaacccttgaaaatgctattgcttggaatgtctgtcacaaatacaaatgayacaaagccacacaaaccattcacttacctccctccagcccccactggtacaatgaaccacagaatctgacttcccaatttttttcatactgtcattcaccatatatttactgaataccttctaggtcctagaaactggcagaaaaagacacaaagtctgccttaactgaacttacaatttggtgcccatgaacaatgatactgtagagttttcttgggtgcaaaaggtatactgatagtaaatcatactagggagtttaagccttttgagcagattatcttattgtgttttaataataatcccatggaggtagacaggacaggtaggttactctgttttgaaggtaaacaaatcaaggatcaaagaagctaagcatgtt

SEQ ID NO: 512931 - DNA, 500 bp, Homo sapiens
tatataaaccatacaagaaacaaaatatatgttctgtatgtaaatatcttatcctgttctggacactatttcaaaatatcttgattgaagcattctatggtacagatggaaatcttatgacaatcgttctaaaamtaaacgagagctttacttttctgtgttgcttaaatttggtgagacgtttttgtttggatcctgtaggagcaatttgaatgactttgagaaatgaatgaatttttaagagaataaggatttgctggttattagtcttctaagcccttaactatgttgaacctcacttttatcagagttggaacagaagggacttcaaaaatacattcttggctgggcatggtggctcacacctgtaatcccagcactttgggagtccaaggcgggcagataactgaggtcaggagtttgagaccagcctggccaacgtggtgaaactccatctctaatttaaaaacatacaaaacattcagccgtggcaatggatg

SEQ ID NO: 512932 - DNA, 577 bp, Homo sapiens
ctttttcaacataccccattccaaaaagtaggtactacctgggccacacacacattcaccatamaaattaaattgaataggtatcaagaaacaattaagtttcatatcagattttcttccattaattttggcaacacagcgttcatttttctttgtattataaaaacttgttgctaatgtccagggtcaccaacctcatgtgaaataaaatgcatttgtgcaaggccctgacatcatatcaaaattcagtcagttatcttaatgcataatatatatgtaaaaaatcaagagagactggggaagaaaaacacaaaaatgtgagtagaatggtaaaagttgtctaccctggctgcacattagaatctgggataaacagatttagataaacagatgctcagaacccagccctagagattctgattcaggcccagtctgactgggccaatcgttgttatccctaagtgattcaaatctgctgtttttcttacctttctcagactttccactgttgtagaaaatgtgtattaaatgagaatactctgattcatatattttctgtcaaccatgataatgatga

SEQ ID NO: 512933 - DNA, 577 bp, Homo sapiens
ctttttcaacataccccattccaaaaagtaggtactacctgggccacacacacattcaccataaaaattaaattgaataggtatcaagaaacaattaagtttcatatcagattttcttccattaattttggyaacacagcgttcatttttctttgtattataaaaacttgttgctaatgtccagggtcaccaacctcatgtgaaataaaatgcatttgtgcaaggccctgacatcatatcaaaattcagtcagttatcttaatgcataatatatatgtaaaaaatcaagagagactggggaagaaaaacacaaaaatgtgagtagaatggtaaaagttgtctaccctggctgcacattagaatctgggataaacagatttagataaacagatgctcagaacccagccctagagattctgattcaggcccagtctgactgggccaatcgttgttatccctaagtgattcaaatctgctgtttttcttacctttctcagactttccactgttgtagaaaatgtgtattaaatgagaatactctgattcatatattttctgtcaaccatgataatgatga

SEQ ID NO: 512934 - DNA, 577 bp, Homo sapiens
ctttttcaacataccccattccaaaaagtaggtactacctgggccacacacacattcaccataaaaattaaattgaataggtatcaagaaacaattaagtttcatatcagattttcttccattaattttggcaacacagcgttcatttttctttgtattataaaaacttgttgctaatgtccagggtcaccaacctcatgtgaaataaaatgcatttgtgcaaggccctgacatcatatcaaaattcagtcagktatcttaatgcataatatatatgtaaaaaatcaagagagactggggaagaaaaacacaaaaatgtgagtagaatggtaaaagttgtctaccctggctgcacattagaatctgggataaacagatttagataaacagatgctcagaacccagccctagagattctgattcaggcccagtctgactgggccaatcgttgttatccctaagtgattcaaatctgctgtttttcttacctttctcagactttccactgttgtagaaaatgtgtattaaatgagaatactctgattcatatattttctgtcaaccatgataatgatga

SEQ ID NO: 512935 - DNA, 531 bp, Homo sapiens
tcggagctacaggtggaatcaagagttctctataatcatcacttgcacagcgtagttttcagggaaatattttcctatttgacaggtgaaacagtatttttcacctgcctgtagcagttttgagacaatatagtacttttccagaagtgcttccctgaatgactgcgcacgattatgatgacattctggaatggggttttataacacttgtgggaacacgctgcccctttagcaatggaaaacaggacttcagagctgccttctgaaaggcctggtccctgcagatggaacccacctgggaccctcctggtcacctacccatctgcctccagtgtaccacccggaagctcttatgcccctgtgcggggsgtgcctgggggcattagaccaagcatgtgtgccttccccaggaagcaggcaaaccaaggaagcaggcaaacccagatctgaatgccagccacaccacttcatcactatgtgaccggacaggtttcctaacctctctgagcacccatttcttcagctgtaaaa

SEQ ID NO: 512936 - DNA, 579 bp, Homo sapiens
aaagacctttggaaggaccatttaaaacacctggggcttcatcgggctggatttgctcggagctacaggtggaatcaagagttctctataatcatcacttgcacagcgtagttttcagggaaatattttcctatttgacaggtgaaacagtatttttcacctgcctgtagcagttttgagacaatatagtacttttccagaagtgcttccctgaatgactgcgcacgattatgatgacattctggaatggggttttataacacttgtgggaacacgctgcccctttagcaatggaaaacaggacttcagagctgccttctgaaaggcctggtccctgcagatggaacccacctgggaccctcctggtcacctacccatctgcctccagtgtaccacccggaagctcttatgcccctgtgcggggcstgcctgggggcattagaccaagcatgtgtgccttccccaggaagcaggcaaaccaaggaagcaggcaaacccagatctgaatgccagccacaccacttcatcactatgtgaccggacaggtttcctaacctctctgagcacccatttcttcag

SEQ ID NO: 512937 - DNA, 652 bp, Homo sapiens
aaactaaaaccatctttttttttttttttaacatgttagtgacaaagaaaaaccacgctcttaggcctactggcatcttacaaaattaatgacttcaagcataatttaagatagttcaatagatttaaagaagtaacacaaaagacatcatagactcgaagttaagaaaaggaagggaatgaagggaatgacaaaatatgaagaaggactccaagagacaagatcagaaaaattgtgaacgtgattgcttaaatcagaagaaatgagacaagcaaaagacatgtgaggaaacaaatagtgagtagwcacagtgataatattgtgctataattacaaatgacataaagaataccaaatgaaatcagatatgatgtcttgttattttgaagaatggatagcaggacaaggtagacaaattatactttcaagaaatgtcattataagaaaagttttttacaaaatttatttggagttttcgcagaaagatcctttggaatcagtgagaaaattgaactataacatatttttaaagcatacaactgtatcatgtacttatcccatatagatcatcaaatgtggcttacaagagtgcaatcaagaaaagaattaatttgaacatatatgtgaatatagtctgtggcatactcatact

SEQ ID NO: 512938 - DNA, 652 bp, Homo sapiens
aaactaaaaccatctttttttttttttttaacatgttagtgacaaagaaaaaccacgctcttaggcctactggcatcttacaaaattaatgacttcaagcataatttaagatagttcaatagatttaaagaagtaacacaaaagacatcatagactcgaagttaagaaaaggaagggaatgaagggaatgacaaaatatgaagaaggactccaagagacaagatcagaaaaattgtgaacgtgattgcttaaatcagaagaaatgagacaagcaaaagacatgtgaggaaacaaatagtgagtagacacagtgataatattgtgctataattacaaatgacataaagaataccaaatgaaatcagatatgatgtcttgttattttgaagaatggatagcaggacaaggtagacaaattatactttcaagaaatgtcattataagaaaagttttttacaaaatttatttggagttttcgcagaaagatcmtttggaatcagtgagaaaattgaactataacatatttttaaagcatacaactgtatcatgtacttatcccatatagatcatcaaatgtggcttacaagagtgcaatcaagaaaagaattaatttgaacatatatgtgaatatagtctgtggcatactcatact

SEQ ID NO: 512939 - DNA, 652 bp, Homo sapiens
aaactaaaaccatctttttttttttttttaacatgttagtgacaaagaaaaaccacgctcttaggcctactggcatcttacaaaattaatgacttcaagcataatttaagatagttcaatagatttaaagaagtaacacaaaagacatcatagactcgaagttaagaaaaggaagggaatgaagggaatgacaaaatatgaagaaggactccaagagacaagatcagaaaaattgtgaacgtgattgcttaaatcagaagaaatgagacaagcaaaagacatgtgaggaaacaaatagtgagtagacacagtgataatattgtgctataattacaaatgacataaagaataccaaatgaaatcagatatgatgtcttgttattttgaagaatggatagcaggacaaggtagacaaattatactttcaagaaatgtcattataagaaaagttttttacaaaatttatttggagttttcgcagaaagatcctttggaatcagtgagaaaattgaactataacatatttttaaagcatacaactgtatcatgtacttatcccatatagatcatcaaatgtggcttacaagagtgcaatcaagaaaagaattaatttgaayatatatgtgaatatagtctgtggcatactcatact

SEQ ID NO: 512940 - DNA, 613 bp, Homo sapiens
ctgctgccttcactcattacctgcccctgtcctggcagctccttcagaacatattgttctttggggaaatatcatggtttttgaactgaggacagattctcttcagaaatcacatggcaaaacattagaaaaaaagaaaaactaagaaatttaaaaattcagaacagaagacaatcggttttatgctaacttttataaccttaatcgttgaagcttttcccctcctttagagcaattacttctatgctgccaaaagaaatgagaagtgatttcatctgagtcattactgtgctctccctcaaaggatagcagacagtaattagtactccacaccagacctgcctcaaatttggcataaactgcattcgtcctttacagagccgaaaatgaagcacttctaagtcttagaatcttctcgtgaatttctgtcatttggcagaartttctggagtcgttgcttcttatagatcttttctactgttaactttaaaaaaatagacttttaacaattggcaaatggcaccacattaccttcagagtgaaatcaccatctgaaagcattcgaagtaaggggaggggaaaagttagacccccattttagtttcctggcaat

SEQ ID NO: 512941 - DNA, 613 bp, Homo sapiens
ctgctgccttcactcattacctgcccctgtcctggcagctccttcagaacatattgttctttggggaaatatcatggtttttgaactgaggacagattctcttcagaaatcacatggcaaaacattagaaaaaaagaaaaactaagaaatttaaaaattcagaacagaagacaatcggttttatgctaacttttataaccttaatcgttgaagcttttcccctcctttagagcaattacttctatgctgccaaaagaaatgagaagtgatttcatctgagtcattactgtgctctccctcaaaggatagcagacagtaattagtactccacaccagacctgcctcaaatttggcataaactgcattcgtcctttacagagccgaaaatgaagcacttctaagtcttagaatcttctcgtgaatttctgtcatttggcagaaatttctggagtcgttgcttcktatagatcttttctactgttaactttaaaaaaatagacttttaacaattggcaaatggcaccacattaccttcagagtgaaatcaccatctgaaagcattcgaagtaaggggaggggaaaagttagacccccattttagtttcctggcaat

SEQ ID NO: 512942 - DNA, 592 bp, Homo sapiens
ctctgctgtcctcaataaagtggatagaggaggaggacaaaatttaaaacattgaattttgcctgataaatatcattcaggcacacacaatcataaatgacccataatcatcatgtctctactgagagcaggaatggatcaacagaaagttattcagaattgttattcaaagttagagattttttaaaaatgagtactgatgggaaatagagaacaaaagggggaaaagcttacagaagtggttcccaaacttgtttacacattgaaatcatctggggattgtttaaaaattccaatgcccaggctccaccccagaataattaaattttaatctctggagatatgtggcaagcggcattgcttttgaagctccccrggtgattcaagtgagcaggcaggttgggaaccatcagcctattgaacaggctctttgaagcatatgagacacaggtgggaagtggagaaaccagatttctgaattattcagataaagggaaatgagttttgcaatggaaagcaccattacgaataaaagttgatttttgaatcatctcagtagacatgttttatgtattatgtacatgctccaaaa

SEQ ID NO: 512943 - DNA, 594 bp, Homo sapiens
tgttcttgtcattttattctacatcttgctgaaccccttgccaggcctcattctcattgtgactttagattctatgagaaactgcagaacatggccrataggaacacagagtctgcctcattgacaccccggtgcaaatcctgattctgcctctcaggagagtgactttacgtaaatcatttaacccctctgtgccactgtctcatctgcagcaggaacataatattactgatatcatggggttctaacgatgtttaaatgagttaattgtacaaaagcctcagaacagcaccttgcagctcagaagtgccatggaagtgttggcacctacaaagtactgttaatgctcacacgtctttccaaaatctcagcactgcccaggtacaagacaggtaggaggtctgatattgtaggttaatgttttcaggcccagtagatgctaaacacagaatgctaaagaccagaagatgccattcaaaaaggcaagaaagttttcacaggtctgcaaatatgagggcaagtgcgtattttgaaggtcccgatttttctgtaaaatctcgctaataatcaagagaagctacaggaagcttacat

SEQ ID NO: 512944 - DNA, 593 bp, Homo sapiens
ctggtatattttcgatgtgatctcaagcatcaggtgtaagggacaagatgggaaatgtggtgaagtgaactaagggaagtgggttatacgagggagggagtcaatagaaaggtgtgctataaagttatctaccaccacatgcacgtgatacctgatcctgtgagaactttggaacaatctttaaaatgtccttttagattttctacccagggtaaaaaaaggggaagcattatacgttgaatctagctcccattgttcaagagtagcttagaggaaactcgctctgcaacaattacaggttatgcatatgtgaggaatgtgcatttgtgagtacagagataatctctactggcatttcatgttgcagcatcatggaaactgagcaaaaagcaagcagtacrcagcatgggtaaggagtgagactgtcaggttacacctgcatgaagtcaataggagcctttgtggaactggtcatcacaacagtgagtgacaatgtttcaatgaacagttatttcctactcctgatctgttaagaatataagggttaccttgtgcagtatggccattttcacgatattgattcttcctaccca

SEQ ID NO: 512945 - DNA, 598 bp, Homo sapiens
atccttaaatcactcacattagacctgtaggatgctawctacatgttctatggttccacatgttggggctcaccttttatcgcttacgaagttcaatattcgagcaggaccaggtaatgttagggaagcacaaaaagaagcattaaagagcttcttccctcctcagcaaatgtctggctccttagcattctgggatatatcttgtgcttgcttgacaagaggcaagaactcatctcttttgcatgctccatcagtgcttgataaacttcaaggtatgtacaattacctggggcccttgataaaatgtagatcctaatttaggagggaggtcaggatgctgagagttaggcatttttaacaagctctgagatgatatgtgtgctgctggtccaaggtctacactagcagtatctttaaaacattcctcccacctgcaccttctttcccaataaccaaccgcaatttcaagctcatactcaattccctggctaacacccctgtctccaggtcctcaatccagttttagcaatgcccttagcccttatgcatttttaatttggtctatttatatagtgtcacttttccatttgtgttcgca

SEQ ID NO: 512946 - DNA, 570 bp, Homo sapiens
atccttaaatcactcacattagacctgtaggatgctaactacatgttctatggttccacatgttggggctcaccttttatcgcttacgaagttcaatattcgagcaggaccaggtaatgttagggaagcacaaaaagaagcattaaagagcttcttccctcctcagcaaatgtctggctccttagcattctgggatatatcttgtgcttgcttgacaagaggcaagaactcatctcttttgcatgctccatcagtgcttgataaacttcaaggtatgtacaattacctggggcccttgrtaaaatgtagatcctaatttaggagggaggtcaggatgctgagagttaggcatttttaacaagctctgagatgatatgtgtgctgctggtccaaggtctacactagcagtatctttaaaacattcctcccacctgcaccttctttcccaataaccaaccgcaatttcaagctcatactcaattccctggctaacacccctgtctccaggtcctcaatccagttttagcaatgcccttagcccttatgcatttttaatttggtctatttata

SEQ ID NO: 512947 - DNA, 650 bp, Homo sapiens
accaaaccccagaaatgactcctcttttgattctgcaattctgggctttcttatcttgggctgtgcttaaaaataaaatatctagtacatttacctaacaaggcatttgcctaattaatgcaagttaaatggattacaaagaagaaaagtagttatcaaaaatcctttcctgtaattaggggattatgatgcctagcaggggaaggtgaaaaatgtatagtacataatgtaaatatacatatttacatttatatattatataatttaaaaaagcattggtaaactattcttaaatgtacaggtttacattaacataaccatactcctcaaaggtctgatatttcctttagagttattattttaatgaacagaaccctcaagagaactgctcatagatcagtaaccactgtaactttttttttaatgagaataagaccattttggagctacaaaatggagaccactgctgagaacaaaaattaaggaaagtgattacagagtatgataaaagtgattacagtatatggatttactaacttataggacccaaayaggaaaccttcaatgagaatacttcttccgtcatcagctcattcctttctagatatagcacagaatcaacaactgataatttaaagaaactggcagta

SEQ ID NO: 512948 - DNA, 600 bp, Homo sapiens
tgttccttacagagaatattagtgtaggttctactttgttctgttgttaacttcccttttgaactgaaatactttctactttgttctgttatttacttcctttagacttagcagggatagcacctaaagtggagcccaagacaagggcttatgtgcaggtaatttatttcagaaaatgacatacatcaaggaagaaaagtagaggctttgaaagagtcaaacaaggaaggaggaaaagccattcyaaggatgcattattttgttggtcaccactatgggcactacagtgttcatctgtgttcattccaattaggtatcctgtgaggagccacagagaatgtgccttataactattcttccaaggggaaggggtggaagagagaaacatgtactcatcagcttctctccaccagtggtcaagggttgaccaatagggtataaactttcttgcatttctaggtttacacatgcttcagaatgaataagtttttgcaaacactttacatgggggttggagggcagagaaaccctggagcagaaagtgagatacatggcacaagtgagataaggttgagttgctgccaggtcctacctatgagc

SEQ ID NO: 512949 - DNA, 596 bp, Homo sapiens
ttattcagtgttttacatctacccctaggtcataacctattagcagacatataatagtattagaactaaacaggagataagtaactatgtcattttaacaatagaaaaacatataaattagagattgycattgatctctaaaagaatttaactctgctttcatataaatataaaacctcagtcttaactgaaaaagtgtccattatctctctgccttttctcccggactggtcagtccttcactcacgatacagtggcttcagccctattttctgtccctatagttttgccttttctagaacgttatataaaaggcattacacagtatgtagtctttgtggttggcttcttccacttagcataatgtatctgatgctcatccatgttgttccatgtatgagtggttgattcctctgaatactttgagaagtattccattgtatggatgcaccacggattgtttatacattcattagttgtaggacgtttgggttgtttccagtttttgatgatcacaaattaagctgctacacacattcatgtgcaggttttgtgtgaacataagtttttatttcatttggataaataatcagtag

SEQ ID NO: 512950 - DNA, 596 bp, Homo sapiens
ttattcagtgttttacatctacccctaggtcataacctattagcagacatataatagtattagaactaaacaggagataagtaactatgtcattttaacaatagaaaaacatataaattagagattgtcattgatctctaaaagaatttaactctgctttcatataaatataaaacctcagtcttaactgaaaaagtgtccattatctctctgccttttctcccggactggtcagtccttcactcacgatacagtggcttcagccctattttctgtccctatagttttgccttttctagaacgttatataaaaggcattacacagtatgtagtctttgtggttggcttcttccacttagcataatgtatctgatgctcatccatgttgttccrtgtatgagtggttgattcctctgaatactttgagaagtattccattgtatggatgcaccacggattgtttatacattcattagttgtaggacgtttgggttgtttccagtttttgatgatcacaaattaagctgctacacacattcatgtgcaggttttgtgtgaacataagtttttatttcatttggataaataatcagtag

SEQ ID NO: 512951 - DNA, 577 bp, Homo sapiens
tttttttggagacagggtctcactctgtcacccaggctggagtgcagtattatgatcttggctcactgcaacctccatgtcccaggctcaagtgaccgtcccacctcagcctcctgagtagctggaactacagctatacgccaccaactctggctaatgtttttstattttttgtagacacagggtttcaccatgttgcccaggctgctctggaactccagaacataagcaatccagccatctcggcttcctaaagtgctgggattacaggtgtgagccaccaaacctggcccagagttttcaaaagttacttaaaatagtcttttttcctcatatggttatattatcttacttgggaggggttaaaaaaacattattatgacaattggggaaatttgaatatggctagatactaattgatattatggaattaccattcattttcttaggtatcacaatggtatcgtggttaagtacgtaattgtccttattctcagttaattcatgtcaatgtagtgataaagtgtcatgatgtctgcaactctctttcaaatggcatggcataacaaagtgtgtg

SEQ ID NO: 512952 - DNA, 577 bp, Homo sapiens
tttttttggagacagggtctcactctgtcacccaggctggagtgcagtattatgatcttggctcactgcaacctccatgtcccaggctcaagtgaccgtcccacctcagcctcctgagtagctggaactacagctatacgccaccaactctggctaatgtttttctattttttgtagacacagggtttcaccatgttgcccaggctgctctggaactccagaacataagcaatccasccatctcggcttcctaaagtgctgggattacaggtgtgagccaccaaacctggcccagagttttcaaaagttacttaaaatagtcttttttcctcatatggttatattatcttacttgggaggggttaaaaaaacattattatgacaattggggaaatttgaatatggctagatactaattgatattatggaattaccattcattttcttaggtatcacaatggtatcgtggttaagtacgtaattgtccttattctcagttaattcatgtcaatgtagtgataaagtgtcatgatgtctgcaactctctttcaaatggcatggcataacaaagtgtgtg

SEQ ID NO: 512953 - DNA, 608 bp, Homo sapiens
ctgtggttgctgtctctctccctcacagggctgctctttcctctgtgtctttggcttccctggggaaaaggtacctgacgagctcactcatgctctggaatgtgctatggatatatttgacttctgctctcaagtccacaaaatccagtgagtattgaccctggtcccacccagtggtccctgacccttttgaggcataagtagggagggcatgcagggaacaggaaagaaagaagaattaattaagaacttagtcctgtgtctcaaactgttgttcctccttcgcatctccgggccatgtagaaatgccataaactaattccaacgggtagagaaaatcctttcccaccctttcccaacccagacattatttcccacccttcccactttctctacgctcattatctttatttctttccccacaaatcttgtctcccctgcaccagaactgtatccatcggcgttgccagtgggattgtcttctgtgggatcgttggacacactgtgagacacgagtacacaggtgtgctgggtcagctcatctccagttttctttcygcaaacacagcaccttgccactgggctttgcgggaggaagcacaaaaatg

SEQ ID NO: 512954 - DNA, 666 bp, Homo sapiens
agaatgcagtatgagagagaaagttacttattactgctgtttgatgagaccactctcagggtacccaggccaaatttggtcacgatttccctatccaagaagctctacttatttcctcattaatctatttggagcagagggaagcttatgtacattaatgtagtatgcctcagagtccagatccagatattaagttgcccatattaaagaaaagttttctctctttctcctctgtagatcctgaaccctcagtcccttgtttctgctcaggatctatcctttttcaggatgataaattggtagtgggaatatccacatcytaaagggaaatctcctgcccagagggataaagccctgccctataaccctaaagagttattgtactcattgtagactgtatcattgttctcaattatttgctgtcttagcttcagtgtcttcccatgggaataagttttcccaagcaattgacttcaggcttgaccatatgacttgcgctggcatagtagatctgaagtattctatatcctagcagaaactttatgagccatcacatggttaagtatttccacttttccttttgctttgagaagatcatattccaaatgatgactactaataaagtcttcatcttggcatgaagaagacacatgacaaacagccaag

SEQ ID NO: 512955 - DNA, 656 bp, Homo sapiens
gctgaaaaatattttgtattattttaatgaaataaattgtacctattttccccaaacagtaaaataaaaagtttgtgctwttcaaattatgtattaaaatgctggttcttaaaatatttagtaaaataattttccaatagaagataaaatttactctttgagatagttgtgtagttttagagagaaaagtccatatgaaagctatgggacagcagaggaaagctggcttgctggccatcaagacgtggccctttttaggaaggctttatcttgaatatacatcctagtcccatatctgtccctcatggcaataatttttgtcaaaaccccatcagcaaccttatgtcttaggaaggcagatttacattaaccaaactcagaaagatccatatataaaatctagaatgtcaacttatctaacaagtagccaaagtctctaggaaacagacctctacatgtttgtgggacagaacaactcctgtgctgaaacctagtaaattagtagaatctatatgcatatattctcttggaactcttacggatgcctggctaagattaatcatctttgaacacattaatacactccttcttcagaagaagaacaagctgactataaagacattcttagtaacacccgttgtgtgtgtctcagtaag

SEQ ID NO: 512956 - DNA, 640 bp, Homo sapiens
tgaaaaatattttgtattattttaatgaaataaattgtacctattttccccaaacagtaaaataaaaagtttgtgcttttcaaattatgtattaaaatgctggttcttaaaatatttagtaaaataattttccaatagaagataaaatttactctttgagatagttgtgtagttttagagagaaaagtccatatgaaagctatgggacagcagaggaaagctggcttgctggccatcaagacgtggccctttttaggaaggctttatcttgaatatacatcctagtcccatatctgtccctcatggcaataatttttgtcaaaaccccatcagcaaccttatgtcttaggaaggcagatttacattaaccaaactcagaaagatccatatataaaatmtagaatgtcaacttatctaacaagtagccaaagtctctaggaaacagacctctacatgtttgtgggacagaacaactcctgtgctgaaacctagtaaattagtagaatctatatgcatatattctcttggaactcttacggatgcctggctaagattaatcatctttgaacacattaatacactccttcttcagaagaagaacaagctgactataaagacattcttagtaacacccgttgtg

SEQ ID NO: 512957 - DNA, 536 bp, Homo sapiens
caccactgtcacctccaccaccgcagaaggcccaagagcctgcagacatacatgctgggtgagaaggaagttacccagcaagggtccagggcagcaggctgtgttagggtccctggaaagcctccctgtatcctccagccagaatgcatcatcctgtccccagagtgcctggcctgctccacagtcacctgtctggccccaaacccaaagaagacccagacaacctctccctactcccagcaggacactggcctattttgcttgtgggcatctagaaaccaaactaaccgaactagttgctcacaygcagcactcaataagtattcatttacaaggagaaggcaagaggcagggggatgttcagctaagaatgttttacataaccagttccataaggcaaagaatagataaagcatctaagacgagatacaggccctcaaagcgtgtgcaatctcatagaagagtgggctggaaagaggggaaaagataacaatgcaataacaagaaaacaagcaccctgattagaaaatgggcta

SEQ ID NO: 512958 - DNA, 536 bp, Homo sapiens
caccactgtcacctccaccaccgcagaaggcccaagagcctgcagacatacatgctgggtgagaaggaagttacccagcaagggtccagggcagcaggctgtgttagggtccctggaaagcctccctgtatcctccagccagaatgcatcatcctgtccccagagtgcctggcctgctccacagtcacctgtctggccccaaacccaaagaagacccagacaacctctccctactcccagcaggacactggcctattttgcttgtgggcatctagaaaccaaactaaccgaactagttgctcacatgcagcactcaataagtattcatttacaaggagaaggmaagaggcagggggatgttcagctaagaatgttttacataaccagttccataaggcaaagaatagataaagcatctaagacgagatacaggccctcaaagcgtgtgcaatctcatagaagagtgggctggaaagaggggaaaagataacaatgcaataacaagaaaacaagcaccctgattagaaaatgggcta

SEQ ID NO: 512959 - DNA, 536 bp, Homo sapiens
caccactgtcacctccaccaccgcagaaggcccaagagcctgcagacatacatgctgggtgagaaggaagttacccagcaagggtccagggcagcaggctgtgttagggtccctggaaagcctccctgtatcctccagccagaatgcatcatcctgtccccagagtgcctggcctgctccacagtcacctgtctggccccaaacccaaagaagacccagacaacctctccctactcccagcaggacactggcctattttgcttgtgggcatctagaaaccaaactaaccgaactagttgctcacatgcagcactcaataagtattcatttacaaggagaaggcaagaggcagggggawgttcagctaagaatgttttacataaccagttccataaggcaaagaatagataaagcatctaagacgagatacaggccctcaaagcgtgtgcaatctcatagaagagtgggctggaaagaggggaaaagataacaatgcaataacaagaaaacaagcaccctgattagaaaatgggcta

SEQ ID NO: 512960 - DNA, 536 bp, Homo sapiens
caccactgtcacctccaccaccgcagaaggcccaagagcctgcagacatacatgctgggtgagaaggaagttacccagcaagggtccagggcagcaggctgtgttagggtccctggaaagcctccctgtatcctccagccagaatgcatcatcctgtccccagagtgcctggcctgctccacagtcacctgtctggccccaaacccaaagaagacccagacaacctctccctactcccagcaggacactggcctattttgcttgtgggcatctagaaaccaaactaaccgaactagttgctcacatgcagcactcaataagtattcatttacaaggagaaggcaagaggcagggggatgttcagctaagaatgttttacataaccagttccataaggcaaagaatagataaagcatctaagacgagatacaggccctcaaagygtgtgcaatctcatagaagagtgggctggaaagaggggaaaagataacaatgcaataacaagaaaacaagcaccctgattagaaaatgggcta

SEQ ID NO: 512961 - DNA, 598 bp, Homo sapiens
cagttttccttcattagaatagcagggtcctattcgattgtattcaacgtgacatctttagctactgtttggcccatagctggaagaaggaggctcccgaaaagtttgtgttgaatgaagaccagagartaaaacccagcctctgagagcacgtcctgcatgcagctctgaatgtggcccagcacactgcatgtaagggagacattcagcacaaagggaaatttcagatcattccttggtccctccctcaggccatgccagcaggtgatactgtgatgaaattcacagttaacctgggtcccactccttccaacgatgcagatcttggttgtagcaaaatgcatggacacagttatggatgtccacatgagacaatgcaccaagctccagaatttatctaggaggggctggttagaagggaagggggcttcagggagggtttgcagagcactgtgcacaagatgaacatcaatcttttttttttttaatagagacagggtctcactctgttgcccaggctggagtgcaatagtgtgatcatagctcactgtagcctcaaccccctgggctcaaatgatcttcccacctcagcctccca

SEQ ID NO: 512962 - DNA, 598 bp, Homo sapiens
cagttttccttcattagaatagcagggtcctattcgattgtattcaacgtgacatctttagctactgtttggcccatagctggaagaaggaggctcccgaaaagtttgtgttgaatgaagaccagagagtaaaaccyagcctctgagagcacgtcctgcatgcagctctgaatgtggcccagcacactgcatgtaagggagacattcagcacaaagggaaatttcagatcattccttggtccctccctcaggccatgccagcaggtgatactgtgatgaaattcacagttaacctgggtcccactccttccaacgatgcagatcttggttgtagcaaaatgcatggacacagttatggatgtccacatgagacaatgcaccaagctccagaatttatctaggaggggctggttagaagggaagggggcttcagggagggtttgcagagcactgtgcacaagatgaacatcaatcttttttttttttaatagagacagggtctcactctgttgcccaggctggagtgcaatagtgtgatcatagctcactgtagcctcaaccccctgggctcaaatgatcttcccacctcagcctccca

SEQ ID NO: 512963 - DNA, 598 bp, Homo sapiens
cagttttccttcattagaatagcagggtcctattcgattgtattcaacgtgacatctttagctactgtttggcccatagctggaagaaggaggctcccgaaaagtttgtgttgaatgaagaccagagagtaaaacccagcctctgagagcacgtcctgcatgcagctctgaatgtggcccagcacactgcatgtaagggagacattcagcacaaagggaaatttcagatcattccttggtccctccctcaggccatgccagcrggtgatactgtgatgaaattcacagttaacctgggtcccactccttccaacgatgcagatcttggttgtagcaaaatgcatggacacagttatggatgtccacatgagacaatgcaccaagctccagaatttatctaggaggggctggttagaagggaagggggcttcagggagggtttgcagagcactgtgcacaagatgaacatcaatcttttttttttttaatagagacagggtctcactctgttgcccaggctggagtgcaatagtgtgatcatagctcactgtagcctcaaccccctgggctcaaatgatcttcccacctcagcctccca

SEQ ID NO: 512964 - DNA, 650 bp, Homo sapiens
ccagctgcatcgggcaccccatcccatgcacrgtgggaggccttggggtgggctccatgctaagggtgcccgggaagcccagagtgagcgtcagtttggttccttagaagcgcccctccccactgaatccccagtctgcatgggcctggggggacccgggccccgcatgcagcagcaggctggagaggtcgcctggccaagtgcttgcaacgtgctgggcaggagaggcggtcccggctgagagctgcctgagggggacagcagggccataccctgatagctaagaggggcccctgtcctgggggcactgaggggttggaaggtggggctggaagcatgtgcacactgatgcacacacgtgcatgcacacgggcacacacatgcacaaacatgctcacccgggcgtccacgtgcacacctggccccatgctcacgcctgcaggagcgctcgcatgcacacaacgcacatggtctccgaaccatggcagtgatggagaggggtccctggccgccctcggggcacaggtggccggctacgcaggcgcggcgggctcagcagagcacgggcatgccatccgtggaaaagatcatgcctgtggtgggctcgtaggtgcccgcgaggtagtacaggccctcgctgtcctggtact

SEQ ID NO: 512965 - DNA, 650 bp, Homo sapiens
ccagctgcatcgggcaccccatcccatgcacggtgggaggccttggggtgggctccatgctaagggtgcccgggaagcccagagtgagcgtcagtttggttccttagaagcgcccctccccactgaatccccagtctgcatgggcctggggggacccgggccccgcatgcagcagcaggctggagaggtcgcctggccaagtgcttgcaacgtgctgggcaggagaggcggtcccggctgagagctgcctgagggggacagcagggccataccctgatagctaagaggggcccctgtcctgggggcactgaggggttggaaggtggggctggaagcatgtgcacactgatgcacacacgtgcatgcacacgggcacacacatgcacaaacatgctcacccgggcgtccacgtgcacacctggccccatgctcacgcctgcaggagcgctcgcatgcacacaacgcacatggtctccraaccatggcagtgatggagaggggtccctggccgccctcggggcacaggtggccggctacgcaggcgcggcgggctcagcagagcacgggcatgccatccgtggaaaagatcatgcctgtggtgggctcgtaggtgcccgcgaggtagtacaggccctcgctgtcctggtact

SEQ ID NO: 512966 - DNA, 650 bp, Homo sapiens
ccagctgcatcgggcaccccatcccatgcacggtgggaggccttggggtgggctccatgctaagggtgcccgggaagcccagagtgagcgtcagtttggttccttagaagcgcccctccccactgaatccccagtctgcatgggcctggggggacccgggccccgcatgcagcagcaggctggagaggtcgcctggccaagtgcttgcaacgtgctgggcaggagaggcggtcccggctgagagctgcctgagggggacagcagggccataccctgatagctaagaggggcccctgtcctgggggcactgaggggttggaaggtggggctggaagcatgtgcacactgatgcacacacgtgcatgcacacgggcacacacatgcacaaacatgctcacccgggcgtccacgtgcacacctggccccatgctcacgcctgcaggagcgctcgcatgcacacaacgcacatggtctccgaaccatggcagtgatggagaggggtccctggccgccctcggggcacaggtggccggctacgcaggcgcggcgggctcagcagagcacgggcatgccrtccgtggaaaagatcatgcctgtggtgggctcgtaggtgcccgcgaggtagtacaggccctcgctgtcctggtact

SEQ ID NO: 512967 - DNA, 633 bp, Homo sapiens
ccctctttcatcactgatccatacaatctttgcaatatattcagcttctatatatatkcataggtcagatactggtttcttttctttttcttttcttttttttttttttttggagacagagcctcactctgtgacccaggctggactgcagtggtgcgatcttggctcactgaaacttctgcttcctgggttcaagcaattctcctgcctcagcctcccaagtacctgggactacaggagcaagtgactgcatcaggctaatttttgtatttttagtagagatgaagtttcaccatattgatcaggttggtatggaactcctgacctcaagtgatcctcctgccttggcctcctgggattacaggtatgagccatcatgctctgccagattctgattttttttattatgttcctttggtgtatttatctcactttgtgccaactactgtagctttaataatctggtagggcaattcctccaacttgtactggttcaatattatcttcacttttttgtttgtttgtttgttttgctggctatctccagtagtatcctttttaaaaattacattctaagtttgctgctgatacagaggtatataattacttttgtatattgattttgtatctagt

SEQ ID NO: 512968 - DNA, 633 bp, Homo sapiens
ccctctttcatcactgatccatacaatctttgcaatatattcagcttctatatatattcataggtcagatactggtttcttttctttttcttttctttttyttttttttttggagacagagcctcactctgtgacccaggctggactgcagtggtgcgatcttggctcactgaaacttctgcttcctgggttcaagcaattctcctgcctcagcctcccaagtacctgggactacaggagcaagtgactgcatcaggctaatttttgtatttttagtagagatgaagtttcaccatattgatcaggttggtatggaactcctgacctcaagtgatcctcctgccttggcctcctgggattacaggtatgagccatcatgctctgccagattctgattttttttattatgttcctttggtgtatttatctcactttgtgccaactactgtagctttaataatctggtagggcaattcctccaacttgtactggttcaatattatcttcacttttttgtttgtttgtttgttttgctggctatctccagtagtatcctttttaaaaattacattctaagtttgctgctgatacagaggtatataattacttttgtatattgattttgtatctagt

SEQ ID NO: 512969 - DNA, 633 bp, Homo sapiens
ccctctttcatcactgatccatacaatctttgcaatatattcagcttctatatatattcataggtcagatactggtttcttttctttttcttttcttttttttttttttttggagacagagcctcactctgtgacccaggctggactgmagtggtgcgatcttggctcactgaaacttctgcttcctgggttcaagcaattctcctgcctcagcctcccaagtacctgggactacaggagcaagtgactgcatcaggctaatttttgtatttttagtagagatgaagtttcaccatattgatcaggttggtatggaactcctgacctcaagtgatcctcctgccttggcctcctgggattacaggtatgagccatcatgctctgccagattctgattttttttattatgttcctttggtgtatttatctcactttgtgccaactactgtagctttaataatctggtagggcaattcctccaacttgtactggttcaatattatcttcacttttttgtttgtttgtttgttttgctggctatctccagtagtatcctttttaaaaattacattctaagtttgctgctgatacagaggtatataattacttttgtatattgattttgtatctagt

SEQ ID NO: 512970 - DNA, 521 bp, Homo sapiens
gtgctgttaataaagcagaagttggccttagattcggatttcctggcacacgctgtccccctgtactgggaggtgctggctgtgttctaggcctgcctcatgggtatcattctggattcttgggccttccctgtccctcatcctgggaaccacttttgttgygttgcatgtttttctcttttttggttcagctccttgttttaaacagtggatctttgagtagctttctgaggaagagtctgtgggagttaaatttctcacatcctcgtgtatttgcaaatctcttcattctacccttattttttagagatagttgagctgggtacccttattctttagagatagttgagctgggtataaattcacgactggaaatagttcccctcaccatttcaaagacatttttctatttttctcttgcttcccatgttgaagacattcaacattgtgattccaaaatcattgtaggagacctgcttttttatctctggaaacttttaggatcttctcactgtccctag

SEQ ID NO: 512971 - DNA, 521 bp, Homo sapiens
gtgctgttaataaagcagaagttggccttagattcggatttcctggcacacgctgtccccctgtactgggaggtgctggctgtgttctaggcctgcctcatgggtatcattctggattcttgggccttccctgtccctcatcctgggaaccacttttgttgcgttgcatgtttttctcttttttggttcagctccttgttttaaacagtggatctttgagtagctttctgaggaagagtctgtgggagttaaatttctcacatcctygtgtatttgcaaatctcttcattctacccttattttttagagatagttgagctgggtacccttattctttagagatagttgagctgggtataaattcacgactggaaatagttcccctcaccatttcaaagacatttttctatttttctcttgcttcccatgttgaagacattcaacattgtgattccaaaatcattgtaggagacctgcttttttatctctggaaacttttaggatcttctcactgtccctag

SEQ ID NO: 512972 - DNA, 521 bp, Homo sapiens
gtgctgttaataaagcagaagttggccttagattcggatttcctggcacacgctgtccccctgtactgggaggtgctggctgtgttctaggcctgcctcatgggtatcattctggattcttgggccttccctgtccctcatcctgggaaccacttttgttgcgttgcatgtttttctcttttttggttcagctccttgttttaaacagtggatctttgagtagctttctgaggaagagtctgtgggagttaaatttctcacatcctcgtgtatttgcaaatctcttcattctacccttattttttagagatagttgagctgggtacccttattctttagagatagttgagctgggtataaattcacractggaaatagttcccctcaccatttcaaagacatttttctatttttctcttgcttcccatgttgaagacattcaacattgtgattccaaaatcattgtaggagacctgcttttttatctctggaaacttttaggatcttctcactgtccctag

SEQ ID NO: 512973 - DNA, 372 bp, Homo sapiens
aagaattatacagtgaacactcacgtgctcactgcccgcattctgctctctgctttttctgatccctacctatccatctatctagctccccatctacctgccaattccaaatttccatgcatttcaaagtcagtggcagrcattggggcacttggcccttaaacatgcatatcgttagctagaggtcaaaatgtggtatgggctttgtttagttttgtttttaggcaaaactgataaacagtgaaatccataaatttctttctttctttttttttttttttttttgagacggagtctcactctgtctcccaggctggagtgcagtggtaagatctcagctcagtgcaacctccgcctcccaggttcaagcaa

SEQ ID NO: 512974 - DNA, 644 bp, Homo sapiens
tacgtcaaggctttcccatgtgccrtccccttggggtcacttccttagggcttctctactcctctcctttgcctgaagattagcatgcggtaaacaaaaagcacccagcataggatttgggacatggcaagagctcaaaaatatgcttctttccaattattatacttcatcctttcctcaaccaccctattgccatctgaaaaccagcatccttgttctacatttttagcatatttctagaatgtcaaatctccagaactggcgggaacaatggcatggaagagagaaggaaagctttggcatgggagagacctgcctccattgtacactggatgtatcaccagttcagtccttgggcgagctacgtactaatgaagcccttcgagcaataatctcctcctctctgagggagaggcagtgatggcatcctcacatttgtgtgtgtgtgaggataaaagtgcaatgatcttgtgaagcatctagcatcatgcctggtgcatgcttagtaactcttctctcacttctaccctccttccccgcccactaagcggcgcagtcactccatcgccaccagatggcgatagtccgtcaccacattgacagactgcctcattttgctgcggggtgaggatgcttcagaactg

SEQ ID NO: 512975 - DNA, 644 bp, Homo sapiens
tacgtcaaggctttcccatgtgccgtccccttggggtcacttccttagggcttctctactcctctcctttgcctgaagattagcatgcggtaaacaaaaagcacccagcataggatttgggacatggcaagagctcaaaaatatgcttctttccaattattatacttcatcctttcctcaaccaccctattgccatctgaaaaccagcatccttgttctacatttttagcatatttctagaatgtcaaatctccagaactggcgggaacaatggcatggaagagagaaggaaagctttggcatgggagagacctgcctccattgtacactggatgtatcaccagttcagtccttgggcragctacgtactaatgaagcccttcgagcaataatctcctcctctctgagggagaggcagtgatggcatcctcacatttgtgtgtgtgtgaggataaaagtgcaatgatcttgtgaagcatctagcatcatgcctggtgcatgcttagtaactcttctctcacttctaccctccttccccgcccactaagcggcgcagtcactccatcgccaccagatggcgatagtccgtcaccacattgacagactgcctcattttgctgcggggtgaggatgcttcagaactg

SEQ ID NO: 512976 - DNA, 537 bp, Homo sapiens
cattttagaagtgattattattgctttcctttctagaacttcmggtttgtgaagtattttctcaatgatcctcaaaacattctaagacataaagtagctgttattagtgtgattttatgcagaaactcaggcccagaaagcttcatggacttacccaattagcagaagagccaggtttgggcaggatcttggtttcctgcaaaggtttcgttgcctagccaggcgtggtggtgtgtacctgtagtcccagctacctggggggctggggtgggtagctcacctgagcccaggtagtcaaggctgcagtgagccatgatcctggtacccagtccactcttctctctactacatggtaatcaatgaaaatattacagatttacattttttaactttttatttaaactttcagctttggagtctctaagagtaaagatattatgtgatgatatttgtattttacttaattgcttattctttaaaacatgtaatatagaaaaaaatacaaattagcaaatgtcctttgctctaaagaaatca

SEQ ID NO: 512977 - DNA, 504 bp, Homo sapiens
ctgctctgtgaggtagatgagggatcatctaatctgtgcaccaaatccagctctccacctgcttttgtaaataaagttttcttggaacacagccatgcccaatcctttacagagggtgaaaacagactgcctagggttaaagccgggctccaccccttactagctgtgtgataaaatgagttggtgtatatgtaacctgtgcctcacggtttgtgccgcctagccattagctattattattaaagtctgttctgtttctgagcmcccccccccaattttggctgctcagttgtttgtatgtaaatagtgcaatgtgacctcagccaaagccagaatgtgggacattctacagggcaaatgacgtggtttatccaacaaatcaatggcataaacagggaaggagggggactcaaaagaaaagagacttgagagtcattgcagttaaatgcaatatgtgacttttattgggatcctgaaccaaataaactaactgtaaaaaagaca

SEQ ID NO: 512978 - DNA, 504 bp, Homo sapiens
ctgctctgtgaggtagatgagggatcatctaatctgtgcaccaaatccagctctccacctgcttttgtaaataaagttttcttggaacacagccatgcccaatcctttacagagggtgaaaacagactgcctagggttaaagccgggctccaccccttactagctgtgtgataaaatgagttggtgtatatgtaacctgtgcctcacggtttgtgccgcctagccattagctattattattaaagtctgttctgtttctgagcccccccccccaattttggctgctcagttgtttgtatgtaaatagtgcaatgtgacctcagccaaagccagaatgtgggacattctacagggcaaatgacgtggtttatccaacaaatcaatggcataaacagggaaggagggggactcaaaagaaaagagacttragagtcattgcagttaaatgcaatatgtgacttttattgggatcctgaaccaaataaactaactgtaaaaaagaca

SEQ ID NO: 512979 - DNA, 616 bp, Homo sapiens
caggctggtgctgacagttccagcacaccttggcttcctcaagagatccaaaggtacagttcccagaggtgctggtcacactcaacttgccttgaattgaaccacaacaaaacacggaaccaaactcctaaacaggactgcagggtcagggtctgcctccacttcccgtctccayatgtgcctgctttagggatccagctctgtagaagtacaggctatttggtcaggtgctgtggctcatgcctgcaatcccagcactttgggaggccaaggcttgtgggtcacttgagcctaggaatttgagatcagcccaggcaacatggtgaaaccccatctctactaaaaatataaaaattacccgggcttggtggtgtgtgcctgctcaggaggctgaggcgggagaatcacttgaacctaggaggcggaggtcacagtgagctgagatggagccactgcactccagccagggcaacagagagactctatctcaaaacaaaacaaaacgaagtccaggctattctttcttacctccagatatttgcacatgttgttccctctgcctaaagcactgcaggccccccttcccagaaaactactcgattcctcacccctcccc

SEQ ID NO: 512980 - DNA, 517 bp, Homo sapiens
actgtgtttctctgaaaagaatgatctgggggcaggctgggcatggtggctcacacctgtaatcccagcactttgggaggccgaggtgggcggatcaygaggtcaggagatcgagaccatcctggccaacacagtgaaaccctgtctctactaaaaaatacaaaaaaattagccacgcatggtgttgggtgcctgtagtcccagctacttgggaggctgaggcaagagaatggtgtgaaccgggaggtggagcttgcaatgagccgagatcgtgccactgcactccagccggcgacagagcaaagactccatctcaaaataaataaataaataaataaaagaatcatctgggggcctagaacaccaccctcactagctctgcattttcattgttccctccatttctctgtgtatatcattatcaagtctaagggtcttcctttccagccatgcccacctagagccccctccttacaatgaactgtgatcatttggtgtgacagagatttcctctgca

SEQ ID NO: 512981 - DNA, 517 bp, Homo sapiens
actgtgtttctctgaaaagaatgatctgggggcaggctgggcatggtggctcacacctgtaatcccagcactttgggaggccgaggtgggcggatcacgaggtcaggagatcragaccatcctggccaacacagtgaaaccctgtctctactaaaaaatacaaaaaaattagccacgcatggtgttgggtgcctgtagtcccagctacttgggaggctgaggcaagagaatggtgtgaaccgggaggtggagcttgcaatgagccgagatcgtgccactgcactccagccggcgacagagcaaagactccatctcaaaataaataaataaataaataaaagaatcatctgggggcctagaacaccaccctcactagctctgcattttcattgttccctccatttctctgtgtatatcattatcaagtctaagggtcttcctttccagccatgcccacctagagccccctccttacaatgaactgtgatcatttggtgtgacagagatttcctctgca

SEQ ID NO: 512982 - DNA, 517 bp, Homo sapiens
actgtgtttctctgaaaagaatgatctgggggcaggctgggcatggtggctcacacctgtaatcccagcactttgggaggccgaggtgggcggatcacgaggtcaggagatcgagaccatcctggcyaacacagtgaaaccctgtctctactaaaaaatacaaaaaaattagccacgcatggtgttgggtgcctgtagtcccagctacttgggaggctgaggcaagagaatggtgtgaaccgggaggtggagcttgcaatgagccgagatcgtgccactgcactccagccggcgacagagcaaagactccatctcaaaataaataaataaataaataaaagaatcatctgggggcctagaacaccaccctcactagctctgcattttcattgttccctccatttctctgtgtatatcattatcaagtctaagggtcttcctttccagccatgcccacctagagccccctccttacaatgaactgtgatcatttggtgtgacagagatttcctctgca

SEQ ID NO: 512983 - DNA, 651 bp, Homo sapiens
tcaagcagtctagctagaggtttatcaatttatccgattttctcaaagaacagcttttggtttcattagttttctttattgttggccacaagattttggggacctaaaggcaagtgtgcttcamataaatttagccttattatattatgtagaattgggaatgataggtatttcagctaataaattaattctatgtcagcatttccctaagtatggtgatgaatagagttttaggcttctctcaggtatcatctggattttgttgttcaaaataattttgtatttattttgttgcaggttaaaaagtatacagacttaaaagactaaactgcatgaagcattttagttttgtttttccgttatggagtgaaacttgccaacttcacttatttataagaagagaatctgaaatggaatttggagaaacatgaatttatagggtctttttttttgcccatgtgccattaagtactttgtaaaatttaaaggcctataaaaataagctatgactcaaacccctggaaagatcaacattttggaagtaaagtttaatacattaaaactggattctgctttcagaattataaatattgagctacaagagacactatacatcaacacgtgaaaacctggatatggttaaacagaccc

SEQ ID NO: 512984 - DNA, 500 bp, Homo sapiens
cagtggttgggaggagcttgaccagtgtgccccaaggagtggagtagagcccaatctaagtattccttgctgcttggaaccctccctgtttggaaccctccccaaagaggcagtcaggctgatgctcagtgctttgtgctccctgctccttcccgcgtasgcaggtgggcccaagggtgcctggcagggagcactacccctggacccctcctgctcgctctggggaccctgccagggaaggccactgggtgttcacctgcaaagtttctggttgtcactgcacagtggtcgcgtcatccatgggtattaaaaggacactgtcaagtacttttttaaactagtttttagggttttttaaaactctctgttgtttgtaatattctcttaaaagcttgaaaataaaacttctttccctaccattagtgtccctttccatatgcgagtttttcttcctcttccctatcctccctctgtggtgtaaacagccttctttctccctg

SEQ ID NO: 512985 - DNA, 500 bp, Homo sapiens
cagtggttgggaggagcttgaccagtgtgccccaaggagtggagtagagcccaatctaagtattccttgctgcttggaaccctccctgtttggaaccctccccaaagaggcagtcaggctgatgctcagtgctttgtgctccctgctccttcccgcgtacscaggtgggcccaagggtgcctggcagggagcactacccctggacccctcctgctcgctctggggaccctgccagggaaggccactgggtgttcacctgcaaagtttctggttgtcactgcacagtggtcgcgtcatccatgggtattaaaaggacactgtcaagtacttttttaaactagtttttagggttttttaaaactctctgttgtttgtaatattctcttaaaagcttgaaaataaaacttctttccctaccattagtgtccctttccatatgcgagtttttcttcctcttccctatcctccctctgtggtgtaaacagccttctttctccctg

SEQ ID NO: 512986 - DNA, 679 bp, Homo sapiens
tacaatcatctgtcagactgctatgccccatgctatattaatctagcttttaaagttgaagagatagcaccacactgggagcttgctgtctctccatgctgaccaacaagcctctgccaaacttctgccacttcagatccttgagaatgcggcaattcctaaccatgaggtccccagactcctaagccttcacagagttaaaaatggggtatttggaaagagtatcagtgtttcaaaaagcctacggaaattttacattgctacaaagactgtgataggctatcaggctgccttctttggttttgaatgttatcaactctttgaataactgtgattatctcatacttatcagaagctttggttgacatcatacattattttgatgaataaattacgagggtaaattaattattccttaaaactgtagtttgataggagaaaaatatttcaaaatatggtgtccaataaagaaaaatatatataagtaccctagtgaaaaaaggttgggtacctcaaccatgaaaacagtacatgaaaggaaaaacattgacctgggatttagggtaccagcccwtgctccattacttaataaacgaaagtataccatgattgcctatgacataaagtccaacgcaaaagataaaaatccatgctacacttcagttttctgccccattga

SEQ ID NO: 512987 - DNA, 603 bp, Homo sapiens
cacagttctggccacatagtaggtacttagcaaatgttgactcaatacgtgaatgaataagggagtggagtaatatcgaggagtttgcactaaaatgattgcatggcctacagaaagacctatgcgtttaaaaagattcatcatattccagggggaaaaaaacaactaatgaaggctaaaactttttaaaaagtactctattaaagaagaattgctgcaagaatttggagaaaagaaaaaagtttacaaagggtagcctcatatttcttctatgaaaaataaatatcagaagagagtagacgaacatatacaaatttttaaaggggaaagaatgaccgtcagacattttcttccccagctaacttgttttttcacatgggaaagacattttgaaatgtgcaagccttttaaaaatacatctactatatactcttgaaaatgttacttaatrtcagatacgataggctaagaaaagctacaattaccaacaaaccccaaacctcagtggcttaaaacaacacaggttattctttgacaactattagcacctttagagggagttggagtcatctgctgactgctgtcactcagcagtttaggcag

SEQ ID NO: 512988 - DNA, 602 bp, Homo sapiens
ctggtaggtcagatagtgtcatcataatgagttgagaaagattggaagaaagactaggttttcttttcttttttttttttataagaggggatctggttaaaaaaaaaagaactatttttgggctgtttaaaatgttagatgtttctaaccagattttaaatgagatttttcctattgttttgggattttaactgaagcccaaagctgaggacagtaggtgaccattgcccccattttaaaaacagatgttatacacaccctcacatggcatgttaaaaggtggctgaactagacctgagcttgcctctagtatctgacagagagaaggattctttaaaggtggtccatggaagtaagatgcccttctctttttatgtgtttttttaccccacaagctgagaaacrgacttcaagacccccttagagagactggagatgtttgccagaaggagggcactagcttgctctttgaccatcaataaatcaactttgcaagtactgtattccttcatctgtccaagtattctaggctgcagggtgagaggaaattggggacttgtgcttgttgtgtgttatgtttattatcctacacttatgtatac

SEQ ID NO: 512989 - DNA, 633 bp, Homo sapiens
tgtgttatgacagttttatttggtgatctttctgtgtttctttttcaggtcagaagtttatttgatattcacaacatgcaactaagggtcctttaagtctggagccatgtcacatttcagaaaagaaaggtgagacactgaaaagttcttctgtaagcagtgaatgttagcacatctgaatatctactagaaaaatgaacttacatgccatacttatttaaaatgattgtgttttctccctatcctagagcttcttatagggtttgccatggcatgctaagataatggtcccctaagcccttaggaaggctggggtaactggaactcccaggtagctgtctctggagggagcagttttatctaaggcttcttagagggtagccaggagcagcrtctggtagcacactccccatgtgtgctggggatggcaaaggtacttatccggcctagcttcggtaccagggcatgcctccctcctcatctcctccagcagcctgttgcagggcattctgctgctcagtatgcataagaagtctgggcactactgaatgatctcatgttctaggtgtcttaagagcaccagccaagggtgtaggttaaggtgatgccagtgggatggtggtggggctggca

SEQ ID NO: 512990 - DNA, 580 bp, Homo sapiens
ctgaacattgtttctcaccaatattccagyacaacatcctctgggaaaatagttgagttatatttcccacccctctgaaattaggctaaagcaggagttggcaaactatggcccaaaagactaatacagcttggttccaatttgtgtaaagttttattggaaaacaacccccttattagttaacaaatcatctatggctgctttcatgctagaacagcagagtgaaagtggtgaccgggcctgtatgtcccacaaagtataaaatatttactccacagcccgtaataggaaaaagtttaccaatgcctcaaactatcatgctcagtgtcacctaagttttaatggccataaaaagtgtcatgcatttcattaaagggtggtgatcgttaaatgctcgatttaaagttataatcttcaattgtctgcaaaaataattgataagttatttaaataattgtggcccatgatatcacaaaataattcgacggctatcatctgaatgtttgtgtccccccaatatttatatgttgaaatcctaaccctcaaggtgatggatggtattaggagagggtgtctttgg

SEQ ID NO: 512991 - DNA, 580 bp, Homo sapiens
ctgaacattgtttctcaccaatattccagcacaacatcctctgggaaaatagttgagttatatttcccacccctctgaaattaggctaaagcaggagttggcaaactatggcccaaaagactaatacagcttggttccaatttgtgtaaagttttattggaaaacaacccccttattagttaacaaatcatctatggctgctttcatgctagaacagcagagtgaaagtggtgaccgggcctgtatgtcccacaaagtataaaatatttactccacagcccrtaataggaaaaagtttaccaatgcctcaaactatcatgctcagtgtcacctaagttttaatggccataaaaagtgtcatgcatttcattaaagggtggtgatcgttaaatgctcgatttaaagttataatcttcaattgtctgcaaaaataattgataagttatttaaataattgtggcccatgatatcacaaaataattcgacggctatcatctgaatgtttgtgtccccccaatatttatatgttgaaatcctaaccctcaaggtgatggatggtattaggagagggtgtctttgg

SEQ ID NO: 512992 - DNA, 640 bp, Homo sapiens
aacaaagttgtgtacgtgtatctgcgtgtatgatatagctatgaaggaaagagaccatttccacgattcatacatggaaatatcacatgatagtcatatctcatacatatatacaaagttaagtagatttaaatatattagcatgtttttacatatgttatagatctctaggagttactaagcagaggcacaaaatgaaatgttagcctttgctatttgttcaggacaaaggaggtcatattctattttggaagcagaagcaaagactatatttactgcaagaatgagcctagtcagagtgaattgtgtagctagattgctagtcacctttgtcttatgttagtactactgtcctacttgcataaaaagacccctccacacacacctccctactgcatggaggccagaaatttctaccactagagcaggattactcaatgtcagcactattagcattctagtacagataaatctttgttgttggagsctgttctgtacattttaggatgtttagcacctttgctggcctctaccctctagatgccagtagcataccccacttgtgacaaccaaattatctgcagacactgcaatgtcccaggttcttagaaggaggggaaaattaccctcagtagcaaaa

SEQ ID NO: 512993 - DNA, 583 bp, Homo sapiens
ctatcccctttttccctgcaactagttaatccctagtcctttaagattcatctcaactattattttctgaaagaagccttcctgatctctttagatatgggttcctatagcaccctgtcaggcctctgagcccaagctaagccatcatatcccctgtgacctgaatgtatacatccagatggcctgaagcaactgaagatccacaaaataagtgaaaatagtcttaactgatgacattccaccattgtgatttgttcctgcyccaccctaactgatatgatatattctgccccacccttaagaaggtacttcgtaatattctctccacccttaagaaggtgctttgtatgcctatcccaaacctataagaactaatgataatcccacaaccctttgctgactcctttttcggactcagcccccctgcacccaggtgaaataaacagccttgttgctcacacaaagcctgttggtgaactctcttcacatgcatgcatgtgacacaccctgtaaggaagggataagtttgcttaatgtctgcaggtactctctgcaagcatgtacgctatgtagggagaaggac

SEQ ID NO: 512994 - DNA, 583 bp, Homo sapiens
ctatcccctttttccctgcaactagttaatccctagtcctttaagattcatctcaactattattttctgaaagaagccttcctgatctctttagatatgggttcctatagcaccctgtcaggcctctgagcccaagctaagccatcatatcccctgtgacctgaatgtatacatccagatggcctgaagcaactgaagatccacaaaataagtgaaaatagtcttaactgatgacattccaccattgtgatttgttcctgccccaccctaactgatatgatatattctgccccacccttaagaaggtacttcgtaatattctctccacccttaagaaggtgctttgtatgcctatcccaaacctataagaactaatgataatcccacaaccctttgctgactcctttttcggactcagcccccctgcacccaggtgaaataaacagccttgttgctcacacaaagcctgttggtgractctcttcacatgcatgcatgtgacacaccctgtaaggaagggataagtttgcttaatgtctgcaggtactctctgcaagcatgtacgctatgtagggagaaggac

SEQ ID NO: 512995 - DNA, 590 bp, Homo sapiens
gctcttagacctctctctctctttctctatctctctctctctctctctttctctctctctctctttctctctctctccccttctaaaacttaaagattgagataggtatagtcatcgaagtgtgccagagwttctggtaagtaaagccaaactttctagataaagaagcagaaagaagagccccagagaaccagaaagctctaggaagattacaaggcatcagtgggtgggaaagtgaccctctaaagttttccatgaactcctaggctcactcttgagcagaagcaaaacaaaatgaaacagaaaacctcaaaaaataaatgaaacatataaaggagaattaagtggaaatgttaacggacacaacataaaacagacttactgaaaaatgcactagatgagcttaacagcaggatgaaaatgacagaagagacattgaacgtcaagttaaatcgacagacattatccaatctgaacaacagagatggagaaggtgcaaaaaagaagaagcaatcctcagggacctgtaagaaattaacaccatgataaatatttatgtaataggagttccagaaggaaaggagaaagaa

SEQ ID NO: 512996 - DNA, 618 bp, Homo sapiens
acactaagtctcttttttcactgctacacaactgtgcaaaaaaaaaaaaaaaatgcagctcacgtatgtcaccataaggcaccatcaatttactctgccaaaccaaactcgcttctgactacatttaaaaatatctttccaagattgtaaattaattgtaaaatatagttctctcttgcaacttcatttgataacagttgaatgctactttctttatgattatttctatttcagaggtaatacacgacagtgattaaaagcataggtactagttttgtgaaattggataagtggtttaaaatgtccgtgtcttaatttccttttatgtttagtgtgttagatttgttaatacatgtaaaatacaaagacagttaataaatgctcaacaaggccgggcgcagtggctcacgcctgtaatcccagcactttgggaggccgaggcgggcggatcacaaggtcaggagatcgaaaccatcctggccarcacggtgaaaccccatctacactaaaaatacaaaaaattagccaggtgtggcggcgggcgcctgtagtcccagctgctcccggaggctgaggcaggagaatggcgtgaactggggaggcggaggttgcaatgag

SEQ ID NO: 512997 - DNA, 551 bp, Homo sapiens
acacatttttttcatgaactacatgttttagcagcttcattttgatataatattttatattattgagatacaaaaccataatattcactcaaattgtacaattcaatgcttccttggaatactcatagttgtaccattatcacaaaacctaattttagaacatattcatcacgtctaatctacccattagcaatcactctctatctctctcctcctcacatataggcaaccactaatctactttgttttactatagatttggctattctagacattttgtacaaatggagtcatacaatatgtcatcatttgagactggctatttgcatttagaatgatgtttcatagttcatgcatattatagaaggtacaacacttcattcctttttattgctgagtaaccttccattgcatgkttaaactacattttattgatttattcaccaatttatggacattttgaaatttttcacttttatgtggttatgagtaatgctgatataaacatgtacaagatattttctggatttttgtggttttcatttcttttg

SEQ ID NO: 512998 - DNA, 551 bp, Homo sapiens
acacatttttttcatgaactacatgttttagcagcttcattttgatataatattttatattattgagatacaaaaccataatattcactcaaattgtacaattcaatgcttccttggaatactcatagttgtaccattatcacaaaacctaattttagaacatattcatcacgtctaatctacccattagcaatcactctctatctctctcctcctcacatataggcaaccactaatctactttgttttactatagatttggctattctagacattttgtacaaatggagtcatacaatatgtcatcatttgagactggctatttgcatttagaatgatgtttcatagttcatgcatattatagaaggtacaacacttcattcctttttattgctgagtaaccttccattgcatgtytaaactacattttattgatttattcaccaatttatggacattttgaaatttttcacttttatgtggttatgagtaatgctgatataaacatgtacaagatattttctggatttttgtggttttcatttcttttg

SEQ ID NO: 512999 - DNA, 684 bp, Homo sapiens
ctctctgtctcagttttattacctataaatatgagatgtaaatattgtctaatttataggggtatttagaggattaactgacttaaaacattaagattcttaaatctattttaggatataaaatctttctaacatgctatttttctcagtattaaatgttacaagcaaaattacgatttatgggtgcagagtatcccattattaaattaatatgcttttgtcacttagacaatattataagaatactaagagctaggtattggaatcaatttaaatcatttttcttgatataaatcttcacttttctgcttttagcctttattatgctgggcaagttatgttacctctttgtgcctctatttcagcacctgttaaatgcaaatgccatttgtagctaaagtatacggttgttgtgagttttaagycagttaatgtatgtttagacatcatcaatttatagtagtagtttttagtatatgtcatttatactcaacactataaacagtcttgcaatagcaactaccacatgtattgctatgatcaatttcctcagataaaatcctatatttggaactctgaagtaaaaagctattaacatcttaaagtaatatgcttcctcaaattgcccttcaatcaactctagaaatttaaacactcaccagaaatgtagcaagtagcgcattt

SEQ ID NO: 513000 - DNA, 611 bp, Homo sapiens
gtcctttgccctctttttagtgaggttatccattttttcttgttgaattgtctaagtttcttgtggatttttcatattagaactttattaggtgtagattgcaaatgttttttccctttctgtaggttatctgtatacattgtcgatagtttcttttgctgtgcagaaggtctttcatttaattagatcccacttatcaacgtttggttatgttgcaattgcttttgagaacttagtcctgaatttttggccaaggccaatgtccagaatggtatttcctgggttttcttctaggatttgtatagtttgaggttttatatstaaagatttaatccatcttgagttagtttgtttatatggtgagagataggagtctagatgcattcttctgcctatggctagccagttatccaagctttcttgccaaactgtgaataaaagagaacttcctcaaactggtaaagatttttttaattaaaaaataattcttaatgatgaaatgttgagatgaaggtggagataaagatacccactttaacaatttcttttctacttagaagtgaagaatgaatcaatgttatgaagtaagagaatgaaataagaattataaa

SEQ ID NO: 513001 - DNA, 615 bp, Homo sapiens
tgtggaggatcagaggtctgttgtaatatctcatgggaccgctatgccctcttatgcttttaaagggatgtcgccatatttcaaatttgaatttaataggctgaattatggtcacatgtatgaagatcaatgattacctagaggcatatctaagaatatgaggaccattgaaacagactgcattttgtaactgtgaaacccaatgagtttcaatactgtgcaagctctcaagagagaaattgctcatctaactctgctgattaaattctgctgtttacttaaaggtgggcataaaacctttgggaaagaaataaatgatttaaaaatcactttaggttccaaaccattaacggaagactgatgaacacaactattcccactgaacgtatttttaaccaactcatcattttaaaactcatttagtcctgatttgtgttaaaaagtggacaccattgattgttgctttttcagactacagatccacatacaccaggggaaatacctaattgagtagcattcaaagctggatcttaattaactagaaactagaggcatgttcattttyattatatgtaaataacaaagtgaccctcaagcaagaggcataaacccctc

SEQ ID NO: 513002 - DNA, 493 bp, Homo sapiens
tctgtcagccacaggagtctagctgcagtttctttttcataatataggacaaacctagggtttatctgaatacagcttctgaacttgggtgaaagtacatccctgagacatggccacacatacttaaacagctcctgaggcttcttttgcattaaaaaattctcataccaggctggaaaaatttccayagtgccaaaaaatagtcagaggttttttattgtttaacttttattgtaagttcaggggtgcaagtgcaggtttgttacataggtaaacttgtgtcatgggggtttgttgtatagattatttcatcacccaggtattaagcctagtagccattcattatttttcctgatcctcatcctccaataggtcccagtgtctgttgttcccctccatgtgtccatgtgttctcgtcatttagctcctacttatatgtgaaaatgtggtatttagttttctgttcctgtgttagtttgctaaggataataac

SEQ ID NO: 513003 - DNA, 493 bp, Homo sapiens
tctgtcagccacaggagtctagctgcagtttctttttcataatataggacaaacctagggtttatctgaatacagcttctgaacttgggtgaaagtacatccctgagacatggccacacatacttaaacagctcctgaggcttcttttgcattaaaaaattctcataccaggctggaaaaatttccatagtgccaaaaaatagtcagaggttttttattktttaacttttattgtaagttcaggggtgcaagtgcaggtttgttacataggtaaacttgtgtcatgggggtttgttgtatagattatttcatcacccaggtattaagcctagtagccattcattatttttcctgatcctcatcctccaataggtcccagtgtctgttgttcccctccatgtgtccatgtgttctcgtcatttagctcctacttatatgtgaaaatgtggtatttagttttctgttcctgtgttagtttgctaaggataataac

SEQ ID NO: 513004 - DNA, 493 bp, Homo sapiens
tctgtcagccacaggagtctagctgcagtttctttttcataatataggacaaacctagggtttatctgaatacagcttctgaacttgggtgaaagtacatccctgagacatggccacacatacttaaacagctcctgaggcttcttttgcattaaaaaattctcataccaggctggaaaaatttccatagtgccaaaaaatagtcagaggttttttattgtttaacttttattgtaagwtcaggggtgcaagtgcaggtttgttacataggtaaacttgtgtcatgggggtttgttgtatagattatttcatcacccaggtattaagcctagtagccattcattatttttcctgatcctcatcctccaataggtcccagtgtctgttgttcccctccatgtgtccatgtgttctcgtcatttagctcctacttatatgtgaaaatgtggtatttagttttctgttcctgtgttagtttgctaaggataataac

SEQ ID NO: 513005 - DNA, 493 bp, Homo sapiens
tctgtcagccacaggagtctagctgcagtttctttttcataatataggacaaacctagggtttatctgaatacagcttctgaacttgggtgaaagtacatccctgagacatggccacacatacttaaacagctcctgaggcttcttttgcattaaaaaattctcataccaggctggaaaaatttccatagtgccaaaaaatagtcagaggttttttattgtttaacttttattgtaagttcaggggtgcaagtgcaggtttgttacataggtaaacttgtgtcatgggggtttgttgtatagattatttcatcacccaggtattaagcctagtagccattcattatttttcctgatcctcatcctccaataggycccagtgtctgttgttcccctccatgtgtccatgtgttctcgtcatttagctcctacttatatgtgaaaatgtggtatttagttttctgttcctgtgttagtttgctaaggataataac

SEQ ID NO: 513006 - DNA, 454 bp, Homo sapiens
gtcaacatcactatcagcatttcagttactaccatgtaacagtctctaaggatttccaaactttccctcatcttcctgtcttctgagytctccaaactcttccaacctctatctgttacccagttgtaaagctgcttccacattgtcaggtatctttataataatggagggatgacctaacacaaaaattggtatcagaagtgagttattgctgaaaagaatcagatcttgtgaaaactcattatcctgaagatagcacaaagccataaagggtctacccacatgatgcaaacacatcccactaggtcccccactccaacactggggattacatctcaacatgagatttgaaggagacatccaaactatatcaagcagtaagcatttactttttcttatgaatctatgtgtcacctgggctgtccttacagcatttctcatgtatttgtggaca

SEQ ID NO: 513007 - DNA, 528 bp, Homo sapiens
gggggttggtctaccacagctattccatcataatcagaaggagacttccagaatgacacaaaactagcccatcatgggaacgacttcaggtgaaaatgccactgaggttattgccaaaactgtctcatacacagcaatccagaagatggaagtcaatggtagattaattgaaatatttagactgaagtacaaagtgaaacaaggcaaatacagaaaaagcattaaggccagaggcagtggctcacacctgtaatcccagtaatttgggagcccaaggtgggaggatcacttgagcacaggaatttgagacsagcctgggcaacatggagaaaccccatctctacaaaaaaatacaaatattagctggatgtggtagtgcacgcttgtattcctagctacctgggaggctgaagtggggggattgcttgaccctaggaggcagaggttgcagtaagctgtgatagtgccactgcactccagcctgggcaacagagtgagaccttgtctcaaaaaaaaaaattcattcta

SEQ ID NO: 513008 - DNA, 588 bp, Homo sapiens
ctggcttgtgaccatccacgtggtgttgccccaaagaagcaaagcaccagtgaccgtgggttacgtcccgaaataagcttccagtggggctgctcttgaagccagcagttggggactttatggaaagacatgtgttggttggcaggggtttttggtttagccttttcacctcatttgtaaatgtgaaaaaaataattatcatccaggttatatgcgaggcccgttcattctttaagttcaattcaaataatccatcccagctcagttttctctctgctccctggactccactccgctgtagtgttgaggattttgtttatttataatgacrctattttattttcagcacatcacaagttagtagctacttatatgtccttccctgtccactagactctgattttcttgaaggagagggacacatttcatcatcattatattcgcatcttcaggacaatggctctggggagagatgagttaactcttgactgaagacagctcggtgtggtggctggaacctcagctttaggctgtgacggatctgcatttgagtccggtctagacaagctgtgagaattgaagcacact

SEQ ID NO: 513009 - DNA, 242 bp, Homo sapiens
taaccacgaaattccatcagtacagcaccaactcctcaccttttctgccccagcccgggccaccaacattctcgccttgtttcttatgataatctgttcayggtcatcctgcctccacaacctcattcccctctgatccactcatagttgtagcacacaaatgtggtgaggtccctgaccaccatccctggccgggtgtatctgtgtaactgcgtttttatcacggcacctgccacggtgca

SEQ ID NO: 513010 - DNA, 242 bp, Homo sapiens
taaccacgaaattccatcagtacagcaccaactcctcaccttttctgccccagcccgggccaccaacattctcgccttgtttcttatgataatctgttcacggtcatcctgcctccacaacctcattcccctctgatccactcatagttgtagcacacaaatgtggtgaggtccctgaccaccatccctggccgggtgtatctgtgtarctgcgtttttatcacggcacctgccacggtgca

SEQ ID NO: 513011 - DNA, 602 bp, Homo sapiens
tagaggctttttatttaaattttttttctgcagcttgtgacgtaatgagaagcaaccaatctatttcagagaggggggaacccgggcagcccttggaagcaggaaaaggccaccacttgggaacctttgtacactagcgtggatatctgtggggtgctcgtgggcgctgagaggcagccagcccagttacaccgtccagagtggccacctctcccacctcacctctgcttctttcccctggtggctggaggtagcatgcgctaaggatacagaggggatcagattctgtgtcctcccccacagcttaattggggtgatcctcacacagtgagacattcccccccaatttgatcagcatgaggatgggagaccacagaagagaggccttcaaccccrcatgcgggaggcaacgaagtcttcctggtttggattttcacatgctctggcttctactccaaatcctggcccacactctgacccatctgcccacaggcaccctggcctcccatcaagtgggtgtgcacagatcatcaggctgagagatgaaagacccccaccttattgcttcctctgggatgtcaggagaccccctgagctgagac

SEQ ID NO: 513012 - DNA, 602 bp, Homo sapiens
tagaggctttttatttaaattttttttctgcagcttgtgacgtaatgagaagcaaccaatctatttcagagaggggggaacccgggcagcccttggaagcaggaaaaggccaccacttgggaacctttgtacactagcgtggatatctgtggggtgctcgtgggcgctgagaggcagccagcccagttacaccgtccagagtggccacctctcccacctcacctctgcttctttcccctggtggctggaggtagcatgcgctaaggatacagaggggatcagattctgtgtcctcccccacagcttaattggggtgatcctcacacagtgagacattcccccccaatttgatcagcatgaggatgggagaccacagaagagaggccttcaaccccacatgcgggaggcaacgaagtcttcctggtttggattttcacatgctctggcttctactccaaatcctggcccacactctgacccatctgcccacaggcaccctggcctcccaycaagtgggtgtgcacagatcatcaggctgagagatgaaagacccccaccttattgcttcctctgggatgtcaggagaccccctgagctgagac

SEQ ID NO: 513013 - DNA, 598 bp, Homo sapiens
ctgtgacatctgaggaaatgctaaagcgctcttttgccacagaaagtaaaactttatgacatagcttcttttaaaacttggcatttttgggcatagtcacttcacctataccaccacagttcaaagactttaaaaatcaatattcactccagcaacccctgctctattctctaagtccaaaactaaagcaatcatcaagagttttggaaacaaaccaaaaactttatttacaaaagtaaattttaacttgcttttatatgtcatataccgttaatgatgacagcaacagatttaaaatacattgaggtttgtgcagctcatttccccctagttataccataaaactttataaacattgctttagctttgatgtttggtcacgtttkttgtgcagaagtcacgtttcagggtaggttcaccgccagacacggtcacatcaccattggctgtggatttccaagaagcaaaggagccaatctcagcaaagctcgcactggcatttttagctgcttaaatttgaagagcagttcagcaaagcttgtgctccctaaaatggaaatggggtgggaaggtcacatctctaaataaattcagccat

SEQ ID NO: 513014 - DNA, 643 bp, Homo sapiens
gcccttatcaaaaaatattttttttgagaatctcaaaaaaattgggtgcttagaattcatcatatcttagtattcagcttaatggataaattttttttatctgtttctatattctgaaaaatacaatcaggtgataatactattaatttttaaaactattataaaaaaattcaaacacaaaattaggtatttattagttgtaaagctttgtaatattagaaattaagattatatgtgattctaaaaaacccaactgaaaacctagaaaataaagaaaaatagctttaataaaaaaatcaattagtaaagaataatatggaatatttagtttattagtatagatcagtgtttggggctctgtgaagaagaatccatccttttctgaataaaaatgaaagttattcatatataaagttgataattttttcttttttgctccaaaacagtccctaacaatgacactgcaacattaatgaagaggaaagtcaaactaggggcagtaactactgagaaactagaacataaaggggtaggtaacagagktactgaagataagacttagatatgcaattaccttctagtcctataggtggcaggtgctgtggagctggcacagagtggtagacgaggaagcaggccagca

SEQ ID NO: 513015 - DNA, 646 bp, Homo sapiens
tggctggcaacgccgctgagcactcagccttcagtggaccttccaaaccatggcaggcactcggagtccacagggacgcaaaggaccatgctctacctctcagtaggctgtgtaggccaaccactctggaatccacaggcaccagtcaccagccccaccctcaccttcgagccaggctcctgtggtcaccgtctcatggtgatggcaaaaagctcctcttttgctccctgtgaccccctgccccctctttggtgtggctgggggcaggagggaggccctcactgtgctctggcctcarggtagagtagccacaagacaatcaccctgtcaaacttcagcggagttcccgtgtgctcttctggtaaaagggcttctttgtagcattgagctgtatatgcaacgtatcctcttgtgtgtgagtgtgcatgtgtatgagtgtgtgtgtgcctgcgtgtgtgtgtatgtgtgttagagatacacacatataggccccaggaaggagtgaggaaggggaaagaaaccagcatttattgcactatgtataaattttcaaaattcatccgtgactaacacaagaagctgtgtcccacctgaacaggtaaacttgcgtagttatttcagaacagcagccccatctccatcccaa

SEQ ID NO: 513016 - DNA, 631 bp, Homo sapiens
caaaccaaaaccacaatgaaagaccatctcaccccagttagaatggctattgttttttwaaaaaacaatgacacatgctgggaaggctgcagagaaaagggatcacttacacactgctggtgagagtgtcaattagttcagccactgtggaaagcagtgtggagatttctcagagaacgtaaaagagaactgccatgtgacccagcaatcccattactgagtatatctatctaacagaaaataaactgttctatcaaaaagacacgtgcactcacgtgttcatcccagcactattcacaatagcagagacatggaatcaacccaggggctcaccaccagtggattggataaacaatcaccagcctgatgagcagcagggcaggttttcatttcctcagtccaggctttctctgaacttatgtaaggttgtactgaaagcatagtgagacccactgctgcagctttgagattggtgccacccaggtgagtttgttcaggggttaggaaattgcaaagaaattctggcattttagagaacaactgaggatttgagaatggaaaagtgaacagcactgggagctcagaggaggtaaccagagggctagaaattctagaagcaaagcctagtccc

SEQ ID NO: 513017 - DNA, 631 bp, Homo sapiens
caaaccaaaaccacaatgaaagaccatctcaccccagttagaatggctattgttttttaaaaaaacaatgacacatgctgggaaggctgcagagaaaagggatcacttacacactgctggtgagagtgtcaattagttcagccactgtggaaagcagtgtggagatttctcagagaacgtaaaagagaactgccatgtgacccagcaatcccattactgagtatatctatctaacagaaaataaactgttctatcaaaaagacacgtgcactcacgtgttcatcccagcactattcacaatagcagagacatggaatcaacccaggggctcaccaccagtggattggataaacaatcaccagcctgatgagcagcagggcmggttttcatttcctcagtccaggctttctctgaacttatgtaaggttgtactgaaagcatagtgagacccactgctgcagctttgagattggtgccacccaggtgagtttgttcaggggttaggaaattgcaaagaaattctggcattttagagaacaactgaggatttgagaatggaaaagtgaacagcactgggagctcagaggaggtaaccagagggctagaaattctagaagcaaagcctagtccc

SEQ ID NO: 513018 - DNA, 633 bp, Homo sapiens
gggcaactaaaggtatctggccaagggtacatccgaaggaccctacaccggcccccagtccccaccagcctgttcaggtgtcggacaaagacttccaatctttcctatcatgtttttcctactgctcttctgagaaatgttacttagttatgtgtctctttgagaaattgcttcttttcagggcaggatgctgggttatgcttgatgaagctaaataaactgccagccagatgagaattatagacaaataatatgcagggaccccccctggattcatcttagtcttgagctcatatagaattcagagaaatcaaaggcagttgacaaggagggtcaaggctgagtgcaagtgaacgcaactactcctgctggcttgatccccccctggtcatgaatggtggctgcgcgcacatccacgaccaaggcaagcctgagagacgccttggactctagcacagcagagggaaagactaaggatgcctttttctcccctctctctttctaaatgggtagcctgcactcctctcaagtgcgagacattgggactcctttgatcctcagactctgaagaaaaaatacctggtatttatcagtascaaggcttggcccagctagaagttggaagatggggag

SEQ ID NO: 513019 - DNA, 514 bp, Homo sapiens
tgtgtgtgctgctgtgttgtgaactccgtggtttgaacatgaaagaagtgtaccttctttcactctgtcwtctttcttttctttgagtctgttttttatagtttgtattttaattatgggaataattgctttttcacagtcactgatgtacaattaaaaacctgatggaacctgggctttgtgcttctgcttgataatcggttctttagttgaatggctttattatttatttatttgagacggagtctcactctgttgcacagcctgaagtgtagtggtgcaagcttggctcactgcaacctctgcttcccaggttcaagcgattctcattcctcagcctcccaagtagctgggattacaggtatgcgccaccatgccaagctaatttttatatttttttatagagacagggttttgccatgttggccagcctggtcttgaacttctgacctcaggtgatccgcctgcctcggtctcttaaagtgctgggattacacatgtgagccactgtgcc

SEQ ID NO: 513020 - DNA, 514 bp, Homo sapiens
tgtgtgtgctgctgtgttgtgaactccgtggtttgaacatgaaagaagtgtaccttctttcactctgtcttctttcttttctttgagtctgttttttatagtttgtattttaattatgggaataattgctttttcacagtcactgatgtacaattaaaaacctgatggaacctgggctttgtgcttctgcttgataatcggttctttagttgaatggctttattatttatttatttgagacggagtctcactctgttgcmcagcctgaagtgtagtggtgcaagcttggctcactgcaacctctgcttcccaggttcaagcgattctcattcctcagcctcccaagtagctgggattacaggtatgcgccaccatgccaagctaatttttatatttttttatagagacagggttttgccatgttggccagcctggtcttgaacttctgacctcaggtgatccgcctgcctcggtctcttaaagtgctgggattacacatgtgagccactgtgcc

SEQ ID NO: 513021 - DNA, 514 bp, Homo sapiens
tgtgtgtgctgctgtgttgtgaactccgtggtttgaacatgaaagaagtgtaccttctttcactctgtcttctttcttttctttgagtctgttttttatagtttgtattttaattatgggaataattgctttttcacagtcactgatgtacaattaaaaacctgatggaacctgggctttgtgcttctgcttgataatcggttctttagttgaatggctttattatttatttatttgagacggagtctcactctgttgcacagcctgaagtgtagtggtgcaagcttggctcactgcaacctctgcttcccaggttcaagcgattctcattcctcagcctcccaagtagctgggattacaggtatgcrccaccatgccaagctaatttttatatttttttatagagacagggttttgccatgttggccagcctggtcttgaacttctgacctcaggtgatccgcctgcctcggtctcttaaagtgctgggattacacatgtgagccactgtgcc

SEQ ID NO: 513022 - DNA, 514 bp, Homo sapiens
tgtgtgtgctgctgtgttgtgaactccgtggtttgaacatgaaagaagtgtaccttctttcactctgtcttctttcttttctttgagtctgttttttatagtttgtattttaattatgggaataattgctttttcacagtcactgatgtacaattaaaaacctgatggaacctgggctttgtgcttctgcttgataatcggttctttagttgaatggctttattatttatttatttgagacggagtctcactctgttgcacagcctgaagtgtagtggtgcaagcttggctcactgcaacctctgcttcccaggttcaagcgattctcattcctcagcctcccaagtagctgggattacaggtatgcgccaccatgccaagctaatttttatatwtttttatagagacagggttttgccatgttggccagcctggtcttgaacttctgacctcaggtgatccgcctgcctcggtctcttaaagtgctgggattacacatgtgagccactgtgcc

SEQ ID NO: 513023 - DNA, 575 bp, Homo sapiens
gaagctcctaaattttcatgcaaaaaaaacctctattatcatgttagaaaagcaggttcatagggccagactacctgttttgaatamcatgttacttgcctataacctcaggaaaattattttctagtctctcagtccttcagtgttctcttcttacaatgaagtctatgactgtatctgtttcttagcagtgttgccaggattcaatgagataatccacataaagtgcttagcactctctctggcatatggtggtgctcagttagcaaacaatgttgttattttatcttaccttcaagtaatataaataataactttttatttttaatgtctactgtaaggaataatgaatctacaaaaggagtatctgttctctctccttccagctatactcttgcaattttgtttcattatttcataattttcataaagcaggaaaaaaagaaaagcaggtatgaggaaagagaccactcactcgagtcctgcagtattattctgcttctgcctattcttgtctgctggctccaggctagcttctacataaagaatatcaagctggtcccagaaactggcaa

SEQ ID NO: 513024 - DNA, 575 bp, Homo sapiens
gaagctcctaaattttcatgcaaaaaaaacctctattatcatgttagaaaagcaggttcatagggccagactacctgttttgaataccatgttacttgcctataacctcaggaaaattattttctagtctctcagtccttcagtgttctcttcttacaatgaagtctatgactgtatctgtttcttagcagtgttgccaggattcaatgagataatccacrtaaagtgcttagcactctctctggcatatggtggtgctcagttagcaaacaatgttgttattttatcttaccttcaagtaatataaataataactttttatttttaatgtctactgtaaggaataatgaatctacaaaaggagtatctgttctctctccttccagctatactcttgcaattttgtttcattatttcataattttcataaagcaggaaaaaaagaaaagcaggtatgaggaaagagaccactcactcgagtcctgcagtattattctgcttctgcctattcttgtctgctggctccaggctagcttctacataaagaatatcaagctggtcccagaaactggcaa

SEQ ID NO: 513025 - DNA, 460 bp, Homo sapiens
atattaaccaggtgtggtgcacacctggggtcccagctacctgggaggctaaggtgggaggtttgctcgaggttgcartgaactgtgaatgcaccactgcattccagcctaggccacagaacaggaccttgtctataaataaataagtaaaaatataattaaaaaagtaaaaagaaatataagcaaatataaatataaatacatataaatataaaaatgaatacatgaaaacaaacaatttttaaatttaacatcactgagggcattctatccatttcatttcatgattccattacatcatttcacttagatgaaatgataagatgacttgagatgagatgaaatgatgaaatgatgagatgaaatgatgagatgaaattttgagatgaaatggtgagtagaaatgatgagatgaaatgatgagacaaaatgacaaaattgaaaagaaattgaaaggaga

SEQ ID NO: 513026 - DNA, 460 bp, Homo sapiens
atattaaccaggtgtggtgcacacctggggtcccagctacctgggaggctaaggtgggaggtttgctcgaggttgcagtgaactgtgaatgcaccactgcattccagcctaggccacagaacaggaccttgtctataaataaataagtaaaaatataattaaaaaagtaaaaagaaatataagcaaatataaatataaatacatataaatataaaaatgaatacatgaaaacaaacaatttttaaatttaacatcactgagggcwttctatccatttcatttcatgattccattacatcatttcacttagatgaaatgataagatgacttgagatgagatgaaatgatgaaatgatgagatgaaatgatgagatgaaattttgagatgaaatggtgagtagaaatgatgagatgaaatgatgagacaaaatgacaaaattgaaaagaaattgaaaggaga

SEQ ID NO: 513027 - DNA, 460 bp, Homo sapiens
atattaaccaggtgtggtgcacacctggggtcccagctacctgggaggctaaggtgggaggtttgctcgaggttgcagtgaactgtgaatgcaccactgcattccagcctaggccacagaacaggaccttgtctataaataaataagtaaaaatataattaaaaaagtaaaaagaaatataagcaaatataaatataaatacatataaatataaaaatgaatacatgaaaacaaacaatttttaaatttaacatcactgagggcatyctatccatttcatttcatgattccattacatcatttcacttagatgaaatgataagatgacttgagatgagatgaaatgatgaaatgatgagatgaaatgatgagatgaaattttgagatgaaatggtgagtagaaatgatgagatgaaatgatgagacaaaatgacaaaattgaaaagaaattgaaaggaga

SEQ ID NO: 513028 - DNA, 608 bp, Homo sapiens
tgagccagcacacctggcttttttwaatttctaataaaaaagttaatagagtttcttgtttcactggacaaagtatgcatatataggaaggaaagacttttggacttgagattgtgctgaagaagaaaaatggaaaaattaagcattttagtctctcagtgtgttatttttgtagcttatacagatatgtctttttaaagtgtctttaaaaagctttattgagataacaataaattagataaattcacctatcatgaaatcaacccctcgagtgcagaattttgtggtttataatatgttcacagaatcgcacaaacaagacaggtatctagatactttcagaccattttcatcagtccacaagaaatcccatacccattagcagtcatccttattccgttttcccctagtcgctggcaataactagcctactttctgtctctgagttttgctcttctggaggtttcacagaatgaaatcttactacatacgatcttttgtgattgatgtatttcacttggcacagtgttttcaaggtttatccatgctgtagcatatatcagcacttcattcttttttaatgctgagtaatcttttgaatggatata

SEQ ID NO: 513029 - DNA, 595 bp, Homo sapiens
ctgggactgcccattcagcttggaagaggagccccttctttctgaacccccagagaatccagggtgctgccctaggctctcccaagccccccaaacaccacccrtctccatctctggggggctttccgaatcattccccacctggaggcatccccctctagactgtaaatgaaatatgcagcccatggcctttcacatttcacacctaagaggtgggcacggccgcagggccatagcgtggagcccctgggggctgtgcaatacggtggccctggtcagacgtgtcacatcctctcgcatgctttatctcattcagtcttcataacaagcctgcaaggcaggtggtctcagacagacgaagaactgcagctcaaagaggtgaagggacttgcccaaggtcacgcagtgagaggaccagtcttgctgactccaaatcacacaccctgttgcttacaaattcctccaaggttctgtatcattcttcatggggacaataacacctacttcacagggaggatgagaaattttcaacaagaagcacctagaatggtcagtcctacccctctgcctgctggggctggagaacccctgggat

SEQ ID NO: 513030 - DNA, 595 bp, Homo sapiens
ctgggactgcccattcagcttggaagaggagccccttctttctgaacccccagagaatccagggtgctgccctaggctctcccaagccccccaaacaccacccgtctccatctctggggggctttccgaatcattccccacctggaggcatycccctctagactgtaaatgaaatatgcagcccatggcctttcacatttcacacctaagaggtgggcacggccgcagggccatagcgtggagcccctgggggctgtgcaatacggtggccctggtcagacgtgtcacatcctctcgcatgctttatctcattcagtcttcataacaagcctgcaaggcaggtggtctcagacagacgaagaactgcagctcaaagaggtgaagggacttgcccaaggtcacgcagtgagaggaccagtcttgctgactccaaatcacacaccctgttgcttacaaattcctccaaggttctgtatcattcttcatggggacaataacacctacttcacagggaggatgagaaattttcaacaagaagcacctagaatggtcagtcctacccctctgcctgctggggctggagaacccctgggat

SEQ ID NO: 513031 - DNA, 548 bp, Homo sapiens
ctgggactgcccattcagcttggaagaggagccccttctttctgaacccccagagaatccagggtgctgccctaggctctcccaagccccccaaacaccacccgtctccatctctggggggctttccgaatcattccccacctggaggcatccccctctagactgtaaatgaaatatgcagcccatggcctttcacatttcacacctaagaggygggcacggccgcagggccatagcgtggagcccctgggggctgtgcaatacggtggccctggtcagacgtgtcacatcctctcgcatgctttatctcattcagtcttcataacaagcctgcaaggcaggtggtctcagacagacgaagaactgcagctcaaagaggtgaagggacttgcccaaggtcacgcagtgagaggaccagtcttgctgactccaaatcacacaccctgttgcttacaaattcctccaaggttctgtatcattcttcatggggacaataacacctacttcacagggaggatgagaaattttcaacaagaagcacctagaat

SEQ ID NO: 513032 - DNA, 572 bp, Homo sapiens
gaaaccacggttcccctacactgtgctgcctttctgtaaagcccttttggttcattccctcagcacagtgtaactggaggcatgggtatattttgtttttcctgtgtatctggggctgagtttccctggccaagtcgccccagtggtaatctaggccctttcagagtcattttatcactgctatctctaaatcactgcggcgttccactagcaacaacaacaaaaattctgtgggcatggtgtggacaagaggttaaagacrtaacacttatgagcctaaactgagtgtgggctcgggaaatgaaggggggcttgtggggacccagattggaacaaggcttccacctccactggcgccacttaggcctttataggcatgagattgtggggaacacggagtgcttgccagctcagggagtaatgtacccgacactggagcgacctggctgggcagagacctggggacagtctggctatgttgggcctaggggagggcccacgctgcctgagccctgcagccagtcccagcagagagtagggtagggccacagcagctccagggcgctcttgcc

SEQ ID NO: 513033 - DNA, 311 bp, Homo sapiens
ctgcctcaggccctgggatagggagacagcgatggggtgctgggagcaaggggcctcagtgggaaagaagatgggaggggaccgccaggcttgggaagttggtctccagcctgcaggcagtggggagcattggaagctgtggagcagagagggacgtggtcaaatcctgcgccatgagctttctggtgaaacaccacctccatgttccctgaggagggaggggatgtgctttagcccaggtgcctctgaggctcaggcactgtacctggggcttcatatcytgtatctcatttaggcttcactatagccct

SEQ ID NO: 513034 - DNA, 413 bp, Homo sapiens
gggaacatcaaaaacttacaactcttgccatgtctttcttaggctccagtcccagagtaggagtttatttcctactctgattagggtttcttggtgaaggcattttgggagtgctggggtcagtaactccaaaccctagttgggtccctggagcaaagtctgactctgacctagtgtcccccattgatttattagcctccctgtcttaacaagggtaagactttmgggggtaaaaggtgataaaaggtggcatcaccctgcaggtgtcttctgaaggtttagaatctgagactagaatgaggctgactcctctcctcagttgggacccttgttcagtgtaccgcccatgcaaccatccatggcagcccttctcagaggtctcccaggccagctgccactcagctagtgcagtc

SEQ ID NO: 513035 - DNA, 230 bp, Homo sapiens
gtggctcaaaagagccagtcaaygggtggcagagcctggacttgagactgtagcagcctctgctgtcagtagggtgggaagggcagtatgtgggtggttgctttgggcagggcaggcactctgtccttgccattcgatatctaccagggatccctgattctttgcatcttgttcattgacagtcatttgcagatcaccttctctgagtcagacagtgtctgctcaggggg

SEQ ID NO: 513036 - DNA, 550 bp, Homo sapiens
ggggaaccccacctttcagcctagttctggcctgggatttctacttctgtttctcccgtcctctgagattgtccttacctcctataacccaagcaatgtgacagaagctatattttatgcataatctgattattttgcagcagaatggcccagaagcacaacctccgtttcctcatctgtgaaatagtcaccaatgatagctactctacacgtcattgtaaaaatcataggaaataatgtatggcagagcactgtaaagtgttatttgaagaataactactagatgatgatctttcacggtgctgagtgctttgcatgcatcatttcattcgtgtctcccgcagatctggctctgtcatcacctccattgasaaatgaggaaatcgaggtttctagtggttaagattcttctttatcatcattgttctaatagtgttgatacggttggaggaggaagatgaaatgagaatatctggaggtgtaccagcacctaaggggatgggatgcctgcccccggggcagtgtggtgcgatgtggagtgtgggctggg

SEQ ID NO: 513037 - DNA, 628 bp, Homo sapiens
cttctgggactgcaaggaggcagcctctgggtcttagatgctgaatgcatcattgcccactctcacgcagacttggcagggttcagcataaattaaaattcttgtggggagtcaccttatatgtggtgccactttatagccaagtcattatggtaatttgcaaagctctctggtgtgtaactagagctgtttgcttcggatttgttggctgtgacctcgtttaggctrcgccatcctgcatgtactgaaccccaagtcttgggggtttgtccttctgagtctggccttagagtcatccagacctgccctttctggggacaacatgtttcccttacaggtccccatctccctgccccaggctcaaggagaaataaaagaaataattatcatcacattactttttaagcactaactgtgagctaggcctcatgccaaatgcattgtgttcatattctcatttgtcacctcaacgttgtgggttaggtgttagcaccattttacagataagaacattgaggcttgatgagaaaaccaaatgaaattcttacctagcttaaaaagtgccaatccaggccctgctatggatttgctgtgtggctggggcaggccctttccttctctgagcctt

SEQ ID NO: 513038 - DNA, 628 bp, Homo sapiens
cttctgggactgcaaggaggcagcctctgggtcttagatgctgaatgcatcattgcccactctcacgcagacttggcagggttcagcataaattaaaattcttgtggggagtcaccttatatgtggtgccactttatagccaagtcattatggtaatttgcaaagctctctggtgtgtaactagagctgtttgcttcggatttgttggctgtgacctcgtttaggctacgccatcctgcatgtactgaaccccaagtcttgggggtttgtccttctgagtctggccttagagtcatccagacctgccctttctggggacaacatgtttcccttacaggtccccatctccctgccccaggctcaaggagaaataaaagaaataattatcatcacattactttttaagcactaactgtgagctaggcctcatgccaaatgcattgtgttcatattctcatttgtcacctcaacgttgtgggttaggtkttagcaccattttacagataagaacattgaggcttgatgagaaaaccaaatgaaattcttacctagcttaaaaagtgccaatccaggccctgctatggatttgctgtgtggctggggcaggccctttccttctctgagcctt

SEQ ID NO: 513039 - DNA, 628 bp, Homo sapiens
cttctgggactgcaaggaggcagcctctgggtcttagatgctgaatgcatcattgcccactctcacgcagacttggcagggttcagcataaattaaaattcttgtggggagtcaccttatatgtggtgccactttatagccaagtcattatggtaatttgcaaagctctctggtgtgtaactagagctgtttgcttcggatttgttggctgtgacctcgtttaggctacgccatcctgcatgtactgaaccccaagtcttgggggtttgtccttctgagtctggccttagagtcatccagacctgccctttctggggacaacatgtttcccttacaggtccccatctccctgccccaggctcaaggagaaataaaagaaataattatcatcacattactttttaagcactaactgtgagctaggcctcatgccaaatgcattgtgttcatattctcatttgtcacctcaacgttgtgggttaggtgttagcaccattttacagataagaacattgaggcttgatgagaaaaccaaaygaaattcttacctagcttaaaaagtgccaatccaggccctgctatggatttgctgtgtggctggggcaggccctttccttctctgagcctt

SEQ ID NO: 513040 - DNA, 320 bp, Homo sapiens
tgtgaagtccagatccaagggaacctcagaaatccattgaagttccattgttaagaagttctgtttgtttggcaactgctttaaacccgatagaacaagatcagaagtggcagtctataactgagtaagtttactcttacggaggtaaatgtacattgtgtatatcatgtgataaacatacatggggtgaagagggctggaaggagagttactagattactaaatactagtgctaatagcttcattttagttgtagaagtcatatgatatatgaatgctgcttgccaacawaaactgaggttgaaatgaaataaaatgta

SEQ ID NO: 513041 - DNA, 162 bp, Homo sapiens
ttcatttcttaattgtgtatatactcttatggcayagacataggtaagaaaaaaatatctaactctaatttcttggaaaattattttagactaataagtgaacctttaatatgaagaaatttcagtaattgtacagtaacagtagaaattatccagcagtgt

SEQ ID NO: 513042 - DNA, 606 bp, Homo sapiens
tgacatttttctaggaattgcacagaaagagaatgaagttaaaatcattccatcgaagaaataaaaatctctaaatttacactatcgtaacatataatactaaaaaaatacacagatggtctctttatcgtcaaagaaaatggattagtttaaaataagaatgatagatgaaggaataamaaacttgaacaatagagtaaaccaacaaaaatgttttagctattgcatacaagatgaggggaaaaagtaaatagttgtgtgaatgaaagaaaacacaactcacaaatgcaaaatggggaacataatgtaagtcaatgttaaatatatggctgactgttgccatggtggggtcaagggtgatggcaggataagaacaggaagctttgattttcttccttgatcataagaaacatacataaggccaacacatattgtttatataagaacaccagtggatctttttgcatgaaattagactatacacagttagacaataacccagatcacctttcaaatacaaaactcccatattcaaatacaaaactcaatagattgagtttcatgaggcctgtagctgtttcattaatcattatacttagaaatgtg

SEQ ID NO: 513043 - DNA, 606 bp, Homo sapiens
tgacatttttctaggaattgcacagaaagagaatgaagttaaaatcattccatcgaagaaataaaaatctctaaatttacactatcgtaacatataatactaaaaaaatacacagatggtctctttatcgtcaaagaaaatggattagtttaaaataagaatgatagatgaaggaataaaaaacttgaacaatagagtaaaccaacaaaaatgttttagctattgcatacaagatgaggggaaaaagtaaatagttgtgtgaatgaaagaaaacacaactcacaaatgcaaaatggggaacataatgtaagtcaatgttaaatatatggctgactgttgccatggtggggtcaagggtgatggcaggataagaacaggaagctttgattttcttccttgatcataagaaacatacataaggccaacacatattgtttatataagaacacyagtggatctttttgcatgaaattagactatacacagttagacaataacccagatcacctttcaaatacaaaactcccatattcaaatacaaaactcaatagattgagtttcatgaggcctgtagctgtttcattaatcattatacttagaaatgtg

SEQ ID NO: 513044 - DNA, 598 bp, Homo sapiens
tacatctaagtttgagcgctttttcagccatttaataggcgcagacctggtcaagtcagaaaacttttttagccttcatttttgaacctatatcatggggttaataaaggaacttcctatcccgtagtgaggtttgtcagagatgtcaccttggctaacaatcaacccgacacattctagtgctcaaaaagtgttcgctataattwccttatcagtttttcacttagacattatcctctatttgtaacatgggaactatatgcatcattactgaagaagagatattttgtagcttttacaaagttacaaatggtgatctctcatccttccttctttcataattaagccagatctggaagaatgtcagcaggggaaaaaggagaggaagaaactcaggccagtgaaagatgggtaatccatgactgtttttagaatctcctgggctttcagagctcctttttaaacttatttgaacactttgagagctcttaattaaaataaataagagtcaaaatatgattgtagaccaatttgtcctctatatctgttgctttacaccctgctcactattttggataattcactgctgtctcaattt

SEQ ID NO: 513045 - DNA, 376 bp, Homo sapiens
ttgtacatagtgtagccatttaggactgtgcactcaaaattggttggcaaacatagggcattatgaggctgaaataactgtagctcactcttcctgaacctcattacttttggcagtgcctctactggtaagtgaaatgagttggatagcacaggagcagatatatgtttttaagaataaactcagggaccttgagtatcacaaaatcttagttaatccacctcttttcctttagaactctgcttmagcctcacccctctgaaagacctggtgccagctctgcccgcctccactggctccatttatcaatgctggcccctgcatccctgatcctctcactaatcctaagcttagagtggcttttcctctcccatgg

SEQ ID NO: 513046 - DNA, 381 bp, Homo sapiens
tgtgcactcaaaattggttggcaaacatagggcattatgaggctgaaataactgtagctcactcttcctgaacctcattacttttggcagtgcctctactggtaagtgaaatgagttggatagcacaggagcagatatatgtttttaagaataaactcagggaccttgagtatcacaaaatcttagttaatccacctcttttcctttagaactctgcttcagcctcacccctctgaaagacctggtgccagctctgccygcctccactggctccatttatcaatgctggcccctgcatccctgatcctctcactaatcctaagcttagagtggcttttcctctcccatggggccaattcctattgaacttcagttagtcca

SEQ ID NO: 513047 - DNA, 381 bp, Homo sapiens
tgtgcactcaaaattggttggcaaacatagggcattatgaggctgaaataactgtagctcactcttcctgaacctcattacttttggcagtgcctctactggtaagtgaaatgagttggatagcacaggagcagatatatgtttttaagaataaactcagggaccttgagtatcacaaaatcttagttaatccacctcttttcctttagaactctgcttcagcctcacccctctgaaagacctggtgccagctctgcccgcctccactggctccatttatyaatgctggcccctgcatccctgatcctctcactaatcctaagcttagagtggcttttcctctcccatggggccaattcctattgaacttcagttagtcca

SEQ ID NO: 513048 - DNA, 448 bp, Homo sapiens
ctgatatccacagaaacacttcactgtcaatcattgaggatgaggatccaccataactgtgaggtattcctgttggtcacttatttacaatttcttcaagcractgtcatactcaggtcaggttgccataacaagaataccatagactgggtggctgacacaacagaaatttatgtctcacagttttgaaggctggaaatccaagatcaaggtgttgccatatctggtgtgtggtgaggggccccttcctagctggccaatgactgcattctcgctgtgtcttcacgtggtggagagcacagggagtgagaacaaggtcttgtgtctcttcttataggggcactaatcccaaccaggagggcttcacactcatgatcaatttacctcccaaagaccctacttcttaatatcatctcattttaacacatgagttttggggaggcacaaa

SEQ ID NO: 513049 - DNA, 646 bp, Homo sapiens
atgtaggccacagagtctgcttgagggtgagatataattatagaagggaaggaaacctggactgataaatctatctgtctttttccacttgtcatatatataccaatgcttcastactaaggtagtgaaccgtgatagagcatggttgtgaaattgaaatcctgggaccagaccatgtccctgcgggtagaaggtaaaattccttccaaaggaagtagatatttttactgtctgtgttccaatggagagatccattccagtactaatacgaagtttaagaaggcatgtgttaaactagaaaaaactgaagatgaaaagaacacagcttcctcctaagagacttagaggaagcatggctctggatttcgattgagtactatctacctgtgagtagtccttcgggggtaggcaaagtggattctgcaataaggcattaggccagaagctaagggtctgggtatgttggctttaatagttaccatatctagttgctattataaattgtcctctttgttgttttttcttctattattgaacacactgtaaatcttgtagaattagaggcccatgcttggatgaaacatcatgggggagagcagtagcagtccaaagggagccatttcaggaagtaggggatacatgaacg

SEQ ID NO: 513050 - DNA, 646 bp, Homo sapiens
atgtaggccacagagtctgcttgagggtgagatataattatagaagggaaggaaacctggactgataaatctatctgtctttttccacttgtcatatatataccaatgcttcagtactaaggtagtgaaccgtgatagagcatggttgtgaaattgaaatcctgggaccagaccatgtccctgcgggtagaaggtaaaattccttccaaaggaagtagatatttttactgtctgtgttccaatggakagatccattccagtactaatacgaagtttaagaaggcatgtgttaaactagaaaaaactgaagatgaaaagaacacagcttcctcctaagagacttagaggaagcatggctctggatttcgattgagtactatctacctgtgagtagtccttcgggggtaggcaaagtggattctgcaataaggcattaggccagaagctaagggtctgggtatgttggctttaatagttaccatatctagttgctattataaattgtcctctttgttgttttttcttctattattgaacacactgtaaatcttgtagaattagaggcccatgcttggatgaaacatcatgggggagagcagtagcagtccaaagggagccatttcaggaagtaggggatacatgaacg

SEQ ID NO: 513051 - DNA, 621 bp, Homo sapiens
gagatataattatagaagggaaggaaacctggactgataaatctatctgtctttttccacttgtcatatatataccaatgcttcagtactaaggtagtgaaccgtgatagagcatggttgtgaaattgaaatcctgggaccagaccatgtccctgcgggtagaaggtaaaattccttccaaaggaagtagatatttttactgtctgtgttccaatggagagatccattccagtactaatacgaagtttaagaaggcatgtgttaaactagaaaaaactgaagmtgaaaagaacacagcttcctcctaagagacttagaggaagcatggctctggatttcgattgagtactatctacctgtgagtagtccttcgggggtaggcaaagtggattctgcaataaggcattaggccagaagctaagggtctgggtatgttggctttaatagttaccatatctagttgctattataaattgtcctctttgttgttttttcttctattattgaacacactgtaaatcttgtagaattagaggcccatgcttggatgaaacatcatgggggagagcagtagcagtccaaagggagccatttcaggaagtaggggatacatgaacgtca

SEQ ID NO: 513052 - DNA, 199 bp, Homo sapiens
aaccaaatgcagatggaattagagggcatttaacgcttcaaacaagggaatgacattggttaagatacacactgtttttttcccctacgaggacttccygaataatatctcttgggtggctagaactgaggccaaaaaaaatttttgaaggcctatttgcctgaggagtcagaaaggaagtttagaacagccagagcag

SEQ ID NO: 513053 - DNA, 199 bp, Homo sapiens
aaccaaatgcagatggaattagagggcatttaacgcttcaaacaagggaatgacattggttaagatacacactgtttttttcccctacgaggacttcctgaataatatctcttgggtggctagaactgaggccaaaaaaaatttttgaagkcctatttgcctgaggagtcagaaaggaagtttagaacagccagagcag

SEQ ID NO: 513054 - DNA, 553 bp, Homo sapiens
ccatcctactgctctagcctctaaaacccaaatccatcctttgtctcattctgctaaatcctgggaaggtgctagcagatatctaaggagttggttaaaacagacttaaggtgagactcctccctaagacagttttttcatggacacaggaagaggaacatcacactctggggactgttgtggggtggggggagggggaagggatagcattgggagatatacctaatgctagatgacgagttagtgggtgcagcacaccagcatggcacatgtatacgtatgtaactaacctgcacaatgtgcacatgtaccctaaaacttaaagtataataattaaaaaaaaattaaaacaaaacaaaacaaacaaaaaaaaacaaacaaaaggcagtgtttttaacaaaaggcttcttcgaacctcaaaggattgctgttctcacagattaggacaggcactggggaagagggccctgctggtgcctcaagtcatccccagaagcagtagcctcggagtgtcttggtaagtggatgmggctgggaacagaagtgcatgcag

SEQ ID NO: 513055 - DNA, 609 bp, Homo sapiens
ctgggactagaagccctgtgctctagtttcagctcttgctacattttaagttgctcttcttaaaaatgagggcaatgacactttgggaggccgaggcaggtagatcacaaggtcaggagactgagaccatcctggccaacatgggagaaacccagtctctactaaaaaataaaaaaaaaagaaaattagcccggtgtggtggcacgtgcctgtagtytcagctactcgggaggctgaggcaggggaatcacttgaactcgggaggtggaggttgcagtgagccgagatcgtgccattgcactccagcctgggcgacagggtgagactttgtttcaaaaaaaaaaaaaaaaaaaaatgagggcaatgatttagatagtcaccccaatcattccagccctactatcatattctaccccttcataccaagaagacagatgctaaataaggatcaggagccataatgttaattttaaccaaaaaacccatatatattcatctggtgatactagagctgaagaaaaccatgatgattagtaaagcaagaaataaaaaatgtatttccccggattttttatggttggttgtagatagaaaaatgggggaaatttg

SEQ ID NO: 513056 - DNA, 607 bp, Homo sapiens
gctgccctcaagtccaatattcactactaattcaggaataacaaatagcaactcttcattcaagaaaatatctagggtcactttttgtcaatggggctgttaccctttgaagggggtggtgaactggccrtctctgtgatgtgcatgtctagtgaatatccatctttgtccatataacaaacattaactaagagtctagttaacggacctgtgcctaccaagccctgggtactcaggatgggtccattcctggcccacaagatccaatcagtggcagtacctggaaggaagaagttccaacctaggaatgcatatctcagggactggatatcctggccttatgtgtgacaggaggagaagccaaggaggaagaagatggcaggtcttgagagggtgcagttccagcagttgtcctgggtggatttttgccacagccttatgggttgtccttgacatagtcactggtatcacagcccctccacccaggtgcgttacttcttgtctgtgttccagattgtaatgctaaaaataatgctcatacctataggttcatttttttgggaatcagacagacttggggtctatctctggcacttctctgtgttct

SEQ ID NO: 513057 - DNA, 591 bp, Homo sapiens
ctgccctcaagtccaatattcactactaattcaggaataacaaatagcaactcttcattcaagaaaatatctagggtcactttttgtcaatggggctgttaccctttgaagggggtggtgaactggccatctctgtgatgtgcatgtctagtgaatatccatctttgtccatataacaaacattaactaagagtctagttaacggacctgtgcctaccaagccctgggtactcaggatgggtccattcctggcccacaagatccaatcagtggcagtacctggaaggaagaagttccaacctaggaatgcatatctcagggactggatatcctggccttatgtgtgacaggaggagaagccaaggaggaagaagatggcrggtcttgagagggtgcagttccagcagttgtcctgggtggatttttgccacagccttatgggttgtccttgacatagtcactggtatcacagcccctccacccaggtgcgttacttcttgtctgtgttccagattgtaatgctaaaaataatgctcatacctataggttcatttttttgggaatcagacagacttggggtctatctctggc

SEQ ID NO: 513058 - DNA, 593 bp, Homo sapiens
aataactcaaatgtccttaaacttataaatgactgtggtacaattcatgcaatggcacacttcttagcattaaaaaaggaaagagacctgcacgttctgcacatgtatcccagaacttaaagtatacaagaaaatggctaaatgaatttttaccaatctgaatttgtttaggatggsctggtttaaaagataggctggtagaataccaggaaattaatctgagataaaacaggtagagagctttcttgtggctacttgagagggattttctgctgcactaacaaatctttgcagtaactctgggacttaggaacatctcaaagggatagaccaacatcagtctaagtgagcatgaatgaggtacaaaaaagtagaggctcatgagatcgctgattagagatgtgtcattgaattgatatgccttgtgtagagaaaacagcagtggatctcaatatatatgcaagatgttttgtcacaaagtggatgcctagaatcacagacatctatttgcaatcaaatgctgaagtgcgtggtataaagatggtgaaagagcctccccaggaatgccaaaagatccacccagttggtccaga

SEQ ID NO: 513059 - DNA, 593 bp, Homo sapiens
aataactcaaatgtccttaaacttataaatgactgtggtacaattcatgcaatggcacacttcttagcattaaaaaaggaaagagacctgcacgttctgcacatgtatcccagaacttaaagtatacaagaaaatggctaaatgaatttttaccaatctgaatttgtttaggatgggctggtttaaaagataggctggtagaataccaggaaattaatctgagataaaacagktagagagctttcttgtggctacttgagagggattttctgctgcactaacaaatctttgcagtaactctgggacttaggaacatctcaaagggatagaccaacatcagtctaagtgagcatgaatgaggtacaaaaaagtagaggctcatgagatcgctgattagagatgtgtcattgaattgatatgccttgtgtagagaaaacagcagtggatctcaatatatatgcaagatgttttgtcacaaagtggatgcctagaatcacagacatctatttgcaatcaaatgctgaagtgcgtggtataaagatggtgaaagagcctccccaggaatgccaaaagatccacccagttggtccaga

SEQ ID NO: 513060 - DNA, 593 bp, Homo sapiens
aataactcaaatgtccttaaacttataaatgactgtggtacaattcatgcaatggcacacttcttagcattaaaaaaggaaagagacctgcacgttctgcacatgtatcccagaacttaaagtatacaagaaaatggctaaatgaatttttaccaatctgaatttgtttaggatgggctggtttaaaagataggctggtagaataccaggaaattaatctgagataaaacaggtagagagctttcttgtggctacttgagagggattttctgctgcactaacaaatctttgcagtaactctgggacttaggaacatctcaaagggatagaccaacatcagtctaagtgagcatgaatgaggtacaaaaaagtagaggctcatgagatcrctgattagagatgtgtcattgaattgatatgccttgtgtagagaaaacagcagtggatctcaatatatatgcaagatgttttgtcacaaagtggatgcctagaatcacagacatctatttgcaatcaaatgctgaagtgcgtggtataaagatggtgaaagagcctccccaggaatgccaaaagatccacccagttggtccaga

SEQ ID NO: 513061 - DNA, 622 bp, Homo sapiens
atgatctagaaactgttgaaatacacatttttattgatctgcataaacttttttcattttattacataaaccatataactatcatttgagaaacaaaatctttctctacaaaaataataaaaaagtggatgtagcattattttccttcctacttaaaatttgtccggaattcaaaagcatcatcagcatccctgagaacatgtcagaaatscaacattgcggaatcaccttagatgaactgaatgacaatctacattttaggaagctaacaagtgatccatgcaaagcttaagaagctatactttaaggaatatttacttcagatattttccccccaaatgaggccatttaaggaaatttctatttaaagccacatgaaaatatatacctatctttacttcctaattaaggaaaagttaaaattgaaggcatttgaaaaattataaaggataaaaagcataattatttatcaatgtcattatcaaatatttgactgtacatgttggtttgaggttttgctcagtcccataacttaacatggttattctgtgtactgagttgtcactgccctgcaggcttgagcccaaatgtaacacagttcatacactggaggtaggttcag

SEQ ID NO: 513062 - DNA, 622 bp, Homo sapiens
atgatctagaaactgttgaaatacacatttttattgatctgcataaacttttttcattttattacataaaccatataactatcatttgagaaacaaaatctttctctacaaaaataataaaaaagtggatgtagcattattttccttcctacttaaaatttgtccggaattcaaaagcatcatcagcatccctgagaacatgtcagaaatgcaacattgcggaatcaccttagatgaactgaatgacaatctacattttaggaagctaacaagtgatccatgcaaagcttaagaagctatactttaaggaatatttacttcagatattttccccccaaatgaggccatttaaggaaatttctatytaaagccacatgaaaatatatacctatctttacttcctaattaaggaaaagttaaaattgaaggcatttgaaaaattataaaggataaaaagcataattatttatcaatgtcattatcaaatatttgactgtacatgttggtttgaggttttgctcagtcccataacttaacatggttattctgtgtactgagttgtcactgccctgcaggcttgagcccaaatgtaacacagttcatacactggaggtaggttcag

SEQ ID NO: 513063 - DNA, 335 bp, Homo sapiens
ttgctcaataactagaaacacatggrgaattgcctttggttccttgggttatgttttcttctagactgaattctctatgttttggatgaaattttctttttctttactttttcttgtggtttatttctatagttgtcacactctttttttaaattcttttctttttttcatcttgctcttactgactagttcttaaaagtgcttctctttgttccagtgtgacttttaagactaataatttcttcctcaacatgcatttttgaggatagctactatgtgttccttttggtgtatcttttcaggatggtgatggttggaggagagggtcagggaag

SEQ ID NO: 513064 - DNA, 610 bp, Homo sapiens
caatctatatgttacttataagaaaaatgaatttaaaaagcaggtatgtctcataggctrcagcttaaggacaagattcgggggagtggaagtaaggagtaggctggatagctccccagtgcacagtggcccacaaggaccacagggagtgtgtctgtttctatgggtgacaccaggctgggcagtctccagcatcagcattaattatgccaagactcgctctgtcaggccccagatcaggggagactatgtataggatatttggacgaccccacacatggcccaagctccttctaaccttctgtgcctcatacccctgcttaattccagcatccctcagctctcacctcatacatcactttttggggaggccttccttcacatcccaatcaagtcaacactccagttcaaatgttctcaaaatgctccatttctccttcagagatcacagtttaattcattttaagaattgttttgagtcactatcccccaaatgaatgtgagactttgacagagggggctgcctctgtatctccagcacccagcacagcacctggcccctttgcaaagggctcaataaattgttgaatgagtgaatcccatcttcaag

SEQ ID NO: 513065 - DNA, 609 bp, Homo sapiens
ttgatctgtctaatattgacagtgggrtgttaaagtctcccactattattgtgtggaaatctaagtctctttgtaggtctctaagaacttgctttatgcgtctaggtgctcctgtgttgggtgcatatatatttaggatagttagctcttcttgttgcattgatctccttaccattatgtaatgcccttctttatctcttttgatctttgttggtttaaagtcttttatcagagactaggattgcaacccctgctttttttgctttccatttgcttggcagatcttaattcattgtgagtagccttccacgcccattacttttcctggctatgcagttccccaccatggaagtgtaccatagtatactcatttccttattgttggatgtgtgtatcactaaatttttgctattttaaagaatgtttgtatgcccttgactatttcttattcctgtgatgaaaggcctacttggagctcccattacggaaatgactttagagtcaacttacgcaccacccaggaaagcctgccgttccttcatcatgggggaagacttgttcctacatatcttctttgagggatttttcagttgtgcattctttagaatg

SEQ ID NO: 513066 - DNA, 564 bp, Homo sapiens
tatcgccatccttagttcaccasaggaggggtggttttagagatgagggacagtctcagagaacttaggcgtaactacgccagcatttcactagtagtgaaataaatgacgggcgtgtgaagtccaggtctgtctggattccccaaagccccttacaccatactacctttggaaaagcaatggaaaagaagaaatcaggcaagtgatgtatggacccattatacttcccccactctcattttaatatcaccttggcaaagctgaagagcagacatcttcgtgcctccatcagttatgccctctgggagtctcagttcatcccttcacacgcgggatacttaactctgcgggatctaaaccctggccaaaataaattttaaagctggaaaaaatccacactgtaccctttgcattgccctaataggctgaaaatagccatgataaccaaattaagggacagcggctgagactcagactcactccttgtacacattttacttaggaaggcggggaggggcgtgaagttaagccctcaacaattatttccttaatttgggagaaggg

SEQ ID NO: 513067 - DNA, 579 bp, Homo sapiens
gtgagatatcctaagaaaactcccagtcatcccagacggatttttgacctaatgtgtgttggttttaggccactaagtttgtgatagcttgttatacagcaatagaaaactaatatagggccccaaacaacatttgcacgttgaaagtgttcaataagtgttaactctctttcattytttatgcaaatgataacatgtttgtttctcacacagactagtttcacttatatttgcctaaatgaacaaaattcttcccatgcaaggcataactgaaatccatttttctgaagaagcattatgtggtcactccagggaaaagtatatatatttctttttgaattatcataacagttttgtttgtatcttttcaccacatgaactgtattttgatgtttattataattgtgagtggatatcttacctccagaactagactacacatcctttaagggcatgactagactttattcatctttatttctgatttatccagttggtaccacaacttgtacacatttgtatcacttcaaatatttattgagcaaatatatatttactgattcattatttaagatagtc

SEQ ID NO: 513068 - DNA, 634 bp, Homo sapiens
taaaaaaatgagcttacagaagtggagaatagcattacagttgttaccttctcctgcctgattgccctgaccagaacttccaacactatgttgaataggagtgatgagagagggcatccctatcttgtgcccactttcaaagggaatgcttccagtttttrcccattcagtatgatattggctgtgggtttctcatagatagctcttattattttgagatatgtcccatcaatatctaatttattgagagtttttagcatgaagggttgttgaattttgtcaaaggccttttctgcatctattgagataatcatgtggtttttgtctttggttctgtttatatgttggattacatttattgatttgcatatgttgaaccagccttgcatcccagggatgaagcccacttgatcatggtggataagctttttgatgtgctgctggatttggtttgccagtattttattgaggatttttgcactgaggttcatcaaggatattggtctaaaattctcttttttggttgtgtctctgccaggctttggtatcaggatgatgctggcctcataaaatgagttagaggattccctctttttctactgacaggaatagtttcagaaggaaaggtaccagc

SEQ ID NO: 513069 - DNA, 636 bp, Homo sapiens
ctgatttttgtggctgttgttgtttttattggtctctctatataacagcctagggttggcttggctgcctttgcatttctcattgcattgaccctgtaagctaactaaataattaggtcttttttctatgcttccagaataaatggaatcctgcctgtgaaagataaatagcattgttaatcagcatctataaaccatgcttaacaaatggcaatacaaaatgcccaacaagaaaatttagttgctttttttcaatttgcctttactcagtataactcatgtagaatagcaaaatatttccaagtggtgttcaggctgtggggaaaagtgaggtcactatgtgcagcatggtcatagggcatatattgaagagaatcttagattgccaataatttctggaaagtagaggccaacccactgggtatttagcctcaagaataatacaagatgataacaatacattgagcacatttttcaatttcacaatgatctcttattcctgagaattgcctccttaacccccagggattaatarctgttgtattatgtgacactgtcattttggccacaattaatcagacaagagataaggtgctgcctcatgctgagccaatcatagtgtgtttcttgagagtt

SEQ ID NO: 513070 - DNA, 532 bp, Homo sapiens
tcaaatcatcactaaacaaaactttatgtttccatcaatacagttacagttttaaaaagtcatcaaactactttcatagagcatttaaaataattgttttttaaatatagcattttaaattttggtgttaccacatattttgaatttactttattgagatgtctataagaaaatgtgtggtaatgtagaaccaaatattcaaattaatgcatattaattatatcttcaaaaaagtgaggttagagatgagttctcacacttcttttaatttggtaaaaagcggagtacattatttttaaaatagtgttacttaaattaacaatttctayagctttgttctagaaagaaaaagaaggatggtacaatacaatgaaaacattttggatttcacatgatttaaacccaaataatacttttcaacattttctcagatacaggacatataaacacatcatttcaactagtatttaatgtggatcacattctagtaaatccttattgatctgtgttgatgaatgtgttaggggataaa

SEQ ID NO: 513071 - DNA, 543 bp, Homo sapiens
actattaaagttatagcatcaaaaatctggaatccagtaaactggacctgtgatctctaatgagkcttgctctttcagcttccccttcttggctgttttgtctgcctggggctggactgaaccagatccgaggacaccggctgagctggcctttagctcaggatggagagcagggaggggcatgaggctgccccaccagggcccctagaaactctcccgcagcactatcggtgcccctttgactggagctgctctgtctcaggggggctcataacctgaactatcccttgagacagggaccctgggagagaaggaagctgcaccttgttggaccagagacagccctgggacactctcctggcaggtgcctgccaggccttacagcgaactatactagccactcctgggtccccaggacccaatcgcagctctggtgagctcggccctagccctgcggcctgacatctgccctgccatcctctcagggacagtgtcccctgctccatactcggattcctcactgtttcccaagcccagttgctc

SEQ ID NO: 513072 - DNA, 551 bp, Homo sapiens
tgtggggcagttggctcttgggccctggcctgcctgttctgttcctgctaacctggctcacctggcggctgggtgaagagtgtagcttctggagtctccctccacctgtagccaaagtacaaccaccaagaccctggcccctacttggcagaggatggaggattcagtgagcctctaaccgatttttctgtccaaagccttgtcctgacccagagggccaagctgctgctggaaaacagttctctggagcagcagaacacagagctgcaggcgctactgcagcagtatctgaactccaaggtgggcggcggggccttccaaggaggggcagcgggagacacgggtggggcaggggcactggagctggrattagggaacgaggagtcccctccccgtcagaggcaagggagctttgtgatatgatgtaaaaaatcaagagtggcaccttgagacaactactggccaaaggagtagatcttgcctgaagtctcctccaggacagctcaggtgtgacagtgtctctttgatactgtggtttctggtgccagtgg

SEQ ID NO: 513073 - DNA, 562 bp, Homo sapiens
actgggggattctgaagacaagaagagggatcaaaatggggatcaaagaccagcccaagatttcttcggtctttgaagatcaatccagggcaggttgggagtgtaggtcccctttttaagccccaaacagagggtagcccaaggagaaragcaggctcccagcccgtccaggcccagcccctcctgccccatcccacacttacttgttgctgaagactttgctgtagttgaaaacctgaatctccagcatctcatttctgtcgatgctgctggccaccggccaccgaaatgtctggggagagagggacaactgcggcttcggtggcaataacaggtaggagccgtggggtgtgggaggggaatctcttgtggggatctccaacagtcagagtggcccctcacttgggcccagtgctccccagggacaaagcattgacacctggaatctcatttagttccaacaaccaccttgtagagccggcattgttgcccactcctctttcaaagatggtgctcagagatgttggaggacctgcccaaggtcatgtggtaggtgaagagc

SEQ ID NO: 513074 - DNA, 562 bp, Homo sapiens
actgggggattctgaagacaagaagagggatcaaaatggggatcaaagaccagcccaagatttcttcggtctttgaagatcaatccagggcaggttgggagtgtaggtcccctttttaagccccaaacagagggtagcccaaggagaagagcaggctcccagcccgtccaggcccagcccctcctgccccatcccacacttacttgttgctgaagactttgctgtagttgaaaacctgaatctccagcatctcatttctgtcgatgctgctgrccaccggccaccgaaatgtctggggagagagggacaactgcggcttcggtggcaataacaggtaggagccgtggggtgtgggaggggaatctcttgtggggatctccaacagtcagagtggcccctcacttgggcccagtgctccccagggacaaagcattgacacctggaatctcatttagttccaacaaccaccttgtagagccggcattgttgcccactcctctttcaaagatggtgctcagagatgttggaggacctgcccaaggtcatgtggtaggtgaagagc

SEQ ID NO: 513075 - DNA, 558 bp, Homo sapiens
ctgctgggagatgatgttgaaggtctgtggctgtgcccttgctcctggcacatggtgaggatcacacggtcagcttccctgtaacccaggtatcaygattaaccctagggagccacatggatgtggtctatgctcttttccaaacacacgtcatccacccttacctaccttgtccacaggacaaccttttccccagtggagctgaccttgctgttgttggcacacaccgtagcttctgcggcctttggctgctgctccccctctggacccttggcctgtgttccactgtctttagccaaaccccctctaggggctttgggagaagtctctgaggtgtcaattcctgatggagattcatggacagggcacgtcctgtctcttgtcttcacccgagctctgcttgagggcagccatctctcttgagtgtctggtttcccggacacatgtcttctccctgcatctctggtctttgaggaaacaggactcaggaaggaagcagggggttccacggtaccaggcaatttctcagtttctgatgcatcccagaccagcatcaaa

SEQ ID NO: 513076 - DNA, 302 bp, Homo sapiens
gctaggatgcctggctaatttttaatttttttgtagagacaaggtctcactgtgttgcctaggctagtctcaaactgccaggctcaagcaatcctcttgcttcagcctcccaaagtgttgggattacaggcatgagccactgcacctggcctagcggatttctgaagcattaatctgttctgttactttccagctaaaaaccaacaagtgtctgaggacacagtttaaactccaagatgatagggtcctccctcacctggrctcccacctaccctcatgacctccttttgtgaaatgctgaa

SEQ ID NO: 513077 - DNA, 507 bp, Homo sapiens
ccgcacctgtggctgtgcagggccccgagccggcccgggtcgaggtgagcgggccgggatggggcgagcgaggctgcagggcgtgcgccgagtaccaggctccaggcctttgaaagcgccgcactccgccggcctcggctgggggaggggagcccggcccctgctcccggggtggagggcggtcgcstgcgctgttttccggtgaggcctggtcttgcccgctcctttagggaaagggagagggagagtccaagaggagcccgctataaacgttgatctccggagggccaagatgctgctccgggatgggcgttttattgatcagatgtgtcttagagtagctagaaagactcatccctaccaaaaagtttttaacagaaggctgctaggaggctttttgtattccctgaggatcatcacatcggccatttcattgttgaaatagcttatgccaaactgcttacccaaattcaacttggcactgcctgtgctttttgccaaatatgg

SEQ ID NO: 513078 - DNA, 636 bp, Homo sapiens
gtggcacagcacctagcatggtgtctggcacagagcagatattaataaatacacattagaaaaaaagtaagcacataaaccaggtattcaccatcctaatgaaacaaaatatacttttctaattctctatccttctggtcatatagataatgaattaaaatatggccaatatgacattatcagttcaaagtcacatagcataaaaagttctgtatctactatttttagagtgttttttataagtaattctattgagaaaaatatttacaagttgccctaattgcaacaagtatctcagcagaaatttagttattctcaagacattctcagtgatttaacattttcaacaggctgattaaaatggaaacgctaaaaagttagcattagaataaagaagacaggaagaagaggggtcagataaagyggtaagaccttgcactgcataacaatgttttggtcaacattggactgcatatatgaccaccggtggccctaagattacagtggagctgaaacattcctactgtctagtgatgtcatatctgttgtaatgtcatagatcaatgcattagtcatcctttgcacttgtgcttgtggtgatgcttgtgtaaacaaacctactgtgccaccaatcat

SEQ ID NO: 513079 - DNA, 441 bp, Homo sapiens
ctttttataattgatgagaaacaggagtgttgtgtcaagctgcagagctctccccaacaacatggtgtggctgcatgtcaaggaccccacactgtcccccacagcgtggtgtgaccgcatgtcaaggacgccacactctcccccacagcatggtgtggctgccatgccagggaccccacactgtcccccacagcgtggtgtggctgccatgtcagggaccccacactctccgccacagtgtggtgtggctgccatgtcagggaccccacactctcccccacagcgtggtgtggctgccatgtcagggaycccacactctcccccacagctggtgtggctgccatgtcagggatcccacactctccgcccacagcgtggtgtggctgcatgtcagggacccctgtgctgtgatgctaagtagagcttggtgttggaggggca

SEQ ID NO: 513080 - DNA, 596 bp, Homo sapiens
ctgctttttataattgatgagaaacaggagtgttgtgtcaagctgcagagctctccccaacaacatggtgtggctgcatgtcaaggaccccacactgtcccccacagcgtggtgtgaccgcatgtcaaggacgccacactctcccccacagcatggtgtggctgccatgccagggaccccacactgtcccccacagcgtggtgtggctgccatgtcagggaccccacactctccgccacagtgtggtgtggctgccatgtcagggaccccacactctcccccacagcgtggtgtggctgccatgtcagggaccccacactctcccccacagctggtgtggctgccatgtcagggaycccacactctccgcccacagcgtggtgtggctgcatgtcagggacccctgtgctgtgatgctaagtagagcttggtgttggaggggcaggaattgggatgaggaagagttgtgggagactttcattgttttgggagaagaatcgccctcgctaggtctatctcattctttttaataaattagtttccactttttcttggaaatctagatctgtacagaggcctaactcattcttaatcta

SEQ ID NO: 513081 - DNA, 575 bp, Homo sapiens
ttttttctctatgtacagattaaataataatggatagcaggtgaaaaaattcaatcagtagtcaaggtctgagatttatttttatgttgctatttttcatctccatatttttcaaaaatgttgatatcttcataaaacagaacttgagacacattccacttctctsaaggatgactatggttcaaggaatgccttgtatttcttatttgcataatatgctcttccattcctctacagacatggtaatgaagtattatgcttccccctctatgattactctttaagaaaataaaataataaggacttgaaacattatttttcacattaacttgttctttctacaatagtcagtgtcacttccctgaagagaatattgttggtgttccacagagaatgggagtaatatttatttagtagataattgagttctactatgttatctcttacctcttattttatctagttgaataatagattattttttctaataaaaatatacacacatacatatatatacacatacatatatatgttaataatagagagttgaaatagcatttagaagaaaaaaactg

SEQ ID NO: 513082 - DNA, 430 bp, Homo sapiens
aggaaagaaagtgaggaagagttgcaamaccaaaaacataagtaataaacgagaaaataaagagaagcactgatggaaaatcactcagtgggagttgaagccacctttatgtctcagacagtttgtagcagatgctttcatctcataaaactaggatttctgttaaaataagtctatgctcaaaccagattattctgaccttaataagaatataaaataagaataagagttatatgaccttaataagaataaaaaaccaagcaacatattatcttttcatgggagatttaagcttttatcttttaaaaatgtgtttattatgatacaatatataaatatcataagataaatatctgaagcctcttctactgctttgatctccttcagctttgtttcttggccctatttgccaacacaacccaggaaagaa

SEQ ID NO: 513083 - DNA, 526 bp, Homo sapiens
gaggtagccagggaccatacacgatggtgagaaacaataaggctgactgtatttcaggaaaggtgatctcacgggaagaggatcatacagttgaagtcagaggcctggcttgcattgcaatatggttttcagaaagtcacaacttctttgggccttagtttcttcatatgaaatggcagaatggtaaaaatgggactagaaccaagggggctgaggtcatacacgttgtggggtgaatcaatctacagtgcactgtagctgtttccacatggggagcaggagccaaggactgctgaagcttgggactgagacactgagaatatgatgttccatcagaagagagagggaagtgacagaggatatgatgcatggacaatggaaacttcccaacacagaccagtagaccattctataatcagacaaaaagtgtttggaaggagcttggcagtctaggcctagatgcccctgctaccctagcctcyggcagagtttctcacagaatggcaggaagctgagtcaaagcatc

SEQ ID NO: 513084 - DNA, 655 bp, Homo sapiens
ctggtgccagtgccattcacttaggtcaccacatctgcaaaccatgctgtaatccagtcattaccttggtatctctgtcttaactaaagtatagagaagtgacattaatctggtagtccaacaataaagtagtacgtttggaccaaggtgtcatgagacgttgttggtcctgtcagtagcgagttataccttaagcatttgttatgaaaaataggtaaagcacttaaatttgtgaaygatttatttttttaaaaaaaataagctgattatattagtgtattttcatttacttaacatttggtctcgctttcttggatagaaaggaacatgttggaacttatgcataaccaacatttacagccctgtattgcctaaatgttccggaaaaagcagaaaggggagaattttgccaaaatcagagcatttccccaggaatatatctagtatgtgaacattatttcccatgtattatggcagaatacagggttggaaccattattttagagtgccaagtgcctatattgtaatatgatcttgcctgtatggtactcctaaaagctgaacttctaggttcatgtcatggtaataacagcagtacctccaaactcttctagaacaaataacaatgaaactattttacattacttgtattaaa

SEQ ID NO: 513085 - DNA, 655 bp, Homo sapiens
ctggtgccagtgccattcacttaggtcaccacatctgcaaaccatgctgtaatccagtcattaccttggtatctctgtcttaactaaagtatagagaagtgacattaatctggtagtccaacaataaagtagtacgtttggaccaaggtgtcatgagacgttgttggtcctgtcagtagcgagttataccttaagcatttgttatgaaaaataggtaaagcacttaaatttgtgaatgatttatttttttwaaaaaaataagctgattatattagtgtattttcatttacttaacatttggtctcgctttcttggatagaaaggaacatgttggaacttatgcataaccaacatttacagccctgtattgcctaaatgttccggaaaaagcagaaaggggagaattttgccaaaatcagagcatttccccaggaatatatctagtatgtgaacattatttcccatgtattatggcagaatacagggttggaaccattattttagagtgccaagtgcctatattgtaatatgatcttgcctgtatggtactcctaaaagctgaacttctaggttcatgtcatggtaataacagcagtacctccaaactcttctagaacaaataacaatgaaactattttacattacttgtattaaa

SEQ ID NO: 513086 - DNA, 655 bp, Homo sapiens
ctggtgccagtgccattcacttaggtcaccacatctgcaaaccatgctgtaatccagtcattaccttggtatctctgtcttaactaaagtatagagaagtgacattaatctggtagtccaacaataaagtagtacgtttggaccaaggtgtcatgagacgttgttggtcctgtcagtagcgagttataccttaagcatttgttatgaaaaataggtaaagcacttaaatttgtgaatgatttatttttttaaaaaaaataagctgattatattagtgtattttcatttacttaacatttggtctcgctttcttggatagaaaggaacatgttggaacttatgcataaccaacatttacagccctgtattgcctaaatgttccggaaaaagcagaaaggggagaattttgccaaaatcagrgcatttccccaggaatatatctagtatgtgaacattatttcccatgtattatggcagaatacagggttggaaccattattttagagtgccaagtgcctatattgtaatatgatcttgcctgtatggtactcctaaaagctgaacttctaggttcatgtcatggtaataacagcagtacctccaaactcttctagaacaaataacaatgaaactattttacattacttgtattaaa

SEQ ID NO: 513087 - DNA, 624 bp, Homo sapiens
actgtattttgaaattcttccagtaaatttttcaattccagaagttctttttggtcctttcttaatatagctatgtcatgtttcaaatcttggattgtttttctggctttgctagattggatttcaactttctcttggatctcattgagtttccttgccatccatatttgggattccatatctatcatttcagacatttcartgtggataggatccattggcagggagctaatgcaatcctctggaggtgatgaaacactctcgctttttgtatggctggagttcctgttctgattccttctcgtctgagggagccaacacttcttgttctgtttgaatttgctgtcatttggatggggctttgtatttttattcttttttcccttgagtgtatgactatggggcatgttttatatacaattggttggctttgtttctagattctttcagagggccaaagccctatatgggtttccttggttgcagataggttcatgcagtaggtttcagatattgcttgatttagcaaagtatttttgtttgatggtataattcagggtacattctagtagatagcaagtaagagtaaattaaacagataggctgaattaaacagataggctc

SEQ ID NO: 513088 - DNA, 612 bp, Homo sapiens
aattcttcattttctgttttggcctacaccaattctcaattcctttcttctcggttctctataaaattttgtattcattttgaaaaatgaaacaaacaaaaaagataacatgaacatctcagcattctggtagcctgaggtcttcctaatctcttggctctctaacacacagacaaataaaaatggcagtgataacctggaatggtaagtggactcagagtcttcaaaacccagctatgaataagctaagtgtcagagagcattagtcatacgttaatttgaaaatgcaaggtgtcgtttatactgcactttagcaatgttcaacgcatttcttatttttagtcagaggaattaatttatgcttgttaattgtaaggagatatgtgtyttagttctctatgacaaaatatctgtttagaatattttgaggatgtcccagtttggtatacttcacagatcataccccggcactgtgtgtttctatatggtaatgtgcacggaagggaggatacaaaggaaactcaagtagaaatgagtccggaggattgatgggtgaaaagctaagggctttgtgggtggctccatgaaccaggataacacagaacatgtcca

SEQ ID NO: 513089 - DNA, 602 bp, Homo sapiens
tgctctccagtctgggcaacaagagcgagactccatctcaaaaaaaaaaaaaaamatttatgtactccaacttggtcatacctgcaatctgctgtgtccttgattcttctacccttctcttcctaccctggggtatattggggtgtgtgtgtgtgtgtgtgtgtgtgtgtgtgtgtgtgtgtgtgtgtgtgtatgcatgtgcatacattgtgtattcgctttgctccttattccttatctgtagagtcatagcatttctaaaattccttagatgatccagactcacattttatggatgaagaaactaagctcagacagaataaaggctttgtcctttgattaacttttgcatggatacccctgatgtattcagaaacagtcttgtggggtatgatgtggacccttccatgatctgtgaagatggatgaaatcaggaattttatttctatggtactgacactattaacaacaacaattcatacatagggtatgtgtgtattactatgtacatgtatgtctgtgttttcctggtttcctttgtttgtttgtttgtttttgagacaggatcttgccgtgttgcccaggctggagtgcagtggcta

SEQ ID NO: 513090 - DNA, 562 bp, Homo sapiens
ttttttattgtcctcagtagccaacaacttgggcaggatctccacagtgacgatttaatcatgcttggatatatctttctagtttaggagcatggaacctagagccttctgaggccagagcctgtcagtgactccaacttcagaatccaggacactgaccccatttgtcaaaagtgtctgtcaggacatttcaacaggaggaagaactcagtcaagatacataaatagttactggttttgcagtccaaaaaatactaagccagtagaagacaagctacaarccagaattagtgggttgatagcctgagatgcagaaataccagggtaatctacatctccacccacaagatgaacaaagcaagaaataaacatggttaggagagtgagtataaggttcccataagttgcagagttggcttaaaatgagtcaactgaagttgtcttttgcatgtatagcttgagatggctcagctaagaagagagatgggctgcactggacatagtaagtctacaagacagaatgactgaagatatttgtgctgagaattgcctagagattgtg

SEQ ID NO: 513091 - DNA, 608 bp, Homo sapiens
gattctcttataactcagaaatgctttcctgtggaaaatgcctttatagacttatatattcttttggtcattatccgtagcrtttttaaaaattgagaatgaattcaatttatggaaccaggccaaattttgtaatgccaactctggtgggtatggtagataattatatttggtaatggcagattttattatgctaaaacaaacactgaaattaaatgatgaagaaactgtgttcatgtaaacatgttgttttctcttgtgatttgaattagagaatgagtattgcacaccaccacacaaaatagacaagaaaacacactgacaaaatattctcactatctatgacaacctactttacaattatgtaaatatttctttgatattctaagtttttgttctttaaagctattctgcaaaaatgggaatatctctgtgtgagtggttgtgaaggggaatatgcttaattgctactttgttagagatgcacttagatgtacctatgaaaaagaagaaatagggttaaagagggagttgttgatcggagggttgactctacctggcagatatcaaatctaacttgaggttttgactcagctttcttttccagc

SEQ ID NO: 513092 - DNA, 505 bp, Homo sapiens
  misc_feature (1)...(505): n = A,T,C or G
nnnnnnnnnnnnnnnnnnnnnnnnnnactttttataccctataaaatctgtaaagattttaagacttttagaatgaattccattttacctgcctttttgttattggcamtttatatagaaatttgtttacagcttatatgttaaatatggtatttatctatttaatatttttgttagcttctgtaatcataacttttattaaaataccatcaattaagaaagacaaattactttttaaaaatacacttagtcaatggtcagaaaacagaattccttcacgacctgattgaaagttgaaatgactttttgtgacaataataactatacggtcttctgaaactttgacaaaaaacattaactctgtatgatgctgtacttacattttaatttatttgctatttctttttttaatttttgtaggtatatagtaggtatgtatatttatgagatacataagatgttctgattcaggcatgcaatgtgaaataattatatcatggaaaat

SEQ ID NO: 513093 - DNA, 578 bp, Homo sapiens
ctgctgttctagcaacaccaaatactcaattgccctctgagagatcattaaattgactctttgctaaattttgctcatttctttttggagacatttcctaataataaaaggcactagggtctgaaatgtcaagcacatgcagtagcttgaaaaattataatttttagagaccataagctgtcactttagattgtgttagcacagtacatactgtgatctttcatacacaaatatccctttkccagggagctctctttatcagaaattgaactgataagatcgccctgtcattgagctttttttttaaatctcactggaatgcaatttatccttcttcccatttgtgcaccctcaatatctgaatgatcagtaaatatctctatacccattgactcagttcagtaaagttttgggggattatgaaatgcatgtttaatttttccatgtttgaacaatcttttaatcagaatattgtatcattcattgtgagaagcttctgatatcttaaaaatttgaaaggaaggggtggcaaataaaatatacaactgggtcaagatgaaggaattagtagttgaatc

SEQ ID NO: 513094 - DNA, 578 bp, Homo sapiens
ctgctgttctagcaacaccaaatactcaattgccctctgagagatcattaaattgactctttgctaaattttgctcatttctttttggagacatttcctaataataaaaggcactagggtctgaaatgtcaagcacatgcagtagcttgaaaaattataatttttagagaccataagctgtcactttagattgtgttagcacagtacatactgtgatctttcatacacaaatatcccttttccagggagctctctttatcagaaattgaactgataagatcgccctgtcattgagctttttttttaaatctcactggaatgcaatttatccttcttcccatttgtgcaccctcaatwtctgaatgatcagtaaatatctctatacccattgactcagttcagtaaagttttgggggattatgaaatgcatgtttaatttttccatgtttgaacaatcttttaatcagaatattgtatcattcattgtgagaagcttctgatatcttaaaaatttgaaaggaaggggtggcaaataaaatatacaactgggtcaagatgaaggaattagtagttgaatc

SEQ ID NO: 513095 - DNA, 622 bp, Homo sapiens
aggcctccttgagttaacacacacatttaagatccaggcccagatacagaacgagctatttgttgaacatagatcatgtatgaacccaacagatgtagaaatgcagctatagccagatccacagtgcaggcaggcaggattcgctatggcccaactatrctgacacccgggagccatctggtcttctccacaccaccaattagcactaaaaatgtcatttgtgatgtaaaagtgggaggtttttttgtttttttgtttttttctgtctcaagtagccacatcgctcaccaaacagccaccaaacattttttcatggtgtttgcgtaagtgagaaccaagaggagaaagatcttggcacattagaaaatagaaaaccacccattgctgcttgaattgctttccggcatagtgaaggtttcatttctgttttggctgtggtttcacaaccttgaagaagccaaactgtggatgtgtaagttacttgataacttaaaatacaaattcttaaatcactcactgcctttccatttcaaatagcatacagtgaacaatctgtttgcaataataataggcataacattttcccacttccccctagctaaatggatgctgatactagaac

SEQ ID NO: 513096 - DNA, 482 bp, Homo sapiens
tgcaccgtgattcttggcagcagtcacacggcgggtcactctctggcaccctgggtgtttgcaagtctgacacagcactgagaggtgccaaggtatacccttctggagtgatctaaagaaggcaaagcctcccctcgtcccctcacttgcaccttctgtctgctttcttgtgcccttcacacaaagtggacactgggggaactgtggcccaccaaaaggaawaaactttgccacagctcaagggttggtcaatcttgggtaattagtgtatatcaatgctttgtatcaggctcttggaagactatttaaagtaaaagcaggattctttaatgatcaaattcaggtggaggaaagattgtaaaaacacttttaatttgcaaataattaaaaatttacataaaagtcatgagaataataacgaagaatatcccataaatcctttccctagatttacctattagtaacattttattttatttgct

SEQ ID NO: 513097 - DNA, 569 bp, Homo sapiens
atcgatacatcatgcccacaccactgatcagctctctgaactgacaataatatttatcctgaagcagtcatttcacacttgcccatcacattacctggcatagagtagtgctgtgtaaacgatcagtgttgaaacaaatgtattcccagtactggggagggagagtaaatgtgaagaggcctttcataggcttgcacttgccctcctaacctaactcctttccatttgaaggttcccctgtgcaatcactggttctagtctttaatttgtaaggttgctaagacttytcccattcaattgagagacaatgttggcatgcaggatttatctatctagagaggaatgggttcaaaacagaaatatgggtgcataaatgatacatagcacaagccctttaaaaaaaatcatacctgctctagacctttcagggcaggttttcgtggtgtatcttttttctaatcttacatctaatcagacagcagcctgtaattttactcatcattacatatggcctattgacagttgacaacaactttactcatcattacatatggccattacagttgaca

SEQ ID NO: 513098 - DNA, 540 bp, Homo sapiens
cagctctctgaactgacaataatatttatcctgaagcagtcatttcacacttgcccatcacattacctggcatagagtagtgctgtgtaaacgatcagtgttgaaacaaatgtattcccagtactggggagggagagtaaatgtgaagaggcctttcataggcttgcacttgccctcctaacctaactcctttccatttgaaggttcccctgtgcaatcactggttctagtctttaatttgtaaggttgctaagacttttcccattcaattgagagacaatgttggcatgcaggatttatctatctagagaggaatgggttcaaaacagaaatatgggtgcataaatgatacayagcacaagccctttaaaaaaaatcatacctgctctagacctttcagggcaggttttcgtggtgtatcttttttctaatcttacatctaatcagacagcagcctgtaattttactcatcattacatatggcctattgacagttgacaacaactttactcatcattacatatggccattacagttgac

SEQ ID NO: 513099 - DNA, 611 bp, Homo sapiens
attagcattccagagtgaagtcttccccatttgactttagcagtcttccaaggtaatgcagtcaactcacctgctatttttagctcaacgtcaagccccacatttgtaactaacttttgcaaatgcttttctattgcctcattcttgaataggatgggcagccgtagagtacgtaatttctgagaaaaacctacaatacaaaaaataaacaacaaaagcactttggaatttattagtagaaaggaagagatatttaaaatatttgatttaggacttaatcattcttacactagggaatatatgacactcatgaaaaaggaataattggagaaccaaaagaacccaagaaatttaaaatacaggccgggcgtggtggctcacacctgtaatcccagcactttgggaggccaaggtgggcagatcacgaggtcaggaaatcgagaccatcctggccaacatcatgaaaccccacctctactaaaaatacaaaaattagttgggtgtggtggcacgtgcctgtaatcccagctacttgggaggctgaggcacgagaatcccttgagcccagggggcagmggttgcactgagttgagatcatgccactgcactcc

SEQ ID NO: 513100 - DNA, 626 bp, Homo sapiens
cactgcctcccccagggtattatcccccctggctgtagccaatacccagcatctgaatgtgagggcatggggcagggtgctagcatgctagggtggcttgacccactgcctcaattagggacactgctgaggggctggccctgcagaagagtcttgcaggccaccatcagcccatgtccagtcctgttagcctcctctcttacagaggctcccaagagcatcttcaacaactcgctggcacatagtctcccttttagagtctttttctgggaacccaacctgaaacaacatacaaacgtttttttctgtttgtttttaaaccacgcaagttatatcacactcattactgaataatctgctttgaaaggtagtgtatttacagaaaggatattttaagattatcccaaacctagtattaggctgaatcaagttaagttaaacataactcaacatgacaatagtatgtcaaagcattggcacccaacttgctayccagggaactaaaattcgagacagagaccagcttgacacaacgaatccacctacagattcttcatttgttggtttcccactaaaacaagtaaacattgccatttaaatatctgggagctaaagctgttgagcaa

SEQ ID NO: 513101 - DNA, 604 bp, Homo sapiens
ccctggaaaattctttccccactcctcacataggcaggaaaaaggtgaatggttaaacacttgggtgctagcacaggcccctaggtaggaatactctcagtttccggtttccctctgccaactgtggtgaggcactattgtgccatcctccctggaaatttggagagattagatacatcaacacaggtgaaacactcatcacagtgcctggggcagtgtaagagatcgataaatattagctattattatcagtaatgtcttttctttttctcttgttgcccaggctagagtgcaatggcatgatcttggctcactgcaacctccgcctccygagttcaagcaattctcctgcctcagcctcccaagtggtgggattacaggcatgcaccaccacacctggctaattttgtatttttagtagagacggggtttcattctgttggtcaggctagtctcaaactcctgacttcaggtgattcaaccgcctcccaaagtgctgggattacaggcgtgagtcactgcacctggccagtactaccacttttattattcacctagttatatctgactcatgtttcagggaagccttccctaaacatcctga

SEQ ID NO: 513102 - DNA, 508 bp, Homo sapiens
ccccagcagccctcacccatgagtataaayaccccagctcccttgcccctggtgggatgactgaggctgctgctctgtgctgttccccagggtcccacggaaggaaaaagccccagcggcccacactccacactggtaatcggctccatgacccaccctttgctgactgccttcccttccccatgctgattcacgacccccctagggcccctttttggccccagccgcccccaaggttccctggagtcaactcctaggtcaaccgtggcactcagatccttctgggggagcccaaccttccacagaggccctgctgggggcagggaagggcaccagggacccctaggacctggctcaccaccggctcacgcacctgcatacccgtgatggagacgtggtgagactccactgtcggccgccggggcagccgaggcgaggactgcggggagctgacgggtgagtagggcagggacgggcagatgcagcgtccgttcatgtccaggctgcc

SEQ ID NO: 513103 - DNA, 543 bp, Homo sapiens
tttacacatggagaaatatcacttgtcaaggtcacatggttggcacacgatagattcaggttcaaaactacgctggactgactccaaagccacccacacagacayctgtctcactgctgccttgttctcaatactatggaggatgcagagatgacagctcagaggaagggcataaaagccttttgctgaatgagtaactttttctgggccaatcccctcacctccccattttcctatctgtaaaatgggcataccacttccttcctaaggcacaaaataaacatgacctaagaataaaatgagacaacagctaggaaaactttccaggaagctgagtgctggaaaggaggctcttctgtggataaggatgggggcagggaggagaatgcggatactcacatagtaggtattgtcattttcattgtaggccaacttgacgacaccataggagccctggataaagggagatgcccatgacatactatccagaagttaagatctgcaaaatgagaaccctaatacagacgttgcaaaccggcagcc

SEQ ID NO: 513104 - DNA, 475 bp, Homo sapiens
caataaaaacgtagatttttccctttcctgagcttgtgttcttattgaggaaagcctaagaaactggtcccatgaagaagtaaaggagtttataccgattgcctctcaatatttgattagaaaatttttcaatcatgtagcaaagctggaagaagtgtccagtgaacacccacatacccaccacctggattctactatattaaccttttcctgtgcttgtctgttcattccttacccatccctcagtccatctggtttcttaatgtatttcagagtaagttaccaccatctccactcttccttccaaatgccttagaaggcagtgattagstagagctcaagtcactgctcttaatgaaatcgttttccttagacgggtggttcaggtacctctctgccaccttctccaacattttcagtgtcccgtgtaaggattccttttccagcacacatgaccaagctgctcttgagtcag

SEQ ID NO: 513105 - DNA, 602 bp, Homo sapiens
ttttcatcacctacaaaggaaaccccaaatccagtagcagtcactccccattctccccttcccctgtccctggccacagtctactttctgtctctatagatgcctattctggacatttcctataaatagaattgtatatggtgtggccttttgtgtctgtcttctttcactcagcatcatgttctccaggtccatccatgttgtagcctgtgtcattgcttcatccttcttatggctaaataagattctgtgtatgaatgtaccacattttatttgtccattcatccgtcagtggccacttgcrtggtttccacttttttggcgattctgagtagtgctgctataagcattcgtgtgcacattctggtggatatcgaatcacttctccacatcttagtaacacacgtcacttactccccactctgtcatccttctatctgcagtatcccacccgcaggacgctctgttcctctgaccgaggttgtaaaaagggatggatggacccgcagagcaaaggtaccttctgtttcttttcccgagaccctaggggtggatggtctggcatcttggtgacatttgtgatgcccaggtcaggtcttcag

SEQ ID NO: 513106 - DNA, 602 bp, Homo sapiens
ttttcatcacctacaaaggaaaccccaaatccagtagcagtcactccccattctccccttcccctgtccctggccacagtctactttctgtctctatagatgcctattctggacatttcctataaatagaattgtatatggtgtggccttttgtgtctgtcttctttcactcagcatcatgttctccaggtccatccatgttgtagcctgtgtcattgcttcatccttcttatggctaaataagattctgtgtatgaatgtaccacattttatttgtccattcatccgtcagtggccacttgcatggtttccacttttttggcgattctgagtagtgctgctataagcattcgtgtgcacattctggtggatatcgaatcacttctccacrtcttagtaacacacgtcacttactccccactctgtcatccttctatctgcagtatcccacccgcaggacgctctgttcctctgaccgaggttgtaaaaagggatggatggacccgcagagcaaaggtaccttctgtttcttttcccgagaccctaggggtggatggtctggcatcttggtgacatttgtgatgcccaggtcaggtcttcag

SEQ ID NO: 513107 - DNA, 611 bp, Homo sapiens
cccatatggcaagaaactgaggctcccaaccagcagccagcaaggatctgatgcctgccaacagtacagtaagtgtgagcttgaatcycataatgaactttgagattactgcagccccagccaagagctttactgcaacttcataagagaccctgagccagaagcacccagctaaaccactcctacattctgacactcagagcctgttagatagtaagtgtttgttattttaaagttttcagtttgggggtaatttgttatgcagcaattgagaactaacacaatcatctagctgatgggcttggctagggtaatgagacctgtcttataattcagcaccacggagctgccgagtggtggcatcattaccacattgtaagttcagctacatttggcaaaatactaaccccaaagccatgacaaatgtcaatctgaagtctgagacgtgccactttgttgcagacatatggaagtgtttgccaatgaattgcatgcaacaatcaggcataaccagtttattttcagattgttaaaaacagagcagataattgcaccttaatgactgctcactgtccacagatcttatactaggggacagagtgagcatattg

SEQ ID NO: 513108 - DNA, 603 bp, Homo sapiens
cttgaaggagaatgatttctcaatcagggcactgccatgttgtttgagaagtttgccatgtttgttactttcatttttattattaaaaactcatgaggccgggcacagtggctcacacctgtaatctcagcactttgggaggctgaggcgggtgcatcacctgatgtcaggagttccagaccagcctggccaacatgatgaaaccccgtctctattaaacatacaaaaaattagccaggtgtggtggtgggcgcctgtaatcccagctactcaggaggctgaggcaggagaatctcttgaacccggaaggggggaggttgcagtgagctgagattgcgccactgcrctccagcctggggcgacagagtgaaactccatttaaaacaaacaaaacaaaacacctcatgaaatgtagccaaataccacctgtaccccaaaaacttatggaaaaaaaacaaacaacaactcatgggaaaaaaaaccaactcatgaaagagtaagggattgggagcttatctgcaggcagcaagaagatgtgaggtcagggagaccattctcaccctgcatttggtctgggatgtaaggatccctacggtacataac

SEQ ID NO: 513109 - DNA, 492 bp, Homo sapiens
gaaaataaaaatacgttttaacataaaattattaacattttcacacatgattcagtagtttgaattactgccttaagtgaagtgaaaaaaaaaatctcatttctaatgtttccaggtaagtgcagagatttttttttttttttaaatggagtcttgctctgtcgcccaggctggagtgccgtagtgcaatcttggctcactgtgagctccgcctcctgggttcacgccattctcccgcctcagcctcccgagtagctgggactacaggcgcccgccaccatgcccggctaattttttgtatttttagcagagacagggtttcactgtgtttgccaggatggtctcaatttcctgacttcgtgattcacccgcctcggcctcccaaagtgctggggttacaggcrtgagccagtgcagaggtttttttaagtgaccatgttgttcatttctttttacttacgcagtctgaattttagccaaaactacattagt

SEQ ID NO: 513110 - DNA, 558 bp, Homo sapiens
tgtctgctagctggcagttctcgaagctaggatcctctctccttcctgataattaccttgaggggaatggctttcaggtccttgagaaagacacccctgagctgtaggcaacacatacatagtagctcagagcaacagaggaaggattcacaatggtaagcctcctttttttagtaaatgctctaaaaaagcaagatcaggggcctgttgtcagatgttggtggaacaaactcaattcttttgacagccttaagctttcccagacagcaactcaaaagggggctgggccatcccagggacgtggcctcaggctgctagaagccatgcgatggtttggtgaagtctctgagcrcagggtatgagtggagtgttggtactgagagtttcagtgtcccaggtatacttaccttatgaaacagatatagttaaaagaacaggtgtgcccaccacctgcgctgctgttggcagcattttaaaagagaactgaccattttctacaatccaccacaggcccactgtgcgaggccaggagtgccgaagccccttcttctagaatct

SEQ ID NO: 513111 - DNA, 558 bp, Homo sapiens
tgtctgctagctggcagttctcgaagctaggatcctctctccttcctgataattaccttgaggggaatggctttcaggtccttgagaaagacacccctgagctgtaggcaacacatacatagtagctcagagcaacagaggaaggattcacaatggtaagcctcctttttttagtaaatgctctaaaaaagcaagatcaggggcctgttgtcagatgttggtggaacaaactcaattcttttgacagccttaagctttcccagacagcaactcaaaagggggctgggccatcccagggacgtggcctcaggctgctagaagccatgcgatggtttggtgaagtctctgagcgcagggtatgagtggagtgttggtactgagagtttcagtgtcccaggtatacttaccttatgaaacagatayagttaaaagaacaggtgtgcccaccacctgcgctgctgttggcagcattttaaaagagaactgaccattttctacaatccaccacaggcccactgtgcgaggccaggagtgccgaagccccttcttctagaatct

SEQ ID NO: 513112 - DNA, 558 bp, Homo sapiens
tgtctgctagctggcagttctcgaagctaggatcctctctccttcctgataattaccttgaggggaatggctttcaggtccttgagaaagacacccctgagctgtaggcaacacatacatagtagctcagagcaacagaggaaggattcacaatggtaagcctcctttttttagtaaatgctctaaaaaagcaagatcaggggcctgttgtcagatgttggtggaacaaactcaattcttttgacagccttaagctttcccagacagcaactcaaaagggggctgggccatcccagggacgtggcctcaggctgctagaagccatgcgatggtttggtgaagtctctgagcgcagggtatgagtggagtgttggtactgagagtttcagtgtcccaggtatacttaccttatgaaacagatatagttaaaagaacaggygtgcccaccacctgcgctgctgttggcagcattttaaaagagaactgaccattttctacaatccaccacaggcccactgtgcgaggccaggagtgccgaagccccttcttctagaatct

SEQ ID NO: 513113 - DNA, 544 bp, Homo sapiens
aagcccagagtggtgcccttggagcccgacttcccctggcacattttctggcttatccaggagccccggggtgtcctttctgctgtgaaacctcctcatgctccccaagcccacagcctctcgggtccaagggggtcttctcgaatacagcaaatcccggcccagcccctcagtagctctggaacactgcggctctcctggtacaatcttcaaatctggtggagaggaaagcgtgtggacttgggaccctgagttggagaatctgctctctgccctgtgaccctggccaagtctctcagctccaagcctgcatttccgcacctgtaaggtggagctaacgggacacgtgcagcgcagaccaggccacggtgagcacaggcaggaggccacggggtgcagtgctcaggcctgtgaggagtcagatcctggctccgaggagttgttactggatgcccagaagcacagtggcctcatcctyaaagcagtggaggtggggggtggtaagaacagggccgatcttgcagggccgttgtgaggattaaaa

SEQ ID NO: 513114 - DNA, 604 bp, Homo sapiens
tggtgcccttggagcccgacttcccctggcacattttctggcttatccaggagccccggggtgtcctttctgctgtgaaacctcctcatgctccccaagcccacagcctctcgggtccaagggggtcttctcgaatacagcaaatcccggcccagcccctcagtagctctggaacactgcggctctcctggtacaatcttcaaatctggtggagaggaaagcgtgtggacttgggaccctgagttggagaatctgctctctgccctgtgaccctggccaagtctctcagctccaagcctgcatttccgcacctgtaaggtggagctaacgggacacgtgcagcgcagaccaggccacggtgagcacaggcaggaggccacggggtgcagtgctcaggcctgtgaggagtcagatcctggctccgaggagttgttactggatgcccagaagcacagtggcctcatcctcaaagcagtggaggtggggggtggtaagaacagggccgatcttgcagggccgttgtgaggattaaaaatacaatgtatgataatgatgcrtcaaagtaggttcctcagtcctaacaaatgtgccactctggtggggg

SEQ ID NO: 513115 - DNA, 281 bp, Homo sapiens
ccccagaagatggctatcatcatacgtaccttacatggtttctactggtacaagagagaaacacacataaactgcctagcacaatgagtgtccacatctgatactggctgatcactyagtgatacctctctgaaccagaacttatcctaacgtcacactttttgatcagaaaccgtgttgtaggagtggaaatgacgtgagagacaggaggatggtccaggtcacagttcctctcctgctcccatcctctccctccctccttctcctttctctctcgaggc

SEQ ID NO: 513116 - DNA, 422 bp, Homo sapiens
tgtcagtattcaaagagactcttcctgaccaccagaccgaagtgggcacccttcacttcctatcacgtcatcctattctcttttctaacctcccagaggagagtcacacagatagacaggaaaaataggtactctccctcctcaacccactctaattaggtatttttcctgtctgtctgtctatctcgcctctgggaggtaagtcccacaagggctgagacattgtctttcttctttaccactatatctgcaggactcagaacagtgccccgcacccccgtgtgygtgtgtgtgtgtgtgtgtgtgtgtgtgtgtgtgtatacatacagcaacgtagtgttgctatatgttgttgaatgcgtgaatgaatggataaataaattagtaacagagctaggaccagaacccaggcctcctgcccc

SEQ ID NO: 513117 - DNA, 235 bp, Homo sapiens
ggccaggccaggcctcaacacccccmagcaccttccccaggccaggccaggcctcaacgcccccaagcaccttccccagtccaggccaggcctcaacgcccccaagcaccttccccaggccaggccaggcctcaacaccctccaagcaccttccccaggccaggcctcaacacccccaagcaccttccccaggccaggcctcaacaccctccaagcaccttccccaggccaggcc

SEQ ID NO: 513118 - DNA, 235 bp, Homo sapiens
ggccaggccaggcctcaacacccccaagcaccttccccaggccaggccaggcctcaacrcccccaagcaccttccccagtccaggccaggcctcaacgcccccaagcaccttccccaggccaggccaggcctcaacaccctccaagcaccttccccaggccaggcctcaacacccccaagcaccttccccaggccaggcctcaacaccctccaagcaccttccccaggccaggcc

SEQ ID NO: 513119 - DNA, 235 bp, Homo sapiens
ggccaggccaggcctcaacacccccaagcaccttccccaggccaggccaggcctcaacgcccccaagcaccttccccagkccaggccaggcctcaacgcccccaagcaccttccccaggccaggccaggcctcaacaccctccaagcaccttccccaggccaggcctcaacacccccaagcaccttccccaggccaggcctcaacaccctccaagcaccttccccaggccaggcc

SEQ ID NO: 513120 - DNA, 235 bp, Homo sapiens
ggccaggccaggcctcaacacccccaagcaccttccccaggccaggccaggcctcaacgcccccaagcaccttccccagtccaggccaggcctcaacgcccccaagcaccttccccagkccaggccaggcctcaacaccctccaagcaccttccccaggccaggcctcaacacccccaagcaccttccccaggccaggcctcaacaccctccaagcaccttccccaggccaggcc

SEQ ID NO: 513121 - DNA, 577 bp, Homo sapiens
actggtagatacagtgaagatcccctgtatgatatcacagtggtagatacactgaagctgctctgtatgatatcgcagtggtagatatagcacagctcctctgtgtgatatcacagtggtagatacaatgaagctcctctgtatgatatcacagyggtagatatagtgaagctaccctgtgtgatatcacagtggtagatatagtgaagctcctctgtatgatatcacagtggtggatatagtgaagctcctctgtatgatatcacagtggtggatatagtgaagctcctctgtatgatatcacagtggtggatatagtgaagctcctctgtatgatatcacagtggtagatacagtgaagcagctctgtatgatatcacagtggtagatacagtgaagctcctctatatgatatcacagtggtagatatagtgaagctcctctgtgtgatatcacactggtagatatagtgaagctgctctgtgtgatatcacagtggtagatatagtgaagctgctctgtatgatataacagtgggagatatagtgaagctgctctgtatgatatcaacagtgca

SEQ ID NO: 513122 - DNA, 577 bp, Homo sapiens
actggtagatacagtgaagatcccctgtatgatatcacagtggtagatacactgaagctgctctgtatgatatcgcagtggtagatatagcacagctcctctgtgtgatatcacagtggtagatacaatgaagctcctctgtatgatatcacagcggtagatatagtgaagctaccctgtrtgatatcacagtggtagatatagtgaagctcctctgtatgatatcacagtggtggatatagtgaagctcctctgtatgatatcacagtggtggatatagtgaagctcctctgtatgatatcacagtggtggatatagtgaagctcctctgtatgatatcacagtggtagatacagtgaagcagctctgtatgatatcacagtggtagatacagtgaagctcctctatatgatatcacagtggtagatatagtgaagctcctctgtgtgatatcacactggtagatatagtgaagctgctctgtgtgatatcacagtggtagatatagtgaagctgctctgtatgatataacagtgggagatatagtgaagctgctctgtatgatatcaacagtgca

SEQ ID NO: 513123 - DNA, 583 bp, Homo sapiens
tcttactgttgaaaaagcccagcatgttaaagctcaggaagaatcccttcaatgggttcttgaggacaagactgtatttcagatagtataataatcagtgttctgggttaggcatggtgacttgtgcctgtaatcccagcactttgggaggccggaggccgaggtgggcagatcgcttgagctcaggagtttgagacagcctgggcaacatggtgaaaccccatccccmccaaaaatacaaaaaatttttaaaaaaaaattagctgggcatgatggcacattcctgtagtctcagttactggggggctgaggcgagaggatcgcttgagcccaggaggtggaggctgcagtgagctgagatcgcgccactgcactccagcctgggcgacagagtgagacgccgtctcaaaaaaaaaaaaaaaaaaaaaatatatatatatatatatataacaataatcaatgttcatcataagaacaagctggagtcaatgagtaaagattatgtttggtttttgaatattggaaaatgcaccactctctagcaagatttccaaaaatgcttacaagctggagttttggtaca

SEQ ID NO: 513124 - DNA, 597 bp, Homo sapiens
gctgctctgtatgatatcacagtggtagttatagagaagctmccctgtatgatatcacagtggtagacatagtgaagctgctctgtatgatatcacagtggtagatacagtgaagctcctctgtgtgatatcacagtggtagatatagtgaagctcctctgtgtgatatcacagtggtagatatagtgaagctcctatatatgataccacagtggtagatatagtgaagctcctctgtatgatatcacagtggtagatatagtgaagctcctctgtgtgatatcacagtggtagatacagtgaagctcctctgtgtgatatcacagtggtacatatagtgaagctcctctgtatgatttttttgtggtagataaagtgaagctgctctgtgtgatatcacagtggtagatatagtggagctgctctgtatgatatcacagaggtacatatagtaaagctccgctgtacatcacagtggtagataaagtgaagctcctctgtatgatatcacagtcgtagatataggaagctcctctgtgtgatgtcacagtagtagatatagtgaagctcccatgtatgatatcacagtggtacgta

SEQ ID NO: 513125 - DNA, 597 bp, Homo sapiens
gctgctctgtatgatatcacagtggtagttatagagaagctaccctgtatgatatcacagtggtagayatagtgaagctgctctgtatgatatcacagtggtagatacagtgaagctcctctgtgtgatatcacagtggtagatatagtgaagctcctctgtgtgatatcacagtggtagatatagtgaagctcctatatatgataccacagtggtagatatagtgaagctcctctgtatgatatcacagtggtagatatagtgaagctcctctgtgtgatatcacagtggtagatacagtgaagctcctctgtgtgatatcacagtggtacatatagtgaagctcctctgtatgatttttttgtggtagataaagtgaagctgctctgtgtgatatcacagtggtagatatagtggagctgctctgtatgatatcacagaggtacatatagtaaagctccgctgtacatcacagtggtagataaagtgaagctcctctgtatgatatcacagtcgtagatataggaagctcctctgtgtgatgtcacagtagtagatatagtgaagctcccatgtatgatatcacagtggtacgta

SEQ ID NO: 513126 - DNA, 597 bp, Homo sapiens
gctgctctgtatgatatcacagtggtagttatagagaagctaccctgtatgatatcacagtggtagacatagtgaagctgctctgtatgatatcacagtggtagatacagtgaagctcctctgtgtgatatcacagtggtagatatagtgaagctcctctgtgtgatatcacagtggtagatatagtgaagctcctatatatgataccacagtggtagatatagtgaagctcctctgtatgatatcacagtggtagatatagtgaagctcctctgtgtgatatcacagtggtagatacagtgaagctcctctgtgtgatatcacagtggtacatatagtgaagctcctctgtatgatttttttgtggtagataaagtgaagctgctctgtgtgatatcacagtggtagatatagtggagctgctctgtatgatatcacagwggtacatatagtaaagctccgctgtacatcacagtggtagataaagtgaagctcctctgtatgatatcacagtcgtagatataggaagctcctctgtgtgatgtcacagtagtagatatagtgaagctcccatgtatgatatcacagtggtacgta

SEQ ID NO: 513127 - DNA, 597 bp, Homo sapiens
gctgctctgtatgatatcacagtggtagttatagagaagctaccctgtatgatatcacagtggtagacatagtgaagctgctctgtatgatatcacagtggtagatacagtgaagctcctctgtgtgatatcacagtggtagatatagtgaagctcctctgtgtgatatcacagtggtagatatagtgaagctcctatatatgataccacagtggtagatatagtgaagctcctctgtatgatatcacagtggtagatatagtgaagctcctctgtgtgatatcacagtggtagatacagtgaagctcctctgtgtgatatcacagtggtacatatagtgaagctcctctgtatgatttttttgtggtagataaagtgaagctgctctgtgtgatatcacagtggtagatatagtggagctgctctgtatgatatcacagaggtacatatagtaaagctccgctgtayatcacagtggtagataaagtgaagctcctctgtatgatatcacagtcgtagatataggaagctcctctgtgtgatgtcacagtagtagatatagtgaagctcccatgtatgatatcacagtggtacgta

SEQ ID NO: 513128 - DNA, 554 bp, Homo sapiens
  misc_feature (1)...(554): n = A,T,C or G
nnnnnnnnnnnnnnnnnnnnnntggtatatcctctgcaaatgactacaagttatactttgtctgaatgcattgtttagtactttgtgagcaataggaaactggaatttcttttcttcttcctgacatcaaaggaaagtgtcctcatttttctgtatcaaacatgatgatgctgagatgactattagtgtgtcaaaaaagtatcatccacttctattttgcttagagttcaattttattaaacgtcttatttgacatcacttaaagcactcattggaatttgttgtcttattaatatgctattttatttatttatttagagaccggatcatactctcttgcccaggctatagtgcactgttgtgatcatagctcastgcagccataaactagcctcaagtgatcattctacctcagcttcctgagtagctggaattataggtatgaacaactgtgcctggcttaatgtgttattttaaacaaataaaattcttaatattgaatcattcttaccctttttccccacttttattttatttttattatatttgggcat

SEQ ID NO: 513129 - DNA, 670 bp, Homo sapiens
gctgcattctggacatcaggggccaaaatcacacacccattagtgacatctccatttctatggtaattttgcataacaaggtaacagaatccaaccagagccatgtgactccaggcaaaagtggaactagattttcacatttcttaggtcggattccttagaggcagagcctgccagctccctacatgtgctgataccctcgataaccttttatatttctaaaatgcatcatagtttgtgaaggtttgggcacactatctcatctaaatcttgcaaattcattctgcaaattgggcagagcaagggtggttttccttatttggaaaagtagaaaatgaggcccagagagagtaagtagcacccagctagaactgtccaggctgggacgccagcctcagtctcagtcaagactccaggatcaggtctctccgtttaccttgcaaatagtcaatatttaaaatttccactaatggaactgttaaatactcctgtttttctgacaccctgtatatggaattatcaaagctttcagcccatttgcttatcagtcccaccacctagactgacattttatctcrctcgtcttcatagctccagtgtctggcttaatcccactttccaaatgtattacatcacctagaaacaatggtgtgtgcagttgaagaacgag

SEQ ID NO: 513130 - DNA, 609 bp, Homo sapiens
gactgtacttggttagactccatcagcatatcgaagagtattagttgctctatatcctcaccaacaactagtgttttctggggtttttatttgttttttcacatgtcttttagcagggtcaccactcctacccctccatccctgaaccacttacgtatggtttgccttctaggaattctgggaactgcagttgtctttattgtgttacattttaatgatgctttagtacttagcactctttgtatactggcattctgggccagtgctcccaatgggccatccctgccttacccagctctagaaaacaaactcatagrtgtagccatattatcttcccattgggctagtttcaattccttccctctgcctctcaagaaagcacattagtgtaagtgagtaggaggagggttatcatgggaattaccataaatctgtcctattttttttagtaaagcatttgcaagcttcagccccttaataattactagtaataaacttcttggtcatacctcactgacaacacaggtttgccaacacccggccatgtgatcctgaataatttcattcccttagcaccatactcagctctgaacaagtaagtggggtcct

SEQ ID NO: 513131 - DNA, 602 bp, Homo sapiens
gctgctgacatcactatgctgatgatctatgtgggccctagggcaaaaatgggtttcgctggtggaaacaaccaaatttggcgtccctttgaaatctgtagccttactataggtgtctcacagaggggagctgagggaagtgaatcctcctgtcccctgacagggctcagtaaagctccttgatggccaagagcatctgtggctgggctgcaragattggctcctcgaggcctctcctgggcatggccagtgacccaggaggatctcaggtttggctggcagttgtgtcaaacagggcaaactgtgtagtacaggtgactcagtctgggagagggccaggggagatctccattgtggccaagggcagctacgggagagtgcccgcccaccagtgttcataccggagtttctaagcctggacagcggtccccacagtgggcctggacttggcagaggaaggtgacagcacggtggcctccaataacctggtctgacacgtgttcacacaagccatcttggagactcctagaagtaccttgagacgggatttttaaaagactggagttaatgtggcataattggaatgatgagcactagggaca

SEQ ID NO: 513132 - DNA, 587 bp, Homo sapiens
ctgctcagagctgactcagaggtaggcctgagtgattgtgttttaaggtggtaacagacaacagcctgttccagaaaaaatgtcatgagccttcacattattaaggatgtttagggttgcaaggacaatagtgttttgtctatccagcatgctctgcccttcctttaggaaattatctttcctactccaaacatatgattggagggagggaagagctggaaatcacagttcccttggttacaggatcagtggtcccatgaggtaggtagtcttactatccccattttatgagggaataacctgaggttcagcaagatgaagttgctgcccaaattcactaagctagaaagtaatagggccagtggtcaaacccggttctttgtgattccagggttcttgcacttcattggaaatgacagggaacagggcagcaatagggcagaggggatagggacaggaattggaagccgacatcaaggcaacatggtactggtaagctcaggccccagagctcaggccagagccaaggtaaaggatyagagcatttccatagtggaactagatttaataaccagctaaagaacagg

SEQ ID NO: 513133 - DNA, 647 bp, Homo sapiens
taaaaaaaaaaactaaaagactaaatcggcatctagaaactatacctgtggaaggaagaaactctggctccaggctgatcctccatgtgcccatcagcataatcttgctattattaaacaccatgtatagacatacctcacaatggactgcagtctggtcgatagttttagctcttgcttcaatctctccatctcccttcatttgcctggtacagttgagccctgtgtctttgttcatgttgctgctgttttatggaccatgactgtcttagatgcttctcccagaagtagacatgagtgaaggattccagatgcaattgtttgggaggtgatctcaggaaacactgctagggaagtggggaggtaagatggggaaaggaagggaaaaggaggaagtcagtaaagaatgtgttatcaagcacgcaatcactatgggagaacgaggcccaatctccttggagacctcagaactcacctctaagttgttccccttgaggggcaaagaaattagggcatttatcctccaactcctacccaccactggctgagggctcctcccagagctttayctcttcagcccttgctgcatgcccagctcactttagaaagcaaacctcaggctgagagtcatacgtgcatgcagtagg

SEQ ID NO: 513134 - DNA, 618 bp, Homo sapiens
ctgctttcagattacctgtatttcattaaaaattatttaacaatgcttccaaatcagaagcaaaaaccttaatcaaaccaggtttgcacatgattaaaaacaatagccaaactataaaactgagtttcccgtggagaagggggactggtgtagctatacaggggaagtaactaaatcttgtggttacggtactgttgagtacccttattgtgctggtagttatgctacctatatgtgaaattgtgtaaagctaaacacacatacacagacaggaatgcatgtataactggtgaaatctgaacaagctctatggactgtaccaatgtcaatttcctggttttggtatactactgtgtgtggtggtgtgggatactgacackggcaaagagagggaagggagttaggggagaggtgtttgggacctccctttacatttctttatttacaacctcctgtgaatctataattatcaaaataaaaattaaataaattttgaaaaactaagttcctaaagtacactcaagaaattctgcaaccttttcaagatcagattctgtatgctactacaatatacattgactacataaacaatatgtattttcaggtaaacacaagtaa

SEQ ID NO: 513135 - DNA, 618 bp, Homo sapiens
ctgctttcagattacctgtatttcattaaaaattatttaacaatgcttccaaatcagaagcaaaaaccttaatcaaaccaggtttgcacatgattaaaaacaatagccaaactataaaactgagtttcccgtggagaagggggactggtgtagctatacaggggaagtaactaaatcttgtggttacggtactgttgagtacccttattgtgctggtagttatgctacctatatgtgaaattgtgtaaagctaaacacacatacacagacaggaatgcatgtataactggtgaaatctgaacaagctctatggactgtaccaatgtcaatttcctggttttggtatactactgtgtgtggtggtgtgggatactgacacgggcaaagagagggaagggagttaggggagaggtgtttgggacytccctttacatttctttatttacaacctcctgtgaatctataattatcaaaataaaaattaaataaattttgaaaaactaagttcctaaagtacactcaagaaattctgcaaccttttcaagatcagattctgtatgctactacaatatacattgactacataaacaatatgtattttcaggtaaacacaagtaa

SEQ ID NO: 513136 - DNA, 438 bp, Homo sapiens
ttgcatcctgcaggatatgatgacagtgtttatttaataataagcatgcgtagcaataaaccagcccctgctttttttttttttttttttttagagagagtttcactctgttgcccagactggaatgcagtggcaccattttggctcactgcaacctccgcctcccgggttcaagcaattctcgtgcctcagactcccaagtagctgggattacagtgcccgccaccatgcccagctaatttttgtatgtttagtagagatggagtttcgccatgttggccaggctggtttcgaactcctgacctcagtgatctgcctatatgggcctyccaaagtgctggggttacaggcgtgagccaccatgcctgcccctagcccctgcattttaacttttttattttattacattttattttacaatatttattactatattta

SEQ ID NO: 513137 - DNA, 514 bp, Homo sapiens
ttgcttttgtcagtactttacacactgtctctattactattattctggagatttatcctcaacctgattctgcatggtagtttttgttagtgacttggatgaagatagaagtttatcatctttgttgatttccttactctgaggtggatagataggtctccataggctgtagtgctgtacctaatgaggtagaatttaatagtatttaatatcctgaacatacaataaaactcaaatgatcaagggcagtagaaagacagaatttgcttaacaatagtgcatttagaatttttaaagttttagtagaaagtacatctcaatctgaattactagtatgctatggccamcaaagaatgtaatagtattgcaagttatattaaaataaatatactttgtgtaatgatgaagttgatagtggagctctgttaggcagagatgaactatacgtaagtgtttattatggtcaatcctagacattaaactttctaagaaacttaggcttgggagcaaattt

SEQ ID NO: 513138 - DNA, 418 bp, Homo sapiens
tcctactccaagattactctggagtcagtgcttgcaggatctctctctctctcttttttttttttttttttttttttgagacggagttttgctcttgttgcccaggctggagcacagkggcacgatcgaggctcaccacaagctccgcctccatggttcaagcgattctcctgcctcagcctcccgagtagctgggattataggcgcgcgccaccacgcccggctaatttttgtacttttagtagagacggggtttctccatgttggtcaggctggtcttgaactccgacttcagttgatccgcccacctcggcctcccaaagagtggggattacaggcgtgagccaccgctccggcctgatctctctcttcttgttagctctccaggtcctagggtttcctctgttgccaaaacatt

SEQ ID NO: 513139 - DNA, 589 bp, Homo sapiens
  misc_feature (1)...(589): n = A,T,C or G
tcaccattattgcctacatatcctgcccaaccaatcaccataatcatatcacttgctaaatttgtgccaagtctccagacatatactctctctgcaaggaagggttttcagacanagaaatcanacagctatgtcctatagtgaataacgctaccancgtatcaatcagtgcctgagttctggtttttcccccgagagtttactgcctatttgaaatgaaggctgaggtcagtatactgatataatctttgagccccaaagaagcatcatcagaggatctccgtcctcagggaacctggtgtttttgtcaaacaaccaacatttaaataaaaatataaacnccagaatggtgagctcttccactctcaatggagtagccgcctgcatccctttacccataaggatttttttcctcagataccttgttgatctctgatcccttgaaccagaaccagtaattattaaaccagtttgctagggcrcctacaagctatccaggaaactaaggaatagacaataatcttctggatgcggcgagtcagtaaaagcatttaatgatgtcatttgatctgtgaaatgcccaaggtca

SEQ ID NO: 513140 - DNA, 653 bp, Homo sapiens
aaaattagttaagactgctgaaatttggaagagaggcatttttttaaattttcttttatgttctagtgggtggctttcactatttaaaaatgtcttagtagggccaagtatgttagctcatgcctgtaatctcagcactttgagaggacaggacaaggcyggtggatcacttgaggtcaggaatttgagaccagcctggccaacatggtgaaacactttctctactaaaaatacaaaaattagccaggcgtggtggcacacgcctgtaatcccagctactagggaggctgaggcaggagaatcacttgaacccaggaggcggaggctgctgtgagccaggttcatgctgctgcactccagcctgggtgacagagtgagagactccatctcaaaaaaataaaaaacaaaaaataaataaataaaaataaaaatgttttagtaatgtgtaacatttgcatacaaagttcaaactttattaaagtaggctattgtattagattattcttgcattgctataaagaaatacttgagactgggtaatttatgaagacaatagttttgatcggctcacagttctgcaggttttacaggaagcatggtgctggcatctccttggtttctagggaagcctcaggaagcttacaatcatgaca

SEQ ID NO: 513141 - DNA, 630 bp, Homo sapiens
ccaatcaataatcactgattgtaatggtagacagaragtgatgatagtaaatatggctcatcaagcaggtagggttttctgatagatcaaattaattgtgttaagctaaaataaaatgctttctaaagaattaactcttaggattttatatatttgtgtatttattttgagacagggtctctctctgttgcccaggctggaatgcagtagtgtaatcaccgctcactgctgcctggatccccccggggcagaagtcatcctcccgcctcagtctcatgagtagctgggaccacaggcgtgtaccatcacacctggctaattttttgtttttattttttgtagagacggggtctcactatgttgcataggctattcccaaggttttataagtattattagtccagaagactgctacaaataattaaagggaaactttgggatcatccaagaatcttaactgtctgaatacccaggatagcttaaagccacatgccagagaatgtgataagtatattcagtgttagtaattgtgcaacatgaatagtgatacttcttaaattcagataacttgaagatgtcaggataggtgaaagcagctgcatggagaatatgaaaagtgccatattgggc

SEQ ID NO: 513142 - DNA, 613 bp, Homo sapiens
acaaggtgagtgtctgactagattatgtctaacctgaacagactttattcctccaatcaaawcattttcctctccttcttaaagttgacaaagtgattatagaaatacagagatctgaatagaaggaaaatgtatgattcatatcatgtgaagcaagatgccacccaatccactctagggaaagttgggagaaaatatgtcttttattttttctatcataatgcagaaaataagcactagcagtgttgatagcctatggcttttcacttagaatcaacaatagtggcatgtcctatgattttactttttcaacaccatccccaaacaaagcaatgaaatgtaagatgatgtgaatgagaccctgaaatttaaggaggcagaataatggtttgcaggtgtgaacattattcatattttaaactaaattaaaattttccccattactctaggaaaatcaaataatgtaattaccaagaggtaagatgcttctgatatgtaaaagatatgctaattttgatgacagttttcagtcatgttaatcaagtaaagtatatttataggatttatattactgagaataataccaaggtgaaacttacaaactaatccttca

SEQ ID NO: 513143 - DNA, 609 bp, Homo sapiens
ctacttccatggattttatttatgttgcttctaattttctgatatcataaatatcatgaaaatgagccttccttaacataaatttttattgtcatccatttcaatttccttaggttagattcctrtaagaaaacttagtgggtattgacagattgcttttcagaaagtgtatagcaatttacacttctaccaattatactggcatttattattatgtcttgtttttaataaagaaaattatatatctattactgcttaattcacatctcagttgattacagaaactaaatattcttatttgtcattcaaacttctttatttgcaaattgttcattgtttttgcccacttttaattaggctttcatgtctgtcttattaatgataaataaattagcccttggatattgtattttaaaatttcctagtagacaatttgccatttggtatttcgattttttttaacttttatggaactaagtctatatgtcttttgtgatttttacatttttcttacaaagtccttacctacagaagggaaaaaaagattcccttgaattttctttgagtttcatagttgcttttctaccaaccttggattaccaatgagtg

SEQ ID NO: 513144 - DNA, 485 bp, Homo sapiens
aactacttccatggattttatttatgttgcttctaattttctgatatcataaatatcatgaaaatgagccttccttaacataaatttttattgtcatccatttcaatttccttaggttagattcctataagaaaacttagtgggtattgacagattgcttttcagaaagtgtatagcaatttacacttctaccaattatactggcatttattattatgtcttgtttttaatraagaaaattatatatctattactgcttaattcacatctcagttgattacagaaactaaatattcttatttgtcattcaaacttctttatttgcaaattgttcattgtttttgcccacttttaattaggctttcatgtctgtcttattaatgataaataaattagcccttggatattgtattttaaaatttcctagtagacaatttgccatttggtatttcgattttttttaacttttatggaactaagtctat

SEQ ID NO: 513145 - DNA, 531 bp, Homo sapiens
gacctgcatcatagcaataattgcactgtcatttcaaagcttttaaaagctaatcaatccaaattatatcaacttgacttataccttcccagcagcagtacctcagtattgcataacaaatatacgataaaagacagcttctggcgtatttgtaaagcagtttaaagcttatgcatttttggctaacctaagacttycagggataggaagaaaaaaaaagacatcatggctccacaggtttgacccaagtttttcccattttactgtctgagccaaacaatacagttaactcactttatgtgcgttcataatatttgccacaaatattgctgcaatagataaaaccagtacttcaatcacaatagtcaatagagttctactgggtagcaaaaactcctcagcacaacaggagacttttaaaattcaagcactctaaaacttagcagcacccctgagagccacaaattgagagagattaattctgtgctcctgcacccctcattaccaggagagctgaagtaggtcaaatgc

SEQ ID NO: 513146 - DNA, 592 bp, Homo sapiens
taagggacctgcatcatagcaataattgcactgtcatttcaaagcttttaaaagctaatcaatccaaattatatcaacttgacttataccttcccagcagcagtacctcagtattgcataacaaatatacgataaaagacagcttctggcgtatttgtaaagcagtttaaagcttatgcatttttggctaacctaagacttccagggataggaagaaaaaaaaagacatcatggctccacaggtttgacccaagtttttcccattttactgtctgagccaaacaatacagttaactcactttaygtgcgttcataatatttgccacaaatattgctgcaatagataaaaccagtacttcaatcacaatagtcaatagagttctactgggtagcaaaaactcctcagcacaacaggagacttttaaaattcaagcactctaaaacttagcagcacccctgagagccacaaattgagagagattaattctgtgctcctgcacccctcattaccaggagagctgaagtaggtcaaatgcaagttaatctcctaaattccacttttgtacatgcaagttaggccagccattactgt

SEQ ID NO: 513147 - DNA, 562 bp, Homo sapiens
ccttccgttctatttgttccatttgggttgcaagaaacaggagcttgcttatgtgggcccaartaaagacgatgggataggaagatacaacaggcaagctcatggaaatggaaggtcctgaggccaggcccagcacaaccacagggagaacactcctgggtagtaaggagcagagaggacttcctcctcctcccagactccacacgacttctctcatctgtgcgcctttgatctaatcattgtctctctcaactggtttcacttgcttcctcctctggcttgctttttccaaggcattgagactccttggctcaaattcctaccacaaaatagttggcaatattttactttccgtcaaattagctcactaaaaattgatcatctctgcttttttatttgagctggaacacctaaattataggtcttcgatcaaccaacaaattggctggcctcagattaggaatttactcctggtctcttcagctatggatgaggaagaaaggccataacacggaaccattggaagtaccaactgggacactaagatactatggatactaga

SEQ ID NO: 513148 - DNA, 635 bp, Homo sapiens
aatctcaggccgatatttaacattctttttaactgaactgtggacgttttccttgtacttcttgaaatagttaggagctaagcttctattattcatatttataaacatgtcctaaacaggaggcatgattttataattcatgagtctttgaaactatttttacaaaggaacacttaraaatattacatcatatcaggaccatggtctggttcagaattctaagagtggaatactccatgtggcagaatataattattgctatacatggcttatcctaaaacaggtggtgacattttctaaagattcttggactaaaagtctttttcactttcaaaaatgaattctcaaattgagttcactggtacaattggaggattataagattcagaaaatgattctaccccaagctcccctattttgataaatggtattcgtacttatctagttgctcaggctcaaagtgcaggagacattctcgatatctcttcttctcacacatccaatccatctgcaagttttatgatctctttaatgaaaatgtatcctgagtcactgggcaccgatcatgttttgcctggaccagtgccttacctccctgtctccattcatgtgcggagtccaatctcctcagagaa

SEQ ID NO: 513149 - DNA, 655 bp, Homo sapiens
ggccaaacatgataatttttgtatgaaggaaatatatcctaatttgcaattaggcaaagaagcctttaccaagggttttctgcattgctatgaaacatactatttttttcttccactctcaccacttatgttcagtaacatacttttaatgtttatcagtgataatattttaaccrtatttcttcttaatatgaactaccgttcatataggaagaatgatacttaaccttgatctgtaaagtacatatgtaagatatagtcccactagaaaaaggtgcccaagtgaaggcaacaggccactgacggcggaaaggaaatgagtgagtctttggtggttttgatgttgctgaagatttagtggaaaagctgagaaagtttcgttttcacaaagaaacaaacaatgcttctattgtaatgaagattgaaggataaacgcctggtggtactggatgaggagcttgagggtatttcaccagatgaacttaaagatgaactacctgaacgacaacctcgtttcattgtgtatagttataaatatcaacataatggatgggagagttccatatcctccgtgctttattttctccagtcctgttggatgtaagcctgaacaacaaatgatatatgctggcagtaagaataagctagtccagac

SEQ ID NO: 513150 - DNA, 357 bp, Homo sapiens
tggtaaatctaccttctcgattacatcagaaaactatactttcctcttatcatttccacaaagtcatgagttaaaggatacaggttgacatatcttttcttgaaactgtgttctgatcaaaagtgatagctaatctccaaaaatggcccccagtgaaccctacttcctggtaggtagccctgcgtagtcccttcacagtarcctggcctgtaccttgatttaactgatgggatgcaacagaaggcctggcagccaaggccgacttatgcattagacacaatagtgcttagtgttcatatcccatagtaatgttttaacttcttttagactcagaagaaaaaagagaactcttagctc

SEQ ID NO: 513151 - DNA, 650 bp, Homo sapiens
agtcaagtcccaaaagaagaacttgggcttgtttggtttgcggatttttagaacccagcgaacccatttcagcctttttctctctctgtctctaaataccttttttttytttctttctttctttcttcgaatggccagagacaatgtgtcctttctggatctcacatgaaaatgttaggaagaaagaagaaagcaaattcttcatgctgtattctaagaacaagaacctagatgtgtttatgttgtagcttatcaacttgattatgggcaaacagtattttatttgcagtcccagccaatcctgagggatctgtggtatgagtaaccagccaatgccatggtgactcaaaggggaaattctctgtgaatgagtaagattaggagaggcctacctggctgatgctgcagttttgttttctttcaggtgctagaaatctagaggaacctgaaggttcagacacgcagaggagcatggtttagtagcagaataaaaacttaacttttcattttaactaacttttaacttaaatttaactaaactttttgtgtaactttttgtggaacttctctaggtattcaaccatttatcttatcccagttgtaaataaggaaccaggcttcttaagttgtgaagagagagttattctcac

SEQ ID NO: 513152 - DNA, 524 bp, Homo sapiens
taaaaagagatttattattagaaactcagcagacactttgggcagggacagaccattgggggcacaatcagtcacaggaagagggagactaataaggcaagtggaacatgtagcaggagagtatagtgaaagacagcagttgacaaattcatgttctagaaatgtggcttttgaatgcccagtaagagcaattgtattttggcaagtggactgagcctggctacagaraaatctgtagacatctaagaggaggataaataaaatcgtgttggtaataaggtgacctaattaaagaaaactcactcactggccactggattagatcttggaaataagagagtagcttaatactaatttccatgctatcaggaatgtccttcctccatgtaggtacaggggtcactctcaattaagtagctactcagatgtcacctatcacaaagaccttctttgactctagattctaaaaggccccccacctcccatggacatgcttcttgtctcataacttgctatagttttcc

SEQ ID NO: 513153 - DNA, 608 bp, Homo sapiens
ctgagcagatagctgctgagtgccatggggtgttcattcagctaaagcatgggagggggttgtcttctgtggttctctagccatggtccttgtggtagcctttaactgtgatttgtttgtttgaccttgatgagtccttggctccragatgattatgttacattacactgaatcactcaatccaacattggtttgaaaagaaacgaacaaagctgcctgttgagtttctctattttacaacagtatctcagtggaaataattagtcctatgtctatgcagaagcacacatcacatttgcaaaattaaagagtgttcttgttaggactggtttctctgtttctttcttcctctcccactgtttaaatatctattttggtggtagtgttagtatgaaaccccatagttcctttcttttcttttctgatttaaaaagcaaataaacaagaaaacacaagtctatctatgttttttaactcaagatgactagatataaccacagcaaatatgtaggattgttgtgttttaagagaaaaagccgtgtctcagataatttgtagtcattgttttgtccattttgacatctacttctttatatactttatagcca

SEQ ID NO: 513154 - DNA, 661 bp, Homo sapiens
ctgctgtggcaaacactcccagacacacaaaatagcattcgagctgaatatttaaatctcccaacatagctcaacaaagctctaactctaaacaaaacaaaacaaaacaaaatcacatctctagcaatcagttataattatataaccaaaaatatttgggctacaacattgtttgctgttcactgagctgaaatgctgtagtgggtgctataaaagttgtaaaatctattgaaacatattttcctgccttgaagaatttaactgtgtacaacatttaaaattgcacactgtagctcagaaaatagcactttgtgttataatatgttatatcaatatacagctaagaagtttatcactggggggtggggggtgaaagcattaaataacagagtaaaagaagcaaaccatgagagagaaatctggaaagactcttctarccactctctctgtgaaagtacatcccagcctaagaattgtagttgtctggcaatagaggcgtatgagagttctggaattgttaggacacactaacatgacacggtgtcatcaaatgttcaaataatgtaacatgctctaattccatagatactgagggatattttttaattactcaattttttatgtcatttactgtagagaaggagcttgcccttgtcagcct

SEQ ID NO: 513155 - DNA, 593 bp, Homo sapiens
tgctatgcctgccacacacatttgtgactttccatatctcctttgttgttgctaaaattggtacaatcatagaacctatctcatgatgttgtctttagaattaaagaaataaaatctgtaaagagctttgaatagtgtctcatacctaagtaattaatacattctagatatgatattgtatatacctgttttaaaatttatttcagctttttgctctgctgataaagattacacaattaccagattcaaatgtaaaacgagtttgagtttctatgtgattaattggaaaagttartatgaagacaagtttggtaaagttcaaattacaggagctcatgagaaatgtatggttcctgtgggaagtgtgattggagctcacacacacatacagaaacacacacatttgtatgcatctgcctgcctcatctgtttatttgtatatatgttattaaggaaatatatataatagctgcttggaaaatattgatatataataaatatatataatagctgtttggaaaatattaattttttggattctgaaatacaattgacattttgaatatgtgtaaagataacttttggaacctgcc

SEQ ID NO: 513156 - DNA, 660 bp, Homo sapiens
cttttgtgttttattgttatttgtctctttgcataccactttgcagcatgcttttctataggctatagaaaatactaaaacagctactgaatgtttgtttgtttcttacaaatccatggctagttgttaatctgttattctttcacattgagaaattgtaaggtcttgtaacaatctttgttgctgggcaaagaaatatcayataaagtttagttttcaatgtcaatgttttaaaataacacaaatgaataaaatgttaagacttaacattggacagtgaactgaaaaactatagagataaaattttcccataatatggcagtagtttctaaatataaaactcgatgttataaatttgggttcttaatgaattttttatatcacaaattctgtttccacttagatgtcagaaactgagctggaaaagataaaagtaagaacagctgagcatttagaaaatgataaaaataacatttcttggttgaaagaaggtaagtcttcttgctcttgattttctattggtgtgaaaattttgcttttgtttataagcaaggaatagtgtgggagaaggaggaaattgtcctgaccgttcaaatagtagtacttctgattttcactcttttctttttttttcaaattcttatgtggcctaagtggttg

SEQ ID NO: 513157 - DNA, 570 bp, Homo sapiens
cgcacacaaatcaatatgttctcctaatgagtacagatttgcgcacttttgaaaatacagctaaacctgtgattatttactagaaggcacggttttataattttttgattttatgatcacttttaatatgtcaaaaaggtaacatttgatattttatctaaataggtatgctgcgtctttttcagcatttaatgaatctwttatattgtaaaaggacagctcttacttaagtagttgacattcttaaaaattgctttataaggttgtaggaaactctaataaatatgtcatgttaattagacaacaccaaaataatgataacaataacatcaacattgacaatgtttattgatatttattgatgattttgctgaatcatcatgacaaccctgtgaagcagttattatccttaatttaccaataagaaaattgagccttaaagagttctagtaacttgcctaaaattacaaaattggaaagtgccaaagctgagattcaatgccagtttgtgtgattctacagcatgtgaatgtaaccaccacctcatcatgttccaaagaaaaaaaatgt

SEQ ID NO: 513158 - DNA, 606 bp, Homo sapiens
tcaaatagccaagtatgggttttgtaacattacttgttctatgacagaagaatgtactttttgcttcagttttacttaacaaatatcagtctcatcttggattcccctagatacaactgggagaaataactagttctttttattttagagatgaaacaataatactaattaggaatcaaatataatttttgaaaacactcaacagggaaaagtaacatggttaaaggctaatatatatataatatatatgtatgtatataactacattgctggaaaaatacacatatctaactctatctgtctctatgcccttctaactatatttttattggatatcttcaatttgtaagataacgtggtagtttaartgagagaatcaaacacaaataatactcgatgtgcctataataaacgtctgtataatgttgtaagagaaggtggtaggtaaggaaagtttatctataagtcaatagatttaaataaaggagaaatgttaagtattagattgttgtttactcaagggcaagggcgtttctggcttgtttacctctatatttgaggtacaatagcccctgaagtaaagcagatgctcaaaaatgacatgaa

SEQ ID NO: 513159 - DNA, 606 bp, Homo sapiens
tcaaatagccaagtatgggttttgtaacattacttgttctatgacagaagaatgtactttttgcttcagttttacttaacaaatatcagtctcatcttggattcccctagatacaactgggagaaataactagttctttttattttagagatgaaacaataatactaattaggaatcaaatataatttttgaaaacactcaacagggaaaagtaacatggttaaaggctaatatatatataatatatatgtatgtatataactacattgctggaaaaatacacatatctaactctatctgtctctatgcccttctaactatatttttattggatatcttcaatttgtaagataacgtggtagtttaagtgagagaatcaaacacaaataatactcgatgtgcctataataaacrtctgtataatgttgtaagagaaggtggtaggtaaggaaagtttatctataagtcaatagatttaaataaaggagaaatgttaagtattagattgttgtttactcaagggcaagggcgtttctggcttgtttacctctatatttgaggtacaatagcccctgaagtaaagcagatgctcaaaaatgacatgaa

SEQ ID NO: 513160 - DNA, 650 bp, Homo sapiens
atatattttaaaatgaataaatgcaaaacatatgctacattttaaacatatatattttgtaatcatttaaaaagtaatcctttctggaaaaatattaaatgcaaagtgattgtgctagccacaagatgattacagaatttataacataatgataattcatagtaaagttaactgcttccagtcatgacagagtaggagagcctgaatcatccttctgctgttgacacctaaagaactagaaataatgtattcaacaaccatttgagatattggacaacagcaattgcaggactgtgatccccgagagaaaggaaacaaagtgagttccaccatcgcccagaccttctgcctaggagtaatttctggactgtgatatagcaacgggaacccagatggagccagacagtgttactgagatgaaggaaagacaaattgaaatttggggaggcagagaggatagaaatttatagggcagagaacccaagagaagggagctcggtagataaatattttataaatttgcgtagggctcccttgagtcttttgctgrataccatctacatgtgtgaagtgaaaccctatgaggctaggcatgacaaactttctgggaaagaacaactactagagatctgtcaaccaaacattttcca

SEQ ID NO: 513161 - DNA, 575 bp, Homo sapiens
tttgtgaagttttagtagagacggggtttcaccaccttggcctggttggtcttgaactcctgacctcgtgatccacctgcctcggcctcccaaagtgctgggattacaggtgtgagccaccctgctcggcctaagcttacacaatctcacaaggaaaatattttctaaatcttctctggacgtctctttattctcygctataactcactgggcaccagttccttgtttattccataatgtctcatttcagatccagaattcatttcactagaaggcaacgtagaaaacagtctatttttaaagacactgggatagtgctccttatttaaaaagaacaaaacaaacaaaaaaacaagtgatgttcaaaattaagcaggaacaaaaatccaattttccaatgagagagaaagtaaatatacatgtaaatattccaagaagaagccatacatggaattatgatatattcctatcaaaatgtcccgtggagagtggagaaggaaagatggagaattccagggagcaaaagtaggctggaaacacaaaagcaaaaggcaagaagagagtaaaagatgtag

SEQ ID NO: 513162 - DNA, 575 bp, Homo sapiens
tttgtgaagttttagtagagacggggtttcaccaccttggcctggttggtcttgaactcctgacctcgtgatccacctgcctcggcctcccaaagtgctgggattacaggtgtgagccaccctgctcggcctaagcttacacaatctcacaaggaaaatattttctaaatcttctctggacgtctctttattctccgctataactcactgggcaccagttccttgtttattccataatgtctcatttcagatccagaattcatttcactagaaggcaacgtagaaaacagtctatttttaaagacactgggatagtgctccttatttaaaaagaacaaaacaaacaaaaaaacaagtgatgttcaaaattaagcaggaacaaaaatccaattttccaatgagagagaaagtaaatatacatgtaaatattccaagaagaagccatacatggaattatgatatattcctatcaaaatgtcccgtggagagtggagaaggaaagatggagaattccagggagcaaaagtaggytggaaacacaaaagcaaaaggcaagaagagagtaaaagatgtag

SEQ ID NO: 513163 - DNA, 527 bp, Homo sapiens
tgtcctaaaggctttatagaacataattgtgattaagcagcactcctgctgctggtgtaggagttatagccaataataatgtattgacatttatatggttgtgatgctctgacctgaacttgcgtaactagtgccctagtaattgccaagtgtttcacattcactgtaatgccaagataaaaatagcaaagttgattaaatacagttagatgttaatataaaataataaagttaagtacttcatataatgttgttcctgacaatttgttttcctcattgagtaagtgaatgcaatttrtggaaaaatagcccttcatattatttccctaaagttagtcaccatgaataattagtctttactaagcagttattaaatcttcactcgcattgtaaatcagttgaaaatgaggagcaataggagaaagcaagattagatttttagaatgctattttattgtgcgttttaaggtactaggtcaccaggtttttgtattattgtaatatatcagataataaaatttgattta

SEQ ID NO: 513164 - DNA, 497 bp, Homo sapiens
ttgaccagaactcaatcacactgttattcctaacttctatgtagtcttcaaaatgtagtgtggctatgttcccaggaagaaaaggtacggctttgacctgagtcagcaatctcctccataaagtgtatatgtaaaaatccatttcttggataattagtcattagttgttattattgtcatgttaagccttcagtgcccttggaagtgctgtacttttcaagtgatatgtatgattcaagagtataaacctttgtggagctagccaatackgaaacaaagagggcattttaatatagaaaaatgtaaaacaaaaagtgaactaccttgagtagacagctacatggcatttctccaaaacaaaatgtctctttttttttttctggctaaactaaggttacataaccatccagagagaatcccaaagcaggagggtgtgctacataaaaatctttgtctcttttattacaaactaccccatttgcattccaaatacctgc

SEQ ID NO: 513165 - DNA, 221 bp, Homo sapiens
ctgcagatgtgcgggcctaaaactgctccatgtgttcaaaccaataataactatcattttattctattttattatytgagcggaaatacaatctgaaacatttaaatttgttccccctaaagctagaaggatatgtgtatgtgaatgtacacaatttgctcctttaaatgcccccaaagcctatttttgctattacatttgcctccacaaccaataaagaa

SEQ ID NO: 513166 - DNA, 539 bp, Homo sapiens
atgagctccaccattcactaggtcyatcaacttgagctactcatttagtctctgtgcctcaaattccctatctataaatgagaattagaaatatatattaataactcatgggatgttgtgagaaataaataagttaacataagaaaaataattcaaacagtgtccagcacacagaaagtactcagtaggtgttattattgttgttgttattaaggccatttccttctcaaaaaggggaaggaaaaaaatggcaaccagtgaacatactatattgaatcaaaagcagtctgtgactagaagagttgtcttggactcaaaatcagtatgctgaatacaaagtcaacatacagtataccacttctgtctaatttttgttttgttgttgcctttcggatctctttggaaaaggccaatcttatctgtaataacagcgagtttttaaaaagaaaaaaaaagacttccttccatttcagctaacggagtgagaaggttaaagcctcctctgatagtcaggctcagtgtgatgataatgatcccag

SEQ ID NO: 513167 - DNA, 604 bp, Homo sapiens
ctatttgagcctcaagttgggagatggtaggttttgctgaaagaagttgagagaaacatgctggctgaattcaaggtccagttccaccaccaactagcagtctgattttggaagtcccttttctttctctttagactttagtttcttcttctgtctastgtggcacgccttgattcctaaggttccctccagttctcactttccgtaattcagcctagctgccctcatcggccaggccatacttcttctctcccatgaaatctgaccgtgcgactgttacacttgactttaggaataagacaagagcaacgtaccctatggatatgttgtttttgtgatttacacaacgcgttaagttctctctttatacaaggtttgtaaatgagaaatctctggagtttgtggccatgatacttaaaatttaccttgcctgagaagaacccaaccccaacgtttaaaaataaataaattcttaaaataaatcaagttttgtgaggatcactcttctccttgagcataaaggctagaatacaaaagaggaaatcctgggttgaaatcccggccacatgtcttaggacctgagtgtccttgtacatgttcgcct

SEQ ID NO: 513168 - DNA, 611 bp, Homo sapiens
ctggtacctagttggggattgaatccatacctgatttgaaaacccatcccctttcttttacatcacatttcctccctgcaggagacactactggcagcccacccagatcccctttcytgccagggcacccatgtcccagctcttgtgcctgttggctgctcacagctcacaaccgacacaaacggctggcccccttgcctcaaggcagggcaaactccatgcaattcctactgcagagctctggaagggaccagccttcactccttccccactggaccctgcttcccttccctctttccccccgtaggagcacatcctcaaatcacaggcatgggaatctcagtcggagactccttctaggggatgggacctagggtgctctcctttgacctttgagttgtcctaactccatccctattctgtttttgttttgttttgcttttttcctatttgtgagcccatttaagtaaagactttcaatttttctctcagtcatctgtcctccataagcactaatccctacagggaaaataatgtcttacatctaattcaagtcctttcagttgcagcattagcccactttttctcagaagaaaaaccaagcagtcttt

SEQ ID NO: 513169 - DNA, 613 bp, Homo sapiens
tttctctccctcattttatgaggccctcacactcttgctctcctgcataccaggttgtccagtacttagggtgggacgaggaatttttatacatacaaaggctaaagaatgcaaatccaataatttatttgtttattttttatttttttctgagacagggtctcactctgtcatctaggctggagtgcagtggtgtgatcacagctcactgcaacctccgcctcctgggctcaagtgatcctaccatcttagcctcctgagtagctgggaycatgggtgctcaccaccacactcggtttttgtttatatttttggtggagatggagtttcaccacgttgcccaggctggtcttgagctcctgagttcaagtgatctgccagcctcagcctcccaaagtgctgggattataggcgtgagccaccacccttggctccataatttaagtgtcaagttcctctctcgtaacctttaagccagatccaattttaatgcatgtgatttaaacccacattttttaaaggatattttctccatatgctttggattgttttttaggagtggaacttgatttgcctacaatcgatgctagtaaagacacacttgcgatgcccc

SEQ ID NO: 513170 - DNA, 597 bp, Homo sapiens
ctgtgatgatgcagaatttgaaggctatccagggtggaggtgggacaatgccagggaaagtgccgaggtggctgctcactgctcaatcgtcctgatgctctatctgcagcaagtgagaaactgagaactgtgaacaagcagttcacggctaagtgtgagcaccagagagccttggtatcgaggagtgtaaaaaaaggcttttttttttttttttttgagacagagtcttgctctgtcgcccaggctggagtgcagcggcaccataccattccactgcaccctccgcctccgccttccgggttcaagcgattctccagcctcagcctcccaagtagctgggattacaggcgtgcaccaccacgcccggataatttttgtatttttagtagagtcagggtttcaccatgttggccaggctggtctcgaactcctgacctcaggtaatctacccacctgggcctcccaaagtgctgggattacaggtgtgagycaccatgcccggcctgagtggataatctattgaaagaactaacgaagttcttcaacataaccagataaacagaaataaaaacgaaatatgtcagcaataaacaattt

SEQ ID NO: 513171 - DNA, 551 bp, Homo sapiens
tggtttcacagaagataccccgcgttgcaccaggccccatttccaggggcctctcttcccatcaacctcccttcccacaccttcctagagggctaggcagtcctttcccccaaggggccaagttttaccttcaatttcctctggtcgcagtgatctatcctgaaacaaaagaacatgtcctattagccgcgacaagggacctggaagtcacaaaatayctaacctgggggccatccacgtggcagcaggcactgggtaggaggtgacgaggatgcagcacaggtgtgcctggatcaggtccttgaggggagaagaaagccccacatctcccttagacatagaagctcctgggcccctaacaggagatgcccaagaagccaccagccccaccagcctgggcacagaacctctgtgcctccagccccttgttccagatacaagaatgggtcagcaggagtttgaggctgtagtgagctatgatggtgccattgcactctgtcaccctggacaacagagtgagaccctgtctcaaaaaaaaaaaacaaaaaaag

SEQ ID NO: 513172 - DNA, 289 bp, Homo sapiens
ctacctggaatggaactgagaggccagattcattttccaggaggagrccccagtgagcttagacaacattcaccgaaatgacggttctctctgcctggaaaacagcatcccagctcaggcttatgttataccccagggtttggtgtgtaatgacagaggccatcgatccattctggggacactctgggatcatagagcccctctcccatttttccctggtgataatcttgcccgtaaagggaaatagatagaccacgctttgaggattctgtggcaattataaagcctt

SEQ ID NO: 513173 - DNA, 591 bp, Homo sapiens
  misc_feature (1)...(591): n = A,T,C or G
tgcagaaagcactcagtaaattcagttggcagccagtgtcttcgctgtccctcctcacctgtgtcctatgtgtgctcatatgtggacagtgccctggttgytgttgcagtgagaattagcaacgaaggatttagcttctaagagttcaacatcagcattgcccaggaaaattagaattttaaaggagccttctcctgtggactcaaaatgaatggaattttaattctgccagatttgtgttagactttgactgttaccaagatatttaactttcaaatgattaagtttgctaatctaccaaataagagtattgattgatattaaccccggggggtctggaaagcttcaaaaaagggaagggtgaaagcctgacggggttcagaagacagtctgtgcagttagaggcaaatgcatgcaaattccagctcagccaatgagaacttatctcctctagcttcatgttccttatctataaacgaagataatagtagtcccatagtntaaataattatgaggattaaataacctgtgtaaaatgcttagtgtctgctaagaattttagatttggttcttatcattacatgaaattct

SEQ ID NO: 513174 - DNA, 608 bp, Homo sapiens
ctcttgcatttaagaatcaaacttcaccctttctgtctccaaagcttcatgtttatatggtaaaaagaaaaaaaaatcagtgtaactcagatgcctcccaagtttcatcccactcttctccaaagatagtgttcttccttgagtagtcttctcttttgtctactgtgcaacaagatgtataaccatcaccttccccaccagayaacatgctaggatgctttctgttaggatatgaagaagagtgatactgacatgctagtgataatactcttggagctgggaaacttgcagagtaaccaggcgtctactgacccaccacatttttaccttatgaccaaagacaaggccctgtcataatagactgtcatcataggaggtagcatgcatccattcatccaacagatatttacacagtgggtcctaagtgcagatattgaaatgatcagggttataagacactaacaatgccaacggagtgggttgatatagaaatttattctaagtgctttatgtgccttttcttcttgttctgaatgaaaaacatgtgaggtattttctgttatgacgtcactgtagaagtaaagaaacggaagctaaatggctgagta

SEQ ID NO: 513175 - DNA, 614 bp, Homo sapiens
tagaccactttaaaatcatgtctgaattctcaaaaatataaggatagtaaagaacctacaaaaacaaccaaacatccctttattttcctgaatgatatgagtgaatacagttttttcttaattataggcttacctttgatctggyatttctgccttttagatagacatatgaacatgtccagttgtagaattaaccttgctttcagaaagcattttattcaaagcctcacttcacggaacctacccaaaaatcatctgaaagaagaaagcccaaatcctagaatgacctgtttctaatacagtcttcttgagtcacctaatggttcccatggtgctcaccctgtcttgttgccacaaggcaattaacccaactttgctaagctacaagtttgtccctgcatgtctttcatggaagggtattggtgccattctcactagagtgggccctgctctgtgctgaccctctcctcagtgtgagaccctgcacccctttagcatcagctactgactcccactggatgggaagctccacatgagcagggctattagcatctgaatttgatagaagagaaaactagacccagagaggtaaagtaactgcccacacccatgca

SEQ ID NO: 513176 - DNA, 614 bp, Homo sapiens
tagaccactttaaaatcatgtctgaattctcaaaaatataaggatagtaaagaacctacaaaaacaaccaaacatccctttattttcctgaatgatatgagtgaatacagttttttcttaattataggcttacctttgatctggtatttctgccttttagatagacatatgaacatgtccagttgtagaattaaccttgctttcagaaagcattttattcaaagcctcacttcacggaacctacccaaaaatcatctgaaagaagaaagcccaaatcctagaatgacctgtttctaatacagtcttcttgagtcacctaatggttcccatggtgctcaccctgtcttgttgccacaaggcaattaacccaactttgctaagctacaagtttgtccctgcatgtctttcatkgaagggtattggtgccattctcactagagtgggccctgctctgtgctgaccctctcctcagtgtgagaccctgcacccctttagcatcagctactgactcccactggatgggaagctccacatgagcagggctattagcatctgaatttgatagaagagaaaactagacccagagaggtaaagtaactgcccacacccatgca

SEQ ID NO: 513177 - DNA, 575 bp, Homo sapiens
ggacacaaatccacctccctaggacaacgtgcatgtgggatgtcttgtgtatattggaagcagttccaggagtgaatgaactaaattygtttcccttgagctgatgacttttgttctatattaagcaattcttataatgcactaaatctcaaaataaaattaattaaatgtcctctctaacccttcctcagataatattctactttgaagaacaccagtagaccgaagcaagatgacgaatttttaatgccaaagtatgcaaaacctgccacttcactggcaagccatgaattattcataaatatagacttggttaatatctttaaaaatgcagcatattttgccttgtgatttctagcttcgataacagttttggaatcatgacatatgaaccaaattacaacaagcccccatatttattttctgtagactagggaaatatgtttactgactcagtaagagatcatcaatagatacccgaaataaggaaattaaactcatcttttgcacagcagttttgccagtatttgtgctaggaacactgaaataaagaatgtatcattttagggaaatgt

SEQ ID NO: 513178 - DNA, 575 bp, Homo sapiens
ggacacaaatccacctccctaggacaacgtgcatgtgggatgtcttgtgtatattggaagcagttccaggagtgaatgaactaaatttgtttcccttgagctgatgacttttgttctatattaagcaattcttataatgcactaaatctcaaaataaaattaattaaatgtcctctctaacccttcctcagataatattctactttgaagaacaccagtagaccgaagcaagatgackaatttttaatgccaaagtatgcaaaacctgccacttcactggcaagccatgaattattcataaatatagacttggttaatatctttaaaaatgcagcatattttgccttgtgatttctagcttcgataacagttttggaatcatgacatatgaaccaaattacaacaagcccccatatttattttctgtagactagggaaatatgtttactgactcagtaagagatcatcaatagatacccgaaataaggaaattaaactcatcttttgcacagcagttttgccagtatttgtgctaggaacactgaaataaagaatgtatcattttagggaaatgt

SEQ ID NO: 513179 - DNA, 597 bp, Homo sapiens
gggagggtccccagcttgggaacctcagcctgtctggctcctgccttcctccttcagccctagaacaaagaagaaggtaatttaggtgatttctggctttttgctacactccctcaaggcgaaggaaagggaactggtcttgtgctctgactttgaatattcacaagaacattatcaaatagttgttgctatcattccccagcgaacatatgcggaggtgaacatgacctgtgatttcagagctgggaagagaccttgggctttcattcaggaggagtccaaggaaatgaggagttttctgtcagggctgacaaagaaacattgggagaagcttcgcctaaattytctgcctcactgaaggtttttgcgaccagcaaaaacgaggacataagaataagagtcttcttggttttaatctcacctctctgcctcttagcggtgtgaccttggtcaagttgttctgtttcttgctgaaatagtaaaatctcctgtgtataggggtgtgtgtgtatgtattaaatttaatgatataacatacgtgaagggtctggttcatggacagcctccaacacctggtgtgcagcaaagaaagagcag

SEQ ID NO: 513180 - DNA, 547 bp, Homo sapiens
cagtgctcacagccttctgttaatggtcttcccccagcacttgccttcctggtcccctgacgggactaatactttagcatcacttggggcattttccytccttgggtatcctctaagcctttccttactatccttttgtgattacatgagcctacccagtatcacattagtgcatctccattctctgtaaaataaccagaggttctttcccttgcttacaactgagaaacctggctgattcaaataagatttacaataacttcaggtttcttccatggacagcaagtctcttttaccgaagccacacagagttcaacgtgacatagcctggtcgttgtctttgtttgtgggacacagaaccaccaccacaccacccagtgttcaatgctctgccccatccacaaggaaatgtggtgtaatttcagatttcagagaggaagaaagaacactagaataaaacagaacaaaacagaatagtttagcctgatttggactctactacctacaagtcatatgataatttcactgatcttataatttctccatc

SEQ ID NO: 513181 - DNA, 547 bp, Homo sapiens
cagtgctcacagccttctgttaatggtcttcccccagcacttgccttcctggtcccctgacgggactaatactttagcatcacttggggcattttccttccttgggtatcctctaagcctttccttactatccttttgtgattacatgagcctacccagtatcacattagtgcatctccattctctgtaaaataaccagaggttctttcccttgcttacaactgagaaacctggmtgattcaaataagatttacaataacttcaggtttcttccatggacagcaagtctcttttaccgaagccacacagagttcaacgtgacatagcctggtcgttgtctttgtttgtgggacacagaaccaccaccacaccacccagtgttcaatgctctgccccatccacaaggaaatgtggtgtaatttcagatttcagagaggaagaaagaacactagaataaaacagaacaaaacagaatagtttagcctgatttggactctactacctacaagtcatatgataatttcactgatcttataatttctccatc

SEQ ID NO: 513182 - DNA, 547 bp, Homo sapiens
cagtgctcacagccttctgttaatggtcttcccccagcacttgccttcctggtcccctgacgggactaatactttagcatcacttggggcattttccttccttgggtatcctctaagcctttccttactatccttttgtgattacatgagcctacccagtatcacattagtgcatctccattctctgtaaaataaccagaggttctttcccttgcttacaactgagaaacctggctgattcaaataagatttacaataacttcaggtttcttccatggacagcaagtctcttttaccgaagccacacagagttcaacrtgacatagcctggtcgttgtctttgtttgtgggacacagaaccaccaccacaccacccagtgttcaatgctctgccccatccacaaggaaatgtggtgtaatttcagatttcagagaggaagaaagaacactagaataaaacagaacaaaacagaatagtttagcctgatttggactctactacctacaagtcatatgataatttcactgatcttataatttctccatc

SEQ ID NO: 513183 - DNA, 547 bp, Homo sapiens
cagtgctcacagccttctgttaatggtcttcccccagcacttgccttcctggtcccctgacgggactaatactttagcatcacttggggcattttccttccttgggtatcctctaagcctttccttactatccttttgtgattacatgagcctacccagtatcacattagtgcatctccattctctgtaaaataaccagaggttctttcccttgcttacaactgagaaacctggctgattcaaataagatttacaataacttcaggtttcttccatggacagcaagtctcttttaccgaagccacacagagttcaacgtgacatagcctggtcgttgtctttgtttgtgggacacagaaccaccaccacaccacccagtgttcaatgctctgccccatccacaaggaaatgtggygtaatttcagatttcagagaggaagaaagaacactagaataaaacagaacaaaacagaatagtttagcctgatttggactctactacctacaagtcatatgataatttcactgatcttataatttctccatc

SEQ ID NO: 513184 - DNA, 611 bp, Homo sapiens
ctgtaaactgaaaaagataaaatcaacttctcatggttgtagtgtctcattcagtttgggctactataacaaactaccataaactgggtggtttgggtaactggataaatgtttagtcaataaacatcttttacaagtctggaggctggaagtttgagatcagggtgccagcatgatcaggttctggtgaggaccttcttctgggttgcagactcccaatttctcactgtatccttacatggtggaaagagagctatagacctctctgggtttcctgtttgtaaaggcactaatcccattcatgaaggccgcatcctcatgacctaatcacctcccaaagaccccacctccaaataccatcatgagggttgagatttcaacataggaatttggggaggaacacaaacattcagaccttaacatktatgtctgaccactagagagaatatgtgtgcagtgcctggcctgctgtagttgtgcttagtgatggaaactacggtaataattacagagaccccagcctctcactgacagagtccttctaaccaaaccaaggaattaactcatcttttttctggggcttcaaagaattagaaataattgtagagtct

SEQ ID NO: 513185 - DNA, 611 bp, Homo sapiens
ctgtaaactgaaaaagataaaatcaacttctcatggttgtagtgtctcattcagtttgggctactataacaaactaccataaactgggtggtttgggtaactggataaatgtttagtcaataaacatcttttacaagtctggaggctggaagtttgagatcagggtgccagcatgatcaggttctggtgaggaccttcttctgggttgcagactcccaatttctcactgtatccttacatggtggaaagagagctatagacctctctgggtttcctgtttgtaaaggcactaatcccattcatgaaggccgcatcctcatgacctaatcacctcccaaagaccccacctccaaataccatcatgagggttgagatttcaacataggaatttggggaggaacacaaacattcagaccttaacatgtwtgtctgaccactagagagaatatgtgtgcagtgcctggcctgctgtagttgtgcttagtgatggaaactacggtaataattacagagaccccagcctctcactgacagagtccttctaaccaaaccaaggaattaactcatcttttttctggggcttcaaagaattagaaataattgtagagtct

SEQ ID NO: 513186 - DNA, 587 bp, Homo sapiens
cctggtacactccctcagtgagacaccatggtgaggggtctgccattcgtcgtaaatgggagacgaagaaagagcctacagcttcattacacacacaatctctgtccattcccatttagcgaaggcatgatactgagcccatgggaactgataccctaagaagcctttacccctgaaggtcctcagatcccgtttgaagattactaaattagaccaccccctgaggggaaagcattggctgaacatccagagaaaagttgacaccccacatatagtataaccaattttcctacccttgcgaggtgcaaaatggaggttctttctggtcataaagcgaagactattayacacacacacacacacacacactgcacacactgtagggaggaaaactttcttccctaccaccttatgtcctagagcatggaacctggagaaaagtgtattacacatgtgcaagcacctgagagagagcaggagagagggcgggaatgaaggacagacttcccaaacagctaagggtaaggatttaggtgaaaatgggcttcagtgggaatatatggaagattctgcgaggctcatttaca

SEQ ID NO: 513187 - DNA, 592 bp, Homo sapiens
ctgaaatgaaataacctttgttttcacaacttgagtcatgaagtacatttgtttttattaaaattaaaagttcagcttggtaatactgaagattaaaaattgagacccaccccccaccccaagaactaggggtaaatagactcatatgaaatgatgtcatctagtggacaaaactgcrtaattctacttttttgctcaaatggaattatatagattatatagcagcagctttcatacatagtgaaaaatcaactggaaaaaaaaagcattttgcatgattaattgaccaccccagatggaaaaataagaaattagaaaatttattttatctgctatatggcaaacgctaagggattttttttttttttttttttttttttttttgacagagtctcgttctgtcgcccaggctggagtgcagtggcgcgatctcagctcactgcaagctccgcctccactaagggagtttttttattgcatttagtttcaaaatgtggtaattccggaatgaccagatccacattcactacttgtcaacgtatttcacaaacatttgtccatttgattttatctacaatgaatgtcaagatgt

SEQ ID NO: 513188 - DNA, 490 bp, Homo sapiens
tgtagagacagtcttactttgttgccaaggctggtcttgaactcctggcttcaaggggtctcctgccttgggattacatgtgtgagccaccgtgcctggccctgatcatacgatcttgatggtgtccttgagcctttctgaacctcaagttcccttagctgacaaatggaaataacaatggcaaccagttatttattgaaaaaaaaatgaaatgaggtgatattagtaaaaaccttcataaaatctagagtactttataaatatgaggtatactaaaaagttatgttaaggtctcatttctctcagggatagcctctttttccacttgccactggtgtccctgaggggcacccttggtaaaatcctccagatcttactgtcactccaaacacattcatttcaactacttctgccactatccatttgctgacyactcccaaatccatatcaccagcccagctctgtctcctgagctctggatctgtatatg

SEQ ID NO: 513189 - DNA, 473 bp, Homo sapiens
tatttatcttgagagcttattgttttaataataatctttttcctatggagaacycaaaataatatattgagttcctgtctgcattgccttggtggggagggaaggtcggaaagagagagaacaggagaaacgaaagttcacttcaggtcctaggtcacgtggtgaatttggcagagcttgaccgggaacgcctgcttttgttagactttgagacttgtaggaaaacactccaaacaaaggccttaagacaaatctaccaattgaggtaggaaatccactgagatatttagtagacagaacttgataatttctttcctttcatattttcattttagatcttcagaacttttattcaggggagaaaggcccaggtagctgctgctgttcagcttaaggctaatctgaccttctataacaggagttcaagtcccagaaatccctggtcctccatcagaggtaagtaaggatggcag

SEQ ID NO: 513190 - DNA, 542 bp, Homo sapiens
tgactaaaagcagcacaaaagaattaaacttccaaacaaaacctcccatattcccttctttgatatgacagttcagagcttgtccactcatgccctgtgacttcacaaatgtgttacacaggacactccagaagttgggttaatcttctgctttttacaaagtgcaggaagtggcaaattagacatcatctttgaaaaaactgtgtcttaaatggcacataaacacaaaagatacaaggggaatgatgtttatagacatctactgatatctgaagagccagattcagatgataataaattaagtacccttttgtacacattcacatggtgatcatgacaagttattgcctactatttaaaatacataataataaaccatgtactctttcaaatggacctttacagtttatgaccttttgaactttcactcatctgaatgtcacaaggacttgtgataggaacagcaggtattacactcrtatgctcatttggggcttagagaagttaaatgctttgctcaggatcataaagccctaagtgac

SEQ ID NO: 513191 - DNA, 263 bp, Homo sapiens
tgggttggagccctggccccaatatatagagcaggacattggttactcatgtcaaggatggactcagtcttcatctgtaaaacaagggggctaggcaaggccttcccaaagcagtctcaagggatgtgaagagttgtgaaaagactaaagtttaagcagagttaagtaaatttctcwccgcctgctgggacttgtcagtgtgtttcaaaagctgacgtgcattgtgaatctctgagaggagaattgctgggcagcaatttcct

SEQ ID NO: 513192 - DNA, 542 bp, Homo sapiens
ctgccatgtggagaagacctgtcaggtggcttttgcagtagtccagatgagatatgatggtggcccggagctgcagtttagtttagcaatggaatcaaggggacagattttgggtatattttagagataggggagataagacatactcataaattatgaacgatgataacaagagtcaaaatactctgtttctaaggcaataaggtgtagtttgagtgcagaaattgacttttccgtttttatggaattgtcttagattaatttttattaacatctaaatatatgacatagcaatatcattgcttaacaaaatctttatttttatcacttgaaataattttcccaaaattccatctattacaccatgtgaagtggttttcttcatccacgacaagcagaactttagttcaacatttattgagttttgctatctgtaaggcactgtggtagatgctgtcgtgatgaaaatatagttcctttscttgtgaaaaagtgttctagttagagagaaagtcagataagtagatagtttcaaatatgta

SEQ ID NO: 513193 - DNA, 469 bp, Homo sapiens
agccttaaaggtacggagttttaggttttagttttttttgtaatgcaatttttcttccatcagtgtgtaaatagtttcatagctttcttaacctcatacttaagtctcttttccacagactattaaaataatggaagtccctgttataaagataaaagaaagttgtcctggaaaatcggatgaaaaattaataaaaagtgttattaatatggtaggtcaaagtaactcattgcatgtggcatgctgcacttcccttgattgtattattctactttctggtgattggaattaggcacaaggtgtattgtgtgcaatctgaagcttaatgartagaaactgttttatactttttaactccttagcttcttttttctcattcattttatatttagtctaaattcttgctgtatttccaaaattataaatcacggtaatttataatcagggaatttgcctcagcatacgaaat

SEQ ID NO: 513194 - DNA, 723 bp, Homo sapiens
cactccagcctggcaacagagtgagactccggccaaaaaaaaagacagtgacttttcaaagactgccctctttgaaggtaacccattgcaatctggcttcagccccatatgtctgatgaaactatccattaggctcaycaatgaacccctgaccccaatgccaatgccgatgccaatgacccacttggcctcactgcagacatttgacaacttgtgctttcttgaaactttcttccctcttctccagtttcttgtttttcttgccacactaacagttcatcccccactccccccatttttattttctttttgtcttttattgattggttcttacactcctgaccactggccctttaaatgatgatgttctcaaaagttccattttttatttcattcgacttcacaattccttctttccttgagcaagccaatgtactatcatggcaaataggaagtatttaccagcagcctactaaattcaaagcctatgacctgtattcatatactgatttctagtccttgatctatctttctcaagcttccatacatatttccaaacatctccaggatctagcctacaagctcctcaaaattaatatggcctactctcccttctccacccctagagcaattaacgacacaaattctcaattatctaaccataagtctaacttctaagctagaaaccttactattgtcctcagcttcttctctcacatgatt

SEQ ID NO: 513195 - DNA, 522 bp, Homo sapiens
ctgggggtggtgggaggtcaggaaaagactagtaaaaaagaggtttatgggcatttgagggagatgagaaggacttccagatgcacaaaagccaagcttcgaggaaagggagagaagccctgcaccaggatgaagtgagacgtgctyctgaggttcatggtcaccctctcctgggtctccctgctgaaggatcccaaatgccccacactcatgatgactgcccagtgggaaaatggtggggagatgagaagcaatcgggattccctttcaaggatgaacaaattcagacaatgacccctcaaaggtcactgaggatctgagagaggagattacaagtctctctgcatagagaatgcccttcctttgcagcaataataagaagaatatctaattgcaaccaagcacctaatccatgccaggcactgggcaaaccattctgtatgcattatcttgtttaacctcacaggttgttatggggattgaacaaggagaatggcccctgcacagtggacaacgcttgca

SEQ ID NO: 513196 - DNA, 558 bp, Homo sapiens
agataacaggctagacaggtacatataaagcattttttacaattggcttgcttttgcagaatttacattgggttgggaatttatttttagaaagctgttcttgggattattcttttcctatatccagctaattttccttttttaataacaactttactaagatataacttacatactgtaatatygactcttttaaagtttataatttaggccgggtgtggtggctcacacctgtatcccagcacttttggagcctgaggcaggtggatcgcttgaggccaggagtttgagacgaggttggccaacatggtgaagcccctctctactaaaaattacaaaaattaggccgacatgggggcacacgcctgtaatccaagctactcagaggctggggcatgagaatcacttgaacccaggaggcagacgttgcagtgagccaaaatcgcgccactgcactccagccttggcgacaaagtgagaccctgtctgaaaaaataaataagtgaaaataaataatgtatataattcaatcttttctaatgtatttaagagtggcgc

SEQ ID NO: 513197 - DNA, 558 bp, Homo sapiens
agataacaggctagacaggtacatataaagcattttttacaattggcttgcttttgcagaatttacattgggttgggaatttatttttagaaagctgttcttgggattattcttttcctatatccagctaattttccttttttaataacaactttactaagatataacttacatactgtaatattgactctttyaaagtttataatttaggccgggtgtggtggctcacacctgtatcccagcacttttggagcctgaggcaggtggatcgcttgaggccaggagtttgagacgaggttggccaacatggtgaagcccctctctactaaaaattacaaaaattaggccgacatgggggcacacgcctgtaatccaagctactcagaggctggggcatgagaatcacttgaacccaggaggcagacgttgcagtgagccaaaatcgcgccactgcactccagccttggcgacaaagtgagaccctgtctgaaaaaataaataagtgaaaataaataatgtatataattcaatcttttctaatgtatttaagagtggcgc

SEQ ID NO: 513198 - DNA, 558 bp, Homo sapiens
agataacaggctagacaggtacatataaagcattttttacaattggcttgcttttgcagaatttacattgggttgggaatttatttttagaaagctgttcttgggattattcttttcctatatccagctaattttccttttttaataacaactttactaagatataacttacatactgtaatattgactcttttaaagtttataatttaggccgggtgtggtggctcacacctgtatcccagcacttttggagcctgaggcaggtggatcgcttgaggccaggagtttgagacgaggttggccaacatggtgaagcccctctctactaaaaattacaaaaattaggcmgacatgggggcacacgcctgtaatccaagctactcagaggctggggcatgagaatcacttgaacccaggaggcagacgttgcagtgagccaaaatcgcgccactgcactccagccttggcgacaaagtgagaccctgtctgaaaaaataaataagtgaaaataaataatgtatataattcaatcttttctaatgtatttaagagtggcgc

SEQ ID NO: 513199 - DNA, 620 bp, Homo sapiens
ttgtttaaagaaataactcagagttggccaggcatggtcgctcatgcctgtaatcccagcactttgggaggccgaggcaggcagatcacttcaggtcaggagtttgagaccagcctggccaacatggtgaaatcccatctctactaaacaaaaatacaaaaattagccaggcgtggtgctgtgcacctgttatcccagctattcaggacgctgaggcagcagaatcgcttgaacccaggaggcggagkttgctgtgagccgagatcatgccactgcactccagcctgggtgacagagtgagactccatctcaataaaaaaataaataaaataataactcagaggcatgtggggctgcagtcacagaatagcatctaaaccaaggttctgtttgatgggaacagcactaggattcaggtctggggttccagtgtttgtgaacgacaggaaataccaagaggaagggatcccggaagtttagacaaacagatgaagcggtctgtgactgcaaatcctggggacagaagctgctgcccacaaatatgtagagaattgtgctgttgaagagaaaacagcctcattctgagtaattgatgaagtttacttgggaagtcaacttca

SEQ ID NO: 513200 - DNA, 481 bp, Homo sapiens
tgtctaggtctggggtgaaggtggggggcctgtctggatacctcctccctcaattgaagggctcgttggaaacataggaacccactgctctctgggactctggaaagacaaattttctttggcaaacggaacagtgtcgcgctgtcgacagagcagactatttttcttgttccctcacaaggtgggggtggggggaaagaaaaggaagcaagaaagaaagggaaattaaatccacacgtgttaagctcgctcaaagggccagagtcaaaaccagagatgaaacttcgactccagttctggctgcccgcgggcctctttccaaccagccaggcctcacagagcaaggcatccccactggagagaattcgatctgatgtttcataaagcgctttatttaaggagaaggggcatgggtctgtctccaagtctrtgctgcagaaatccagaatttgtagcggcaaagaaaacaaaggagataaca

SEQ ID NO: 513201 - DNA, 630 bp, Homo sapiens
tcatctgaaacttagatctgagtagagtctgagcccacgtctgcatatggctaaccaccaagggtgtaaacaagaggctytccggatatacactctatatgcatggtatgagtttgctaggactgccgtaactaaataccacagactgggtagattaaacaatagaaacatattttctcatgattctggagactggaagtccaagagcaaggtgttggtggggttgattaagtactgaggtctccttccttggcatgcagatggctgcttttcccctatctttactttgtcttgcctctgtctgcatttttgtgtcctgatcgcctcttcttaaaaggacaccagtcatatggacgagggcccaccctaatgacctcattttattttcattatctctttaaaggcattgcctctaattacagccacattctgaggtactagggattagaacttgagaacacgaattttggagggacacgatgcacccaatagcataggtgccaggcacagacactttacatgcttgagcttatgcaacgctcaaaacaaccccatgaagatggcagtatcatccccattttactggtgggtaaactgaggctcaaaggggttaagtaacttgaatgtagt

SEQ ID NO: 513202 - DNA, 512 bp, Homo sapiens
ctgctagaaagtcctgatcctttttggtctgagccaaccaggtctcagcccagtcccacttgcctcaatttaaagtgacatttttggtctctagctgggtgcttccccctctgtagcatataacaaggatacactttcaaggcagggagcctggaggacaaggagataaccctgcaggcctggccacccaggctctttccggtgttccatgtacactgcatagattgagtggacacccaggttaaagagatctctcagtactcttggattttcctttaccttaattttgaaattataatattttagacataacttgtgcaggatcacacagtgagtctataggagaactggatgagaacccaagttttctgactttcaatcagctctctctccctacatgtaccttaacatgtatcataaagatgactgttgccatatgggctaagccctccattttctgagtatgcwataccacctccttccctcagaacaattaacagaggatctcataa

SEQ ID NO: 513203 - DNA, 512 bp, Homo sapiens
ctgctagaaagtcctgatcctttttggtctgagccaaccaggtctcagcccagtcccacttgcctcaatttaaagtgacatttttggtctctagctgggtgcttccccctctgtagcatataacaaggatacactttcaaggcagggagcctggaggacaaggagataaccctgcaggcctggccacccaggctctttccggtgttccatgtacactgcatagattgagtggacacccaggttaaagagatctctcagtactcttggattttcctttaccttaattttgaaattataatattttagacataacttgtgcaggatcacacagtgagtctataggagaactggatgagaacccaagttttctgactttcaatcagctctctctccctacatgtaccttaacatgtatcataaagatgactgttgccatatgggctaagccctccattttctgagtatgctwtaccacctccttccctcagaacaattaacagaggatctcataa

SEQ ID NO: 513204 - DNA, 402 bp, Homo sapiens
aaacacagccgggcataatcatatcattataagttgtgaccagccttgacctgcgccttgaccccacccacagcctacattcttacaccctgctctcaactgtttcagacattctctrctgtgacttctatctcccttccccactccttccttctcaagggatgccctggcctcattcttcatagtgaaaatgaaagctgccagaagaaactctttcagcttctgctctcaaatctgtgcccatcctttctgtcccttagtgcctatcagattatcagttgccaattggtctccatgtatctctggtccctttttcccctgtcttctgagtgccctggctccatggatcatccattctttatcctacccaatgggattcttctcgtcaacatccatttgtgc

SEQ ID NO: 513205 - DNA, 544 bp, Homo sapiens
gtgtgctaccatacccagctgatttttttgtattttttgtaggacagggtttgaccatgttgcctaggctagtcttaaattcctgggctcaagcaatccacccaccttggcctcccaaagtgcttggattacaagtgtgagccaccacgcttagccaaactcattacattctaatgcccctgtgtatggtggtgcatgggatgaagtaagtacatggtcccatttaaggtttagccaaagaatgaaaaaaaaaaaaaaaagtgataatctacaccagaggtcagccaaactactgcctgtgggccagatgtgatgtactgcctgtttttgtaaataaagttttactggaacacagctacacccatttgtttacatgtggtctctggctgctttcatgatacaatggcagaggagagtagctgcaacagaaacgatacggcccacacagcaaaaatacttactgtctgaccctataagaaagtttgccaacccttgatctayaccttctaattactttttggtcatacattttctttatgctgtg

SEQ ID NO: 513206 - DNA, 530 bp, Homo sapiens
gctgtctggagaacagcacaggaagtgtatctttcatgcatcatgtttatgaagctaccgttcattgtaaaaacaaatttataactgtgcaatgtgtgtgggagatgtctagtggccgtcatactaatcatggataaaattagaagctagtattatggatttagaaaactatgaccttgatgcacagcatttctcatttaaagaaacaccttcttagwtatcttttatttatgcaatctaattttttttaacattgcaacattcaagtattttgttgggaaaactgatatgaaagtagagcacttgtgaaatatcttatacaacaaaggtcccaaaaattcacaggagagttatataatgtttcatgtgctgttaagcactcactaattttctgggaatatgagaaattaatttagtatgacataaccagcatcaaaaaataaaatggaataaaatagaactgaactggagtagaagtccctcactcattataaagtattatgttgtgaatattttcttttagttatgtg

SEQ ID NO: 513207 - DNA, 589 bp, Homo sapiens
taaacagatgtttctgtagtcaaaggtattgttttttgaaagcaatgaagtaatggggtttcaggtatatgtcttatttattggtcatgtttttcttcccatgtttctaaaacaacttaaatcaatrttagtaaatatataacgaaagttaagaaaatgcagtcagcaggtttaaatgttttaagaattaaaaaaggagaaacattatcttaaagtttgctggtttgtaagtagtcaagtgaacaaactgaatccatcaaaagaccatttattcgtattttaaaaaataatactgaaagacacaggaacttgggggagagatttttaaatgagaggataatcttaaccatagaaatgtcaattttttggaatgaaaagcaacgtgttcataaaggaagcatttgattgacagatgatattctgaacaaaagctttgagagtttgatcttagtgtcttttgtgaaatttttacattataaaaatgatgaatctagcatgttgttttgaggtatatttgcaattgaagtgttatttcgttaatttttttctgttttggtcaatataaattttgataagatgttgtttaagc

SEQ ID NO: 513208 - DNA, 589 bp, Homo sapiens
taaacagatgtttctgtagtcaaaggtattgttttttgaaagcaatgaagtaatggggtttcaggtatatgtcttatttattggtcatgtttttcttcccatgtttctaaaacaacttaaatcaatgttagtaaatatataacgaaagttaagaaaatgcartcagcaggtttaaatgttttaagaattaaaaaaggagaaacattatcttaaagtttgctggtttgtaagtagtcaagtgaacaaactgaatccatcaaaagaccatttattcgtattttaaaaaataatactgaaagacacaggaacttgggggagagatttttaaatgagaggataatcttaaccatagaaatgtcaattttttggaatgaaaagcaacgtgttcataaaggaagcatttgattgacagatgatattctgaacaaaagctttgagagtttgatcttagtgtcttttgtgaaatttttacattataaaaatgatgaatctagcatgttgttttgaggtatatttgcaattgaagtgttatttcgttaatttttttctgttttggtcaatataaattttgataagatgttgtttaagc

SEQ ID NO: 513209 - DNA, 551 bp, Homo sapiens
tgtttgtatttatttttcctacatagctagatttgtaatgataatctttgcatgaaaaatgtttctctgggatccagattactttctatggatagatttctagaagggaaattactaaataagagcctgaawgaatattttatggtcttgatcatattgccaatttgctttccagaaaatgtgtatcaatttatagttctctttgcagcatatcttttaaaattttttaccatattgaattaattttaatatgaacttttttaaaactttgctaattttattaatgataaaagattattagtagtgtttccatttctttaattgctaatgagattgaaaactttcttacaaagttttcagttgtttctactctatgaattatctgtttatgaactttgtaattctttaattatcttagtgttttcaacaatgtacagttatttaattgaaagttgtaatttatgcaatctatttaatctgtataaatatttccctatgcgtttgcttttaaattttttagtattgtttgaaattcaacagtttaattttca

SEQ ID NO: 513210 - DNA, 591 bp, Homo sapiens
ctggaatcctgcttccaccaccacctgcatgtctaaggcctaacacaagttctcctccaaaataacccctgcccacccaccactgccacctctaactcttcctagaattgtatttcccaacaccaccaaactacttaacttcttacatttgccactgaggaaacttaaaaagatgttactcctaaagaccatgaagacaaagtcaacactggggataaggtcaacactagacatctaaaatctgcttccccagtttgactagaattcttagtgatatcctacactttcttttcactttcagatacttcaagctctcctttgggatgaaagtgaaagtatactttttttaagattttatttttttaatagcacttttaggttcatagcaaaattgaaagaaaggtacagagatttccccatatacttcctttcttcatactggctacagaaaatgaatattttcctgatgtgctatgaagaatacatgtgactctgaatagggtatcttccccactgagatattgggcattgcctgatttgggggaagagggaatatkttaatcactatcactgcatagcatgtaaaagcct

SEQ ID NO: 513211 - DNA, 648 bp, Homo sapiens
gacttatccagttaaggacatttaccagcaaagtgctgaagatgtcacctggtttcttcttactgtcttatggtaaactatgagaagaaagagatacattgggggaagtactgctaaacaaaaaggaggcaggacttgatagttacgaaaattcttagcttctctagacagcaaataatgttgaaattaagaaacagcttttaagataagatcaattccaggacactatcagaaaaacatggtctaaagacaaaagcggagggtgtcttataaaatcggtttgttaaaatcttggaatgatcaaaagtgatatctcagagtactatttcatcagatgacagracctcctaagggttcctcagagcctcataatgagcctttgggaaatttaagggcatgcattgtctctccccgatcttggcacaagcccaaagtagagaagacttatctccaagagatatatgaatgtggcttttggctaatggagaaaattcaaagaagtttcacaggagacccacaaactttttgagaagattgtatcagcagaaccactgcctatttggaccaaaaggggtagaagcagtactaaatttaaaaaggccacgggtccttaaaattctaccggtaggaagcaggctgagaaaacca

SEQ ID NO: 513212 - DNA, 607 bp, Homo sapiens
gaggggaaaagtataaatctttctaaatatatttttgttaatatggggtagttgatgttgtctagtgctgtttgattaagaaaacaagttcaggccgggcacagtggctcatgcttgtaatcccagcactttgggaggccgaggtgggtggatcacctgaggttaggagtttgagaccagcctgaccaatatagtgaaaccccatctctactcaaaaatacaaaaattagccagacgtggtggtatccgcctcccagctacttgggaggctgagacaggagaattgcttgaatccaggaggcagaggttgcagtgagccaagatcacgccactgcactccagcctgggcgacagaatctcaaaaaaaagcaaaacaaaacaacaaattcaattagccgggcgtggtggcgcactcctgtaatcccagctactcgggaggctgaggcaggagaatccaggaggtagaggttacagtgagccgagatcacgccactgcactccagcctggggacagaacgagactccgtctcaaaaaamaacaacaacaaaaaaaatctgtggacacagtatggtaccataaatcagtaaacattgcctaatacatgca

SEQ ID NO: 513213 - DNA, 613 bp, Homo sapiens
taccctggtcccccctcccttgctcatctgggccgggcatcccttagtccgcaacagtgccttttcctcacgtgtcctgctctcagagttcaaggcaacatggcaggctgagcagagctgtcactgctggtttggccccgtttctccacagagagacaagaaggaccaaaggaagctctgtcctgttctattcctctatgttgtccattgaatacgtggtgacccagccctgagcaccaaggtccttccctctctattctagcatttccaaccagccccgaccacatgtgaggtggccaagccaccaccccatctgtcccattccatccctccatgttctccattgaatacgttgtgacccagccctgagcaccagagtccttccccctccatcccagcatttcccatccagccccgaccacgtgtgaggtgggccatggcctcatatagttttgacatctgtacatattcarcgtacccctaatgaacacattccttccaaagagaccctttcgcccaccctaagcccaacaagaaacaactaattagactattaaggacttactcaaaaacgtcgtgtatataccctaaataaagagaaaagctgctttct

SEQ ID NO: 513214 - DNA, 611 bp, Homo sapiens
tggatcttctatcagcttctacattcagtctgctgtgatgtcaggcctaagtagcttgtggacaactccactgtccacttctgagaggctgagcatggaagaggcccacggcacacagcaccgtccttctctgtgtgccctttaggagccctcctcatccagtccagcgccgcatggggaaggcatatgggcagtaccagtctttctggagaagcacctgctgcacatgccctagtctcagagcccactgggagatgcacagattctctaattgatacaataaggagtacttagggagacaaygctctttcaagaaaaccaagtaaaactatgtctttctcagcctgcataatcctttatctgattctcttttcttttccatccctaattcttactccctttctttccccacttctatttccctagcctctttaaaaaactaaatttaagtccattttaagttttattttggttttttcttaagagacaaagtctcactcttgctcaggatggagtgcagtggtgcgatcgtggctcactgcagccttgacctcctgagcccaagcgatcctcctgcctcaccctcacaagtagctgggactacaggcaca

SEQ ID NO: 513215 - DNA, 517 bp, Homo sapiens
tgaagtactgattacctgcacactataccagtgaggactcatgggtgagcagatgggaggcactgagcttgattctgaaaccctggcctccatcccacctgacattcaatgtcagattagaatttggaagaccctaagtctccagattggtgcactgggtagctcctgaaatggggtggctgagacaggtcctctgtgcccccttccacagcttcctctggggcccttctgctcactggcatgtgcttctgggcaaataggcctctcccagcatttgttttggctctgtgaaatggggtaatatttgttcctattgcgggtgaagcgctgctgctgggatgctcaggtaactcactccgtgggtagctgatattgcctgggcaagtggcattttagaggaaatctgtgccatcaaaagagttggacctgatcacacttttgcttttgaatatgctttgtcccagcctggccattygtcacttgggaccccctgggtctctctgaccccactgtaaaa

SEQ ID NO: 513216 - DNA, 519 bp, Homo sapiens
aacattgggagggtcctggagggtgccccaggcagggcatggagctccatggcccttccccagtagctggccctacgtgctcttcatctggatcctttgtaatatcctttataataaaccagtaaaagtgtttccctgagttctgtgagctccagcaaattaattgaacccaaataaggggttgtggggaacccaacttgaagctgctcagtcagaggttccagaggcctggacttgtgactcgtgtccgaaacggggccagtcttggggaccgakccctcaacctttggaatctgatgctatctccaggtagatggtgtcagaattgaggacacacagcttgtgtccgctgctgaactgcttgcttgcttactggtgggaagaaatattctcatattttgggattacagaagtcttctgtgttgattgttgtgttggtgtgagagcagagtaaaaacacaatttaagcattttccctaaacattacatatggagatatccacatttaaagagctgaat

SEQ ID NO: 513217 - DNA, 659 bp, Homo sapiens
tggagagggattggccccctaaaattgatgggatgcccccaccatcatggctaaagccacccctatgtctctcaggtctcagactgttgatgaggccaggcccggagaggagtagcccatgaagtcatcttgttcagccccctgactcggggcaggactgcaccccatccaggtcagaggctgactcactcccagctattcactggaaagttaggcagctccctcctcatcctgccttccaggaaagccaggctttctggaagcccagaggctagagcttgcctcttcctgcccagggtgggatgagggggttgggttagaggatggggcgaggggctggttcactctgacctcatcacattcttggackggggagcggaagcctggtgagccatccccaggtccagcctcctgaagcctgctgctgtgatttgtgggctggcttccaggcagggtaagaatggaattggccccaggaacacactgtaggaagggacctgtctgcctccatttgggaaggaaaatggtgaaaacctaggctcaagtccctgcactgctgtttcctactgtgtcacactgagcaagttatttaagctgagcacagtcctttcctgtgaaatggggataacaatggcacctaactcatagggctgttttga

SEQ ID NO: 513218 - DNA, 524 bp, Homo sapiens
agaaaccttatgtatatctgcaacttctcttcacttttgttatataacataacataatatgggagagatgatcccatcacttttgccatattctgttggttagaagcaggttacatgtcccacccacactcaatgggggagaggattataccaaggcatggattattgagaatcactctagaattctgtctatcatagtgtaattatatatctatgtagtgaaaaaaatagatgtttgtaatttggaggtattaaaaagttgaatacaaagaaaaaattatagaactttaaagtcttaattttaayggagatggcacattattttgaagatagagaaaatggctttctatccttttcctatattacacttagtgccttgggcaggatatatgtccaagtatctaaactgtagattatattatatgaacttaaatggaataattaaataagtaattctgaaagacaagtatttaatgacataactggcttgatttgggaaccattttaccatgtgttagcctcag

SEQ ID NO: 513219 - DNA, 518 bp, Homo sapiens
ctgatgttgggccctttccaatactccttcttgaagataacgctgaccctggkgggcctgtttctcgtccccgacggcatctatgacccagcagacgtaagccgggagtaagggacagcacagtccaagactcatttagtacctttgtgttctaaaaggaatcaccagagccaacaccccttgacagagggccccagaaaagggtggctgtgggaaaacagaggctcagggactgccagggagagaaccgcaataggccaggcccccgggctttttcattaccgttcctgccgtgggagaggagagctcaaaggaagcaccaggtgccatgatgcatggctcacgaggccgaggtgggaggattgctcaagagtgggagttcaagaccagcctggacaatatagcgagatgccatttctaaaaatgtttttaaaattaggctggacatggtggctcacacctgtaatcccagcactttgggaggctgaggtgggaggatcacttgaagccaggagttt

SEQ ID NO: 513220 - DNA, 538 bp, Homo sapiens
gcagcagagccacctgtccacccagctctccggatgcccggcctgtgctccctacacagccgcttactgccctgccaggaaaaggcaggcaggagggatctttccactcccatyaggggctgaggaacaggcatctaggagctaaatctgactgggggagtctcccagcccagacagcccagggccctgcccaggggtcagtgctttcacttgctgacctcatgcctccaccactactcggggacagatgaggttcagcatgactcaggttcagccaaaggatactaatgggccatggaataaatcctgcctggagccctgttcacctcaggacttgtcctcagaccatggaccttcctccctggtcactcagtcaaggaatcgcaggagatcagtgcaagagtagctctgaatgggccgggcgcggcggctcacgcctgtaatcccagcactttgggaggccgaggcgggtggatcacgaggtcaggagatcgagaccatcctggccaacacggtgaaaccccgtctctactaaaaa

SEQ ID NO: 513221 - DNA, 414 bp, Homo sapiens
tggctttgcagttggctttgatgatcactcccaaaagttcagtgaatgaattaccactatgttaactgttcacaaaaagaatgaaacagacagtttctgcygttacggtctggtaccaacacattcgtataaagccatacagccaactaaataaatgagtaatttatatagtgcagtatttctgtcaataaatggaaaacggtgtctcttaaacttcctctctcttcttcggttggatgatgtcttgggaacctgcgaaaggctatgagccctcctcgtgtggatagtgacacccgacacaccacttcccacacagacctgagttttaaatttggattgacgaaagttaagtttatcttagcttaatattgccttttagaaactctatatatttttctgggcatggtagttcat

SEQ ID NO: 513222 - DNA, 327 bp, Homo sapiens
gaatgtgtgaacccccactcccatccaagccacggcccagcaacgcaggccctgtccggctgcacaagtacaccctgtaaagtaaagggtgttccctccctgggcccccagtagaggcccagacatcccaagggttcaggccccactgcctcgtacaggacctggagtctggagatatggagaggcaccatggagggaacaggtgtgggctgtggmtgggcaccctggagctgcatggacagcgaacgaggacaagactgcccccagccacccccatcctctgtccatgcccagcacatgctcaggtcctgaggagaaaccacgagg

SEQ ID NO: 513223 - DNA, 548 bp, Homo sapiens
ggtgtcaacagctcgacccctggagctggcgctccgcagcrtcttgtgcgcacatcccagaactgctgtcccagagttccccccgggccggcttctcctcgggccagactggctgcagtggttttgtttagtaaatatttattagatgcctactgtgtgctgggctctggggatacagcagtgaacaaaacaagtatttctggagcacctcctgaagtaggtagtgttctcccttaaggtacgtctgcgtggaacctgggagtgcggccttgtttggaaagggtttttgcagatcacattagttaagatgaggtcacaaccggataggggagggccccaaatccaatatgacgggtgcccttagaagaaggggagacacagagacaggagatgcagtggaaaggctgcgtggagatagaggcagaggatggcacgatgcatctacaagccagggaacaccgggggttgccggggccaccagagctggaggagtgaggaagtaggaagggcctcccccagagcccccagaggccgtggggccctgatga

SEQ ID NO: 513224 - DNA, 266 bp, Homo sapiens
actgactgacttgtgctggatcccaagtgaagagccttaagacccaaaggttggtaagatgaggtttaaccgagatgggctggagcctccctggggggaacaggcagtgctgggaccctcccctgcacagccagaagccaagacaaggactgcaggcgctggcagtgggtgtggtgctgagaatggagctggtgtggcacatatgcttaagaaattcctgttggcatctggcggggtggcrctgggtcagcactttgcaggaagcc

SEQ ID NO: 513225 - DNA, 636 bp, Homo sapiens
gtaacattaaaaaacaattattatcataagtgtagcaaacattgacagagctctttcaagacgtcaggcactggctgatatggtttgcctctgtgtccccacccaaatstcatcttgaattgtaatctccacatgtcaaaggagggactgacgggaggtgatttgatcatgggggtgttttcccccatgctgttctcatgatagtgaattctcaggaaatctgatggtttaaaagcgtgtggcttccttcactctctctctctccctcctgccaccatgtagactgccttgcttccccttcaccctccgccgtgatggtaagtttcctgaggtctccccagccatgcagaactgtgagccaattcaacctcttctttataaattacccggtctcaggtagtattctttatagcagtgtgagaacagactaattcactggccaaatgactttccacatcacaatgtatttgatcctcacaacacacctctaaagtaggttaccttcatatcccccatattacaggtgaggaaactgaggcacaaagagagtgagcaaaatacctgatattacagctagaaaatagcagaactcaatacaaggcagttcagaatgcataaccgtaagtggatgaaatc

SEQ ID NO: 513226 - DNA, 636 bp, Homo sapiens
gtaacattaaaaaacaattattatcataagtgtagcaaacattgacagagctctttcaagacgtcaggcactggctgatatggtttgcctctgtgtccccacccaaatctcatcttgaattgtaatctccacatgtcaaaggagggactgacgggaggtgatttgatcatgggggtgttttcccccatgctgttctcatgatagtgaattctcaggaaatctgatggtttaaaagygtgtggcttccttcactctctctctctccctcctgccaccatgtagactgccttgcttccccttcaccctccgccgtgatggtaagtttcctgaggtctccccagccatgcagaactgtgagccaattcaacctcttctttataaattacccggtctcaggtagtattctttatagcagtgtgagaacagactaattcactggccaaatgactttccacatcacaatgtatttgatcctcacaacacacctctaaagtaggttaccttcatatcccccatattacaggtgaggaaactgaggcacaaagagagtgagcaaaatacctgatattacagctagaaaatagcagaactcaatacaaggcagttcagaatgcataaccgtaagtggatgaaatc

SEQ ID NO: 513227 - DNA, 636 bp, Homo sapiens
gtaacattaaaaaacaattattatcataagtgtagcaaacattgacagagctctttcaagacgtcaggcactggctgatatggtttgcctctgtgtccccacccaaatctcatcttgaattgtaatctccacatgtcaaaggagggactgacgggaggtgatttgatcatgggggtgttttcccccatgctgttctcatgatagtgaattctcaggaaatctgatggtttaaaagcgtgtggcttccttcactctctctctctccctcctgccaccatgtagactgccttgcttccccttcaccctcygccgtgatggtaagtttcctgaggtctccccagccatgcagaactgtgagccaattcaacctcttctttataaattacccggtctcaggtagtattctttatagcagtgtgagaacagactaattcactggccaaatgactttccacatcacaatgtatttgatcctcacaacacacctctaaagtaggttaccttcatatcccccatattacaggtgaggaaactgaggcacaaagagagtgagcaaaatacctgatattacagctagaaaatagcagaactcaatacaaggcagttcagaatgcataaccgtaagtggatgaaatc

SEQ ID NO: 513228 - DNA, 580 bp, Homo sapiens
ctgcataaacataacgggccttattctcccacataaaaggcattgaaagatggacagctcaggcctgacacagagaccccatgaagtaatcagggaccaaggctttttctacccaaaggtcacaaagtggcccctgaagctccaactaccatatagccattccaggtagccggaaggagaggtaagaggtgggcccctctcggctgagccagaacttttaaaggcccttcctggaagttccttccgaagatgccacttttatctgattggccaggacttagtcacatgcctaaaccaaactgccaggaaagccagaaggtgcagactttttgatctcagcaagttgccacccctgagaaaggccgggctctgaggccgakagaggacaagggaacaccagtggggcaacagcagtaccagctacccctccaaaccgctctctcagctacctcctccaaactgctcctccctcagctacctcctccaagctgctcctctctcagttaccccctcgaaactgctcctctctcagctacccactccaaaccgctcctacctcacctaccccctccaaaccgct

SEQ ID NO: 513229 - DNA, 243 bp, Homo sapiens
tctgtaactagaaatcaggtctatcttatttcagacttcagttttatgggccaccaaattgtcartgagtcctgagactagcagcaatgtgagcttgggaattggcaggaaatagtctgaagtagagatcctaaattagtcatctattgctgtgtcacaaattacccaagacttagtggaaggaagtcatgccatgccagtgttggtctaaaggttaagaaagatgggaaattctgctgtggt

SEQ ID NO: 513230 - DNA, 497 bp, Homo sapiens
gctcacatgatttgaacaagttytttggaacacattgtctttatttgatccctgttttttagtgccatgtaaattactcataaacacagtgctttggccatcccaataataagacagaacaaatgtaatttctttttaccccaacttccgcattcgtggtctctccattagtaaatcccaaacattggaaatatcaattcatttaccaaatgtttattgcatgtctgttatgtgccaggcaccgttgtatgacttagagattcagcagtgaacaaaataaagcaggacactgctttcataaagctcatattaaaattcaaatagtatatacaacataaactgtacatattgaaggctaaccctcatgcacacaatttaaatttcatttcaaaaagataaaaatgggacaaatcatgctttagtatatcaccctctttcatagactctatagcatccaggtcaaagatattttcagatcctattttgtgcctttgaaa

SEQ ID NO: 513231 - DNA, 610 bp, Homo sapiens
tgctcacatgatttgaacaagttctttggaacacattgtctttatttgatccctgttttttagtgccatgtaaattactcataaacacagtgctttggccatcccaataataagacagaacaaatgtaatttctttttaccccaacttccgcattcgtggtctctccattagtaaatcccaaacattggaaatatcaattcatttaccaaatgtttattgcatgtctgttatgtgccaggcaccgttgtatgacttagagattcagcagtgaacaaaataaagcaggacactgctttcataaagctcatattaaaattcaaatagtatatacaacataaactgtacatattgaaggctaaccctcatgcacacaatttaaatttcatttcaaaaagataaaaatgggacaaatcatgctttagtatatcaccctctttcatagactctatarcatccaggtcaaagatattttcagatcctattttgtgcctttgaaaagagaggatattgttcttatatttagcacactcgtccctcctttttctcggtaatagtaattctacttttattctagtattttcttttctctatggagctcctataaatgtg

SEQ ID NO: 513232 - DNA, 575 bp, Homo sapiens
tggatacactagaagcccaattcccaccattatgcatgtaatatccatgtaacaaacaagtacatgtacctcctgaatctaaagtaaatttttaaaaatatgaagtccaggccgggtgtggtggagcacgcctgtaatcccagcactttgggaggccaaggcgagcagatcacaaggtcaagagatggagaccatcccagccaacatggtgaaatctgatctctactaaaaatacaaaaaataactgagcgtggtggcgcacacctatagtcccaattaatcgggagactgaggcaggagaatcccttgaaccagggaggtggaggttgcactgagctgagatggtggcaccgcactccagcctggtgacagagcgagactccctcttaaaaaaaaaaataaaatgaagtccacaaaaatttgaacamattatttagagactttttttttgttaatgtaagccaagagtaattgaattctaaaattagaataataagtcccaacacatttcggaatttaaagtgttcttaaagattctctatatatcttgtttcattttaaaagcttaactccat

SEQ ID NO: 513233 - DNA, 470 bp, Homo sapiens
ccattcatggactttataaggaaacagagactccaggttaagaatttctactctgagcagtaaagtagaaatgggaatagagacagggaaaggataagtaatgaattaaaatagattaaaaagtatcaaggagatattcagttccttaatttcctgactyttcttgaatgctctggggcatctcttttgtcagttgtaattaattaaaagattaattattatttccataatattgattagtttgtacttggacagtaaatcaacacttattgaatatccattagtctgcacaaggtacatacctctctgttaaatacaaggaaatttacaataactcatcaatcaattaatcaaaaaatatagactgaggaaccactgtgggaggaagtgttataccaggccccatggaagataccaagaaatacaaagtacgatgtgaagggcatagcctcaagggaaatatgttgcat

SEQ ID NO: 513234 - DNA, 521 bp, Homo sapiens
tgtgcttatgttggggtccgtaggacaattgcactgtcaatagaaactatatatgtcccttctggcawgtggccatcaaataccaatgtggtacttccttcagccttctcttcccatcctgctgcaatttggaggccctatgtttcaggtagcatggtcacacgatataaaacagccttatcccagcactttgggagaccaaggtgagtgtatcgcttgagcccaggagttcaagaccagtctcggcaacacggcaaaaccccatctctacaaaacaatagaaaaaaatgtagctgggcatagtggcataagcctgtagtcccagctacttgggaggctgagatgggaggatgaattgagcccaggaggttgaggctgcagtgaactatgatcacatggctgcattttccagcctgtgcaacagagtgacatcctgtctccaaaaaacaaacaaacaaaaaacaaaaacccagtctcctaatcacaatagaactccacctgaggtattcaatgactttcat

SEQ ID NO: 513235 - DNA, 608 bp, Homo sapiens
ttttcactttgtaatattctggctctaacttccactggtcccttcataggtcccacacatctcccttcagccatgaaaactcttcataaacacctaatttcttagggggtttcttcctatctgaggttgcacatatattgttacctttaactcatccacaagtaaattcactgtctcgtcaactccacagtgtggtcttcctyctgcatcactctcgcagtgatggcagcccccatcactcacccagggactagacagggtgccagggtaggttcttccatcaatggattgctgggctgtaagttcgaatccttcgtctttgctcaggtgcggccccaggctccttccaagtccccctgcctctagtattatttccttttaatgcactttcctcactgctgctagaaagagcttttcaaaacacaaatctgaccatgtctttcctctctctacaatctccactggctccccattgcccttccctcgaagtcctttcattatctggtcatgcctacctgtccagtgcccctcttgttgttctgctgtgaacatgacaccctggctgcataaaccatcagcagtttccagaaagtgggctactctttctt

SEQ ID NO: 513236 - DNA, 536 bp, Homo sapiens
tttgtgtttagatgatataaaggttgacacaaatgttagatggaatacctttatagctggttgagcttttgttctctgtagtgcattaatgttttgatttaattataaattgttgttcataaaagtatcctattttcagaaagaccatctggaaaaaatctccagggccacacctcygatgtcttctttgcaataggcagcttgactgcagcgttgcattgcagaaagagattgaagatatttacatttattgtaaattttgatttgaggaagccgcagggttgacaaccatacttgatgctgaaatgctgggaaattcctcaaggctcagcaagataatctagaatctaaattaaccacagagaattactataaagaaatagtgctccaccatgaggcacattatccatgaccttaaagacattttcttagaacagtacctcacagttcctaaatgttcttaaacagtcaaaagcagttcactggtggcctcggtcatagaacagcttacactgaacaccatgccaatgtgtact

SEQ ID NO: 513237 - DNA, 593 bp, Homo sapiens
aaaaggtggaagaaacccaagtatccattgacaagtaaatggataaacgtgtggtatatttatacaatggaatattattctgccttaaaaagaatggaaattctgacacacgctacaacatggatgcaccttgagagcaaaatgcttagtgaaataagtcagtcacaaaagaacaaacactgtatgattccgcttacgtgaggtacctaaagtagccaaatttgtagagagagaaagttgaattgcagttgccaggggctgtggagagtgggaaatgggaattgcttaatgggcattgagtttcagttctgcaagatgaaacagttctggaattggttgcacaacactgtaaacatacttaacacgactgaactatacactaaaaaaatggttaagatggtaaattttatgttacgtgtatttcaccacaatttaaaaatatyatttaaatactgatttcaatcaaaccaactatagcggtcacggtggccaccaattagcgggagggtattctgttgtttctgatctgtgagatctgatgaaattatcaatgcttttccctgtcagcagccaagctcagtgatatgccgcag

SEQ ID NO: 513238 - DNA, 673 bp, Homo sapiens
ctggggaggcgagaggatacagagaggcattaagagcaaataaacaaactcacttataaaggagacatcgtccctcagccagagcctcagccccatacctgacaagactagtcgggctcaaggacggaaggagacctggggcctccatcccagccctgcctgctgcagggatgcatgcccctccagcatcgcaggcggtgccatctgagccccagcaccttcagtgatgcagagtttatgtcctcaccgggccccaggggagaccattaggaagcttcctccacaggaggagctgggctccacctcctgccatgcgcagacgaggggcttcatccaagtaactggtccctgtggctcagggcaggaactggggaggcagggctgcctcctccccaagctcaggggatgccacgagggaggaggttattcagtgtgattcctacgtgtgtccccttcatccagcacatggggtgtgtggcaaaccctggacaaggggacacaagacgcatgcagctacagcctggcggcaggatcaggcccgagcactgatgacgactgaggcatacacagttggatccactgtctggcatccagcccctcttatccctgaacctcctccccactgttggtccacgtgactccgctaggtstccccctgtccgttctcagcacc

SEQ ID NO: 513239 - DNA, 541 bp, Homo sapiens
ggtgaccgttctcgacagtgtaggaggctcttggcccctcacaccatcaccagtgcctcacattcccaccggcgcatgcacttctcctcccctcccagagggtggaggctcgtcttctctccgccccactccctatgcccagggcagtgccacccaggaaacagtcctgaggggcggcaggtgsaggcttcttgctgtgtgcaagctctcctctaggtgctgcactggtgcaaattccctcatcttcacacagcacctgggtgggcaagcgtcatccccacttcacagatgcacaggctgaggcccagagaggtcaaggggctggccaatatcacacagcagtaaggggtgagcagattggcctcagggcctatgtgtttacctgctgcttcttccatattgaacccaccctggtccccagcttcagcatcaatcagcccttcctgactagcacttttttttgcctcccccagaccaaggcaaaggggcagccgaccaagattcacatccctctctctgcttcccccaagctgtgtgacct

SEQ ID NO: 513240 - DNA, 541 bp, Homo sapiens
ggtgaccgttctcgacagtgtaggaggctcttggcccctcacaccatcaccagtgcctcacattcccaccggcgcatgcacttctcctcccctcccagagggtggaggctcgtcttctctccgccccactccctatgcccagggcagtgccacccaggaaacagtcctgaggggcggcaggtggaggcttcttgctgtgtgcaagctctcctctaggtgctgcactggtgcaaattccctcatcttcacacagcacctgggtgggcaagcgtcatccccacttcacagatgcacaggctgaggcccagagaggtcaaggggctggccaatatcacacagcagtaaggggtgagcagattggcctcagggcctatgtgtttacctgctgcytcttccatattgaacccaccctggtccccagcttcagcatcaatcagcccttcctgactagcacttttttttgcctcccccagaccaaggcaaaggggcagccgaccaagattcacatccctctctctgcttcccccaagctgtgtgacct

SEQ ID NO: 513241 - DNA, 245 bp, Homo sapiens
tgtctttggataatactaatttacttttggytcacacatccctatttcaaatcattttctaataaattacttcaacatattttccactttggagaaacaagtggcatggtgacagaaacaagggcgaaccccattcacataagtagttaccaacaacacatcaaccagtgttctctgagcacctgctgcaagctgggtgttgcctctgcactggtttgcaaaccagattccctcaatatcatgtt

SEQ ID NO: 513242 - DNA, 472 bp, Homo sapiens
tttgaaaaggacatcttcataggtgtaaagatttcaaattaaatgaatractgacatgggagatcttactcattgcctagtgggtaatggaacaattgctaagggcttacattatctctataatgattactaagggcttacagtgagaggtggtggagccaagtttgaattcctaaagtagataagagctggcaattacatttacaaatttcttctttcacaaggatagcctagttcagaatacattgctctggctgacttgtgccaatggatgcttattttcatataaagcatctttatatttgtataattgggaaaatgcaacaaatataattaataatgggtggtaaataggaaataataggtgaaaatgtgatttcagcgtgaaggaaaagcatggcctagatgccttgaggtgtggtatggggaggtctggacaagccaaggactggtgtctgttacatgcctgcag

SEQ ID NO: 513243 - DNA, 472 bp, Homo sapiens
tttgaaaaggacatcttcataggtgtaaagatttcaaattaaatgaataactgacatgggagatcttactcattgcctagtgggtaatggaacaattgctaagggcttacattatctctataatgattactaagggcttacagtgagaggtggtggagccaagtttgaattcctaaagtagataagagctggcaattacatttacaaatttcttctttcacaaggatagcctagttcagaatacattgctctggctgacttgtgccaatggatgcttattttcatataaagcatctttatatttgtataattgggaaaatgcaacaaatataattaawaatgggtggtaaataggaaataataggtgaaaatgtgatttcagcgtgaaggaaaagcatggcctagatgccttgaggtgtggtatggggaggtctggacaagccaaggactggtgtctgttacatgcctgcag

SEQ ID NO: 513244 - DNA, 571 bp, Homo sapiens
agattgacttgcctttgaagaattatccaagaagacgtattatataggcagttatttytacaggtcagaagctaaagaggtgtcctgactaaagttaaaaatgttgaactcgttttggaggtagtagttaaaggacaaatgtcgtcacatggatcgcaaggaaagagaggactttaagaaaggagatgcgactgccctatcatgctatatgttgttgtgatcccagtgaggtgtgaactagaaaactcaaagcatgcctcacacattgcctgccaatgccttacacattcctgtcttctgaacatgttctatatgctttcgctgagccattacccgtgctttcctaccttccaccacagcaaaggcagcaatctggcattttgtgtaaagagcagtagtgatgccactcacttgagggcagagtgcactgacgtggtcctcccttgctctcccaccaacccttggctgtttataccacctcccacctggcattgccagctcttaagtacgtgtatctctgccttatttcactggcatacctcactgaagtcacagactctgtcttaatcat

SEQ ID NO: 513245 - DNA, 634 bp, Homo sapiens
ttgaatttggcttaaaatttctaatctgactcaactttatctaaaaatatgagtatatataggatagaaaagtgtttttaatgccatgaaatttaagtttttgctttaaaaatatatatttatatgcatgcattatatatctaattaacatatgaaaatgtttccaacatgtctttcatttcttatttttctatttttctactgtagtatattttatgccttcctatgtaaataaagatgaaacagtttgaatttttacttgtgaattagtctaattttagaattaagaatggcttgatttgaagactgctagagtaagaaaactgaattgaaagaaatctgaaagaatttaaaaaaatttttttagccaggcatgtgcctgtagtcccagctactcgggaggctgaggcgggaggatcacttgagcccaggagctaagactgcaccactgcactacagcctaagcgacagcaagattccatctctaaaataaactaaaaataaaaattttaaattgttcataaagcttgcctcccagcttctctagcagttgctgaccatcagatgcraagagtttctggggggaaacagtaatgtgtcaaggtggttccagagctgaagggagatgaaagaa

SEQ ID NO: 513246 - DNA, 539 bp, Homo sapiens
ttataaatgggagtggttttctggcactactcttggcccatcctgtatgtaagtacccaataaaccctatgtctcattccctggctctgggtctcttcttcagccccttggacatggcgatatccttaatggagtcaacagaggtctagcatgacaccctgaaaactctcagtctctgtttcctttggtcagcagtgtgtatgtggttgctgatccttcacttaggaaccaaggaggggctctactcacgtcatgcatggagtccagcagcttggtcagttggtagaacctctgccagctctgcccagaattgttgggacacttagttaccatcttcctcagttctttgatgtaatttgtcctcatttcttcaaatgcagcctggcttttgaggccatcctttggaactgtgttaaggaaaacagacatgtaaatttccaggayggaaaacaactttagcatcttggcaggtaaagtcatatactgattttgaggttagatactaaatctcaattaattgcatttatgaataaatatgg

SEQ ID NO: 513247 - DNA, 518 bp, Homo sapiens
aaatatcatgattccaacatgtggtgttggctgcattttcagagcttgcagtcatacgtcttagtctgttggggctgctgtgacaaaatactgtaaattgggtctctctaacaacagcaatataatgttcacagttctggaggctggcagtccaagatcagctggcatacagggtgtctggtgagggcccactttctgggtcatgcctgccatcttcccactgtggtcacatggcggaaggggcgagggagctctctggggcctcttgtataagggcgctaatccyaaccacaagggccccaccctcatgaccccatcacctcccaaagatgccacctccagatgccatcaccttggggatgaggtgtcaacacatgagtttggggggacacagacatttgttcatgtggtaagtggctccaatgctggcctgcctctgaggcctggcctcctggtggagggccgtgcaggcacagggctctcgtgcactggggtccccggggacacctcccacccct

SEQ ID NO: 513248 - DNA, 584 bp, Homo sapiens
gtttgggaagctgaatgttgcagtaagctggggattgagagaatctgggagacacaggagagtacctgagggcctggagtaaagagttgggagacatggggccagagccctgtgaggtccctgagtttctgsttgttacatgggtgtcagggcctgactgttacagaaatctaggaatgattggagagtaattgggagacatgagactccctgagggctggtggtgaagagatgggagacataggggaggatcccgtgaggtctatgagtgtctctgtaattcctgggtgtggcaggcagactgtcactgaatatgaagaatgttcatggcttatatattttttatttttactttattttctaggtctcatcatagctcatatataacactcaaaacatcattaaaccatctaatctaatattcgaccatatcatttctttctttacacgacttgtgagataagtaagatatcagttaaaattttcatttcagcatctgtttttctcatatcccctttgtgcttcttaaagatggttaaaataggacagacagacttggaactttgttcaactgtcttaggaaa

SEQ ID NO: 513249 - DNA, 556 bp, Homo sapiens
gggcaccaagggcaaggtcgaggcgtggggtactgggcaccactgcagcaaagcacstgaaggaggtggctgggggcctccgagagagcgagtgaagaggccagagagcagcggtcagaggctggaaatgcaggcttggaaggtggacgcagatacccagtaagagaagccatgagtgtggctgagctgctcagggagcacaggtgtgaaaagcggcacctctccccaggcctcccacttctgatgtggtctcggcaggaaaaagcccacagaaacagatgagcattgaaaacaacaaagggagggacaattaaaaacaaaaagcatgttaagttatagctcctgggttcccagattttcagtgaaggaaggatttctcctgagcttcccactcttcatcctctgcctgtcccaggacctggagcaggtggtctgcggtccagaggaggacaaggtcccaggaggacggaaaacactgaaggccccagaagtagatcatcctagaaggcttggacaattggtaaggacatatggggtgggaggagacagcaaaggg

SEQ ID NO: 513250 - DNA, 556 bp, Homo sapiens
gggcaccaagggcaaggtcgaggcgtggggtactgggcaccactgcagcaaagcacctgaaggaggtggctgggggcctccgagagagcgagtgaagaggccagagagcagcrgtcagaggctggaaatgcaggcttggaaggtggacgcagatacccagtaagagaagccatgagtgtggctgagctgctcagggagcacaggtgtgaaaagcggcacctctccccaggcctcccacttctgatgtggtctcggcaggaaaaagcccacagaaacagatgagcattgaaaacaacaaagggagggacaattaaaaacaaaaagcatgttaagttatagctcctgggttcccagattttcagtgaaggaaggatttctcctgagcttcccactcttcatcctctgcctgtcccaggacctggagcaggtggtctgcggtccagaggaggacaaggtcccaggaggacggaaaacactgaaggccccagaagtagatcatcctagaaggcttggacaattggtaaggacatatggggtgggaggagacagcaaaggg

SEQ ID NO: 513251 - DNA, 667 bp, Homo sapiens
caagctcctcatctctcagtcaagtgggaaggacaacagcgttgctaggtcttcttccagttctgagraaagggagtcaaaattcatgaaacctgacagttgggtctccgccatcccagtctaaatgccctggtgagagtttaatctgtacatgatggcgaccacgagttaagacaccaggtgccatctggagtgtgagctacctgcagctcttcaagggaaaataggattcagatccactttttagataaaataggtggttctcagagcatgttcccaagggtgcttgggaatacccaagacctgttcaggagtctgctaggtcagaacaattttcataataatttaaaaactgtatttatctctttctcttattttctccctatattcaacagtgtttactgtactatatgacatatgattctatttcagattaaatgcagaagcagacctgagaatttaactgtctctattaagctggatagtgaaggaattggcaaaaatgtagaattatgccactcctcacacttttttttgttttgtaaagatatagttatgtttcatatacatgtcatttatactaatataatgggttaattattgttactttaaaataaattaataagtaaataggctaaatatattagttttaatttctaatataata

SEQ ID NO: 513252 - DNA, 571 bp, Homo sapiens
gcaatatttttagttggaaataacccaccagagccatcctatctcaatgaagaaatcaaacacagaaggtctcgtttttaagcagtgtgacatcctggtaaaacctgcaagaaaagctggtagtgaaatattgcccccggtaagtgaatgagttgtctttgctataaatggttgtcaaaagaaagaagttgcgaaggttaaagttgtaatgtacatcttgatcaggaggcaagaagaaacaaagagactggaggctggaccttgagagagctggctctagtctacactgggatcgtagccaaatgggaaaccaggtacttgctaattgtcctcgcccatgaaatggggctattcaataccctaccctactccatagggtagccacrtgagtcaaatgacgcaaagtttgctgaagtatcttaaaaaattgtaggccagtcaccgtggctcatgcctatagccccagcactttgggaggctgaggcaggaggatcacttgaggccacaagttcgagaccagcttgggcagcaaagcaagaccctttcgctaaaaaaaaaattttaagttagc

SEQ ID NO: 513253 - DNA, 635 bp, Homo sapiens
aaattttaagttagctgtatgtggtgacttgcatctgtatttccagccactagagaggccaagccaggaggatcgcttgagcccaggagtttgaggctgcagtgagctatgatggtgctccagcctgagtgacagagtgagaccttgtcttcaaaarttaatattaaaaaaatggtaagccctggccaggcacagtggctcacgcctgtaatcccagcactttgggaggctgaggcgggcagatcacgaggtcaagagatcgataccctcctggccaacatggtgaaaccccgtctctactaaaaatacaaaaattagccaggtgtagtggcacgcacttgtagtcccagctactcaagaagctgaggcaggagaatcgcttgaacccgggaggcggagattgcagtgagctgagatcacgccactgcactgctttctggggaataagcctaactaatgctgtttgtaggacacatcttacatatctcagctatgaaggtgcttccttcctccctgtctctcctgcccatctcagctctgttacaatcaacagtgtatctaacacactggacgtgaacaccaagatcttgcctctttggcaagccacctcttaaggtcttattgacagtcataat

SEQ ID NO: 513254 - DNA, 514 bp, Homo sapiens
ctgcatccagacaagggaggggttcccagttcatctacattcttgggccatactcctccacctggggtttgccgagcactgcactggtacaacagggagcacaacacagaaccaaactcactgcttccctcccgaggacggaggggtgtgctgcttaaggtgagacgtggatgcagccaagcaaactggaaaacgtcgagttttgaaaactgctttaagtaaaaatattctgaataaaattaggtaaatggcttccaaatatggcccattttaagaaatcactatctaagctcctcatttagaaacaaagactcgatcaggattttgactctccttatgaccttgmtgaaaggaggaaaaaacacaagaaaaatcatttctttgcatgaaatcaatgtgcaaggacggaaccccctggctggaagagatcctgggaggtctttccctttgtcttcattgttttaaacaaaagccacctccttagaatttgtttttaagccacattctgtatttc

SEQ ID NO: 513255 - DNA, 588 bp, Homo sapiens
ggtggggctcacagcagtcaacaaacaaatcacagagtggactgcagggaacctgggcttagggcaccatttggcactacacgggctgtagcgttcacgggcttaaagaccaaaaaagacagtatgcttacaatttctggacagacctactatacaaggacaatcacagacaaagccagattgcaaagactgtttataaatacctacatattcaatgcacakatatcaatgtataactacaaagatgaagaacagtcagggaaacatgatgtcaccaaacagacaaagtgccagtgactgactctaaagaggcagagatatatgacattcctgagataattcaaaatagctgtctaaaggtataaaactccctggtaaaaataactcaggaactgataaccaaatgatgatgatgatgatgatcaacccagaggactggttgaattcgttgctcaaaccagagaaaaacactgtcctactaaatgatactattttaaataaattgattggtcattactgtcaagcaattgaagtaatttgtccagatacatataaagatgaaggttttgctcaaattcaagtgagatt

SEQ ID NO: 513256 - DNA, 536 bp, Homo sapiens
ctaactatttaaaatactatgataatttccaaggcatctttatttacaggggacttgaaatataactcaatctccctcttcaggtcaaagaaaattktatttatttgtacttactatgtattttaagagtgaaaatatatacattaactaatacaaggcctgtcattctggagtggaattaaaaaaaaaaagaaaacatcctttctacctctgagaaagtaccaaagataagtcccaccttatgtttattaaaagaaacaaaatgagtgacatcagaatgaatcgctttacacaatattatcaaaggcataaccgtatggatttcactctgctggagcaggatgctcttaactagaaagtaaaaattccttccaactctatgctaaaatctgtgtttatattcaagcagactcgtagtaacttaaatgtgactagggccgattttattggttctggcacacttatgtatcataaaatgattttctcatcatccccaggtgtttctcccctggtcctttacctgctttcctgctcag

SEQ ID NO: 513257 - DNA, 536 bp, Homo sapiens
ctaactatttaaaatactatgataatttccaaggcatctttatttacaggggacttgaaatataactcaatctccctcttcaggtcaaagaaaattttatttatttgtacttactatgtattttaagagtgaaaatatatacattaactaatacaaggcctgtcattctgragtggaattaaaaaaaaaaagaaaacatcctttctacctctgagaaagtaccaaagataagtcccaccttatgtttattaaaagaaacaaaatgagtgacatcagaatgaatcgctttacacaatattatcaaaggcataaccgtatggatttcactctgctggagcaggatgctcttaactagaaagtaaaaattccttccaactctatgctaaaatctgtgtttatattcaagcagactcgtagtaacttaaatgtgactagggccgattttattggttctggcacacttatgtatcataaaatgattttctcatcatccccaggtgtttctcccctggtcctttacctgctttcctgctcag

SEQ ID NO: 513258 - DNA, 653 bp, Homo sapiens
  misc_feature (1)...(653): n = A,T,C or G
ctgtcacccacaccactgaatgggtgcctaaggaacactctacagggtcatgtaagcctgctgctgtctggagaacatggcatcagcctagaatgcaccaagcctgactttgagcatgtacttttcaaggcaacacattgtaaatcagcctagatcactgtggtcatcttgaaaggtcttgctatcctgccaaaatcccagacaaacctgygcatgtttaaaaagcgaatggcagacgcacacaaacacatggtaggaatcaattctttactagcctttcaaggacaaaagaggaccctcaccttctgggccctgtgctctttgcagaccatgatcttatggtatcatcacactgtggaaaagccagaaggttgctgctgtactttgctctccagcactactccgtntttatcagtgacagctcatcttcatattagcacccacacaagaaggcaacagtggtgacctgagaccttgcagtggccactcccactgccccacagcaaagcacacacatagacccaggtggaacccaagtgcctttcctatggaacagagagaatgagcatttgctcatagccctgacacctcactctgagaccttgcataagtattttcagttcttcaggcctcagtcagatccactggaaaat

SEQ ID NO: 513259 - DNA, 608 bp, Homo sapiens
aataaatatgtgacggttgaataaataaatgaattattatttgtcctgaaaattctcaattgcacctgattataaatggataaagattttagaatgaagaaaaatttaaaagtacatataaaatcttgcataatcatctatataatctttttaccctgattatttgctttagagaagaaactacaagttttgcttcaaaatagaataggctcaaaagggaaacaaggtgtgcaatatggtgtaacaagagcaccattcaataaagaataaggtgttatcctctcaggcattacaactactttgctctatgaatgtaaataagtccctatgctgtgttatatttaatgttaaaattaaagcaytctggttagttgattataaatgtcctgtctatctatgtctaactttctatgattgtagaaattcaaaagttgcagatgaataacatttaaaaaaatctgagtcaaggtttttattatttgcaatgggaaagatcttaactgataatggaatatttggtgctttgctctgcaatatcttgtttatgtctacatctcaaattagaccaagtttttcatagcaaagacattatggtggtataattaaca

SEQ ID NO: 513260 - DNA, 614 bp, Homo sapiens
tgtatttttagtagagacaggatttcactgtgttagctaggatggtctcgatctcctgacctggtgatccgcccccttggcctcccaaagtgctgggattacaggcattgatcgtcattcttaactgtgatgtgtgatgtcagttcaggtccctgggagggcttaagtagagcagagtagggcacaatgtctggtgctgggaagcccccttggtcagcgtttggggcacagaatgaggtttagatcccatttctagaatagaagctgaggcacggggtgaggctgggttattctacaaaagctcatttgttgggggcttgaaagcagaacctgactcacatcctaaaagccatggtgyctgcagcctctctgctccttggtcttccctgatgctagagaagtaactgcaggtgggctgaatcttcaggggagtgtctgagctcccagcagggagagaaagacaggaaggctgagaaccaggcctggcagcctcagctcctgcagaagcagtctgtgctttgtgctaagaaaacaaagtttgctttcaccccccagtagaaaaaacattcaggccaagtgcctgcacacaggagccaacagtgctgctaaaccca

SEQ ID NO: 513261 - DNA, 614 bp, Homo sapiens
tgtatttttagtagagacaggatttcactgtgttagctaggatggtctcgatctcctgacctggtgatccgcccccttggcctcccaaagtgctgggattacaggcattgatcgtcattcttaactgtgatgtgtgatgtcagttcaggtccctgggagggcttaagtagagcagagtagggcacaatgtctggtgctgggaagcccccttggtcagcgtttggggcacagaatgaggtttagatcccatttctagaatagaagctgaggcacggggtgaggctgggttattctacaaaagctcatttgttgggggcttgaaagcagaacctgactcacatcctaaaagccatggtgcctgcagcctctctgctccttggtcttccctgatgctagagaagtaactgcaggtgggctgaatcttcaggggagtgtctgagctcccagmagggagagaaagacaggaaggctgagaaccaggcctggcagcctcagctcctgcagaagcagtctgtgctttgtgctaagaaaacaaagtttgctttcaccccccagtagaaaaaacattcaggccaagtgcctgcacacaggagccaacagtgctgctaaaccca

SEQ ID NO: 513262 - DNA, 501 bp, Homo sapiens
atagcaggtgttcaactaatattagccccacttctcttggtagcatttctcaaccatactacatattttctcaactatactacacattttcacaactagggatctttgaaaaatacagcccacaccatacaatacagggactctcactagatcaattttgttagaatctctggggatacgtgccaggcactgctgtgtgagaaggaagcctcctcggcctctgcatggggcccagccttcagcagcatcactttaaaggactgtgactgtttttgaccttggtatttacagtttgtatgtgtgtgaaygagagaaatggcagtgaggcacactcactgctgcagtgacctttccaggcaggctggccacagacagacacgtctgcaatttccgaggaatctgcgaggtggaaatgggatttgcagtaatcaggtctccgacacaacaggctgtgtcagcaggcatgcctgctgcaggatgatggagatcacaggcaatcag

SEQ ID NO: 513263 - DNA, 397 bp, Homo sapiens
taagcaaaaagagttgcattattaacatgcatccctatggtctgcggaaagtggcttccagtatttctgaacttaaactagtcaaagtttatgcaataggaaaacccaggtcatttttgccctcagaaagactgacgtgggaaaatattcccattggcacygcgagtgacaacaaacaaacaatcaaacaaagtgttctcatggtttttaaattaggtgtacttactctttaaccaaagtttcttttctgaaagcaagttctagcagcagagatggtacaaggtacaccacaagggcagtcataacaatccatattggcctggagcccaaggcaggagtcatcagggacagaatcattgccgcaggtccttagttccgtctgtgctccgtggagtgt

SEQ ID NO: 513264 - DNA, 608 bp, Homo sapiens
ctggtttggtccagtgtttcctgggagcctgttgtgtgactgcatttcagagggtctttagggattccaccctcactacaccagtcactctacactggccatgcacttagcttcttgggaccccgtgtgtgtcgtcttcagtggagctgtgaagagctctagttagggatagatctcattctcacgtsgctcaggctgcttcaaaagctgatcatcttgtctttggacatatggacattattccttttgtgtattttgaagtccgttgctgttttttttccttttttttttttaataatgtggacccttgcagtaacagtgacagtcacttttcaatatctttgtgaatttaactctggcaacaatttgatgaagttgacacgtggttctcattttataggtgaggaaactgacacttggagaggtagagtagctttatttacttcacacaagcttttgatgaaatcaagtctcaacctagaagtcttcctctaaggtatgactgtggcatattctttgtgtttctctgccagtgtcccaaaggggtccacatcccatctggactccgttttcttcttaatgacaggaaacttgcagaaagagggctt

SEQ ID NO: 513265 - DNA, 608 bp, Homo sapiens
ctggtttggtccagtgtttcctgggagcctgttgtgtgactgcatttcagagggtctttagggattccaccctcactacaccagtcactctacactggccatgcacttagcttcttgggaccccgtgtgtgtcgtcttcagtggagctgtgaagagctctagttagggatagatctcattctcacgtcsctcaggctgcttcaaaagctgatcatcttgtctttggacatatggacattattccttttgtgtattttgaagtccgttgctgttttttttccttttttttttttaataatgtggacccttgcagtaacagtgacagtcacttttcaatatctttgtgaatttaactctggcaacaatttgatgaagttgacacgtggttctcattttataggtgaggaaactgacacttggagaggtagagtagctttatttacttcacacaagcttttgatgaaatcaagtctcaacctagaagtcttcctctaaggtatgactgtggcatattctttgtgtttctctgccagtgtcccaaaggggtccacatcccatctggactccgttttcttcttaatgacaggaaacttgcagaaagagggctt

SEQ ID NO: 513266 - DNA, 367 bp, Homo sapiens
gttcctccatcaaactcttcttaatatcttttgtcaaactttactaatatttttctacctttttctttatcttttttttattttgagatgaagtctagctctgtcrcccaagctggagtgcagtgatgcaatctcggctcactgcaaactccacctcctgggttcaagtgattctccagcctcagactcccgagtagctgggattacaggcgcacaccaccatgcccagctaatttttgtatttttagtagagacggggtttcaccatgttagctaagctggtcttgaactcctgacctcagatgatccgcacgcctcggcctcccaaattgttggggttacaggcatgagccactgtgcccagcct

SEQ ID NO: 513267 - DNA, 567 bp, Homo sapiens
caaaatctcaggatatcttttggtagaaactaacaagctgtttctaaaaaggaaaacaaagttgggaggctaatgatacctgacttcaggaattatgatgaagtgacagcaatcaaaatagagtggttgcaaagagacacaaatgtatcaacggaacaaaacagagtccaaaaatagatccacacatacatggacaagtgatttccaagaaagtgaataggcaattcagtgaaggaagggaagccttttcaacaaatggtgctggaacaattcatgtacacacacaaaaagagattttggtttttttttgtttgttttttgtttttttgagattttggatccacacatgtcatgatgtacaagagtcctccttatctgcaagagatacattcaaaggccccagtcaatgcctgaaaccagatagtactgaaccctatatatactgytttttcctattcatatttacctatgatacagtttaatttataaatcataaaataaaatattaacaataactagtaataaaatagaattataacatactgtaataatagttatgtgaacatg

SEQ ID NO: 513268 - DNA, 567 bp, Homo sapiens
caaaatctcaggatatcttttggtagaaactaacaagctgtttctaaaaaggaaaacaaagttgggaggctaatgatacctgacttcaggaattatgatgaagtgacagcaatcaaaatagagtggttgcaaagagacacaaatgtatcaacggaacaaaacagagtccaaaaatagatccacacatacatggacaagtgatttccaagaaagtgaataggcaattcagtgaaggaagggaagccttttcaacaaatggtgctggaacaattcatgtacacacacaaaaagagattttggtttttttttgtttgttttttgtttttttgagattttggatccacacatgtcatgatgtacaagagtcctccttatctgcaagagatacattcaaaggccccagtcaatgcctgaaaccagatagtactgaaccctatatatactgttttttcctattcatatttacctatgatacagtttaatttataaatcataaaataaaatattaacaataactagtaawaaaatagaattataacatactgtaataatagttatgtgaacatg

SEQ ID NO: 513269 - DNA, 420 bp, Homo sapiens
tgaacagtaactccactgtgtaaacgcccatgaacataagattacaagacttttccagtttagacataccatattttctttcagacaattcttcagtttgtttacgtagatcagcgatacgatgattccatttctctgaaaaccaagcaaaagttgcttctcaataacacrtccctatgtcagagcagcactaacgtataatgactgatttcatatattttacattctaacagtccatatcattttactgctttcaagaaaaaatttccccttcttggtggttcttagaattggtttaatgggagactattagagaagctgaaaagcaggagggcagaaaagttcaatcaaattaaacacaataacagggaggtcacaatgaggcggtctccaggggtcttttagcaaacttcctaaaac

SEQ ID NO: 513270 - DNA, 420 bp, Homo sapiens
tgaacagtaactccactgtgtaaacgcccatgaacataagattacaagacttttccagtttagacataccatattttctttcagacaattcttcagtttgtttacgtagatcagcgatacgatgattccatttctctgaaaaccaagcaaaagttgcttctcaataacacatccctatgtcagagcagcactaacrtataatgactgatttcatatattttacattctaacagtccatatcattttactgctttcaagaaaaaatttccccttcttggtggttcttagaattggtttaatgggagactattagagaagctgaaaagcaggagggcagaaaagttcaatcaaattaaacacaataacagggaggtcacaatgaggcggtctccaggggtcttttagcaaacttcctaaaac

SEQ ID NO: 513271 - DNA, 553 bp, Homo sapiens
tggggccttaatctccatcctgcagccccacttggccaccttctctttctctctgggtcacatcattttctttctattaaagggcagaccygggggtggcggggaagagggtccaggcctcaggatgatgacaggagaggccatctggggcagccttgctgtgggtgggggactcaggatctttaaccacagggtttggtttgaacaagtggttcaaactggggactaaaaacaaggctaggataaagaccaaagctcacttctgcttttgtggggccccagaagtagaagctgcgtgagtgtgaagtgaggaggacaggtttgtgcttggaaaggtcagaaaggtcggaagaccggtgagtgggcaggtgggaagaggttgaaggctgtggacggcgtggccatctgggcttgagggaggccgacaaaacctctctctcctggagggcagtgtttcctcctggcatcgctgctcccacccctgccggctccctcctctcagccttcatcgggggcatcacccacccaaggctgggctggctgggggcttgtt

SEQ ID NO: 513272 - DNA, 572 bp, Homo sapiens
aacacagggccacagccacacacacagacccacatacagaggatcccactcaaggaacacacgtgtgaaagtccccacagaggtacacacagggtccacacaggagcaggcacaccacaggcaagacccaaaatggaaatccaggcagacgccacgtaggcaggtggacagagcacagagccagacaacactgcgtggtcgtccggaggggcgtctggagggggcgtccggaggagacgggcggcagaggcagcggtatgaggygggagccccagaaagaggaagtgtccaggactgggtggacacagaccccatgtcgcccatggcgtaggtcagggcgggggtgctcagcatctgaaagctggtgtcgagccccaagaggacccctgacaaggccaagaaaaaggtacacccatgtccaagggggttgggagccgcagtgaggcagcctctgaggtcagccagggcagccccagcgccaccactgactcacacccaccacaaccagcacagaccctgatcctgaccctggatcccagactctcccacagccagaaccttccagcatttca

SEQ ID NO: 513273 - DNA, 591 bp, Homo sapiens
tggctgccggccattgactgacactcggctgatgtgattggctgaaccgccgctatttgttaccatgatacattcccaagtcagattttcagtttgtttctatactaaattaggttgcgattcttcttgttcttcttcttttttcttttttgaggcggagtctcgctctgtcgcccaggctggagtgcagtggcgcgatctcagctcacagcaagctccgcctcccrggttcacgccattctcctgtcccggcctcccgagtagctgggactgcaggctgccgccaccaagcccggctaatttttttgtattttttttttttagtagagactgggtttcaccttgtaagccatgatggtctcgatttcctgacctcatgagccacccgtctcggcctcccaaagtgctgggattacaggcgtgcagccacgcgcccggccgcgactctttacaaggactcctcgggaggcttccagagcccaaatgttgtttgatgtaagaattcctcccttttggtcagcctctcaattttgagatattgatcaaaactttgggcattggtgtcactctttgttgtcgttgtaaattgag

SEQ ID NO: 513274 - DNA, 591 bp, Homo sapiens
tggctgccggccattgactgacactcggctgatgtgattggctgaaccgccgctatttgttaccatgatacattcccaagtcagattttcagtttgtttctatactaaattaggttgcgattcttcttgttcttcttcttttttcttttttgaggcggagtctcgctctgtcgcccaggctggagtgcagtggcgcgatctcagctcacagcaagctccgcctcccaggttcacgccattctcctgtcccggcctcccgagtagctgggactgcaggctgccgccaccaagcccggctaatttttttgtattttttttttttagtagagactgggtttcaccttgtaagccatgatggtctcgatttcctgacctcatgagccacccgtctcggcctcccaaagtgcygggattacaggcgtgcagccacgcgcccggccgcgactctttacaaggactcctcgggaggcttccagagcccaaatgttgtttgatgtaagaattcctcccttttggtcagcctctcaattttgagatattgatcaaaactttgggcattggtgtcactctttgttgtcgttgtaaattgag

SEQ ID NO: 513275 - DNA, 591 bp, Homo sapiens
tggctgccggccattgactgacactcggctgatgtgattggctgaaccgccgctatttgttaccatgatacattcccaagtcagattttcagtttgtttctatactaaattaggttgcgattcttcttgttcttcttcttttttcttttttgaggcggagtctcgctctgtcgcccaggctggagtgcagtggcgcgatctcagctcacagcaagctccgcctcccaggttcacgccattctcctgtcccggcctcccgagtagctgggactgcaggctgccgccaccaagcccggctaatttttttgtattttttttttttagtagagactgggtttcaccttgtaagccatgatggtctcgatttcctgacctcatgagccacccgtctcggcctcccaaagtgctgggattacaggcgtgcagccacgcgcccrgccgcgactctttacaaggactcctcgggaggcttccagagcccaaatgttgtttgatgtaagaattcctcccttttggtcagcctctcaattttgagatattgatcaaaactttgggcattggtgtcactctttgttgtcgttgtaaattgag

SEQ ID NO: 513276 - DNA, 401 bp, Homo sapiens
gccccagacacatccctggccccaaagagcctctccaagctcaggacacctgcacaccagsgcgcgcggggacatacatgctggtgcagcgtgaactgaacaggtttccagggaccaggaggctgccagcagccatacagaaccccggtgccaccagccatacagaaccccggtgccagcagcaagcccctccagcatgccaagcacgaagcactccagtcagaagtagcacttcgtcgtggagcaggatgggtccggaaggtgaaatgaggtactgtcagttaccacaccaggaggctctcatgatcattcatctgcaggcactggccatgctgctggatgtgaccagacagattccgggctgggcacagccatgaggaccagcactgacgaggggctca

SEQ ID NO: 513277 - DNA, 401 bp, Homo sapiens
gctgaggacagggcctcggtgccctggatacaccggccgatgggggccgggggcagcagtagagggcggctctgccctggcctgcgatagtcgggcagaggggctgctcacccagggaggctgcaggaaggatctgggcgccctgggaggcagcggtggggaagggcactccaatcagagggaacagcgttgagtaggcgcccagaggacccttgcgaaagagcaagagagataatgacgctcattccctcatcagcaggtgctccggcgcgctaattaccacrgagcttttgagtataagccccaagcatgccgatgattcccacgcaatgagagacagattcccaaagaggctgagaacgccatagcagggggcaggacacctgggcagcaggggctga

SEQ ID NO: 513278 - DNA, 169 bp, Homo sapiens
cctctaaaaaaccttgctccttaaagtaaaycaaggggaacagaaaagtctgctttccagcattaaagacttttgaatgatctgtgaattgtttagacatgcaaattctcacgcatcaccccagaatcacatcgtaagtaccattagagtaatagatggctcagttgtc

SEQ ID NO: 513279 - DNA, 457 bp, Homo sapiens
ctgcccattgaaacttataaggaattctagaaggcatgaaatatgggcaggtctattaagacagtgtggtcctttcacctagaaggcccagaggctcttccaggtgcctatgaggtcaaaacttgtcataatgacattaagatattacttagcctttttcacaattttcaaataaacagtggagtttccaagtaattatgtgactggtacacaacagaatgaatggaatatagaatgygtcagaatctagatgccatttattaaacacatctgtgtcagttttaatttttaattcaaatattgataatccacataataaaaatctttgaaatctttagtttttctgaaaacaaactgaaattcacctagattagcatattaaacaaatgtatttataaattgaaataaagatgacaataaaaataatttgttgaattaatgaatcagagcaagatcc

SEQ ID NO: 513280 - DNA, 457 bp, Homo sapiens
ctgcccattgaaacttataaggaattctagaaggcatgaaatatgggcaggtctattaagacagtgtggtcctttcacctagaaggcccagaggctcttccaggtgcctatgaggtcaaaacttgtcataatgacattaagatattacttagcctttttcacaattttcaaataaacagtggagtttccaagtaattatgtgactggtacacaacagaatgaatggaatatagaatgtgtcagaatctagatgccatttattaaacacatctgtgtcagttttaatttttaattcaaatattgataatccacataataaaaatctttgaartctttagtttttctgaaaacaaactgaaattcacctagattagcatattaaacaaatgtatttataaattgaaataaagatgacaataaaaataatttgttgaattaatgaatcagagcaagatcc

SEQ ID NO: 513281 - DNA, 547 bp, Homo sapiens
agcgcatgcttggggttcctgagtgctgccataacgagtacccacaatctggttggtttaaaacagcagaaatttattcccttacagttctgtagtctagaggttcaatatcatggttttggaaatgccatgtgtcctcaccaggttctagggatgaatctttctttgctcttctcagcttctggtgattgctggccgggagtgttctttgaagccacatattccagcctctgcctccatcttcacgtgaactttatccttgggtatatcartgtgtccaagtttcacgcttcttcttataaggataccttaaaagccctaatccattattacctcatcttaagttaattacatcagcaaataccctatttccaaatacagtcacattcagaggtactggggtttaggacttgaacgtattctagggaacaaaatttacccacaatacaaaaagactacttgtgctatctgttttctgggagaaattcctcctgctgcctctcactgacatcttgactttccaggttttgacctcagcttgctgatt

SEQ ID NO: 513282 - DNA, 651 bp, Homo sapiens
ttacaaaataagaaatgagttgttatatataataccaccactgaaagacccatgttaaatttttagccaatgtcccttcaaaaagatatgatattcaaaaggactttataacaaattttaggtgaattccagactgacatatctttaagattttattaattatttacatagttctgaaatttacatcctgcttccaaatgagttcatttgaatatayacaagcaagttttgcttctgtttgaataaactcatgtctttggctgatatttctgacatttttgttatattgtctgagaagtagaatgactccttccagacagggatctaaacaattctaaagaaatactgaggaaacagagagcagcagaagcaaactatagtgtgtttaacaattctgaggttgttcctggtacaacttgcgcataaaggaaacagaacttcagtcttaaggtaaacattggcatctatcaaatgcacacatcttatcctctctgaatttgataccttctgaaagggaagattcaatgtgatttgtaatgtgcagaaggctttgagattaaaggcgttcaacaattccacttatctagttcccctctttcagcccccttttaccagcttccaagattaacctcattccttaattattgtggt

SEQ ID NO: 513283 - DNA, 651 bp, Homo sapiens
ttacaaaataagaaatgagttgttatatataataccaccactgaaagacccatgttaaatttttagccaatgtcccttcaaaaagatatgatattcaaaaggactttataacaaattttaggtgaattccagactgacatatctttaagattttattaattatttacatagttctgaaatttacatcctgcttccaaatgagttcatttgaatatacacargcaagttttgcttctgtttgaataaactcatgtctttggctgatatttctgacatttttgttatattgtctgagaagtagaatgactccttccagacagggatctaaacaattctaaagaaatactgaggaaacagagagcagcagaagcaaactatagtgtgtttaacaattctgaggttgttcctggtacaacttgcgcataaaggaaacagaacttcagtcttaaggtaaacattggcatctatcaaatgcacacatcttatcctctctgaatttgataccttctgaaagggaagattcaatgtgatttgtaatgtgcagaaggctttgagattaaaggcgttcaacaattccacttatctagttcccctctttcagcccccttttaccagcttccaagattaacctcattccttaattattgtggt

SEQ ID NO: 513284 - DNA, 569 bp, Homo sapiens
tgttttaactcctgaccccaaaactaaagctaaaatgttgccatttcaactttaaaactaataaatgccacaaaaaaaatcaatgtctatctcaagtaaaaaccaagagcaattaatggcaattaaagtgactgttatatgtttccataattcttttaaatacattacatgtagacattaagtacattaagaaaattgtgatttgggttttttactttcagagaaatggaaattatcctgaccctagcwtaaagatgctgtgaattttctcatctatgtgaaatttcactgactcctattttatttcttggctgttgtgttatacaaaaatacatttttaaaataaaataaaatttcattcattcatatgcactcatagaaatctgtacccaaaactccactgaaaataacatatcttcagttcaagttatacccttctagatggagaagtgaacagatcagtattttacataagctgaatacttaagcctcaccacacaggtaattaacctcaagtagtacaagaactttcatgtttcttttctaaattttgcctcaggtattaacca

SEQ ID NO: 513285 - DNA, 569 bp, Homo sapiens
tgttttaactcctgaccccaaaactaaagctaaaatgttgccatttcaactttaaaactaataaatgccacaaaaaaaatcaatgtctatctcaagtaaaaaccaagagcaattaatggcaattaaagtgactgttatatgtttccataattcttttaaatacattacatgtagacattaagtacattaagaaaattgtgatttgggttttttactttcagagaaatggaaattatcctgaccctagcttaaagatgctgtgaattttctcatctatgtgaaatttcactgactcctattttatttcttggctgttgtgttatacaaaaatacatttttaaaataaaataawatttcattcattcatatgcactcatagaaatctgtacccaaaactccactgaaaataacatatcttcagttcaagttatacccttctagatggagaagtgaacagatcagtattttacataagctgaatacttaagcctcaccacacaggtaattaacctcaagtagtacaagaactttcatgtttcttttctaaattttgcctcaggtattaacca

SEQ ID NO: 513286 - DNA, 411 bp, Homo sapiens
taaattaagagatgacattgactagaaagtattaaatcattttggttgctaaaggaagaaataatgagaatctgaaacataatcaatagaattagataagcaaatggatacagtgggtttgagaaaaagagaagaaatgtccagtctgggccattagatggctaatagtgccattacccaaaacagaacaagttaacacaagcctaataaattccatgataaatacattaagcttgaaatgactgcggatgatccaagagaagatatgcaacaggaaattggaaatggagaaggaaaactcagaaaagagactgagactggagatraagtatttaaaggtgtcaaactacagataaatgaagccacggaaatggtttacttctcctaccatcataacacagagtcataaaa

SEQ ID NO: 513287 - DNA, 411 bp, Homo sapiens
taaattaagagatgacattgactagaaagtattaaatcattttggttgctaaaggaagaaataatgagaatctgaaacataatcaatagaattagataagcaaatggatacagtgggtttgagaaaaagagaagaaatgtccagtctgggccattagatggctaatagtgccattacccaaaacagaacaagttaacacaagcctaataaattccatgataaatacattaagcttgaaatgactgcggatgatccaagagaagatatgcaacaggaaattggaaatggagaaggaaaactcagaaaagagactgagactggagatgaagtatttaaaggtgtcaaactacagrtaaatgaagccacggaaatggtttacttctcctaccatcataacacagagtcataaaa

SEQ ID NO: 513288 - DNA, 637 bp, Homo sapiens
aacctctgccgccagggttcaaaagattctcgtgccttagcctcccaagtagctgggactacagatatgcgccactatgcccagcttattttttttgtattttttagtagagatggggtttcaccatgttggccaggctggtctcragctcctgacctcaagcaatccacccacctcggcctcccaaagtgctgggattacaagcatgagccaccacacccagtcaggtctgctttttttttttttttgagatggagtctcgctctgtcacccaggctggagtgcagtggcgcgatctctgctcactacaagctctgcctcccgggttcacgccattctcttgcctcagcctcccgagtagctgggactacagacatccactaccacacctggctaattttttgtatttttagtagagacggggtttcaccgtgttagccaggatggtctcgatcacctgacctcgtgatctgcctgcctcgacctcccaaagtgctggaattacaggtgtgagccaccgcgcctgcaggtctgcctttttttgaaagagttcattgcatagtaaaaagattaacaccttgtctgagatataagaggcaaatagttcctcctgttttgccttttgatttttcttatg

SEQ ID NO: 513289 - DNA, 637 bp, Homo sapiens
aacctctgccgccagggttcaaaagattctcgtgccttagcctcccaagtagctgggactacagatatgcgccactatgcccagcttattttttttgtattttttagtagagatggggtttcaccatgttggccaggctggtctcaagctcctgacctcaagcaatccacccacctcggcctcccaaagtgctgggattacaagcatgagccaccacacccagtcaggtctgctttttttttttttttgagatggagtctcgctctgtcacccaggctggagtgcagtggcgcgatctctgctcactacaagctctgcctcccgggttcacgccattctcttgcctcagcctcccgagtagctgggactacagacrtccactaccacacctggctaattttttgtatttttagtagagacggggtttcaccgtgttagccaggatggtctcgatcacctgacctcgtgatctgcctgcctcgacctcccaaagtgctggaattacaggtgtgagccaccgcgcctgcaggtctgcctttttttgaaagagttcattgcatagtaaaaagattaacaccttgtctgagatataagaggcaaatagttcctcctgttttgccttttgatttttcttatg

SEQ ID NO: 513290 - DNA, 298 bp, Homo sapiens
agaagtatactgtttaccaagtagctgtcwttctttaaaaaataatgttgactgatttttttcagatttaaaatacctgtcctttatagaaaaacatgactgcgaaagtaagaaaggaggggggagaggtggggcgggggggaagaaaggaaggaaatgaaaaaaagggagatccagccaagctgctttattataatagaggttttactacaacataatttgaggcagcattctttaatagctaaatcataaattaaaacaccactaatctctgatgttggcaaggtttgcttaagct

SEQ ID NO: 513291 - DNA, 298 bp, Homo sapiens
agaagtatactgtttaccaagtagctgtcattctttaaaaaataatgttgactgatttttttcagatttaaaatacctgtyctttatagaaaaacatgactgcgaaagtaagaaaggaggggggagaggtggggcgggggggaagaaaggaaggaaatgaaaaaaagggagatccagccaagctgctttattataatagaggttttactacaacataatttgaggcagcattctttaatagctaaatcataaattaaaacaccactaatctctgatgttggcaaggtttgcttaagct

SEQ ID NO: 513292 - DNA, 298 bp, Homo sapiens
agaagtatactgtttaccaagtagctgtcattctttaaaaaataatgttgactgatttttttcagatttaaaatacctgtcctttatagaaaaacatgactgcgaaagtaagaaaggaggggggagaggtggggcgggggggaagaaaggaaggaaatgaaaaaargggagatccagccaagctgctttattataatagaggttttactacaacataatttgaggcagcattctttaatagctaaatcataaattaaaacaccactaatctctgatgttggcaaggtttgcttaagct

SEQ ID NO: 513293 - DNA, 298 bp, Homo sapiens
agaagtatactgtttaccaagtagctgtcattctttaaaaaataatgttgactgatttttttcagatttaaaatacctgtcctttatagaaaaacatgactgcgaaagtaagaaaggaggggggagaggtggggcgggggggaagaaaggaaggaaatgaaaaaaagggagatccagccaagctgctttattataatagaggttttactrcaacataatttgaggcagcattctttaatagctaaatcataaattaaaacaccactaatctctgatgttggcaaggtttgcttaagct

SEQ ID NO: 513294 - DNA, 479 bp, Homo sapiens
gaatatttcgcaaaagaatgagtacatyagcatgattagggaattctcctgaaagatagttgtctcactggcagaactatatcactgttaggtgaccaaaaatatatttccaagaaaattgtatgaatctgctttctttgttgcatcagattttgaaacaaattaaacaaccaaaaggattttttttaacgtggtgccctaatttaaattcccagatgggttttgtatgtgtgtatttagttggctacaaatgtaagaaaaaaattttagacagaatgttttgattgaaactaccaaagcaacatgtgtgaaaataactgtcttatgtcttaattctctgtttcttatctaggcgagattagtaatgatcccataacatttaatacaaatttaatgggttacccagaccgacctggatggcttcgatatatccaaaggacaccatatagtgatggagtcctatatgggtccccaacagc

SEQ ID NO: 513295 - DNA, 624 bp, Homo sapiens
agcttggggttagtgcttcactgccctgtgtcctccgctccaggaggtctctgtgattgtgccacagcctaagcctccatcgctctgtgacctgctggtattggaacattcatagcaaagaccccaggacactcctgaagccaagaaggaggaaaagaaatagccctgcaatgtgaagagacatgagacagtagccaaactcccagaagacaggagaagacagaatacctcctaaatctttatatgaggccagcattaacctacatcaaaccagacaaagacattacaataaaataaaaccacagaccaatatctcctataaatgtacatgcaaaaacctcaacaaaatactagcaattcaaaktcaatgaggtacaaaaacaattacacactatgaccaacttggatttatttcagataatgcaaatctggttcaacatttaaaaaccaattaatgcaatccattccatgaagactaaagaagaaaaataacatgagcatataaatggagaaaaaaacatttgaaaacatctagtaccttctcgtggttaaaagactgggcaaagaaggaaaagaagggaacttcctcaactttatacaaaatattttttaaaaactccaaca

SEQ ID NO: 513296 - DNA, 284 bp, Homo sapiens
ccagtcccaacttgactattctttagcctgcaggctaaatcatgttagaagaattaaatawagtagaatttttgactcagaaaatgaagccttagcatgaactcctgtactggcgtaaggcgaaaaggtataatttgaccgttagaatggtcatcaagaatatgacaaggacattgcagctccatgctaagagttggccacactcacacttttcttatttcaccatttgaggaaagtctgtagattatctctttgctttttatctatgggcctttcaaaaacag

SEQ ID NO: 513297 - DNA, 537 bp, Homo sapiens
gctgggcaatgctgtaatcagaaaaaggatcattgacttaaataaagcttccatcaaaatatattctttataagaagatttgcaatattaatagcctttctctcaaggtatactagaaagcattcagtgagtcttactgtatgtcaggtaagccttgttctcagtcttttctggaaaaaaaaaaaagaattatcagacgtcaaatataaagaatatttatcagtatttattctaaaaatctctgagaacacttaaattttttttttaaattaagctcatgtcttctcttctttgtaatgaaccagaaggattactgggtgtcttcagyggaaaactaggcagttgtctaagcacattattactgtcatctgatctataggttctctgtatttttcctcatctttgagttattttataattcttgtaagttgtaagtaactgatagcaatgcaagtaattactctacagaatcacacaaattaattttgtcttagggaaattaaactgatttctctctacttcccatggaataagacc

SEQ ID NO: 513298 - DNA, 582 bp, Homo sapiens
ctggtaataaaaaccagcttggatactcaagaaaccacgctccttcataaacaaaaacaaccattcatctcaaccctggatgcagggtctagtcttggtttcgggggcttatacgtcagatgataatcctacatgatctctagaattctytcagcctttaaagtcctggttccatgtagtagtgatgctctgcctgccgaatcctgcctcaggagaaagtattcctctgtcagccttcaaaacgccccatcaggtcagtggcggcattagattctcataggagtgcgaaccctattgtgaactgtgcatgccagagatctaggttgtgcactccttatgagaatctaactaatgcctgatgagctgaggtggaacagtttcatcccaaaaccatcccccacatccgtggaaaaattgtcttccacaaaaccggtccctggtgccaaaaggttggggaccactgctctagagggatggaagagctacagagccttctggcaatgcttcatgaatatcatttatcataaccaggattttcggtaacaaaaatacgggcagtctccaacatgccaagtccaaaca

SEQ ID NO: 513299 - DNA, 551 bp, Homo sapiens
agaagatatttgaaatggagaatttaaagtcacttttaaattttctctaactagtgtagatattgaatgacttacttytgtctatgaacactaagcaactcattgtctttctgatgtgttttcatttctgcatatgttgtctctgcaatctcataaacccctgaattatcaccaccatgggaacatgaagaaaccgaggctgacggaaagtgagtgagtgtctcaagggaatgtgcaatcttttatctccttgttcagcatccttttcatttatctcatgtattctctctagaattctagctgaattagaaagtcaaaaacatcagggaccacttttagtctagcagatttaaataaaagtccaaggcattttgttgagtgagaaaatgagtgagtgggcaaatgacagagtggactcactttccagttttccagcttaacacataataagtgtgggaaatgccacctctagatgtcagacacagcacattacaatactcactcagagttttcacttctgacacttaaaaacaaaccttcctgcttccttg

SEQ ID NO: 513300 - DNA, 551 bp, Homo sapiens
agaagatatttgaaatggagaatttaaagtcacttttaaattttctctaactagtgtagatattgaatgacttacttttgtctatgaacactaagcaactcattgtctttctgatgtgttttcatttctgcatatgttgtctctgcaatctcataaacccctgaattatcaccaccatgggaacatgaagaaaccgaggctgacggaaagtgagtgagtgtctcaagggaatgtgcaatcttttatctccttgttcagcatccttttcatttatctcatgtattctctctagaattctagctgaattagaaagtcaaaaacatcagggaccacttttagtctagcagatttaaataaaagtccaaggcattttgttgagygagaaaatgagtgagtgggcaaatgacagagtggactcactttccagttttccagcttaacacataataagtgtgggaaatgccacctctagatgtcagacacagcacattacaatactcactcagagttttcacttctgacacttaaaaacaaaccttcctgcttccttg

SEQ ID NO: 513301 - DNA, 630 bp, Homo sapiens
ccttcctgggaacctgcctggagcaaaaaggaaatgctctttatggtgctcacaaagtctgcacatcaagttgtgaacatcagattgctggatctacttgacatttgggctgtccaactgaggcaaacttgaggttcytgagagttagcaagagagccccagggtaaactttgccacgctctgggtgatgcctacacgctatttctgaaagtataaaatctcagaccttcctcttgaggagaagcatttttactgatggaactaagttgctctttgcaatcataagaagcaaaagaggaagctcaaaaacactcaccttacggaaggacaaagcatttcccaaaaaaggcagaggtgtgggccctggaattccaagcttcttaaaaagtccatgtgtacgggttccatatctacaaagtgaaacaaaaatcaggtctcagggattgtgactttatagatataggggctggtgagtcactgactgaggaactggaatgatcaggcaaaggaggtaacattaaggcaataaaaaataacagtaactctgacggcaatgattatatttgttcatcaggtcctttcatgcttccaccatgagacaccaaaaagttacaatgattagctaaaagc

SEQ ID NO: 513302 - DNA, 397 bp, Homo sapiens
gtggaaacttcctggataaagatgtgtatgtgtgcattattttgatggatttgaagtattttggattgaaggcagccatgaagataagggctggttagagattgaatgccaatgacttcacaagagtttctgataagaatctataactcttggggyttatcaaacactgattagtttactgatatcacacaatataaagtcaaaggaggtcaaaataagggtggccataattcttcaccaactgtgaatgtgagaagagcaccccaatccctccacatgaggagcagcataggtagcttttctactggctgcagctatggacccaactcattccccagcacataaatattcctgttaaccttaactaaatcacctctgggcagagaaagaaagctct

SEQ ID NO: 513303 - DNA, 545 bp, Homo sapiens
cacacatgacgcatatggatccatttatatacaccatacttttcagccacattttcctaatttgcctctctgggaccaaccttgtgggactagcagattcacggttgagttgatggctggtgatgtctgccatcagcctttcttcttcctccagtcttccacccctcagtaacatcagactgggaaggtcttcagatatccagaaccctcagttgggggagtccatacatgacccatcaaagatgagttgcaagcaggcctgccatagggagcagcagccttaatgggttttcctacagagatacttgatgtgcagaggcaataaactgactgctttgtgattgatcaccttgaaaaaagtragcatatctgggtgtattagtcctttcctacatcgctgtaaagaaatacctgaggctgggtaatttataaataaaagagatttaattggctcatggttctacaggccctacaggaagcatagcgacttctgcctctagggagccctcaggaaatgttcaatcatggcagagggtgaaggagaa

SEQ ID NO: 513304 - DNA, 243 bp, Homo sapiens
gaattataagcaataatccttgtcttcaaggattctacacttagccggggaaatgagacacacgcccagacacacacatgcatgttataaaacaagatgtttatatgaacagtgtagtgaggtggcatataatgaagagccacayaggtaatacctactctactccagggtggaggccaaaaagtacatactacaggtgccaatatatattacctttaatcctcaaagccatctccattttac

SEQ ID NO: 513305 - DNA, 548 bp, Homo sapiens
aaatacctgcttgctctattctttttaaccagtgcagcagtgcttccttctaggataacagagctcttctcatatattccattgactgttgaaatctcagtaagggaaacacttttcaaaatgtcttgttatggaaaggattgggccaaataaatatatttcctgttgaaagtaacgtgtactttcactgaaggatagcttctctactacagctactgtttgaaagacaataagaatgttgattctggccasgtgcagcgttgggcacctggagttctggcaactcaggaggctgaggcaggggatcacttgagtgtgctgtgattacacctgtgaatagtcacttcactccagtctgggcaacatagtgagaaccagcctcttcaaaaatgaaaaggagaaagaacgttggttctggagtcagaatgaattggttctagtgtttggctcttaggctcagtaacttgtgatcttggacaagttacttattttgtctggccgaactccaaattccccatctgtaaagtgggaatcataactctgagaat

SEQ ID NO: 513306 - DNA, 492 bp, Homo sapiens
tgagaattatcactgccctgaatctcaccacccttgcaactattggcttaatctcaaggaatgaaaactgmtggaagcaatagaaagagatctttaattagtagagtacatcgaaccttacatagatgtaatctcccaaagttcagtaaaagcttatagtcatcaagaagttggtgactgttatctaaacttgatggagataagtgcagaaaacagacataaaaaaataccagatgagagttataaaaatacagtgaagagtgaagtatcctgccttagagagagaatgatataagagaataaaatgcagtatttttagctaatgtgatttgtaaaagtaacagtgcaagaaagcagtttatggcagaaaaaaaaatattgcccttagacccacaatgaaccagaacaaaatgggataggctgtgtaagaatcaagttggctcagaagtaagacacctcataaaggtactatatttagaattttgaggtgga

SEQ ID NO: 513307 - DNA, 492 bp, Homo sapiens
tgagaattatcactgccctgaatctcaccacccttgcaactattggcttaatctcaaggaatgaaaactgctggaagcaatagaaagagatctttaattagtagagtacatcgaaccttacatagatgtaatctcccaaagttcagtaaaagcttatagtcatcaagaagttggtgactgttatctaaacttgatggagataagwgcagaaaacagacataaaaaaataccagatgagagttataaaaatacagtgaagagtgaagtatcctgccttagagagagaatgatataagagaataaaatgcagtatttttagctaatgtgatttgtaaaagtaacagtgcaagaaagcagtttatggcagaaaaaaaaatattgcccttagacccacaatgaaccagaacaaaatgggataggctgtgtaagaatcaagttggctcagaagtaagacacctcataaaggtactatatttagaattttgaggtgga

SEQ ID NO: 513308 - DNA, 622 bp, Homo sapiens
tgacataagtcaacctaattatcagatgttactggtggaattatcaactcyaaagtggtcttagcattttgcttctatcaaaattaaaagctaacaaattattgaaataagtaaggaaagatgaaaatattaatttgtatgataactggcatttttatgtccatatggtggcttagtgaataatagattaatgatgaggcttttgatgatgatgataaaataatgatgtgaaccacacaatgttataaggaaatgataataacaaaatctgcctatgctctaaatcattgagatttggaagttctctccttgtattgcacagcctatgaccattgatatgcatacatacatttgatgttatccaatcatatgtaatactgccaagatgaaagtaaaataaaaaaaatggtgatggatgtttgtgtatttttcccatacagcatgtcatcaaatattcaaaaggcaaatagtatactagatcctttcaaaaaatcttacatgcttaaatagtaggaagaaggtttaatagcacaaaattcacagaaattatgttctaaagttaaaaataacttcagaaatggaagattttacctgtcacagagcaaaccctgactcattttta

SEQ ID NO: 513309 - DNA, 449 bp, Homo sapiens
ccttttacaaagcttattatttcaatttaaaaggaaaagaaattgatctarcatggcttgtttttcctaagactattaaaacatggcttctgagttatgtctaaatcaatagtttccaaactttagtgtacattagcatcacaataagggatggagatattaagtcttatcaaaatgtaaatgctgtagtcctcttggcctcccactttctgatttggaagactgaactcaggaatgtgcatttttaacatcagttcaagccattctaaagtctgtttatctacttttagaaatactggtctaataatacaaagtatgtctttaaagaaaataataaaaatttgcagtgttatttctaactaaaaactcttaaagagcagaattttttttaccagtttaactgaattaataacatctctctaaataatgtcaacaaatgtaccttccat

SEQ ID NO: 513310 - DNA, 559 bp, Homo sapiens
aagcaccattctcctactgtggcaactgtttctgcatatttgtcttctaagctagtacatgcacagaataaagacaggcatcatatgtatttagctcaaggtcacatactcagagtctagcacagtgactaataatattagcacacaggtacccaataaatatgtattgaattaatcaattaaccatttggtttatgcttggcacccatcattggaaaaagtcatatgaaattgggtaacatgagaaagaataataagagctacaaacaggattctactcatttsccaattttgcatttcggtgcatttcaaaagtacagtttcaaaattttcgagagatccctagcaattccattacaaaatagagtagtaggatttaaaataattgcagactctgactttttaatgatcgccgttctaactggtgtaagatggtatctcattgtggttttgatttgcatttctctgatggccagtgatgatgagcattttttcatgtgtctgttggctgcataaatgtcttcttttgagaagtgtctattcatatcttcacccactt

SEQ ID NO: 513311 - DNA, 559 bp, Homo sapiens
aagcaccattctcctactgtggcaactgtttctgcatatttgtcttctaagctagtacatgcacagaataaagacaggcatcatatgtatttagctcaaggtcacatactcagagtctagcacagtgactaataatattagcacacaggtacccaataaatatgtattgaattaatcaattaaccatttggtttatgcttggcacccatcattggaaaaagtcatatgaaattgggtaacatgagaaagaataataagagctacaaacaggattctactcatttgccaattttgcatttcggtgcatttcaaaagtacagtttcaaaattttcgagagatccctagcaattccattacaaaatagagtagtaggatttaaaataattgcagactctgactttttaatgatcgccgttctaactggtrtaagatggtatctcattgtggttttgatttgcatttctctgatggccagtgatgatgagcattttttcatgtgtctgttggctgcataaatgtcttcttttgagaagtgtctattcatatcttcacccactt

SEQ ID NO: 513312 - DNA, 556 bp, Homo sapiens
tgaaagggcttggaagcaactatatctagatagcaatgaacaygtttaaagcttagatcttggtttctaaaagccactctccattaaaagtgaacagggctccttggagaaatgacgaattccagaaaagggacaggaaaagtataagattaacttggaactttgtgtgctagaaaaagggaagggcttaaataataatgaggacaagtcaaaagaacacagaagccagcataaagagtctccaatgaccaaatctgggacaatttcagcatgaaagtaaacaatcatagtatcatattataatccactgtataaaataggtattcatgagtttcataccaatataaataatgaataaagtaaaagtttgattaagattgagatgtttacagtggttgggtgtggtgattcatgcctataatcccaggagggaggatttgggaggcagaagcaggaggatcacttgaagccagttttgagaccagcctgggcagcagagcaagatcccgtttctacaaaaaaaaaaaaaaaattacagacaggtgtgtacagagtc

SEQ ID NO: 513313 - DNA, 556 bp, Homo sapiens
tgaaagggcttggaagcaactatatctagatagcaatgaacacgtttaaagcttagatcttggtttctaaaagccactctccattaaaagtgaacagggctccttggagaaatgacgaattccagaaaagggacaggaaaagtataagattaacttggaactttgtgtgctagaaaaagggaagggcttaaataataatgaggacaagtcaaaagaacacagaagccagcataaagagtctccaatgaccamatctgggacaatttcagcatgaaagtaaacaatcatagtatcatattataatccactgtataaaataggtattcatgagtttcataccaatataaataatgaataaagtaaaagtttgattaagattgagatgtttacagtggttgggtgtggtgattcatgcctataatcccaggagggaggatttgggaggcagaagcaggaggatcacttgaagccagttttgagaccagcctgggcagcagagcaagatcccgtttctacaaaaaaaaaaaaaaaattacagacaggtgtgtacagagtc

SEQ ID NO: 513314 - DNA, 556 bp, Homo sapiens
tgaaagggcttggaagcaactatatctagatagcaatgaacacgtttaaagcttagatcttggtttctaaaagccactctccattaaaagtgaacagggctccttggagaaatgacgaattccagaaaagggacaggaaaagtataagattaacttggaactttgtgtgctagaaaaagggaagggcttaaataataatgaggacaagtcaaaagaacacagaagccagcataaagagtctccaatgaccaaatctgggacaatttcagcatgaaagtaaayaatcatagtatcatattataatccactgtataaaataggtattcatgagtttcataccaatataaataatgaataaagtaaaagtttgattaagattgagatgtttacagtggttgggtgtggtgattcatgcctataatcccaggagggaggatttgggaggcagaagcaggaggatcacttgaagccagttttgagaccagcctgggcagcagagcaagatcccgtttctacaaaaaaaaaaaaaaaattacagacaggtgtgtacagagtc

SEQ ID NO: 513315 - DNA, 556 bp, Homo sapiens
tgaaagggcttggaagcaactatatctagatagcaatgaacacgtttaaagcttagatcttggtttctaaaagccactctccattaaaagtgaacagggctccttggagaaatgacgaattccagaaaagggacaggaaaagtataagattaacttggaactttgtgtgctagaaaaagggaagggcttaaataataatgaggacaagtcaaaagaacacagaagccagcataaagagtctccaatgaccaaatctgggacaatttcagcatgaaagtaaacaatcatagtatcatattataatccactgtataaaataggtattcatgagtttcataccaatataaataatgaataaagtaaaagtttgattaagattgagatgtttacagtggttgggtgtggtgattcatgcctataatcccaggagggaggatttgggaggcagaagcaggaggatcacttgaagccagttttgagaccagcctgggcagcakagcaagatcccgtttctacaaaaaaaaaaaaaaaattacagacaggtgtgtacagagtc

SEQ ID NO: 513316 - DNA, 644 bp, Homo sapiens
cactgcaactacatttctgtcatcctgaattccccctgtagttgctgtgaaaagcagtcatcttttttcctttagtttctccattactgaataaatgtaacagagcaatgtcttggtcaatgagaatcctgatgcttcatgagctataaacctatgtgtgagctataaacctatatatgagctataaacctatatatccctgccttgcagccgatgtgagcaagcaagcccaagccatcaggagatctggtcactccccaagcagccaagatcagactgggggccaaggttccagagaaaacacaattctctcatctaccgtgattccttccttggcccctttgattcttgcacttcatgtggggctgtggctccacctcctgggcttcrcgttgtctgggcaaaaaggacacagaagatctctaagcctctggtatcatttcttcttttgccacaccaaagctagggcttaacttcctttttctgggcttactgtcaactctctgggaagaaaaatgtgtgttcttcactcttcatttgctaagagcttctttcttctcctcagtgggccagctgactgagccggcagtcaacggatggaggtacaggcccctccactatattctttatgcacttctggattt

SEQ ID NO: 513317 - DNA, 644 bp, Homo sapiens
cactgcaactacatttctgtcatcctgaattccccctgtagttgctgtgaaaagcagtcatcttttttcctttagtttctccattactgaataaatgtaacagagcaatgtcttggtcaatgagaatcctgatgcttcatgagctataaacctatgtgtgagctataaacctatatatgagctataaacctatatatccctgccttgcagccgatgtgagcaagcaagcccaagccatcaggagatctggtcactccccaagcagccaagatcagactgggggccaaggttccagagaaaacacaattctctcatctaccgtgattccttccttggcccctttgattcttgcacttcatgtggggctgtggctccacctcctgggcttcgcgttgtctgggcaaaaaggacacagaagatctctaagcctctggtatcatttcttcktttgccacaccaaagctagggcttaacttcctttttctgggcttactgtcaactctctgggaagaaaaatgtgtgttcttcactcttcatttgctaagagcttctttcttctcctcagtgggccagctgactgagccggcagtcaacggatggaggtacaggcccctccactatattctttatgcacttctggattt

SEQ ID NO: 513318 - DNA, 628 bp, Homo sapiens
cattggattgtctttgtctattcaccatgtctgttactttatattcaattacttcaatatcatatttttcacctgcattcattatstaaagccttttctgtatattagcatgtttattttcacctatgctatctgttccctgattttcaaatcaccatgttggttctgtcatgtgttggtctgatccttaatttgtcttatttactctgcagcatcctcattactatctgtcatctcttccctgagacaccatgtgattgtcacctttatgaagttgctaaataacgcagagctcttgtgaggaattttcttttgttctgggtcattgtcatggtgcctcccagactggattactgttactttttatttttgttcatacttgtgtttattgcagctagagtatgtttccatctttgtgttgccatttcttctcatgatactatgctcaatctgagctgctctatcccaataatttttctctgatatagtggggttacctcccttttataactgtgcctaatacctgtttgttttctcttctcagctacaattagagagttggacatctcatgttcagtcatagactgagttacagcaggatggagtgagtataagaaaagaaggaggt

SEQ ID NO: 513319 - DNA, 628 bp, Homo sapiens
cattggattgtctttgtctattcaccatgtctgttactttatattcaattacttcaatatcatatttttcacctgcattcattatctaaagccttttctgtatattagcatgtttattttcacctatgctatctgttccctgattttcaaatcaccatgttggttctgtcatgtgttggtctgatccttaatttgtcttatttactctgcagcatcctcattactatctgtcatctcttccctgagacaccatgtgattgtcacctttatgaagttgctaaataacgcagagctcttgtgaggaattttcttttgttctgggtcattgtcatggtgcctcccagactggattaytgttactttttatttttgttcatacttgtgtttattgcagctagagtatgtttccatctttgtgttgccatttcttctcatgatactatgctcaatctgagctgctctatcccaataatttttctctgatatagtggggttacctcccttttataactgtgcctaatacctgtttgttttctcttctcagctacaattagagagttggacatctcatgttcagtcatagactgagttacagcaggatggagtgagtataagaaaagaaggaggt

SEQ ID NO: 513320 - DNA, 628 bp, Homo sapiens
cattggattgtctttgtctattcaccatgtctgttactttatattcaattacttcaatatcatatttttcacctgcattcattatctaaagccttttctgtatattagcatgtttattttcacctatgctatctgttccctgattttcaaatcaccatgttggttctgtcatgtgttggtctgatccttaatttgtcttatttactctgcagcatcctcattactatctgtcatctcttccctgagacaccatgtgattgtcacctttatgaagttgctaaataacgcagagctcttgtgaggaattttcttttgttctgggtcattgtcatggtgcctcccagactggattactgttactttttatttttgttcatacttgtgtttattgcagctagagtatgtttccatctttgtgttgccatttcttctcatgatactatgctcaatctgagctgctctatcccaataatttttctctgatatagtggggttacctcccttttataactgtgcctamtacctgtttgttttctcttctcagctacaattagagagttggacatctcatgttcagtcatagactgagttacagcaggatggagtgagtataagaaaagaaggaggt

SEQ ID NO: 513321 - DNA, 615 bp, Homo sapiens
aacagacccaaatgagctacagggccaggacccacctagtacatttaaattaggttgagtgccaggtaagacttttgtggcagaagtaatgggaaaagccacgtccccmgtccccaagtcctggaacacatccagaaatccataaagcaaagggtttcttaaactaaaaagtcatacagaaacattaccatacttattttccttatcctcaaaaacactgaaaagtgaaacagagcattattataacaaggtaacacctatgtctttaggatatgaatggtccacatcatgttcagatgttacttgataatgatagatgctacataatttgatgacaactaaaatctgctgagcacttactgtatactaataactatagttgacagcattttccagtttgatcctcaaaaaaccctgagacataactgctattcctttccttttgtgtccagagttggttccttctggggggttcgtggtctccttgacttcaagaatggagctgcagacctttgaggtgagtgttacaactcttaaagatggcacagacccaaaaagtgagcagcagcaagatctactgtgaagaccgaaagaacaaagctttcacggcaccca

SEQ ID NO: 513322 - DNA, 706 bp, Homo sapiens
tctcacttttagggtttaagaatctgatgcttcaaggtcacataactagtgatagactttgctctcttaacatttatacaacattgcctcttacttattttcaatgttttagaaaaacgatactaaatgtcatagagtaagactgtaactatatttgctcattttcatgcagtttgttaatgccctaaatacttttcaaagatggtatttacttacatgcacacagtgcatcactatcccgagattgtttacctccagaaaaatatattttatatattacatttggaaattatactaagtacctttctacaaaactcttgtaagtacaaattaattctattattctaaatctagctgtagccttcccactcaaatactatgaacatgctgagaatgatgtgtcccaagttttccatttgtggactggaaaacgcagtccagtccccagtggcagatattattgtcagatacagcagaagagaaacatctcaatttccttatatgatttccaatttctgtggataatcaaaratgcatgtagaattgtaatattctaatttccatttgccttcattttcccaattccactttccacttcagccctgccttgagtcttttgctttaatttagtcaagttgatagagaagtattctagagtgagagaaaaaaatagagaaggaggaagttttagagagagattaagaag

SEQ ID NO: 513323 - DNA, 706 bp, Homo sapiens
tctcacttttagggtttaagaatctgatgcttcaaggtcacataactagtgatagactttgctctcttaacatttatacaacattgcctcttacttattttcaatgttttagaaaaacgatactaaatgtcatagagtaagactgtaactatatttgctcattttcatgcagtttgttaatgccctaaatacttttcaaagatggtatttacttacatgcacacagtgcatcactatcccgagattgtttacctccagaaaaatatattttatatattacatttggaaattatactaagtacctttctacaaaactcttgtaagtacaaattaattctattattctaaatctagctgtagccttcccactcaaatactatgaacatgctgagaatgatgtgtcccaagttttccatttgtggactggaaaacgcagtccagtccccagtggcagatattattgtcagatacagcagaagagaaacatctcaatttccttatatgatttccaatttctgtggataatcaaaaatgcatgtagaattgtaatattctaatttccatttgccttcrttttcccaattccactttccacttcagccctgccttgagtcttttgctttaatttagtcaagttgatagagaagtattctagagtgagagaaaaaaatagagaaggaggaagttttagagagagattaagaag

SEQ ID NO: 513324 - DNA, 567 bp, Homo sapiens
gccacctaccacggagctctagtttcattgcatcgtcaccagcctggagtgtttgtatgttgttaaaacctttcagtttgatatgtaaaagtcattgtattttgctgtaatttcattttctatttcttttattactaaggaagaaaagacaatttattatttattgattgtttgttttttatttttgttttttttgtttttgagatggagtcttgctctgtcgcccaggctggagtggagtggctcactgcaagctccacctcccgggttcacgccattctcctgcctcagcctcgcaagtagctgagactacaggtggccgccaccatgcccagctaattttttttttgtatttttagtagagayggggtttcaccatgttagccaggatggtctcgatctgctgacctcgtgatccgcccgccttggcctcccaaagtgctgggattacaggtatgagccaccacgcctggttgattatttgtaattttattctttaaattgactattttccccctttttcctccttaaggatcttagtttccccatctccatagatttgtaatg

SEQ ID NO: 513325 - DNA, 604 bp, Homo sapiens
ggtaggagataaatctagagaaggagcaaaaggccaaatcatatcaaccacatgcaaagccctttaaaagaaattgtattatgtactctccttgcttcctgttttcccttagactaattttctcatcttctactacaaaacttattctactgactgtcatttcctgatttattttcctccaggcactacttctaagcacttctccctgtatgcacacaaccctgtccttatcacccaacagcaggcctttcattttggcttggactcctggttatgggttsagtgaggccaggctatttaactatactgctgcttgtcagggggtttatgaaatccttaatcaggggtttatgtaaatcagtgtaagttaacttctaaaacctttataaaactgtttttatttttttaagactaaatcacaggtcaaaagtttaatcagtcaacacaactctaaactagctttaaaaaagaatatattcatcttactgaaaaatccaaatgtagatcattacctgtcattgctagctctggggctcaaaaaatgtgagcagaactttggctgtgactccctccttgtgttttggttcttctttatcatgtgctg

SEQ ID NO: 513326 - DNA, 604 bp, Homo sapiens
ggtaggagataaatctagagaaggagcaaaaggccaaatcatatcaaccacatgcaaagccctttaaaagaaattgtattatgtactctccttgcttcctgttttcccttagactaattttctcatcttctactacaaaacttattctactgactgtcatttcctgatttattttcctccaggcactacttctaagcacttctccctgtatgcacacaaccctgtccttatcacccaacagcaggcctttcattttggcttggactcctggttatgggttcagtgaggccaggctatttaactatactgctgcttgtcagggggtttatgaaatccttaatcaggrgtttatgtaaatcagtgtaagttaacttctaaaacctttataaaactgtttttatttttttaagactaaatcacaggtcaaaagtttaatcagtcaacacaactctaaactagctttaaaaaagaatatattcatcttactgaaaaatccaaatgtagatcattacctgtcattgctagctctggggctcaaaaaatgtgagcagaactttggctgtgactccctccttgtgttttggttcttctttatcatgtgctg

SEQ ID NO: 513327 - DNA, 505 bp, Homo sapiens
cagcccaataagttaaagattatctcagtagttagacatatgcttttagcttaaaggaaattcacktaaccgtcactgctatagatctttcacaaccgaatgacacacgtacccctccttcaccatttcaccctgtaccatccccttcttagatcaaaaaattgtactcaataaattgtcaggcagccagagctctgggccttttgcagccttccctccagcaactggccccctggacctactttaaatcttaacttgtcttttctcattcctttgttgccaccagactttgggtacccgcaggtagtgttgaggctggaccccaacaaaagggatgataatggactgtagtaatgcagttttgaggactgaggtcagaggagagagatacagatggacatctctgaagagcatgaaatgtacagacatgtgtacctcatattaacactgattaaagagaattcagaaaaggatattaattaatatacccaattctgtgcacatc

SEQ ID NO: 513328 - DNA, 505 bp, Homo sapiens
cagcccaataagttaaagattatctcagtagttagacatatgcttttagcttaaaggaaattcacttaaccgtcactgctatagatctttcacaaccgaatgacacacgtacccctccttcaccatttcaccctgtaccatccccttcttagatcaaaarattgtactcaataaattgtcaggcagccagagctctgggccttttgcagccttccctccagcaactggccccctggacctactttaaatcttaacttgtcttttctcattcctttgttgccaccagactttgggtacccgcaggtagtgttgaggctggaccccaacaaaagggatgataatggactgtagtaatgcagttttgaggactgaggtcagaggagagagatacagatggacatctctgaagagcatgaaatgtacagacatgtgtacctcatattaacactgattaaagagaattcagaaaaggatattaattaatatacccaattctgtgcacatc

SEQ ID NO: 513329 - DNA, 505 bp, Homo sapiens
cagcccaataagttaaagattatctcagtagttagacatatgcttttagcttaaaggaaattcacttaaccgtcactgctatagatctttcacaaccgaatgacacacgtacccctccttcaccatttcaccctgtaccatccccttcttagatcaaaaaattgtactcaataaattgtcaggcagccagagctctgggccttttgcagccttccctccagcaactggccccctggacctactttaaatcttaacttgtcttttctcattcctttgttgccaccagactttgggtacccgcaggtagtgttgaggctggaccccaacaaaagggatgataatggactgtagtaatgcagttttgaggactgaggtcagaggasagagatacagatggacatctctgaagagcatgaaatgtacagacatgtgtacctcatattaacactgattaaagagaattcagaaaaggatattaattaatatacccaattctgtgcacatc

SEQ ID NO: 513330 - DNA, 604 bp, Homo sapiens
ctggctgagccctgcccccacccctaagacaccacctcatgattggtctcagctaaaaagtcacttcctccaaggtcatctcccattcccagggccactcacacctgatgacttgtcagtgtagaggtatagaggcctggctctggccccaattttgggtagctgtgcagggccatcttagtctctgggctcctggaggggttgactcactaggcctttgttgtcatcacagcctgacttcctctgcttccttcactcrcccacaggctcttcccaaaaatactcctaaatgaatttcatgcctgcacaactttatctcagcatctgctgaactgtgacagcaacatccagaaagcacagtctaatcctcactgaatgaggggaagttgaagggtgagtgtgcgagagatttgggtgggtacacagagccaaactatatcacatgagttatacctaatcagttattatttgtatattagtaaattattatagtttgtatttagttgcacccatcaacttactaaattctcttattgttagagtagtttatcacttcctgggctgtggtaatggattgcagagcatgggtgcttgctcttgtgac

SEQ ID NO: 513331 - DNA, 604 bp, Homo sapiens
ctggctgagccctgcccccacccctaagacaccacctcatgattggtctcagctaaaaagtcacttcctccaaggtcatctcccattcccagggccactcacacctgatgacttgtcagtgtagaggtatagaggcctggctctggccccaattttgggtagctgtgcagggccatcttagtctctgggctcctggaggggttgactcactaggcctttgttgtcatcacagcctgacttcctctgcttccttcactcgcccacaggctcttcccaaaaatactcctaaatgaatttcatgcctgcacaactttatctcagcatctgctgaactgtgacagcracatccagaaagcacagtctaatcctcactgaatgaggggaagttgaagggtgagtgtgcgagagatttgggtgggtacacagagccaaactatatcacatgagttatacctaatcagttattatttgtatattagtaaattattatagtttgtatttagttgcacccatcaacttactaaattctcttattgttagagtagtttatcacttcctgggctgtggtaatggattgcagagcatgggtgcttgctcttgtgac

SEQ ID NO: 513332 - DNA, 604 bp, Homo sapiens
ctggctgagccctgcccccacccctaagacaccacctcatgattggtctcagctaaaaagtcacttcctccaaggtcatctcccattcccagggccactcacacctgatgacttgtcagtgtagaggtatagaggcctggctctggccccaattttgggtagctgtgcagggccatcttagtctctgggctcctggaggggttgactcactaggcctttgttgtcatcacagcctgacttcctctgcttccttcactcgcccacaggctcttcccaaaaatactcctaaatgaatttcatgcctgcacaactttatctcagcatctgctgaactgtgacagcaacatccagaaagcacagtctaatcctcactgartgaggggaagttgaagggtgagtgtgcgagagatttgggtgggtacacagagccaaactatatcacatgagttatacctaatcagttattatttgtatattagtaaattattatagtttgtatttagttgcacccatcaacttactaaattctcttattgttagagtagtttatcacttcctgggctgtggtaatggattgcagagcatgggtgcttgctcttgtgac

SEQ ID NO: 513333 - DNA, 381 bp, Homo sapiens
gagaattggacaatgagaacacatggacacagtaaggggaacatcacacaccggggactgttgtrcattgggggaaggggggaggaatagcattaagagatatacctaattaaaaaggttattcctacccccttccacattatattgaaaggtagaaaaagtcaatttaataaacattttaaaaccccacatattcagaatattggatacgttataaatgatcaaatatgggcataaggatatttagagtaccccatcagttttaaaaaatacatttatactgatttctggcattcaatttatgttctttaaatatctaaaagactcatttctaaatcttctagctcctggagaagggctatctctttttgaattttcccc

SEQ ID NO: 513334 - DNA, 381 bp, Homo sapiens
gagaattggacaatgagaacacatggacacagtaaggggaacatcacacaccggggactgttgtacattgggggaaggggggaggaatagcattargagatatacctaattaaaaaggttattcctacccccttccacattatattgaaaggtagaaaaagtcaatttaataaacattttaaaaccccacatattcagaatattggatacgttataaatgatcaaatatgggcataaggatatttagagtaccccatcagttttaaaaaatacatttatactgatttctggcattcaatttatgttctttaaatatctaaaagactcatttctaaatcttctagctcctggagaagggctatctctttttgaattttcccc

SEQ ID NO: 513335 - DNA, 495 bp, Homo sapiens
ctgccttcagtggcttccaggctgctagttttcatagtgattttagttttttggttttcaaggttactgcagagtgggggtaatgagaaaggggcaggttgaaacatgacagaactcactattcttactatttttcttgaatgaacactctctatattacttcaagcgttgggttgatacacagagttctgaaaaacaaaaataaaaacaaaaacaaaaaacaaagagttgattctgactattttttgacagtgttctctatttttgtggagatttttggagggcattattctgctattcccactgacatcatctcacaattatatttgtcttataawtatatagcattatggttgcagtgtgaaaggtaatttgagagaagcaagccttgaaacaggttcaatccaaagaagaagttgcaacaatccagtccagaaatgatggtgaccataactcaagtagagataaggaaaaaaaaaagtggatgctccagag

SEQ ID NO: 513336 - DNA, 495 bp, Homo sapiens
ctgccttcagtggcttccaggctgctagttttcatagtgattttagttttttggttttcaaggttactgcagagtgggggtaatgagaaaggggcaggttgaaacatgacagaactcactattcttactatttttcttgaatgaacactctctatattacttcaagcgttgggttgatacacagagttctgaaaaacaaaaataaaaacaaaaacaaaaaacaaagagttgattctgactattttttgacagtgttctctatttttgtggagatttttggagggcattattctgctattcccactgacatcatctcacaattatatttgtcttataaatatatagcattatggttgcagtgtgaaaggtaatttgagagaagcaagccttgaaacaggttcaatccaaagaagmagttgcaacaatccagtccagaaatgatggtgaccataactcaagtagagataaggaaaaaaaaaagtggatgctccagag

SEQ ID NO: 513337 - DNA, 649 bp, Homo sapiens
tggttgtctaagagttgtctgttagggcatttcttacccacatattccagaaataccaggattttgtccatttcctggaatttctcatcactttccctattgttcaaatactttcctccactttactgactgccagagtcctgatcatcttacatagctgagtggaaatattttctcctcgtgtcacattctctgattactcttgtctctgtgcctgtctagcactgtgtttataggtcattgagcaaacacactcatccaatcaactcttgcatgtgctgagtaccatggttataagatgtgtattgttctgttggcctgtttgcttttttttgtttaaatcatgacattgtaagctccacaaataaatggaatataccttccagtgtgtaccatagtttgggatgagcagtaggtrtttagtaaacctttgtaattcaaactgagctgaaatgaatcagaacctggacaataagagagtcaccttgtgcctcctgtaaaagatcaaattctgtagatgtggaatacagtataaaatgcacttaatgctaaagcactactgaacataatttaatctttcttgggtgattcaaaggctctccaggatcttatagcgttggagggtcattaatgtgagcatcagttctca

SEQ ID NO: 513338 - DNA, 633 bp, Homo sapiens
gttgtctaagagttgtctgttagggcatttcttacccacatattccagaaataccaggattttgtccatttcctggaatttctcatcactttccctattgttcaaatactttcctccactttactgactgccagagtcctgatcatcttacatagctgagtggaaatattttctcctcgtgtcacattctctgattactcttgtctctgtgcctgtctagcactgtgtttataggtcattgagcaaacacactcatccaatcaactcttgcatgtgctgagtaccatggttataagatgtgtattgttctgttggcctgtttgcttttttttgtttaaatcatgacattgtaagctccacaaataaatggaatataccttccagtgtgtaccatagtttgggatgagcagtaggtatttagtaaacctttgtaattcaaactgagctgaaatgaatcagaacctggacaataagagagtcaccttgtgcctccygtaaaagatcaaattctgtagatgtggaatacagtataaaatgcacttaatgctaaagcactactgaacataatttaatctttcttgggtgattcaaaggctctccaggatcttatagcgttggagggtcattaatgtg

SEQ ID NO: 513339 - DNA, 535 bp, Homo sapiens
tgttaatataattgcacttcccatctttctctacatttttaatgcaccttaaacaaaagcattgtctccttgataatctctcagcttctttactctgacttttaygatttattaaaatatttgagaaacaatatgcctgataattagaatcaacaataaaatatatatatgtcgtggtttccaagaaccctggagcatggtgtggggtgggaggtgggggatggcagggacctagaaaggtcattgaggcagtgaggtagtgattcacttaagtcccacaactggttagtatcgttagtcattcactcaagaccaggactcaggtttcctgactcacatcaaaccacactagctcctcgaatgtcctttaaattttctcctagtaaggaatgatacaagcaaataaatcaacaaacttatataatttcacatatttaactggtggggcaagatgatccaaagtaataatcatgatatgatgtcaactgtggaaagctatcaggagggaattaccaatgaagtgcctgagatggtg

SEQ ID NO: 513340 - DNA, 631 bp, Homo sapiens
agtatatttagctttcaaacatgacttctcctaatatcttctacacagctctttcagatgaaaaaaaaattggctaactgggtaaagggtgatacctttataagctctatttttttaatccctgaggaagtgaaccatgttatgagtcacatacatcgtgtttaggtaggtgaggaaatgcattgaactgatttgcagagaatgagagctccagacccagacagtgagacttcagaacttcataratgtcaaagcatctttgacatctatgtcccagctctaggacacattcatgataggttcacttacttccaaacccaaagaggatattcttagacacttcctagtttcttcatcttgtaaaagtggttaagtggcttgtccaaggtcttttggctataaattgtagacaaggattcagagccaagtgttctgtccccaagaatgcttttgtctcttttttttaaatagtaacatcatgaggacatctcaggtcatggctggggagtgctttgtgctctgtaagggactaggaaattgttcacatacttcttcaatattgttcctgctgtgctttttataggataacacattttaactctgtcctcactaccaagactttatataaaat

SEQ ID NO: 513341 - DNA, 579 bp, Homo sapiens
gaattctactcaaatcttagcaaaatgaatccagtgatatgtgaagagatcagtatcttacagtaaagttgggcttattaatggagaatgtttggtttaaaaattgaatattaatttttaataaaggagacaaaccatatggtcatctcagtagatagatgtrgagtctaagaatagatagaaagtgatccgatctgatcctgtaaggctttctaccaaagacctacactaacattatattaaatgtttttccccatccttgccagcatagcacatatttagttaaaattttgatattttattccacatagatttcttgcattaatttattttttcaattattacattaccagtattatttatcttgattactcagtttattggtgttctttctcctaaattttgtgcctgagatggtattccattgtgtcaccttactcctggccctggcatcagggaaacacaaattaaaaccaccattaaatgttgcttttcattcaccagtatgagtaaacaggggaaaaaccaagtgctggctatgatgcagagcaatggggattttcattcactcttccacgt

SEQ ID NO: 513342 - DNA, 579 bp, Homo sapiens
gaattctactcaaatcttagcaaaatgaatccagtgatatgtgaagagatcagtatcttacagtaaagttgggcttattaatggagaatgtttggtttaaaaattgaatattaatttttaataaaggagacaaaccatatggtcatctcagtagatagatgtggagtctaagaatagatagaaagtgatccgatctgatcctgtaaggctttctaccaaagacctacactaacattatattaaatgtttttccccatccttgccagcatagcacatatttagttaaaattttgatattttattccacatagatttcttgcattaatttattttttcaattattacattaccagtattatttatcttgattactcagtttattggtgttctttctcctaaattttgtgcctgagatggtattccattgtgtcaccttactcctggccctggcatcagggaaacacaaatwaaaaccaccattaaatgttgcttttcattcaccagtatgagtaaacaggggaaaaaccaagtgctggctatgatgcagagcaatggggattttcattcactcttccacgt

SEQ ID NO: 513343 - DNA, 631 bp, Homo sapiens
tgtgcaagttaaagctgttctgaatggcattaatgtatgcagtcattcagccaatggaaatgcgtggaagttttaaccttgatgtgggataaaggcttcgtggaatgagcagtaccctgcacaaccccgcggccrtcccgatttcctcaaacacgtgacatgggatgaagggagcacaaacatactgactttatccttctttaggtttttccctaaagaagtattgatgctaccatcagtaatggaaaattacattgctaatatttaaggtctcttcagccattaaattaaaaagtctgattacttcaccaggatgatttctgagatctcatctcatatcgtcctgaatacacacacacacacacacacacgcacacacacacacatctcagaaatcatcctaatcaaatatagactttatatatatcaaatatatatatacatgtagaaatacatataggtatgtatctttaagtccttgcttgtgaacaatgcttttaaatgtttttaaaatactgtatgccaaaataggttttctcttaatgctttacttcctaatggatgtgatttgcagatttgtagggcacttggattagggttctctgagtttgccctgccttataatgtagat

SEQ ID NO: 513344 - DNA, 631 bp, Homo sapiens
tgtgcaagttaaagctgttctgaatggcattaatgtatgcagtcattcagccaatggaaatgcgtggaagttttaaccttgatgtgggataaaggcttcgtggaatgagcagtaccctgcacaaccccgcggccgtcccgatttcctcaaacacgtgacatgggatgaagggagcacaaacatactgactttatccttctttaggtttttccctaaagaagtattgatgctaccatcagtaatggaaaattacattgctaatatttaaggtctcttcagccattaaattaaaaagtctgattacttcaccaggatgatttctgagatctcatctcatatcgtcctgaatacacacacacacacacacacacgcacacacacacacatctcagaaatcatcctaatcaaatatagactttatatatatcaaatatatatatacatgtagaaatacatatrggtatgtatctttaagtccttgcttgtgaacaatgcttttaaatgtttttaaaatactgtatgccaaaataggttttctcttaatgctttacttcctaatggatgtgatttgcagatttgtagggcacttggattagggttctctgagtttgccctgccttataatgtagat

SEQ ID NO: 513345 - DNA, 559 bp, Homo sapiens
cacagggctccataggtgttagttctgtaagacctcttgactctcatttttgtaatttagatcaatcactttaacaggtattttagtcaatctatcaatgaggaaagacatgttgtgattttccaaaaagaaaaatagtatttacttttgggtttgcatgatgaaagacrtgatcttggagctttcaaacaatgggataaaattttaagagaaatttgacaatagaagacatagatttggctccttctctgccctcaaaactctccatgcctgctgggcacagtggctcatgcctgtaatctcagcactctgggaggccaaggtgggagggtcacttgagctcaggagttcaaggcctgcctgggcaacatagtggaccccatttctacaaaaaattttttttaatttttttttttattatactttaagttctgggatacatgtgcagaatgtgcaggtttgttacataggcacacatgtgccatggtggtttgctgcacccatcaacccatcatctacattaggtatttctcctaatgctatccctcccctagccccc

SEQ ID NO: 513346 - DNA, 609 bp, Homo sapiens
cttcaaatacttggaggacttaggtgtgaataatggcaacattttaacttaggtagcatctcacaatttccaaagcgcctttatttttattatttaatttgatgcttatattggctttgtgaggtagacctttataaaacggtaagctgttttataaaggaggaaactcaagctcaaagagattaacttcattttgctctaagtaggatggtggttaagtggagatgttgggacwagaatgcaggcctcttgaattatatttagtgttctttcaatgacataagacatcctgtgcttttgtagaaagtgaactaagggccaatggtagtgaagcagaaggcagtgaattcaatataaaaatttttcaaaaacactggcaagaactttccgataatggaagggccagccccccaaagttgtcaacttttccagtggaaattagataatcgtccttcagggatattgtagcaaagattccagtatggaaagacactggacaatcttactggtttccataactgttattttatttgtattagactgagaaagaaacaaacatataaatatgctggcaacctgctgtgttttcattaatcagtttgctaacta

SEQ ID NO: 513347 - DNA, 382 bp, Homo sapiens
agtcaaaacaacagtctatggtcgtagtgggacagtaaggcaaccaaaagccccttggtgtctcatgctctctatgtccctcaaggttaagtaatagggcacaaaaggaggctccgtggcaggatttctgagattcataaccaccacccgactgcacccttcttcaactcccaggccctttgmagagagggttattccatccagcacggccaactgctctcttcttccggcacctacgtcagtatcttgtactcaatgacttcttcaaaacttttccagtaatttttttcttctttttgataatctaagctttgtgcaattactctagttgggggttttgtgtatgtgggttgttttaaaagataacttgtattgcttttta

SEQ ID NO: 513348 - DNA, 625 bp, Homo sapiens
ctgtgacacattgatttaaaatttacacaaagacttaaatgtctactgtaaaattcctcttctgagtggagattttaaaaaggatgttgtattcgtcagggttctcattcaattctacagcccccaagatccttaggatgatatttgagcccccagggctaagctggggaaggggcgaggtggaggaagaccaacaggagctaacatcagggctcttgcatacgtaagtgtccctggttcctccactttcacactactgaatgtggycccaggacagagggaatggtatcccacagagtttgtgaattgaggcatttctagtagctcaaatgtaaaaagaaaggatgagctatacagtctaagaattccaagatttggggtagagaatgcagagcaggcaggagaagcatcttatcaacagcaaagttctgtttgcagaataataaaaataattaacacttagtatgtgctcactgtgtgcctagcagtgctctaaaggcttatttcctttaatcctcacaataaccatacaagtatttggtagtcttctcctcatttaaaagttgagaaaatggatgaacagagaagtaactggctgaaaattgcacagccagtaagtattaat

SEQ ID NO: 513349 - DNA, 531 bp, Homo sapiens
gtgattaatattattatcctcagttatgtgccagccttggtggatataaacagtaataagacatagaaaatttatagtctagaagaraggatcaacaataaacatgtgaatagatatgactaaatctgcttagtgcaataataaaatttgaaaagtgctttgagaacataaatgactgtgttggcatggaagaatccattaaaaatgaaaataatcagccacctaaatcaaatcaagttctgatagtcatttattgtttttcaatactgtggttactaagattcctccttttcttggcaactgaaacttgcaactctcaaggctcaggcctgtgacctcttctattctgtggcttattcctaggtgatctcatccattccacttgtgatactcatttcacatctctaagcccaacatcatactgaactgcaagtgcctgtgacatctcacactgattgtgtctacatccaaattctccctccacagccccctaatccttctctcacagtgttccccatactggaaatagca

SEQ ID NO: 513350 - DNA, 528 bp, Homo sapiens
ggtagaaattaccatctgtctagaaaatagagttggagaagagaatgaagctgataatgtgcctgaaatcttttttctggcttctattccagtctgagagtcaggaaaagaagagatctctaataaaatgcttctaatgtttgggtcatttttaccacaacatcagtaatggaagagaaagtcaaaagaatgaggctccaggccaggcgcagtgactcacacctgtaatcccaacactttgggaggccaaggcaggcggatcacaaggtcaaaagattgagaccatcctggctaacatggtaaaaccccgtctctaataaaaatacaaaaattagctgggcatggtgccacatgcctgtagtctcagctactcaggaggctgaggcaggagaatcgcttgaaccccrggggcagagcttgcagtgagccgagatcacaccactgcactccagcctagtgacagagtgagactccatctcaaaaaaaaaaaaaaaaaaaaagaatgaggctccaagatgagcacctgag

SEQ ID NO: 513351 - DNA, 530 bp, Homo sapiens
ttgatattcaggttttctttaaccctgagatgtggccatggcacacaaatgtaaacattttcaaatcagtcccaggtggtaggcttctagatttttgttttttacctttgaaatcggttcaagacaatgccattatggaaagcctctgcagaagaaactatttttattgtaccaattgcctttctaaaatctgtcaaatcttttaagtttctcccttgacctttttggaagcttaaacaggaactgaatcatcataaaatttttgaaatttgccttgaatctactttggagctgcatgaattgagatctcttggtaactgaccttgtgttgacccagakaggcctgttgcagtgtacggcatgtacaccgcacacctgccaccacccctgctgcagcaatgtttgcgagcctgaagagttttgtgtggggagttatgacagaagtcagccaagtgtaggtaatgatgtcaggtagcatgggaggttggagcgcaggaagaggcaggggggggatctttaagcaaggaacc

SEQ ID NO: 513352 - DNA, 472 bp, Homo sapiens
tgcacacactcagggtgcctaatcggggtttcaaggcttgcatgacaaaggcattagtattcttctctatcgttttagcacagcatttaaatgagctataaagtaaataatgagttctagggtaaggagtgagagtcctagcttcagaagcctttgtggaactgatctgaagctctgagggatccaggtgaatagcgcgaagaatcaatcagaaatggggtctstagtagagagatatttgggtcagaggttattagaaagactgattaggatagacaggaaagggcaaatttaaatataccaacccatatatttttaattggtttcctagtcctgagactagatcagttcagttaaatagctgtttaccatatcaggaagtggcagtgcagatgggctaggcttctgtatgtgatgacagcaaacaagcttttaataggaggcatttctgtggaaacagaagaaaaacaaa

SEQ ID NO: 513353 - DNA, 474 bp, Homo sapiens
attttgaattaaaggcccttagagatcaacagatgctaaaagaarcctttcccctatctacataaagactggacaggcccaccaaggagaacaattgcttttccttcctctatcccctctcagtcctctacctgtcccaaagcacaggatgaggttattctcatatctaccaaagaaggaaacaattacttctggtcccttctcggagtttccattgactgaactcacatcacaggatggaagactaaagtctgacaacaaacctggacagacttttgtcccaaatgactgtccactctgtaggcctgaccgactttgtcccagaccattgtatgttcttcaagtccattgaatttccttaaaaatcatttactatctgcctaaaatcacccacacctccccattctctttcccctaagatgtagggcatataagcatctgtaccccgttgggagactgggcactcactctgtg

SEQ ID NO: 513354 - DNA, 613 bp, Homo sapiens
ctagaagaaaccatgattgatttgtttctcaaaatgtaaaatacatgacatatttttctaagtgacctaaaaaaaatacaactatgggccaggtgtggtggctcacacctgtaatcctagcactttgggagacaggggcaggaggatcgcttgagcccaggagttcaagaccagtctaagcattatagtgagaccctgtctctaaaaacaaaacaaaacaactataatccttttgctcattaacatatatagccagcatcctttcatgtcctcttctttctaggggttatcaagttgtagtttcaaaygcaagcatagatgtatttttatataccttacgttttatgcatctgagttttgaaacatagtcaatgttactgcaacatgtaaagatccattttacactaactaatgtctctttaaagggctggcatttcactttgcatacatcttctacagagtgaactataccataggagaccatcatctgtggccatcaacagtcagatagtcacacaattaaacagacattgataactgatgatttggtttgattgtcatttatttcttttaaataaactccctctaaatgcaggaagtaagtataatgaga

SEQ ID NO: 513355 - DNA, 441 bp, Homo sapiens
ttgcactccagcctggggacagagcaagactccatctcaaaaaacaaaacaaaaaaaaagcaaacaaaaacaaaaacaaaaagccacgtaaaagaagaagaagaaactctacctaaagaaagtgtaagcacctgtgcacattttataaatctaggtctctgtctcttagctattattttggagaatgaaaaaaacactcgagccttccttggaaaatgtctggcattagcactgtaagctgtcgctgaatgagaggaattatgtttctaaatactgtgtcatacagcatttcccttgtgaagatgcagccttggtttcacatgacataatcttaatasaagtgaggtactagaattttacattgcaattacaaacatgtcttctttagataattttcatttaactcacagattgttcttgaatcaagactggtactattaa

SEQ ID NO: 513356 - DNA, 626 bp, Homo sapiens
gagcctagtgagatgttacagctcaagagtgaaaccctgggcttaatagaacaaggaagtccagagggtgggtggtgatgcaagtgaatgtccccctatgctcttgccagctctgatgacacataagtcccctgtcccatgcaaaggggcatatttttggaggaacatggacaaactacagtatattcacatgtggctgttggcaagtggtgaacaaatgataatgaaactagaggcatagcttctttaattatttgaccttatgctatggaaaagacttttatcttcagaagacccagtctgactaagggcataagggcttggacgcagtggtatggtagaatgtcttctggaagtctttgaaagtgagattgatactcatcttcctgttccatgtggtttctgcagcagcwgagagttggtcccaagtatctgaggagcagccacagggctctggaattttattcattacactgcaactgtgggctttgggaataggatgctctgaacactcaggcctggggtcagaagaactgatgcgtgggccccaccacgaattccgagttaattagtagtgaatgaggccaggacacaaactccctgagtgagtctaacatactgccaag

SEQ ID NO: 513357 - DNA, 676 bp, Homo sapiens
ttagctgtctaaatgtactctttttgaatgtattagctattctttaagccacttaatgaagaaactaatattattcattaccaaaattgaatccttaytaagtgcctcagggtacagggaccaaaaaaagaaggcattaattgaagtatataaaatagggaattgaagtactatgtaaaataggaaatcgagttttttaaagtagcgtccttcagatgccattccagattaaatgtagatttagaaggataggtgcatttcatgaaacagaactacagtttcaatatttggtaacaaacacacaaaaagcaaaatttttgagtggatttgtgagggatgtcctttgcatgaatctgatacaattgtaagcagagactgagggacaacaggagccacttcctacacccctgcccccacttttgggtagaaaataatttgacctgctccaaaaaggtaactgcttctatccttaattttcataatgctacattaggattaagcactaaaatccaaatttgaaaattatagtaaaatgtaaagtataacttactctttaaaaataaacacgaagttttcattggtctcattattacctctgagctaaataagtgttgcacagcgctttatcattttcaaagtgctttcacatttgaaatttgatccttctaacaatcca

SEQ ID NO: 513358 - DNA, 676 bp, Homo sapiens
ttagctgtctaaatgtactctttttgaatgtattagctattctttaagccacttaatgaagaaactaatattattcattaccaaaattgaatccttattaagtgcctcagggtacagggaccaaaaaaagaaggcattaattgaagtatataaaatagggaattgaagtactatgtamaataggaaatcgagttttttaaagtagcgtccttcagatgccattccagattaaatgtagatttagaaggataggtgcatttcatgaaacagaactacagtttcaatatttggtaacaaacacacaaaaagcaaaatttttgagtggatttgtgagggatgtcctttgcatgaatctgatacaattgtaagcagagactgagggacaacaggagccacttcctacacccctgcccccacttttgggtagaaaataatttgacctgctccaaaaaggtaactgcttctatccttaattttcataatgctacattaggattaagcactaaaatccaaatttgaaaattatagtaaaatgtaaagtataacttactctttaaaaataaacacgaagttttcattggtctcattattacctctgagctaaataagtgttgcacagcgctttatcattttcaaagtgctttcacatttgaaatttgatccttctaacaatcca

SEQ ID NO: 513359 - DNA, 552 bp, Homo sapiens
acccacacacgctcattcccacactttgacaaggtgctcaactgctgctgggttgcagccttgtctgtttcctcacgacttactagacaatcagaggccacacatctcgctttttttttttcagtacagaagccgtgtatgcacaaaacaacacaaatcatgaccttttagaggttagaatctctgaggaattaaagtcaccaaaaaaggacccattgttccaaaaacaactgggaaaaggaaaacgcatttgtggcaccagacaatgtgctatttatataaggaattcaatttctttttttctacacccttcccccaatgaaatatatccgastgaaatttaatttatttcttcctaggcactaggagtatcccctggaaatgaaagatctaattaagtgatggtctctgtaactcaaaagacaagttttggaaagagttcaaagaaaaaattgaaaaagataatgaaaggtttgggtgatgagatgatgatgaaaggctaaggaaatccaaattctttgttctgaaaagccgagatctgagaggtccctg

SEQ ID NO: 513360 - DNA, 558 bp, Homo sapiens
aactcagcattttgggaggccaaagcgggcagatcatttgaggtcaggagtttgtgaccagtctggccaacattgtgaaacccatgtatattaaaaatacaaaaattagccgagcatggtggtgtgtgcctgtaatcccacctacttgggaggccaaggcaggagaatcrtttgaacccaggaggcagaggttgcagtgagccaagattgcgccactgcactccagcctgggtgacagagcaagactccatctcaaaaaaataaattaaataaataaataaataaatgtatagagcgtgctaagatcagtgactggcccatagcaagtatataggtatacatataagtataaaagtgtttgacattatttttatttgacccaacacattttgcacctagtaatttatcctagatattcgtgtgcagttttgaaatcacatctgtacaaaattgttcatttcagccttatttgtaatagcaaaagattggaagccacccaaatatctgtcatttggggagtaaataagttatggtacatccatacggtagagtacactg

SEQ ID NO: 513361 - DNA, 543 bp, Homo sapiens
tctcccacaggcacagaaaggaagactccagatgtgtgggtcagcctcatgggttttctgtcttgctgtcttgttcctggctttgcttttagcctcctcatttgaaactgctgcatgcctcggcctaccttcaaggacctgtgtttgagttaagctttcagatgctgtyttttggactgacctctattgatccaacccaagttccctcagggaaattcagagaaggtccctcagggaaatccagacaatttgcttataattcctagctgcttcctacattttagctcttagaagctagaactagctctcatacattgtttttctaacacaaggcttaataaagtgccctgccaagagtatcactcaatacatcttggttgagtgaagcaataaatgaatattcccagctcagcataaacacatgcttcaaagaacttggtaatcagccagtcactgtactgacttcaaactactagccatcacggaccccaaagtacgagaatgaattacctttcggaccatttgtacgaagtccttggagtt

SEQ ID NO: 513362 - DNA, 453 bp, Homo sapiens
cagttattgtaccccatttatttatcttatcttactgaattagctaagtctgttggctcaacattgaacagtcatggtgagattgggcaccatgattcttctgtctttaatgaaaggctactagtgtttgttaatcaaatatgaggttttctataggtttgtggtagatgtcttttgtgatgttaaggaagatttcttctattaatctgagttaaagcttattatatggaagtgttaaataaatgctttttccagaatccagatgatcatttgagttttctctttaacttatatgttaatttggtggatatagygacttacattattacttacctgaattcactcttggaaggaaaagaatcctcttgggtagtaatgaattgtgtcatattacttttatgtgatttcttagtattttatttagttgtatgacattaagttgtaagtgaaatt

SEQ ID NO: 513363 - DNA, 641 bp, Homo sapiens
tatcttacattaaactcctaagaataatgacattatgtgattctttttcatagccyttatagctcctagcagaatgcccagtaatgctgctgaagaaatgagttttcaggtattaaagttatttgtagatggtgcatatttttacaacaaaaacaaacaaaaaatgacttacataatgataaacactggtatttagtaatgtgtatgtaagtattttcccgtaaagaaaaatattttcccatatattggtaaaaattcctatccatatttatttttgtctgcttttaacgattactatctaactggtagaagctcttcaggagactttttctgaaaagtggaacaaagtgttacattgaagcagtaaagtaaagtgactaatactgactggagtgaaaaagagggttggaagagtcacttttttacatacagtttctcttctttctgtttccgtatctcttatctccctcttaccattcctggggaggtgctgcatagttatcaacatgcttaacagacagtgaactgtgaaggaagaattatgggtaaagacatttgtttgacttcccagtgtactcccaactccaaagtgacaaactggaacaaaaagcttatgggacagtaaattatgactgtagcag

SEQ ID NO: 513364 - DNA, 641 bp, Homo sapiens
tatcttacattaaactcctaagaataatgacattatgtgattctttttcatagcctttatagctcctagcagaatgcccagtaatgctgctgaagaaatgagttttcaggtattaaagttatttgtagatggtgcatatttttacaacaaaaacaaacaaaaaatgacttacataatgataaacactggtatttagtaatgtgtatgtaagtattttcccgtaaagaaaaatattttcccatatattggtaaaaattcctatccatatttatttttgtctgcttttaacgattactatctaactggtagaagctcttcaggagactttttctgaaaagtggaacaaagtgttacattgaagcagtaaagtaaagtgactaatactgactggagtgaaaaagagggttgraagagtcacttttttacatacagtttctcttctttctgtttccgtatctcttatctccctcttaccattcctggggaggtgctgcatagttatcaacatgcttaacagacagtgaactgtgaaggaagaattatgggtaaagacatttgtttgacttcccagtgtactcccaactccaaagtgacaaactggaacaaaaagcttatgggacagtaaattatgactgtagcag

SEQ ID NO: 513365 - DNA, 609 bp, Homo sapiens
tccttacaaattactctgaaataactgtatcagaagtttgtcatcaaggtcattacaaactataggattttcaagagtccctcttaactgactstctctcacttcttgcctacctcctttaaccagagacactgccttttttcacataattggagatacctggcaaaattaagtacagccttggaaggctatgatgggaagtatatatgctccttgtggaaagtaaaagtggactaggagtaaagacctaggttctagtccccgttttccaaatatctcacagaataaccctcagccagtatttttatctctctggagttcaatttattttccttgtacaatatataatgagcagatttcaattagattagataaactctgaacctgtcctatattttatatatctataccaacatttatactgaaataggctttttcggcaagaataaatttttgctttgaatggggtacagaaggcttagaagagtgtgctagggaaataagctgacttggtaattgaaagggaaaagagaaagaatgagagaagggcctgccactgaggaggacagagtctgatgacaatgaaaaacaaactttatgcttttactt

SEQ ID NO: 513366 - DNA, 610 bp, Homo sapiens
aagcataaataaacattcttgttatgatagtatctgctaagttaaaaatacccttttctagtaatgtcaaaatagaattattttgtagacagaatattargtaggcatgtataaaccctgaactattcacatatactttaagtgtgcaaaaatgttcctattagaagtagaatgtgaataagggttttctgcactaggaacttacaccctctgtagacgcacaaatggtattctcctctaatataaacaataattgaagctacctggtatagctatatacatatatagctatgctgtgatggaaagagcaccacactaggattaagaagcctagaaattttccacttacaagaggacagacagaattaccgcaccaacaaattacaattaaaatatgttaaactgtaactgttaagttcaggaaaattgcccacaaaagtgatgaaactgctaaaacaattttccagtgttaaaaaatgcaatttgttcacatttggtcaaaattcaattaattccattctatgaaaatagttgataccactttgttccataataaatcctctcaaaacaatttttctcccgacacacattttcctaaagtactatctat

SEQ ID NO: 513367 - DNA, 610 bp, Homo sapiens
aagcataaataaacattcttgttatgatagtatctgctaagttaaaaatacccttttctagtaatgtcaaaatagaattattttgtagacagaatattaggtaggcatgtataaaccctgaactattcacatatactttaagtgtgcaaaaatgttcctattagaagtagaatgtgaataarggttttctgcactaggaacttacaccctctgtagacgcacaaatggtattctcctctaatataaacaataattgaagctacctggtatagctatatacatatatagctatgctgtgatggaaagagcaccacactaggattaagaagcctagaaattttccacttacaagaggacagacagaattaccgcaccaacaaattacaattaaaatatgttaaactgtaactgttaagttcaggaaaattgcccacaaaagtgatgaaactgctaaaacaattttccagtgttaaaaaatgcaatttgttcacatttggtcaaaattcaattaattccattctatgaaaatagttgataccactttgttccataataaatcctctcaaaacaatttttctcccgacacacattttcctaaagtactatctat

SEQ ID NO: 513368 - DNA, 654 bp, Homo sapiens
actgctgtcttttcatctaaattactctcatttgcaaagctcatgtcttgtaacgataaaatctcagatttttcctctcgattttcaataacgaaaccacactgattaaaactcatagatgtatcctctcattctaaaggctgtatgttatttttgggtaggcatcattataacagcaaacagataaatggcaccaaaaagacacatatcagaggatgccaaaagcgggagtagtcaatctattcaaccacaaatgattcacctcattcttctgcgaactcatctattgcatatacagtccttaaaaagtgccatgtgattagcgggctatttgatttctattcaatgacaaaagctacttgcttctgcatttttaaaaggcttcctgtattttaagaatcctttccagaataaaacattatttcctccccccccccccccgcaacacaccctttwtccattctgaaagttaacatgctttgaaataagcgaattcaactcggaaactgcagcggtaaacccgaacccgctcgcgtcccagacctcgccttccagctaacatacctgttctctggaaatacaaggcaacgacggtctcctgaatattttgcaactgccatagtaactggctgcagtttctcctaacgacacgca

SEQ ID NO: 513369 - DNA, 610 bp, Homo sapiens
atcccttactatgagttaatccacgatactcctccttcctaatggagtaaagcttcctctcaagtccactgagctgtggttatcaataatccactccttccttcaacaactacttgagctgtaagtcacaccagataaaagaacaaaggttcttttatcactctcttcccttactttccaagayacttgaggtgtcccctctaaataaagtaacagaattccacagccacagaaataagattatggtatgaatttacagtattttcaatgagtgatgatactcattcctaactcctcactactgattataatcacaatgtgtaatgagaaattttactgatatgaatatggtaatataaatataatgtgagagcagaaaaaggtattgggtataccgaaatatccacttgtatttcaattatgaatatagacgggtttcactagaattacttaccaggtgggcttattctaccattactactattctgtctttgaagatgttctttatagcatactgaacacatgccatttgtacgagggtttccataaaatccacagccagtggaacaaagcataggcacttggctgtgattagtttcttgagccatgt

SEQ ID NO: 513370 - DNA, 479 bp, Homo sapiens
cagagagaaccttggttgggccataggtacttattactataattattattattttttgtttgcttgttttttgagattcagtcttgctcttgtcatccaggctggagtgcagtggcacgatctcagctckctgcaacgtccgcgtcctgggttcaagtgattctcctgcctcagcctcccaagtagctgggactacaggtgcccgccaccacactcagctaatttttgtatttttagtagagatggggtttcaccatgttggccaggatggtctcgatgtcctgaccttgtgatctgcccgcctcagcctcccaaagtgctgggattacaggcgtgagccaccgcgcccggctaggtacttgctaagtgtgaacaggtttcgccaattatcttccatcatcaccctctccccaactggctgccgtttccacctgtgatagatcagtgttacacatgtgcattttccagaactcccagct

SEQ ID NO: 513371 - DNA, 475 bp, Homo sapiens
cagagagaaccttggttgggccataggtacttattactataattattattattttttgtttgcttgttttttgagattcagtcttgctcttgtcatccaggctggagtgcagtggcacgatctcagctctctgcaacgtccgcgtcctgggttcaagtgattctcctgcctcagcctcccaagtagctgggactacaggtgcccgccaccacactcagctaatttttgtatttttagtagagatggggtttcaccatgttggccaggatggtctcgatgtcctgaccttgtgatctgcccgcctcagcctcccaaagtgctgggattacaggcgtgagccaccgcgcccggctaggtacttgctaagtgtgaacaggtttcgccaattatcttccatcatcaccctctccccaactggctgccgtttccacctrtgatagatcagtgttacacatgtgcattttccagaactccc

SEQ ID NO: 513372 - DNA, 590 bp, Homo sapiens
atcagtaatttcatacggtttaacttagtagatgcgccagctcaggcagacagttctgcaggattgcaggaagcagagacgarcagagattaatagaggagtgatagtctcatgaacaacaaccatttcatcagagccttgaaaaaataaagccctcaacagtgaagaaaagaagggcaagaaggtaaatatcctagagacaaggacagcacaagcagtcaaaaagttctacaaactcacagcaggtgtggagaatagcaaatagagcagtagatagttcatgaaagcagggggatcacaaaaaaaaaagggggtagaatacggaggacttaaaagaccagattaaatacactagaatttattctacagtcaatggcaagttagtaaagtgtttagacaaaggactgacatgactaaatctattttggaaagataaccttgataaaaatatggaggatttgttggttgtgggaggtatcagaggcaggagaatgacctacaagggtttcttaattggggtctgtgaatttcttaaaatggttgcaatattgtgtatgtgcacacacatttgtacatacacacatcttttt

SEQ ID NO: 513373 - DNA, 532 bp, Homo sapiens
gccctcatcagcctggcctcctgacaggcattctccaatggacaagattttctcttgctcccagcctgttcatttcttctggaccctctgggaaacaactctgcctggaggcagatggcagggctaagcagccccaattaccacatggctggggcctattgggccagtcctctttccccttcccagtggggagaygacacaagactctgcaagagagatgggaccccagaagacagaaaggatgcaagtggttgagtgctaaggtggtaagtccaggccctgaagccatctaggcagacacaacatctgacacttacactgctctttctgtgcattttcacaagcaagagaggcagaacaggtaccaccatcatgcacagatgccgaaactggggcactgccaggtaaggaacctgcccagggtcacagagcctgttagttacagtacgaactctcactggggcctgcttcagagaccagtgctaggtcaaaaccaaacgtaaacatgtttttcttgttacttttcatgttt

SEQ ID NO: 513374 - DNA, 587 bp, Homo sapiens
tgagggtccctgtagtcacagttacttgggaggctgaggcaggaggattctttcagcccaggattttgaggctgcagtgagctatgactgtgcctgtgactggctgctgcactccagcctgagccatagagagaggccatgtcttaaaaaaaaaagtaggtcaatactagatatacaaaaccaaattaccagatactaccagtttgaaartatagtaaaaaaagatcaaaacacaaactataaaataagtaataacataacaataaccataatgagaaatatgtaggacctatttagagaaaattggaaaattttgtgagaaatataaaaagtaagatttggataaatgcttagtacatgtcatgggctcggtggtaaagactaaaacctgttagataaacagtttttccccaaataatctgtaagttcaacataaattttccaaagttcatctgaaaaaacaaacaggaaagaacaacaaagaaaattttgcagaagagtcctgcagggggactggccctatcagatgccacaacatgtaagccgtgtggcacagacagaaggacaggcaagcagaacaatggaac

SEQ ID NO: 513375 - DNA, 601 bp, Homo sapiens
accaccaggacaggctaatttttttattcgtgtgtgtatatgtagaggcagggtctccctgtattgcccaggctgggctcgaacccctgggctcaagygatcctcctgccttggccactgaaagtactgagattacaaggtgtgagccaccacccacagtctaataaatcttaatgttgtactatttgaatcctgtcaagatgtcttaactagctaagaaatagttagaaagggtatctgatagaatgtagctctgctgtggttcttagctttttggctggaaaaaggagtgtgacatttccaaagctgcctttgagtaaatgcttacctcaaacttgagaaatgtgttcacctgtaaacctgcctttttaagaatttttttctttcttgcagggtaacgccatcctctgaaaatcctaatggtgctacttctagtgtcagccaaggaaaaccctctttaagacgaattaaagggagattacacagaagcaaaagccttgatagcatggatttctgtgagctcactgtaagtggactgatcaatgcttttctcatttttccaaagagtatgaaagtttttattttattattttcataaaaa

SEQ ID NO: 513376 - DNA, 535 bp, Homo sapiens
aggtttctgtaacatttcttagtataaacgttctgtttctactgccggctattgttttgcaaggaaaatgggtgttagatatcaatttagatttgaggaggtgagtaaaagttcaaactatttttccagataaggtattttctcctgtggtttttaatagtacaaataaacaaatatcacgttgccttttagagtgttttctgatttcaatgcagatacgcagtcctctgtggagcataaatctggatcagcctagaaactctgcttagactgagataagtgatgaagacttaaagaataattaaaattaaaagctaagttggtttcccrcctctgcctccaacaacttaactgatggatgggttccatgtgaagtcctggaagggtttagctaccctattcttcagagacccaggttctaatctgcagactccagcttggcccgagtgcataaagacattctgcttggtgggtaggatgccccgctcacctcaaaatcctgtgtgagcatggtatgagaattggggtttccagg

SEQ ID NO: 513377 - DNA, 535 bp, Homo sapiens
aggtttctgtaacatttcttagtataaacgttctgtttctactgccggctattgttttgcaaggaaaatgggtgttagatatcaatttagatttgaggaggtgagtaaaagttcaaactatttttccagataaggtattttctcctgtggtttttaatagtacaaataaacaaatatcacgttgccttttagagtgttttctgatttcaatgcagatacgcagtcctctgtggagcataaatctggatcagcctagaaactctgcttagactgagataagtgatgaagacttaaagaataattaaaattaaaagctaagttggtttcccacctctgcctccaacaacttaactgatggatgggttccatgtgaagtcctggaagggtttagctaccctattcttcagagacccaggttctaatctgcagactccagcttggccckagtgcataaagacattctgcttggtgggtaggatgccccgctcacctcaaaatcctgtgtgagcatggtatgagaattggggtttccagg

SEQ ID NO: 513378 - DNA, 535 bp, Homo sapiens
aggtttctgtaacatttcttagtataaacgttctgtttctactgccggctattgttttgcaaggaaaatgggtgttagatatcaatttagatttgaggaggtgagtaaaagttcaaactatttttccagataaggtattttctcctgtggtttttaatagtacaaataaacaaatatcacgttgccttttagagtgttttctgatttcaatgcagatacgcagtcctctgtggagcataaatctggatcagcctagaaactctgcttagactgagataagtgatgaagacttaaagaataattaaaattaaaagctaagttggtttcccacctctgcctccaacaacttaactgatggatgggttccatgtgaagtcctggaagggtttagctaccctattcttcagagacccaggttctaatctgcagactccagcttggcccgagtgcayaaagacattctgcttggtgggtaggatgccccgctcacctcaaaatcctgtgtgagcatggtatgagaattggggtttccagg

SEQ ID NO: 513379 - DNA, 635 bp, Homo sapiens
ttccatgaagtaaaccaggaaattattcatgcccttttatagtcttattttagaaaacatgttaattggtgcattaatgtcaccaagtcatcctcctcaaataaatgatagtttttacttgtcctgtctcagcatgtataaaatggttggctctggtttggcaattgtgataattagtggtttggggaaagcataagtgatggaagtttgagtatatgtattataaattcattaatgtatccatttctgtgtactttatgcaaaagtttataaatgtcaaaaacattattgaatatttcccatagagattaaactgcccactgttctacaagtaatcgaggtgtatggctaaattgttgggtaggattttcagctcttataataactgttgactcttccacttgcatttttgtaaagcatgtggttacatgcatagtatggttctcagaatacagtaaatatccactcagtatctgttgaaacaataatagtaacagaataagggcccttcatagtgaggttaaatgagatataaacacctagcatagtgattgtgcagcagtamtgagcttcagtttgcatattggcagttcatgatgctgtcagagtacacaggcaaagtgtgtggttgtcca

SEQ ID NO: 513380 - DNA, 649 bp, Homo sapiens
ctgggcacactgagaggcgtggggaggccactcataggagacaggccttcaacaataaacaggatgtcaacaagcacactaaggcactcggtaagatattttacatgcagaattgtgtgaaaagacatacgtgggtatttcttcaaggaaataagaatggagcacagaagtggcaagagtaaatgcataggctgttttctacatgtatcaaagtattcaatatatttaattatcacaataagccaatcaagtggtactgttatgcccattttacagatgaagactaagccaaagagaaattatatgcaatggccaatgtcatagaattaattagatagaaaacaatactcaaattgtcacttgtcttattgtaaaaacatatctactttttatctattaatttattccaaaactatataatcagttcctatgtaggcacctgtatgttgtggtgaaataaacagtcmtaatttctgacatcatgaggctattagtctcctatctacactgtacctgacatctgatcttaactaattatttttaaattttgtatttgtgaacacctcattttatttaatgtggatactatgtattctggattgaggaaaagtcgaaggatttgctgaggctctagctaggtaggttccat

SEQ ID NO: 513381 - DNA, 629 bp, Homo sapiens
ccaggaataacctcttttttttgtatgtttgcacgtgtgtgtgtcagagagagagagagtgtgtgtgtgtgtgtgtgtgtaaaatgtatttttaaggtacccaagagattctgatgatctgccaagtgtgggaatttctgagcaaggagaaatttacaacaaatcaaataatctttggagagctcagaaaggtatggaatgggagatgttctgttagaagagcctccttacagaatgtgttttttgtttttttcaaaatcatatttcgaatggtatctttaccaactcctgttgtttcccgattcacattttcagttatcgtttctggaaaaggcattttcattctcataagccaggattattgtaaaaatcaactctcttttcctctctgtcagcgaatcactattctaaggaaggaatggagagactggtcaggctaaagaaagtaaaataacagagaaaggatttttcacaagacaaggcgtcagtgagtaaacagaaagcattgctacctacttgcaacgatttgtctgcttattgttctgtgcmtactatctcaacttcttacactctctaaagggtctaatgtcatctgaccctggacttgatccagcctcctcttaggccag

SEQ ID NO: 513382 - DNA, 629 bp, Homo sapiens
ccaggaataacctcttttttttgtatgtttgcacgtgtgtgtgtcagagagagagagagtgtgtgtgtgtgtgtgtgtgtaaaatgtatttttaaggtacccaagagattctgatgatctgccaagtgtgggaatttctgagcaaggagaaatttacaacaaatcaaataatctttggagagctcagaaaggtatggaatgggagatgttctgttagaagagcctccttacagaatgtgttttttgtttttttcaaaatcatatttcgaatggtatctttaccaactcctgttgtttcccgattcacattttcagttatcgtttctggaaaaggcattttcattctcataagccaggattattgtaaaaatcaactctcttttcctctctgtcagcgaatcactattctaaggaaggaatggagagactggtcaggctaaagaaagtaaaataacagagaaaggatttttcacaagacaaggcgtcagtgagtaaacagaaagcattgctacctacttgcaacgatttgtctgcttattgttctgtgcatactatctcaacytcttacactctctaaagggtctaatgtcatctgaccctggacttgatccagcctcctcttaggccag

SEQ ID NO: 513383 - DNA, 634 bp, Homo sapiens
aagactttttgaatatttcctatggtagaaaataattcaaattgtaatttttgtataaaaaaatcttcatgagcatgtaccattgtcctaaagaagcaggtgttacaagtacttgattgtgggtagcctttatttttatcaagaaaaagttttctcttagagcttgcgattactgaatgtctagtatgtgaggggcattatctgtggagctgaatgaactatactaaaataatacattgtttcaaggactaatgaaataatcacatttggttttgtcttctttagatttaagatttttttagacatgattattaagacttttttttcttcatttggtcaacactagactaaatcacaaaaataaacatttggaaatacaagaaaccagtgtaaagtacagtacaatttcaatagaacatgctaatcctgagtaattgttgaagacatatttttgtgaaatggtaaaacatttctgctccttttatatttgactcgtactttcatctctygtcccgggtggtcacacataccttcacatgaccaaaacctatctattgagaaatttttatatatattcagattctaaatgaacctttcttaaattcacctattgtaatttgttaattctgttgcc

SEQ ID NO: 513384 - DNA, 634 bp, Homo sapiens
aagactttttgaatatttcctatggtagaaaataattcaaattgtaatttttgtataaaaaaatcttcatgagcatgtaccattgtcctaaagaagcaggtgttacaagtacttgattgtgggtagcctttatttttatcaagaaaaagttttctcttagagcttgcgattactgaatgtctagtatgtgaggggcattatctgtggagctgaatgaactatactaaaataatacattgtttcaaggactaatgaaataatcacatttggttttgtcttctttagatttaagatttttttagacatgattattaagacttttttttcttcatttggtcaacactagactaaatcacaaaaataaacatttggaaatacaagaaaccagtgtaaagtacagtacaatttcaatagaacatgctaatcctgagtaattgttgaagacatatttttgtgaaatggtaaaacatttctgctccttttatatttgactcgtactttcatctctcgtcccgggtrgtcacacataccttcacatgaccaaaacctatctattgagaaatttttatatatattcagattctaaatgaacctttcttaaattcacctattgtaatttgttaattctgttgcc

SEQ ID NO: 513385 - DNA, 612 bp, Homo sapiens
aattttttaagcctgagtttaattgggctgtccacaattattccagttctgttctctttctggtataatgattatatttccctgtgcccactgaagttaggtgtgctcagataacctctttaaacagcaaaatgtgaagataattaacttstgacatttacttgtagaagttttacaaaccggaattttattcatcatacccccttgtttcctgccttgaccattatgtggatcaagttggagccagaatcagcatgagtttctgtgtgacaacagtgacagaggcctctggcagcggcagctggacatgtggtgtgagccagcttaagctgtcctatgccgactaaattaatttgccttcgcatggtttactccttcatgagagccctttctttctcagattatggaagaatcctgatatttactttatgttcaatatgtctaaaaattctgctggttattagcatctctataactttacagtgagaagaaagcctttccatattagctaatttgactgtgttcctggaagccagcatgtaaactactagtcattcagtttacagttttaagtgcattgctaataaaagccataatacatgcatatttata

SEQ ID NO: 513386 - DNA, 612 bp, Homo sapiens
aattttttaagcctgagtttaattgggctgtccacaattattccagttctgttctctttctggtataatgattatatttccctgtgcccactgaagttaggtgtgctcagataacctctttaaacagcaaaatgtgaagataattaacttgtgacatttacttgtagaagttttacaaaccggaattttattcatcatacccccttgtttcctgccttgaccattatgtggatcaagttggagccagaatcagcatgagtttctgtgtgacaacagtgacagaggcctctggcagcggcagctggacatgtggtgtgagccagcttaagctgtcctatgccgactaaattaatttgccttcrcatggtttactccttcatgagagccctttctttctcagattatggaagaatcctgatatttactttatgttcaatatgtctaaaaattctgctggttattagcatctctataactttacagtgagaagaaagcctttccatattagctaatttgactgtgttcctggaagccagcatgtaaactactagtcattcagtttacagttttaagtgcattgctaataaaagccataatacatgcatatttata

SEQ ID NO: 513387 - DNA, 612 bp, Homo sapiens
aattttttaagcctgagtttaattgggctgtccacaattattccagttctgttctctttctggtataatgattatatttccctgtgcccactgaagttaggtgtgctcagataacctctttaaacagcaaaatgtgaagataattaacttgtgacatttacttgtagaagttttacaaaccggaattttattcatcatacccccttgtttcctgccttgaccattatgtggatcaagttggagccagaatcagcatgagtttctgtgtgacaacagtgacagaggcctctggcagcggcagctggacatgtggtgtgagccagcttaagctgtcctatgccgactaaattaatttgccttcgcatggtttactccttcatgagagccctttctttctcagattatggaagaatcctgatatttactttatgttcaatatgtctaaaaattctgctggttattagcatctctataactttacagtgagaagaaagcctttccatattagctaatttgactgtgttcctggaagccagcatgtaaactactagtcattcagtttacagttttaartgcattgctaataaaagccataatacatgcatatttata

SEQ ID NO: 513388 - DNA, 560 bp, Homo sapiens
tatcacaaatatgtaaaattagaatgccctgggaaaaggatgtaaaggaagaggaattccagcaaatacaaawactcatgtagtatttatagacacattttccataaactatattaaaaatccaagaaaacggttttgaacttacacattttttctctcactcagggctttaaaactttcttctataacttcattctttcttaacttccagccacacaatcaatctggatgccacccctacacaactgttcctttacattctatgctgctgtcatgagatgtattttattaaatgacacaaaggtctggtattttgtgaaatgatgctaattcgctaagactctccattagggttctaaaagcaggtagaaacttgtcacgtgaaaatgatccttacctctatgaatatgctttttaattaatgttctattaactggctgacaataactcacgagcttagtgaacagatctgaatgtaattaaacatttattaagtggcccagatccctgttacaattatagcctatctacccttcacataggttggagcaggaaaggga

SEQ ID NO: 513389 - DNA, 611 bp, Homo sapiens
aggggcaaggaagtggacttcactcctgagtaggagctgcaacattgcatggcaaagggtgtggacacacagaggagagaagaattggggacaatcaygtgtagggtcaaagggcctgttttggcctcatggggaaagcagggcttccccataattcttgagtcaccatggcaggcccacttcacctagaactgagctccaccttggtgctttggcttcggaatagctaagctgcttttctgacccttgcagatcttggatgaggtggaaaaaagacgaggcatctctcctgccctggttcagccactcatgagaagtgtcatggaagcccctttcccagccctgggcaaaaccatccttgtcaagaacttcctgccaggttcaggaactgaggtgagttgtcagactccttccttctccctggggaggcagtggcccagacagccgagtctccgtgctcagaggggctgcctttcagtgagcagtccaattccttggtgtcttctccccacccctagagctggcccagatcactcatcatgagttccaccctcaatccatccagcctaggactctgcccaatgcggcaagcccaagaactatgctatggc

SEQ ID NO: 513390 - DNA, 636 bp, Homo sapiens
ggtgtttcttagtgataagtgaatttctattgaagaaaatttgaaagagagattcacagctttctttcaccactttctatgcaaaaaaaaaaaaagccataccctatccaatcagacattggaatgtgcttttcactgctgtaacactgtaccaccactctacattgtgaggctctatttatagaaatagctagtatttattaagcactcactctataccaagctctctgctaggggctttatatgtgttatctagtgcaatcctcaaaataagcagaagagtgcatcaggatgcttattttttaaagagacgacagttttttaaaaattatttatttttcagcttttattatgggtttagtgggaacatgtggactgttacacaggtatattgcatgctgctgaggttcatagtatgaatgaatctgtctcccaggtggtgagcatagcacccagtaggtagtttttcagccccttgactccttctctctctccttcctcttgtatttcccagtgtctattgttctcatctttatgtccatgkgtacttgatgttcagctcccacttataaatgagaacatgcagtatttggttatctgtttctgtattagttcacttaggataatggcctccag

SEQ ID NO: 513391 - DNA, 622 bp, Homo sapiens
ttcatcctgatcctcattttcttgcttcatcctatgcatagcctattcttcactttcagtcaatttatgttttcacagggttattcatcaaatagacaaattaaaactccggcaagtccctagtttcttcctcctcattatatcaaagtactgctttccctatttctctgaacttttccctttagacagcttcrtatttcctattccctaatgtatagatgtagctatagatatatggaaatagatatatttaaacaagtctgacttcaaaggataatgctgattggtgtcacctttcaaaggtcagagttccacttgggaagatcctaagcgtggcattcatttgatgcatcctggtagtccaacatctggtcttccagaaacatcaaataatcctttcaacaaacatttgcgagggaacctctagtgccaggaaaagtactaaacattgatgataaaaggatgggtagttgaacaattcttctgatttaacaaagaatagtctgatctccagtgtccagcaaaaatgccattctaaaagaaaggagaaaagacccatagtgatccttccaaaagtattactaaaagcatggtgggggaaggagtataaaaataacagcgg

SEQ ID NO: 513392 - DNA, 608 bp, Homo sapiens
tggctgattcttcagtgggcaaaaccctcattttcagacaatctaaaggcctttcttatcagtagattctcctaagcatttatgagtgtaacaggatggaataggcctggggtagaaggtaagggtgctcaggactagtctgtgataaaaatggggttccaatggaaaaataaggcagcctatagtataaatgtgagcccgctgaggtctgctgtgtgattctctttaataacagagttgaraggtgttaatgagcatgacacagggcacacagccatcgagtgaattagtcatagcttgattcttttttgtgcctcgtctaatggcaaacattacccagcaatcacagcagtatcactcagatggagcagaaggtgtggaagggtgtaatgaggctgcctaaaaactgttttacagagccctgcaccaattcacaacagataatagaactcagagccagacagataatagaagcgacagccatttattgctaagagactgtctgaatatttgtgcataaagcagcccactccaagttctttaatcacatttcttgagaaagagtggcaaaatggaaagccacgtgtcaggctacttccattagtgtg

SEQ ID NO: 513393 - DNA, 646 bp, Homo sapiens
ctatccatattttgtcctagtgctaagttaacattctccatcagtgcagggtttggattatattcatcttttattctataaacatgaaactcaatgttatacatagaaattgctcaataaatatttaataaatgaataaatgaatactatttttatctaatttagtttaagggggtatatgtgcaggtttcttgcatgaatatattgcataatgctggggtttggacttccattgaacccatcaccaaaatagtgaacatagtactcaataggtaatttttcaacacttaccctccttcttctatccytcctcccttttggagaccccagtgtttattgtttccatctttgtgtccatttgcagctttttaaaagctttcacttataagtgaggacatgcaatatttgattttctgtttctgagttaattcacttaggataatggcgtccagctgcatccatgttgctagaaaggttgtgattcttttttatggctgcatagtattccatgatgcatatgtaccacattttgtttattcactctaccattgacaggcacctaggttgattctatgtctttgctattgaaaatagggctgcaataaacatgagtgcatgtgtatttttggtagaatgatttatattt

SEQ ID NO: 513394 - DNA, 638 bp, Homo sapiens
gtctttaagggttccatgagagagaagagagggttaaactggtgaagcacagtgkagttttaagggtggtgaacatatcctatatgatactttaatataggatacatgacactgcatttatcaaaacccattgaattttacagcacagagagtaaaccttaatatatgaaacttctttaatcatttagaaggtcagaagtcccagaatggaatgcaaaaatgtgacaaaacaacctcactatatgtataaaatgtatgatgtatgaaaaaacgtgtgaaataacaacactgagggagttgtggaaagaaacacaggcataaataactttggaaatgaagagaatctacaagactaaagtaaaagacacttatataagtacgatagtctagttgatagctttttcccataagagtatacattaacaattctgatgccactacgcatgtataatgaattgagcaattaagtaaatgagtggcagatggtgggagccaggttcctttctgatggagtaggagttcacagataagtaaggaaagaggctaaaatgatccaagtggtaatagattagaattggagatatgaactcatgcttagtttcttatagatatatatgcttctgtatataaatatctaa

SEQ ID NO: 513395 - DNA, 638 bp, Homo sapiens
gtctttaagggttccatgagagagaagagagggttaaactggtgaagcacagtgtagttttaagggtggtgaacatatcctatatgatactttaatataggatacatgacactgcatttatcaaaacccattgaattttacagcacagagagtaaaccttaatatatgaaacttctttaatcatttagaaggtcagaagtcccagaatggaatgcaaaaatgtgacaaaacaacctcactatatgtataaaatgtatgatgtatgaaaaaacgtgtgaaataayaacactgagggagttgtggaaagaaacacaggcataaataactttggaaatgaagagaatctacaagactaaagtaaaagacacttatataagtacgatagtctagttgatagctttttcccataagagtatacattaacaattctgatgccactacgcatgtataatgaattgagcaattaagtaaatgagtggcagatggtgggagccaggttcctttctgatggagtaggagttcacagataagtaaggaaagaggctaaaatgatccaagtggtaatagattagaattggagatatgaactcatgcttagtttcttatagatatatatgcttctgtatataaatatctaa

SEQ ID NO: 513396 - DNA, 538 bp, Homo sapiens
ataaacagtgcaaatatatactgcacgagggatcttaaaaatcatacgtatggtttgatccacaagctcmtatgagcgtgcaatgtcaacttttttcatgtttttttaagtccacttaaattctattttaagccaccatctgcctgtgctgttagggcagttagccctcaatcattttaagatgctcccctctaagtactgtgatagtgatagagatgtcaccagtcaagtgtcctaggaagccgactccgagttggagatttgcatgcaaggaggttgaaatgatattcccaacacctgtggaagagcgaaagcaataggattgggtggagcaggaagtcggctggaatgcaatcactatcatggccgcagtgcactctacagggatcttggtgagtttacctaatgacctcaaattggagcaagcaaacaaggccattatatttctgtaccaagcagttctgggatgtgggatgcctttataaggaacatggatttggatgaaggaactttactgtgctgtgagtattgttgacag

SEQ ID NO: 513397 - DNA, 488 bp, Homo sapiens
ttttttaagtccacttaaattctattttaagccaccatctgcctgtgctgttagggcagttagccctcaatcattttaagatgctcccctctaagtactgtgatagtgatagagatgtcaccagtcaagtgtcctaggaagcygactccgagttggagatttgcatgcaaggaggttgaaatgatattcccaacacctgtggaagagcgaaagcaataggattgggtggagcaggaagtcggctggaatgcaatcactatcatggccgcagtgcactctacagggatcttggtgagtttacctaatgacctcaaattggagcaagcaaacaaggccattatatttctgtaccaagcagttctgggatgtgggatgcctttataaggaacatggatttggatgaaggaactttactgtgctgtgagtattgttgacaggagtcagctgtcaacactcccaggagaaggggaattatgctttagtcactg

SEQ ID NO: 513398 - DNA, 488 bp, Homo sapiens
ttttttaagtccacttaaattctattttaagccaccatctgcctgtgctgttagggcagttagccctcaatcattttaagatgctcccctctaagtactgtgatagtgatagagatgtcaccagtcaagtgtcctaggaagccgactccgagttggagatttgcatgcmaggaggttgaaatgatattcccaacacctgtggaagagcgaaagcaataggattgggtggagcaggaagtcggctggaatgcaatcactatcatggccgcagtgcactctacagggatcttggtgagtttacctaatgacctcaaattggagcaagcaaacaaggccattatatttctgtaccaagcagttctgggatgtgggatgcctttataaggaacatggatttggatgaaggaactttactgtgctgtgagtattgttgacaggagtcagctgtcaacactcccaggagaaggggaattatgctttagtcactg

SEQ ID NO: 513399 - DNA, 488 bp, Homo sapiens
ttttttaagtccacttaaattctattttaagccaccatctgcctgtgctgttagggcagttagccctcaatcattttaagatgctcccctctaagtactgtgatagtgatagagatgtcaccagtcaagtgtcctaggaagccgactccgagttggagatttgcatgcaaggaggttgaaatgatattcccaacacctgtggaagarcgaaagcaataggattgggtggagcaggaagtcggctggaatgcaatcactatcatggccgcagtgcactctacagggatcttggtgagtttacctaatgacctcaaattggagcaagcaaacaaggccattatatttctgtaccaagcagttctgggatgtgggatgcctttataaggaacatggatttggatgaaggaactttactgtgctgtgagtattgttgacaggagtcagctgtcaacactcccaggagaaggggaattatgctttagtcactg

SEQ ID NO: 513400 - DNA, 488 bp, Homo sapiens
ttttttaagtccacttaaattctattttaagccaccatctgcctgtgctgttagggcagttagccctcaatcattttaagatgctcccctctaagtactgtgatagtgatagagatgtcaccagtcaagtgtcctaggaagccgactccgagttggagatttgcatgcaaggaggttgaaatgatattcccaacacctgtggaagagcgaaagcaataggattgggtggagcaggaagtcggctggaatgcaatcactatcatggccgcagtgcactctacagggawcttggtgagtttacctaatgacctcaaattggagcaagcaaacaaggccattatatttctgtaccaagcagttctgggatgtgggatgcctttataaggaacatggatttggatgaaggaactttactgtgctgtgagtattgttgacaggagtcagctgtcaacactcccaggagaaggggaattatgctttagtcactg

SEQ ID NO: 513401 - DNA, 463 bp, Homo sapiens
cattattacccaggctcttggaggcagccactcctcattgattatttgcacatgagataaacctctttgttttaccatattgaaggactaacagaatcacaaactgtaactcaagtgcttttccagtgaagagtgaaataggaaggaacgaaaataacatatatctacccccctcctcctcttcctttagcttggggtcatcattacctccatttctccrttttatttttgtttcctttttattggcaccacccaagtatgtgtgtgtgtgtgtgtgtgtgtgtgtgtgtgtgtgtgtgtttgatattaaaactttagggaaagaaacagctctcttaaaaatgtcagcaacttcaattcattgctttttaaatatcctggttaataatttacacccttggttaaaatattcaatcttctacttaatatatagtgcttagctttgtttttattttattttttg

SEQ ID NO: 513402 - DNA, 428 bp, Homo sapiens
caccttgttgaacagtcattgaccatatatgtgaggactaacttgtaggatctcaaatctgttctgttgtattggtctgaaagtctattggtcttattccagtaccacactctcttgattactgtagatttgtagtaggctgtgaaactgaaaaatgtgagttttccaatgttctttttcaagactgttttgtctgtcagatcctttgaatttttgtatgattttagaatgagtttctttgtttctgcaaaaatgcctttgggattttgayggtattgcattgaatctgtagagtactttagatggtattgtcatcttaacgatattgtcttacaacccgtgaacacagaatgtctttccacttatttccactctctttagttttttgcagcaatgttttgtgtataccaccatggttagatttatgc

SEQ ID NO: 513403 - DNA, 428 bp, Homo sapiens
caccttgttgaacagtcattgaccatatatgtgaggactaacttgtaggatctcaaatctgttctgttgtattggtctgaaagtctattggtcttattccagtaccacactctcttgattactgtagatttgtagtaggctgtgaaactgaaaaatgtgagttttccaatgttctttttcaagactgttttgtctgtcagatcctttgaatttttgtatgattttagaatgagtttctttgtttctgcaaaaatgcctttgggattttgacggtattgcattgaatctgtagaktactttagatggtattgtcatcttaacgatattgtcttacaacccgtgaacacagaatgtctttccacttatttccactctctttagttttttgcagcaatgttttgtgtataccaccatggttagatttatgc

SEQ ID NO: 513404 - DNA, 428 bp, Homo sapiens
caccttgttgaacagtcattgaccatatatgtgaggactaacttgtaggatctcaaatctgttctgttgtattggtctgaaagtctattggtcttattccagtaccacactctcttgattactgtagatttgtagtaggctgtgaaactgaaaaatgtgagttttccaatgttctttttcaagactgttttgtctgtcagatcctttgaatttttgtatgattttagaatgagtttctttgtttctgcaaaaatgcctttgggattttgacggtattgcattgaatctgtagagtactttagatggtattgtcatcttaacratattgtcttacaacccgtgaacacagaatgtctttccacttatttccactctctttagttttttgcagcaatgttttgtgtataccaccatggttagatttatgc

SEQ ID NO: 513405 - DNA, 422 bp, Homo sapiens
aaacccagctgaccatgatactttcaagggagtttttccactgaatttgattattttctcatttggcacttctttctgggttttttaakcagcccaaaaactctaggtgattttacttttgtaattgtattctcttgggaattcctgattcctcgtttcaccaaataggtgtgtaactttcttgtttctgcctataataattctggagtctttaaacaaaacgactgtgacttttcatgatgagtagaagataggttttactcatgctacaatcaatattaattccttgcagttcaaagacactgaggccctgtctaataatatagaagttgaacttggacttgggagatgactcctgcctctcatactctctgtggctctgctttctattattttactcataagcttgttttgtctccttg

SEQ ID NO: 513406 - DNA, 422 bp, Homo sapiens
aaacccagctgaccatgatactttcaagggagtttttccactgaatttgattattttctcatttggcacttctttctgggttttttaatcagcccaaaaactctaggtgattttacttttgtaattgtattctcttgggaattcctgattcctcgtttcaccaaataggtgtgkaactttcttgtttctgcctataataattctggagtctttaaacaaaacgactgtgacttttcatgatgagtagaagataggttttactcatgctacaatcaatattaattccttgcagttcaaagacactgaggccctgtctaataatatagaagttgaacttggacttgggagatgactcctgcctctcatactctctgtggctctgctttctattattttactcataagcttgttttgtctccttg

SEQ ID NO: 513407 - DNA, 422 bp, Homo sapiens
aaacccagctgaccatgatactttcaagggagtttttccactgaatttgattattttctcatttggcacttctttctgggttttttaatcagcccaaaaactctaggtgattttacttttgtaattgtattctcttgggaattcctgattcctcgtttcaccaaataggtgtgtaacyttcttgtttctgcctataataattctggagtctttaaacaaaacgactgtgacttttcatgatgagtagaagataggttttactcatgctacaatcaatattaattccttgcagttcaaagacactgaggccctgtctaataatatagaagttgaacttggacttgggagatgactcctgcctctcatactctctgtggctctgctttctattattttactcataagcttgttttgtctccttg

SEQ ID NO: 513408 - DNA, 608 bp, Homo sapiens
tgggttttgctttctgctgtgataggacagcactgggttgaatgcaaagtctcacagtcgctgctctttctctcttgcaagtgcacagattctttctctgtaccatgcagccactgccagggggatgggggaggagtggcatcggcgattcaagactgtctttactaccctcttcaatgcctctttcagtgatatgaagttcaaacgtggtaccgtgagtgctcgcctgatttttggttcttaggaaggtgctttttgggtgtagatagttgttaagtttggtgttcctgttgtgggggacaatcagtgtggagccttctattcagccatcttccattagagctcatttgtgatgggcaggtgggttagggggacagctcctcagcttcctggtctgatgatatttcctagtggttatcaaaagcctgatgttccaagaatctatccttggtttagacacggatttgggtaactgccayccttagtttcataagaatgtgttgtcatttacatctgaggttagaattcaagtaggtacaggaaattcctaaccaatttcctctcttaactggccaggtgaggtcaaataaatagggagatgaaaaaag

SEQ ID NO: 513409 - DNA, 547 bp, Homo sapiens
ggcacaagagcagcaaaggagaagaatgattcttggtttttaataatattatcaggagcatggatttggaatgatagaggactttgaagaaggctttcagaggacattatcttgtggagagtgaaagsagttctcctggtttggtttagctgtgttgctgatggaacttgcccttctagggtcggtgttgtctttaggttcccctgcaggtgggtgtgatcaaggagaatgttctagaaagaagagttccatagacagaatgtcaaggacaaaagtgttgcagagggatgacatagttcctggattttagcacagattttttcgctaacatgagggaatttattaggggaaaccttccagttgtagaggtagacagatgcgaacccatcatgttcagttcacatagcccagagccacagtgactcaacctcttccctgccccacctcagcacacctagggttacgtgccagtcatgaacagtggcttattacctctttgggtaggagatgggggtggagagtagggaagtctctcagaagcactcag

SEQ ID NO: 513410 - DNA, 545 bp, Homo sapiens
gcacccagctgactgggccccctttgattggttgtcgtgaatcttgtgctttttgaaaactggcctgtttggagatttgactatcatttctytcctgtttgcttggagggtccgatcttacaagtaaacagcttaggttttggtttggtgacgtggaacttttgcatgaatgactccatttgggttggtctgttggatcctagtgcaagagctcagtccaaatcagtggctccctatcaatttcacttaacaagacggaatgagaacatgaagaaggagtgcacatggtgtatgatttttggactgggatgaaaaggaatacttagcagcttactgaaggtagagagtttccaggtgtggcaacaaggtatggatgatgaacaatactataacagcactctctcaggaggggaggggcagagtttgggggccatctgggatacccagttggaaatgcccagtcggtggttggaaatttggcattcctgtggaaactcttttaagctaatgatatacctccaggtaggcatggacttagaatttgt

SEQ ID NO: 513411 - DNA, 465 bp, Homo sapiens
aaggcatcacagaaacaaacaaacaaatgaacaacaacaacaaaaataatcacaaaatctcagggaggtaggaatattaaagccagcttctgggcccagaatatgcatctatatcttattcatttgacttttactagtttgttttwgttttttaaaaactaagttgttacttttctggaaagtcttagttgacatcattgccattgcccttctaaaaaattctgtgaaaagtgtcttccttacatgtttttatgttttgattttaccataatttgtagggaaaataataataatagcaacagcaatcaacatgtattgttcaatacttcatgtatagcagtaagtactctatttgcactatttcatttaatgctggcaacaaccacttcttcggtgagactgccactcagttctctgtggagatgatagcaattcatgggactcagagtgtcccctgtgaggtga

SEQ ID NO: 513412 - DNA, 465 bp, Homo sapiens
aaggcatcacagaaacaaacaaacaaatgaacaacaacaacaaaaataatcacaaaatctcagggaggtaggaatattaaagccagcttctgggcccagaatatgcatctatatcttattcatttgacttttactagtttgttttagttttttaaaaactaagttgttacttttctggaaagtcttagttgacatcattgccattgcccttctaaaaaattctgtgaaaagtgtcttccttacatgtttttatgttttgattttaccataatttgtagggaaaataataataatagcaacagcaatcaacatgtattgttcaatacttcatgtatagcagtaagtactctatttgcactatttcatttaatgctggcaacaaccacttcttcggtgagactgccactcagttctctgtggagatkatagcaattcatgggactcagagtgtcccctgtgaggtga

SEQ ID NO: 513413 - DNA, 433 bp, Homo sapiens
aatttcatagaaaaaaaatttatttttttttaattttawttttttaattttttaattttttaaaggacatatcatttattcatacacatgctggaattattggtgcagacatttaaatacattttttttgagaaagtcctttttttttttttttttttgatggagtttccctcttgttgcccaggctggagtgcaatggtgcaatctcagctcacaacaacctttgcctcctgggttcaagcaattttcctgcctcagcctcccaagtagctgggattacaggcatgcaccaccacgcccagctaattttttttatttttagtaaaaacggggtttctccgtgttggtcaggctggtcttgaactcctgatctcaggtgatctgcccgccttggcctgccacagtgctgggattacagtcgtgagccaccaca

SEQ ID NO: 513414 - DNA, 433 bp, Homo sapiens
aatttcatagaaaaaaaatttatttttttttaattttaattttttaattttttaattttttaaaggacatatcatttattcatacacatgctggaattattggtgcagacatttaaatacattttttttgagaaagtcctttttttttttttttttttgatggagtttccctcttgttgcccaggctggagtgcaatggtgcaatctcagctcacaacaacctttgcctcctgggttcaagcaattytcctgcctcagcctcccaagtagctgggattacaggcatgcaccaccacgcccagctaattttttttatttttagtaaaaacggggtttctccgtgttggtcaggctggtcttgaactcctgatctcaggtgatctgcccgccttggcctgccacagtgctgggattacagtcgtgagccaccaca

SEQ ID NO: 513415 - DNA, 577 bp, Homo sapiens
gaggtctaccaaagagaatcacagtagatgacccggactttgggtgctgacagacctaatgagcagtaggaggtgtgatgcaattacttgtttgcttccaaggtagtttatgatgccaagactgtgagtgatactgaggggaggagagttacaggacttacaaaaaggagatggcatttctggggatccaacttgattattgctggagaggtagaggcctctgcagaggccatcttgctgtgaagtcacaggactcctaagatccctattatctccagcctakgcaggaggttagcaaaagctttaaatgcctagaatcgaagtgcctacttgtcttgtctctacttataaaagaagggggagtaccttctctgagtgtacataattaaaatcatagaaaaagagtgtttaaatacaaggtcattgagatgaatgccttattggtcatatatcagaagcctgaaattactaaagacaatcatgacaactctcgattcatagaatggatgtgattttcaaaagtggtgtagtgtattcatcctagctgagcagggctatagctaaaccaggccaggca

SEQ ID NO: 513416 - DNA, 604 bp, Homo sapiens
tgaaaataaactcaactatactaatcagttttgtaaaaaatgctgtcaattcagtgcatccaagcataaggatcagacggtatcatattatgttgttacgaactgaatgtttatatcctccttaattcctaatgtgatggtatttggagatggtgcttttgggaggcaactatgtcatcaggtggaactcttgtgatgaaattagtgcccttataagaagagacatgagagggtttgcttcccctctctctctccaccacgtgaggatataaaaagagaaccayatgcaaaccaggaagagtggcttcaccagacactggatctgacagtgccttgatcttgtaaatcccagtttttagaactgtgaaaaataaatttctattgtataagccccacagtccatggaattttttatataggagccaaaactgactaaggcacaggcctataattggacttttctctacatctccagatttgtctttcaggagcgttctaatcatggccttcactttctagtcctgcttttcccagaagggaagaggtgtttccaagggtgttctgcattctttgtctagaatgtcctttacatgttggtcttcct

SEQ ID NO: 513417 - DNA, 622 bp, Homo sapiens
actaatgatttccaattcaaacattttaagtctctttttctcttactgacatatttttttctcatctagcaatttttattgcccccagacctagtcttttgtgtccggtattttgcaagaactatcagaataatcaaacataaactttaagaaaaaagttgctttcttctactctctcctaatacctcctgcagggatataagagattgtctayttcttcattattttaacaaggcttcttttccttataacactaaggttgtataacgatcttccctaattttattccttggggctgaacaagtctgataactccatttccaaagtaagaaaaggaagccaaaatcatcaaccagctttctttttaccgaatgttctgtttttttaaagaagaaaacctttcctttggtagaaaatgccacttgattatgacaaacactcgtgaaacttctgtcttcttgaaaatagcgaatatcttaaaattcacaaaatttttcacagattagaagaaattagttggaataggtgtgctcttaaaggccaaactacctgagctccggctctgcttttcccgctgtctctccagcagcatcatgtggcggtcctgccaaaaactcacatt

SEQ ID NO: 513418 - DNA, 444 bp, Homo sapiens
tcacatttgccagctccttgatattggacttcccagcctccaaaattgtgagaaataaatttctgttgtatgtaagccacccagtttatgctttattatagcaactcaaagggactaaaataggacagacacataggtacacttcaggtaaggtgtcattaacaccaaaatctattctcatttatttattaccaatgagatatagataggtagtcatgttaattaaactgtttwagaataatataataaaactagaataatgaataagccaaatatggtttttaatttactatccacatctgtcattctttaattgtcctaccattttatagaaatgaatagttgaaaaaactgttaagcctgtaattttttccaccttaggaattcttaggaaacataaagcaatagacaaatctcttaagtatatatgctatatatcagtgt

SEQ ID NO: 513419 - DNA, 630 bp, Homo sapiens
agttatctgaatttcgtgtttgacttggttcagtagactaaatggaagatatcggaatataaaagaaagggtacatattatttataaacaacattttgttattttatctgtcttatagtaaaaggctgacagagatactgtatattcaatgactgaggaatcatgatttctaaatgtctggcagaaacctctttcatgcaattctaattttcattaactgtgttagagtgttggatttactggctcatggcacttggcttgaatgtttttgctgaagtttaattggattcaggcagtagaaactgtaagtcaaaacacagaaataaaatcacatgatatattattgataaagtccacaccacacatgaaaatatgaactgttccagtgaggaaaatttcatgttcaaaaaatttagaaattctattccaaagtgttcaaggtcattcatgattcaagtaggtatgccaagaactattatatctctatactatttcttaaacactacataygcatcctcaaaggagaaattactgaatgaataaataaaacacaaattattgtgtttaatgcgtcttttgatcagtcacacagctcccatttttgcttccacttaagaataatagcctcat

SEQ ID NO: 513420 - DNA, 562 bp, Homo sapiens
cttgaaacctgtcaaattaatcctaatacattaaacacacgctataaataataagtgctatgaaggaaaaaaatcggtttctagaaagagaataataggatgggaatcacttatttagattgtaatgtcaatcgaggcatttctaaggaaataaatctaagtcaggatctaaaatataagaatggagctgcagtatatgagcaggagaggaagggagagagcattctagaaataaagaacagcaagaagagtggcataggatgaggaaaaccagggactgtgtagaggctataggccrtcagaaagaatttgaattttatcctaaatgggaagggaagctagtgaaatattttaagcaagagatggcttattcttatcttactttttaaaaaataacactctagctgctctagaaaacaaatcagagatggacaagagtggaaacaaaacaaacaaaagacaggttatttgaacagactaggccagaaataatagtgatgtggaccacggagtgccatcagagatggagaaaatgtactccagataaatttaggaggtagaa

SEQ ID NO: 513421 - DNA, 635 bp, Homo sapiens
ttaagaatcagcaccttctggggttgggacattaggcctcggtggcatgggtttgtgagagggaacttccgatccgtgggttgcacagttctgtggaaaaagcatggtttccccagctaggtagcacactcactcactgcctcccttggctgggggaagggggctcctctgcccgtgtggctcttaggtggcctgccacaccacattgttcttccttctctctatgggtcattccagcctcctagtctgttctgatgagagaacctggataccctgattgctagtgaargattcacacgtttattatggtttttctgatgggagcctccgaaggccactgtttctagttggccatcttggccccaccctcccatttttcttattttcattttttttttttctgaggcaaaatggtgaaaagaggaacaaataataatggcacattacagaagccacaacacttctgcttgcatttttgtttgattttagttgaccctcgaggtaaaactgtctgtcatggggaagacatttaaaaaaaatgtatgattttgaaatttatatccaagaaaatatagcacttaaagattctcaatccatggtagtttccatgcccacctcaaacataatttgaaaga

SEQ ID NO: 513422 - DNA, 610 bp, Homo sapiens
tgtaattaacccttctctgagaagcttttcytgaccatcacaccatctattagcagtaggtagtgagtgggaaaaggggagacaagggaaggtgaggatcagatgtagagctggggagagtgtgggaaagatacgctttacattggaagagaaactataattttaatttagatcaacctagacttttttaagcattaaaatgaaaagtctggatcatgcacacttttttaaacatgaaaacataaaagtgataagaaaaaaaaatacctggaaccctctctccctctctctctctatatatatatgtgtgtgggtgggtgggtgggtgggtgggtgtgtatgcttgtgtgtgtgtgtgtgtgtataaatgaagcatatctctctctatatatacatatatgtatgtatatatatgaagaaggatatatctttatagatagatagataggatatttattcctctagggctaaagataaagattaggaaaaaattaatttgcttatacctcaaagagtctacctcagtaaagaaaaatagtccacacctcttgttggccactgcacacatagagccccagttgagtagaaactcaatatttgtcaagtcaat

SEQ ID NO: 513423 - DNA, 610 bp, Homo sapiens
tgtaattaacccttctctgagaagcttttccygaccatcacaccatctattagcagtaggtagtgagtgggaaaaggggagacaagggaaggtgaggatcagatgtagagctggggagagtgtgggaaagatacgctttacattggaagagaaactataattttaatttagatcaacctagacttttttaagcattaaaatgaaaagtctggatcatgcacacttttttaaacatgaaaacataaaagtgataagaaaaaaaaatacctggaaccctctctccctctctctctctatatatatatgtgtgtgggtgggtgggtgggtgggtgggtgtgtatgcttgtgtgtgtgtgtgtgtgtataaatgaagcatatctctctctatatatacatatatgtatgtatatatatgaagaaggatatatctttatagatagatagataggatatttattcctctagggctaaagataaagattaggaaaaaattaatttgcttatacctcaaagagtctacctcagtaaagaaaaatagtccacacctcttgttggccactgcacacatagagccccagttgagtagaaactcaatatttgtcaagtcaat

SEQ ID NO: 513424 - DNA, 610 bp, Homo sapiens
tgtaattaacccttctctgagaagcttttcctgaccatcacaccatctattagcagtaggtagtgagtgggaaaaggggagacaagggaaggtgaggatcagatgtagagctggggagagtgtgggaaagatacgctttacattggaagagaaactataattttaatttagatcaacctagacttttttaagcattaaaatgaaaagtctggatcatgcacacttttttaaacatgaaaacataaaagtgataagaaaaaaaaatacctggaaccctctctccctctctctctctatatatatatgtgtgtgkgtgggtgggtgggtgggtgggtgtgtatgcttgtgtgtgtgtgtgtgtgtataaatgaagcatatctctctctatatatacatatatgtatgtatatatatgaagaaggatatatctttatagatagatagataggatatttattcctctagggctaaagataaagattaggaaaaaattaatttgcttatacctcaaagagtctacctcagtaaagaaaaatagtccacacctcttgttggccactgcacacatagagccccagttgagtagaaactcaatatttgtcaagtcaat

SEQ ID NO: 513425 - DNA, 610 bp, Homo sapiens
tgtaattaacccttctctgagaagcttttcctgaccatcacaccatctattagcagtaggtagtgagtgggaaaaggggagacaagggaaggtgaggatcagatgtagagctggggagagtgtgggaaagatacgctttacattggaagagaaactataattttaatttagatcaacctagacttttttaagcattaaaatgaaaagtctggatcatgcacacttttttaaacatgaaaacataaaagtgataagaaaaaaaaatacctggaaccctctctccctctctctctctatatatatatgtgtgtgggtgggtgggtgggtgggtgggtgtgtatgcttgtgtgtgtgtgtgtgtgtataaatgaagcatatctctctctatatatacatatatgtatgtatatatatgaagaaggatatatctttatagatagatagataggatatttattcctctagggctaaagataaagattaggaaaaaattaatttgctyatacctcaaagagtctacctcagtaaagaaaaatagtccacacctcttgttggccactgcacacatagagccccagttgagtagaaactcaatatttgtcaagtcaat

SEQ ID NO: 513426 - DNA, 576 bp, Homo sapiens
ctctcctttcccaatttctttccttggttgtaasccactttatcctacagcaaaaaccctgactccaaagagcagcaatatgtttactcatttgctagattgtatactacacacacccacatatacacacacaatagctttagaatatacaaagtaatgttcaagacatttttctatttttttttctttctatctttggactgagcttatactatggaagtgcttagagtagtttattttgttcctacatgttgttatcatttggatatacagttagtttcatgtattttttgcttgttttaaatttatagttgttaccatcccactgattacatttatttttaaactaggcaaagcctttgcatggcttgaaaagacaaaacccttcagatacatacatatacacacacccagagtgaattgtgtgtatattcccccgttcttctttgggcccattctatagataataaactttattaattttttgtttattcatcatcttgtgttcttttttaaaagtaagcatatgtatgtgcacacacacacacactggaaatcactcatcagtttttaaaa

SEQ ID NO: 513427 - DNA, 429 bp, Homo sapiens
aattatttataaatcactacacaccaataaattagaaaacctagctaaaaatgtatactttgggraaaatattaactttcaagatagtgtaagaaaaaattgattaacaataattagtaaaatttatatataaattaaattttcttaaatatccccacactagtcagagttagtaatcaacttgtgcacaattttgagaaacattaaaatttccattatatattttataataaaaataaaaaagaaaattttccatttcatttttagtgtctattaaaatattggcttcaaatccacacattgagagtgtacgaaataagttaaaagtcctattcacatatgaaagtaaagtgatacagtgtatatatttgtctataagttaacaataactagcaatctattatataattataatccattcatataagt

SEQ ID NO: 513428 - DNA, 609 bp, Homo sapiens
gttaatagttgggccacagagctgagagacagggaggggtaatagcccttgttgcctcttaaagccatctatacgtcttgcgtttgccatgaacccattccagcttttcccaggttttgttccccaggcttcccatagatggcctaggtcagagtttttttaatctctattgcatcacaatcacctggggaactttggtaaaacatgaagactgagctccacctggactaactgaaccrgaatcactcgggtatggaactcagggaacctgtgcttcttaaaaactcatggagtaattctgatgcacagtgagggtggtgaaccacagttccagacagttttccataggtttgctgggcctttctgtaagcaagtggctgctgcttagaaaactgttcccaccccataccctatgcacaagcacacacacacacacgcacacacactgtctctcaagtatcagggctgtagtgtggtataactgagtcatgggcatgagcccctttcccaacctgcccaccaggtaagctcaggtcacgagagcaataactaccacatgtgcaggtcttcactgcttaccaagctttcttcagagatatgagtgccttt

SEQ ID NO: 513429 - DNA, 180 bp, Homo sapiens
tctgtttctaaaattatgaggtgaccctctagaccagtgctctttctctatctcctgactcctattatcagaagcataggtggaactgttgaagactgagcttcttagttttcctttccactgcctcttacccrcctgccagacacaatttgttcaaattggacaaggatgatgtagtat

SEQ ID NO: 513430 - DNA, 596 bp, Homo sapiens
  misc_feature (1)...(596): n = A,T,C or G
cccctctgagagtgtaataaaagctgtagattcacttccttcaaatccctatatggttatgcacataaattttgcatttattatcaggggttttatggacaacctgcatcctgtaatagcctatgggttytagttaaaatccttcatgtaaggtacaagcctctttttaaaaattttaaaatctgataaattctgaaaaatcaaaatgcttttctatattccaatgtttacacttgttcaaaggtaactatagtggatatctgctgcttttatctgcctagtacccattttatccttttcttctggtaacagtgcccaacacccttttacaagggtgtgcacgtgacccaggttgcatcaagaagaatattgttggaggccgaaagactgagggttgtgatcaactcagtataccactgggggctatataagtaaacagcaaactgttctcgtaaacgcagaatgttggcaaactgacaaactgggtatgccacccagaaggaatgctgagggcagtcacgacccangcacaagtgtttcttgtgactaggcacatatgaagcctattagtaatcatatgaacctatgatcaatta

SEQ ID NO: 513431 - DNA, 607 bp, Homo sapiens
gttacctcctcctccttgatcttgctacccaataaatacaaagggctgtagaagctcaggggctgcctttgctcactagaagcagagagctctcttcttcttcccctggaccctttccttaaaacagtttcttttgtcttttgttatcatttctgtgttcatcccttcattcagtcttgcaaatgacagtctcaggcagtaacagtagtaactgctgtaatgatggtctcaactagcagcagtggcrgttggccacagaatatctgatcttagaatagctaaagcatgagttaaaataaaaaagactaacatactaccaaatatgtaagaatctatgcatctgaatgagtaatttcttttccactgtaatcactttgggaaatttcattttaattatggctatgtcatggttcaaaatgtttttgaatttctcttctggaattgcctttaaaggaaatttgtagctataaaagaaagtcacattatcaaaacctttggttgaaagacttcagcaaaaaagaaatttattggcccatgtaactggaaagcatagttaggagctctgttttcaaacacaagtggatggagaaactcaaacagtacaatc

SEQ ID NO: 513432 - DNA, 607 bp, Homo sapiens
gttacctcctcctccttgatcttgctacccaataaatacaaagggctgtagaagctcaggggctgcctttgctcactagaagcagagagctctcttcttcttcccctggaccctttccttaaaacagtttcttttgtcttttgttatcatttctgtgttcatcccttcattcagtcttgcaaatgacagtctcaggcagtaacagtagtaactgctgtaatgatggtctcaactagcagcagtggcggttggccacagaatatctgatcttagaatagctaaagcatgagttaaaataaaaaagactaacatactrccaaatatgtaagaatctatgcatctgaatgagtaatttcttttccactgtaatcactttgggaaatttcattttaattatggctatgtcatggttcaaaatgtttttgaatttctcttctggaattgcctttaaaggaaatttgtagctataaaagaaagtcacattatcaaaacctttggttgaaagacttcagcaaaaaagaaatttattggcccatgtaactggaaagcatagttaggagctctgttttcaaacacaagtggatggagaaactcaaacagtacaatc

SEQ ID NO: 513433 - DNA, 556 bp, Homo sapiens
gccaagcatggaaatcacaatagaattttcagccagagaataatataataatggtaataataamaaatacaacactccgggtcaggaattatttgaagtgctttatataatattatctcatttagtccttacaataagtccataattacaattattattatcttacagaagagaaactgaggcacaagtgttatgtggtcaagatcatacagctaataggtggcagtctgactccaagtctgtgcttttcactgctgtgctatgccactaaaggtaatacatcttaaagtttaataacacctgatatgtgtataatgttttacacacaacaaaatactttatttcatttgagctttgtaacaatcccctgaatttagtagagcagttatttatttctatctttattttatttttgaaaccattcaaatatacctctctcttcctaggcaattttcctacattcatatggctggaaagtggttgagatcagactagagttaagagctcttgagtcatgttagtgtttttgccttgctgcctgaacattaatgtattg

SEQ ID NO: 513434 - DNA, 583 bp, Homo sapiens
gatttggggcttccggcttccaaaactgtgagccrtcaagtttgtggtaatttgtggcagcagccacaagaaacaaatgcagtggctgactgagtctgtgaccccaacaagagagttaagaaaggaaagatctgtgttccaaggccaccctcggaaaagaaagccctttggtcccttgggtagaggctgcagaaacaccaagtccttccagctagggttgccctgggtggtcttgtcaaatcacactcacactaactccttgaactttgatcctcacaggaggtgtccaggcaaggatacgaggaaaattagtatcatttgcttctccacttccggcacaaacgctccctcacctgggaaggcaggaacagcctggaccaactgtctgaggccctagaatcaagcacctgaaaacgatctcccagagctgctctcgggctgcatcaagggtacctaggggaggacagatcctgtgcaaggaagcatggggcattcccccagcctggggttaacagccctcaccaacttctcagggatgctatgagagttaatgattgtgaagtgcactcactgccacagaaac

SEQ ID NO: 513435 - DNA, 583 bp, Homo sapiens
gatttggggcttccggcttccaaaactgtgagccatcaagtttgtggtaatttgtggcagcagccacaagaaacaaatgcagtggctgactgagtctgtgaccccaacaagagagttaagaaaggaaagatctgtgttccaaggccaccctcggaaaagaaagccctttggtcccttgggtagaggctgcagaaacaccaagtccttccagctagggttgccctgggtggtcttgtcaamtcacactcacactaactccttgaactttgatcctcacaggaggtgtccaggcaaggatacgaggaaaattagtatcatttgcttctccacttccggcacaaacgctccctcacctgggaaggcaggaacagcctggaccaactgtctgaggccctagaatcaagcacctgaaaacgatctcccagagctgctctcgggctgcatcaagggtacctaggggaggacagatcctgtgcaaggaagcatggggcattcccccagcctggggttaacagccctcaccaacttctcagggatgctatgagagttaatgattgtgaagtgcactcactgccacagaaac

SEQ ID NO: 513436 - DNA, 429 bp, Homo sapiens
taaaaatgcagtacccattctccagttccctatcaggggtctttgttcaacttactgtttkttcataacacttgtatttagggaatgttgggcatgattaaacttcgtttagctttgggtttctagaccttgagaaacaattcagtgcaggcaaatattgtatgcccctatattttttcctgaaagccaataaagaaggaatgatgacaccttcactgcgtctatggggacaaaagctgcttgtgtgtgtgtgtgtgtgtgtgtgtgtgtgtgtgcgtgtgtgtgtgtgagagagagagagagagagagaaacagccttgtcaaaaagacgtgtttgttgctgtaccctcattatatgaaagccatcatggcatcaaaacagtataagccaggttgagctctatcctctctgcatcaactcagaatccc

SEQ ID NO: 513437 - DNA, 243 bp, Homo sapiens
tgtggtgtgagtatcaacccctgggctgccctgggaggcaagggtgagggctggattttaaaagagggcctgttttggggagggggtgattgagcrttggggaggcagctcccagggctgaagccttccctgagagcagtgaggacacaggtcatgaactcacttttcaagtgctgaaggcggcagagtgggagccgagagagaagggggttgctggggaggaagttattcagaggacaggga

SEQ ID NO: 513438 - DNA, 243 bp, Homo sapiens
tgtggtgtgagtatcaacccctgggctgccctgggaggcaagggtgagggctggattttaaaagagggcctgttttggggagggggtgattgagcattggggaggcagctcccagggctgaagccttccctgagagcagtgaggacacaggtcatgaactcacttttcaagtgctgaaggcggcagagtgggagccgagagagaagggggttsctggggaggaagttattcagaggacaggga

SEQ ID NO: 513439 - DNA, 647 bp, Homo sapiens
taatgtgaagatcagagtcagtgggtactgggagaagacatttgcattgagtgaataagctatgaccttgctagttcccattcaggatagtcaggtagggcatttgccccaggataaagctacaagcacagttttcaaaataaaaaaggatatttgctgtgggaacctcttggaggggacagtggaccagagagagaattgggcagtgccctggataacttctggtcaaggacaagaaaactactcccatccctatccccttactctgtctgccagacattaagctgacaacctcaccaatgatatgaaagtcctaaagcctctgccaaaagtctcctggaactgataaacaacttcagtaaagtttcaggacacaaaatcaatgtgcaaaaaccagtagcatttttatacaccaatagcattcaagctgartgccaaatcaagaatgcaatctcatttacaatagccacacacacacacacacacacacacaaacgtagtaatacatgtaaccaaggaggtgaaagatctctacaatgaaaattacaaaacactgctgaaagaaatcatagatgacatgaacaaatggaaaaacattccatgctcatggactggaagaatcaatatcattataatggctgtattgt

SEQ ID NO: 513440 - DNA, 586 bp, Homo sapiens
aaaacaaaaacaaaaacctgtaaattgacccatcagccatgaccaaatagaacccaattatgtttcttttcwcattcattcccaagataatactagcaagaaaccataaaccatgtgtgtctgttcctttgcgcaactcctaaccatagtccatttggaaatttccagatatccctgaggcaaatgtatggcttataatgatttagtattgaattgattctgaaaagtaaggtggtattccaaggccaccttcctcttgaaaacagcttacacttaattagtataaattaattggacaaaaacgttgtctttcaatgatcttcagtatgtggctttagaaaatccaccaaaatgccacaagaacataagaatcaggcaacatgatgaacgcccatgtctacaaaaagtaaaaattaaccaggcatggtgacacatgcctggcctgtggtcccagctactcaggaggctgaggtaagaggattgcttgagcctgggccaagattgtgccactgcaccccagccggggcaacagagtgagcctgtgtctcaaaaaaaaaaaaaaagaagaatcaaaacgatgccagag

SEQ ID NO: 513441 - DNA, 574 bp, Homo sapiens
tggggcaaagagcatgatcttgagtcagagaggggcttcactacaagctcctgccacttacaaatagcaggactccaggctagtatgttacaacttaggcccttgatgatcctcatctgcaaaatggacatcacagcaccttccagstcagtgggaggattcagagggatgataaaagttcccagcatagggcttggcaggccataggcacccagtcaatgataaccattattctaactgctcagagccaggattccacacagggctcatggcttcctctgtccagttagacacattcaaacccatgtccacgcctccaaagtccaccctaacaagccactccaccccaacagaagctccctcagtaacctaacttgctgacccaagaccccagagtaatgtattagcagggtggctgccacagtgaacactgcccagggcacttgctcctttgtaatcaaggtggcaggttggggagcaggagactgggggcacgtgggagattagggaggtacccagatgggtttcatttctcccctctgaagccaagatagccccttctagggcaggacag

SEQ ID NO: 513442 - DNA, 574 bp, Homo sapiens
tggggcaaagagcatgatcttgagtcagagaggggcttcactacaagctcctgccacttacaaatagcaggactccaggctagtatgttacaacttaggcccttgatgatcctcatctgcaaaatggacatcacagcaccttccaggtcagtgggaggattmagagggatgataaaagttcccagcatagggcttggcaggccataggcacccagtcaatgataaccattattctaactgctcagagccaggattccacacagggctcatggcttcctctgtccagttagacacattcaaacccatgtccacgcctccaaagtccaccctaacaagccactccaccccaacagaagctccctcagtaacctaacttgctgacccaagaccccagagtaatgtattagcagggtggctgccacagtgaacactgcccagggcacttgctcctttgtaatcaaggtggcaggttggggagcaggagactgggggcacgtgggagattagggaggtacccagatgggtttcatttctcccctctgaagccaagatagccccttctagggcaggacag

SEQ ID NO: 513443 - DNA, 616 bp, Homo sapiens
gggttggagagaagaggcaataagcccagagaggagtgatgtggggcaaagagcatgatcttgagtcagagaggggcttcactacaagctcctgccacttacaaatagcaggactccaggctagtatgttacaacttaggcccttgatgatcctcatctgcaaaatggacatcacagcaccttccaggtcagtgggaggattcagagggatgataaaagttcccagcatagggcttggcaggccataggcacccagtcaatgataaccattattctaactgctcagagccaggattccacacagggctcatggcttcctctgtccagttagacacattcaaacccatgtccacgcctccaaagtccaccctaacmagccactccaccccaacagaagctccctcagtaacctaacttgctgacccaagaccccagagtaatgtattagcagggtggctgccacagtgaacactgcccagggcacttgctcctttgtaatcaaggtggcaggttggggagcaggagactgggggcacgtgggagattagggaggtacccagatgggtttcatttctcccctctgaagccaagatagccccttctagggcaggacagc

SEQ ID NO: 513444 - DNA, 535 bp, Homo sapiens
tggcttctctgggtgctgaatgatggggtaaggaggcacagggagaccctggctcagggaccctccttgccctgcagtgccctgcttccccagcccaggggtccggctcacccccagcccacaggaggctcaggcagatccctacatgacacacaggcaagaccctctgccgaagaggtgtcattccagggcagagggtggggctcaggcccagccttaagggcagactgggccagggcctgacttgggagggctgaggggaggctcaagccctggggaagcccctctctccactgaaatgagtgcccccccataaggagctgcaagaccttgtctgacccagcctcctggaggggtccggtgactctcatggggaaggtcactgaagccccaatgggctagctcgagccaccagccccagcctggaagggccaggtcctctcatgcctactttccccacagatctctctcgggctcaccccgtgcctgtgggacatrtatttgctggaaggggaacagatgttgatgctgataa

SEQ ID NO: 513445 - DNA, 542 bp, Homo sapiens
cggtgcagcaggttttctttgtcctcgctggcagctcctctcagtctctgaggctgcctcctcatcttctgcccacatccgactgtggaagtttctaatctaatcccttaggaggctgtcaactttacttagtgctgaagaatgtctcattcactcaataagtatttacaagcccagtgaggtggctcaygcctgtaatcctaacactttgggaggccgaggcaggcagatcactttcatctaggagttgagagtagtctgggcaacatagcaagaccccatctctgcaaaaaataaaaaattagtcaggcctggtggcatgcacctgtggtcccagctacttgggaggctgaagtgggaggatcacttgagcctgcaaggtcaaggctgcagtgagctgagatcttgccactgcactccagcctgggcaacacaacaagaccttgtctcaaataaataaataaataaataaataaataaatacttacagagagaaactggattcccacaggctcagtcctgatgagggtcagtcctgcttc

SEQ ID NO: 513446 - DNA, 654 bp, Homo sapiens
  misc_feature (1)...(654): n = A,T,C or G
nnnnnnnnnnnnnnncaagtgaaggccaagaaagcagtagggaaatagaaaattttttggtactcttgtacaacttaaatttgctacaatagctttgtaagaccccattgcgggaagattctctggtgggactttttctgcatctgggaattctaccatgaatttcaggtctcaactaagaaaaaatcttcactcaacttggtactctggacttttcaggtgttgtgtctttttgagggcaagagaataggatattttcatttaccagctcccagaaaagcaaacattattatttgaaggggtacgtgttacaggagcatctcaccatgtgtttccccttctgatatatatatatacatatwttttttttttttttttacctgagacagagttgcccagactggagtgcagtggcgcgatctaggctcactgcaagctccgcctcctgggttcatgccattctcccacctcagcctcccgagtagctgggactacaggcgtctgccaccacgcccggctaattttttgaatttttagtagagacggggtttcaccgtgttagccaggatagtctcgatctcctgacctcgtgatccgcccacctcagcctcccaaagtgctaggattacaggcgtgagccaccgcgcccagccc

SEQ ID NO: 513447 - DNA, 654 bp, Homo sapiens
  misc_feature (1)...(654): n = A,T,C or G
nnnnnnnnnnnnnnncaagtgaaggccaagaaagcagtagggaaatagaaaattttttggtactcttgtacaacttaaatttgctacaatagctttgtaagaccccattgcgggaagattctctggtgggactttttctgcatctgggaattctaccatgaatttcaggtctcaactaagaaaaaatcttcactcaacttggtactctggacttttcaggtgttgtgtctttttgagggcaagagaataggatattttcatttaccagctcccagaaaagcaaacattattatttgaaggggtacgtgttacaggagcatctcaccatgtgtttccccttctgatatatatatatacatattttttttttttttttttacctgagacagagttgcccagactggagtgcagtggcgcgatctmggctcactgcaagctccgcctcctgggttcatgccattctcccacctcagcctcccgagtagctgggactacaggcgtctgccaccacgcccggctaattttttgaatttttagtagagacggggtttcaccgtgttagccaggatagtctcgatctcctgacctcgtgatccgcccacctcagcctcccaaagtgctaggattacaggcgtgagccaccgcgcccagccc

SEQ ID NO: 513448 - DNA, 583 bp, Homo sapiens
caaagatctaccttatattgcacacttttgggtcaggaagcactcactaattaattctgtcttacttttcatatttgytttttagaggccttttttcttagaaatgcatatgcaaacacaatgtaaacatatatcaatgccattttctacatgattgtcaggatttattatataaaaggattgactttactgatattctaatagaataaatctgcctgtcttgcattcttgaaagatctcctaaaggtagcaacaaatgatgggatcattattaaagtaagatgaatgtgttgtcagggccttggagaaacataagcataatactaccaggagaattgtaagttcttaaaaatggtcaagaccctcaaagtcatcttgccccaaactagggagagttcataaaaatcatccactgctactgcaaagcttgacaaggaggctgagactgtgcaagctctctcggacagaaatttatgggacaaatctgagcttttattgggaaaagagagtgagaagagccttttactaaagagaatcttgaggtagaagatgccccacgggactctgtggctaaggagaggtt

SEQ ID NO: 513449 - DNA, 594 bp, Homo sapiens
cactagacaaggacaggggagcatgggattatcttccctcttctgcccctagctcccactgggccctcagatggggaaagttcattaccttgtgtcagactgaatgatgtttgaaagactgcaggctgtagtttctgagtggagatgtatttgagataatgaggaacagacttctatacgagaaatgaagctttttgtagctggcctctgaggctcctgccaaaaaaaactcgaggctgagctaatcataatgagttttcaaaagctatactcaggtaacagtttaaaagaatagaaatattattttagcaaaaaagcaatgtttagaatagaggtaaatgatttcattggttaacccaaagctattaaccaataacataaatataaatttttattatagacatatattgccaagctacagaaaatccatgacttccctagagggaaaattagcatttgctttatttatattaaaaataatcatatttaagattattttgcaggtggtgtgtgtgtgtgtgtttgtgatgtggyttaatctatttatttatctcaagttatggaaaagtctatagcttaggcagaatgtggttt

SEQ ID NO: 513450 - DNA, 573 bp, Homo sapiens
tgctgtgctgtttagatgttcctgacaccatttgaatccattacttcattgagatattttgctcaacatcttttccttctatggatgaattaattgtgcccaacactgaccatcctcactccagagcccaggctagctatgacaacccagtcaacaactcaaggctagtcctcctccctcccgatttatacttggagagtcaggcaatctgcaccagcaggataataaagattcattaaagggaaaggagactgggcagatttttctcttcactttccctagagggaaccatatgaaattgctatttttataarctgaaagtggtcagacatcagcaatgttgtgtgcttcagcccaatacatgaaaaaatatattcacaattcaacaaaataaattacaaacttcatattgcccaataaatatgaaaatgaaaggtgtcttgaaagattcatgcacgtctgagagcacaagaatggcaatgttctttataaggggctttatatgcttgagggcttaccctttcaatgtcttccgtatttaaatactgaacaagagtgatagatcctttgccc

SEQ ID NO: 513451 - DNA, 573 bp, Homo sapiens
tgctgtgctgtttagatgttcctgacaccatttgaatccattacttcattgagatattttgctcaacatcttttccttctatggatgaattaattgtgcccaacactgaccatcctcactccagagcccaggctagctatgacaacccagtcaacaactcaaggctagtcctcctccctcccgatttatacttggagagtcaggcaatctgcaccagcaggataataaagattcattaaagggaaaggagactgggcagatttttctcttcactttccctagagggaaccatatgaaattgctatttttataaactgaaagtggtcagacatcagcaatgttgtgtgcttcagcccaatacatgaaaaaatatattcacaattcaacaaaataaattacaaacttcatattgcccaataaatatgaaaatgaaaggtgtcttgaaagattcatgcacgtctgagagcacaagaatggcaatgttctttataargggctttatatgcttgagggcttaccctttcaatgtcttccgtatttaaatactgaacaagagtgatagatcctttgccc

SEQ ID NO: 513452 - DNA, 524 bp, Homo sapiens
tgaatgcatgcgtgcatgaatgcatacagacatgtgaaaaagagagggcaggtggttccatcttatgccatctccaggtgattgaactgctgcttgggatgctatgctcaggcaactttctgagccagaagtaagtgtgttgcaattcattagtmgtgtctcctgtggacttgggacagaagagtggcagaatatttgctattccagttagcaaatggaggtagggagttttttggtgtccttggggcttgtttttatatacagaagataattttgcatttacttcagttttcaaagttaatacagatggtccccgattacaatggttcagcttatgatttttctactttatgatggcacaaaagtgatacacattaagttgaaaccatactttgagtacctatacagccatgctgtttttcacttcaatatagtattcactaaatgacatgagatattcagcactttattataaaactggctttgtgttagatgatttgctccactataaagtaatgtaagtg

SEQ ID NO: 513453 - DNA, 524 bp, Homo sapiens
tgaatgcatgcgtgcatgaatgcatacagacatgtgaaaaagagagggcaggtggttccatcttatgccatctccaggtgattgaactgctgcttgggatgctatgctcaggcaactttctgagccagaagtaagtgtgttgcaattcattagtagtgtctcctgtggacttgggacagaagagtggcagaatatttgctattccagttagcaaatggaggtagggagttttttggtgtccttggggcttgtttttatatacagaagataattttgcatttacttcagttttcaaagttaatacagatggtccccgattacaatggttcagcttatgatttttctactttatgatggcacaaaagtgatacacattaagttgaaaccatactttgagtacctrtacagccatgctgtttttcacttcaatatagtattcactaaatgacatgagatattcagcactttattataaaactggctttgtgttagatgatttgctccactataaagtaatgtaagtg

SEQ ID NO: 513454 - DNA, 497 bp, Homo sapiens
tgctggcttcatcattcagggaaagtcttcaagacttttctgagtctttaatataattatccaatgtgggggacatagcaatggcacaactcatttgaggacagaattctttttctctttgttcattgctacacaatttttctaaggtacacaatttgaactcctaaatggatgcctaaggaaattctattaagctcaagactagaaacacgamattggctagaattcactcccttgttgtccctggctgggtcatttaagccaacgtctgtctatctatctatctgtctatctatctatctatctatctatctatttatctatctatcatctgtctgtctgtctgcctatctatctatctctatctatctatgtgcctgcctgtctgtctatccatccatccattcatccattcatccatctctctattatttttctctatttataagacttatgggaagtcagatggcacagcaccaggttccttgagattaagg

SEQ ID NO: 513455 - DNA, 494 bp, Homo sapiens
agaaattgcagaactggaattcaacacctatttttcatcccagagtaataacttgaaattttatgttgagattattattttcattgaggtcagaaaatttctgtaaggcgaaagagaactcaaggaaaagccctaggtgggggaaatggaagcaaagaagtgagaagagttgaataatgggagagactgaggaccataaaccttgtttactgaaagaatcagagataattagatagcagagaagcaaccattccatctaagtcttgccctgtgaacttgacccagatccctcaaaaagacacaattcttgccaaaggttaaaattaattatttctcgtacaaaggaattttccatgtgggccccattgcactctaagatggatgattttggccacaaaacttgctgttcactcacagcaaaarcgatgaccacaacttcagatcttcttaaacgtgccgttgagagcagagaataaaggggaaaagccaattca

SEQ ID NO: 513456 - DNA, 481 bp, Homo sapiens
attcatcttgtgttcaaagccacgttcttctgagatggaactatgatgtcaaactagacttaaatgtcagcatgcatagaaaaattggcatgcataaagtatcactttgatattgtatggtatattcttgtttgttctaataaaacatctttcttatgcaaaaagaggctgggttgctttgatcttaagaaattcttaagaaggaaaattgctccgcatggtttagaaggagaaaagcctataagtcagacacaacactgaaactcatagctcatttcctaacaactgaaagctatgtatgtagcctggcagaattggcagtgagactccatctggggctgagctgcagcgggaggtgtcctgggagaatcatcaagatgtgggttttctcagaagtcctgcaccaatctagtcttccytctccacatttcatgtgccctgtgagagatagtactgacaattacttacgttgtctgtacta

SEQ ID NO: 513457 - DNA, 620 bp, Homo sapiens
ctggatcatttttgaaggaggttgagtgaatgaaacattgctagcaatagactatgtgctcatctctctctggatgagctggaaatcaaatatctattggccatttctgaatatctggctacaccacaaagtaaaaggagatggatcacaagagaggaaacctttcttagagctcttaggtgagccacttaccgactcttctctaaggactgtcaagggcctaggatccaggtagaatttctgagttacaaatagcttgtatcaatgtccttgaagtctcattaagtccttgaagtttcaccagaagttctctttcatggcgtctcttttagcctgagaaacaaatctatagaaggattatttaaagatataagctgtgttaatacactttagtacaaagtagggggatgagggagaggctaaaaatctttgacgggtascgatctttgattggtactaaaaatgagagaacataggcccagaagaattatgggctattttgaatggcctgtaatatctgattcactccatttcaaaagttaaatttgaacagtctatagaagactaaggagggtattattactgaattgagtggatccaatgtggctcttatgaggatg

SEQ ID NO: 513458 - DNA, 584 bp, Homo sapiens
gaaacctaaacaatgcagctttcaaagatttaatggacaaatgggtaattcttaatttagatctgtaaactcataaggcctttgagaaattgagctagagatcataaaaagactggaaaagcaaagaatactggacatttaatgtaaaatcatagtatcttaaattaatatgtttctattttgtgtcaytgttctataaattttcacaattttttcctttttttctatttttacgttaagttctggatacatgtgcagaacgtgcaggtttgttacctaggtatacgtgtaccatggtggtttgttgcacctattgactcatcatctaagtgccctcccctcgcctcccacccctcaacatgccctggtgtgtgttgttcccctccctgtgttcctgtgttctcattgttcacctcccacttatgagtgagaacacgtggtgtttgtttgttttcctgtgttagtttgctgaggatgatggcttccagcttcatccatgtccctaaaaagcacatgatctcattttttaatggctgcagattattccatggtgtatatgtaccacattttctttaaccagtcta

SEQ ID NO: 513459 - DNA, 551 bp, Homo sapiens
tcaggggtttggtccagcagcagttcaaaatactcctcttcaagttcagtttctacacttcctgaaaattccccctttgaagtgctcttcttgcaagcacatttgagggaaaagattagtcttattttgctcataattcacttcaatgctataactgcacatctcatttctatcacgagccctcgttcatttacaacaggtcactccctgggactcaacgactgtccttcttgatataataaaatttattatgattatagttttaatattaaatagataatgagcattttcttgtgccaagtgctgacctgagccacttatgcacattatcccattttattttttctacaagcttatgaagcatagggaggtcaagttactttcgtaaagtctaataagtggtacagtagaaactgtaggagctttatcccaaatatgatgctgctkccatgacatgggtctcagtaaagaatttaactaggtgggcccagcttctctatttccaacaatactatcattcagggatgtataaatgtatcagacttactgag

SEQ ID NO: 513460 - DNA, 551 bp, Homo sapiens
tcaggggtttggtccagcagcagttcaaaatactcctcttcaagttcagtttctacacttcctgaaaattccccctttgaagtgctcttcttgcaagcacatttgagggaaaagattagtcttattttgctcataattcacttcaatgctataactgcacatctcatttctatcacgagccctcgttcatttacaacaggtcactccctgggactcaacgactgtccttcttgatataataaaatttattatgattatagttttaatattaaatagataatgagcattttcttgtgccaagtgctgacctgagccacttatgcacattatcccattttattttttctacaagcttatgaagcatagggaggtcaagttactttcgtaaagtctaataagtggtacagtagaaactgtaggagctttatcccaaatatgatgctgctgycatgacatgggtctcagtaaagaatttaactaggtgggcccagcttctctatttccaacaatactatcattcagggatgtataaatgtatcagacttactgag

SEQ ID NO: 513461 - DNA, 609 bp, Homo sapiens
tgaggacatcaacttcctggggttcacgaagagggtagagctcatctgttgtgatcatagtaactactgcaacctccctgagggagtttagttctacgtctctcctggattttgggttctttttcaaccactacgctctttttctcttccctgaacctgaattttgctctcctcttctatgcattggtagagagtgagaaagccagctcatagtgaaaagacaagcaggcataaggagacgcagtgyggacagcggagcctattgatgatggagcactagactcactctttgcacatccctgtcgctaacaggtgggaggggttttgctctccttacgtgatactgccatgaataagctcagacttggtcatttattatctcctgtatgaaaatgtgaacacttgggccataataatctccaatttgtactgagaattctgtgactatcctctatcctcatctacacacacactcctctccgttggaattctctttggattagccctgacactttctggcactgtccttttctgcccgtgggttctggagagggctaaccccagcttcccagtgtgttggcagcatgggccaagtctttctctgataga

SEQ ID NO: 513462 - DNA, 647 bp, Homo sapiens
agctcaggcaccaaacaccatgacctctccccacttccactggaaccaatgaggggaacacacccagaggcgacttcctgcagctctccctgccccactttatctacagttagctgcaccagccacagcaagggacaatccagcaaaagattagccactgggatgaaagacagacaacaaacccaacacatagaaccaaggtacagccatccaaaattaaaatggggatttgatacaattaaacatggtccacctagagagaaagtgagctgctgtacttcaaaagccattaaggaggttaaggagcaagaacaggtaaaatcaatgagaatcaataaagatcatagtaaagaaaactagaattctgaaaacaaaaaatagtgaaggctgagtagcatacaaagatcaaattaatgtggtgatagttgttacaaaggaattttcctggaacacagcacaaagttgtcaaagaacacccggtaaagacgtggaaaaagcttgaagacatgcagaagcacgtggaggcctgatccgaccctcatccacgggattccaggaygaggaaagagacaggatggagcacagcacattcacagatggcatcacatcttcccagaactgaggaaaggtccactgaattccaaata

SEQ ID NO: 513463 - DNA, 540 bp, Homo sapiens
cttgccttggtagtgcttaaaaccacccaaaggggagactctgggactgaatgaatctaggggacatttgggcatgaccgactcacgcgttccttcaatttcttgagccatagtgaaatatgggtagctatgatgtggtcagatgaaacagtgactgagtgaacatatggttttcaataaccacataactctacctctctgacattacaataacaccaagattttgtagctttcctgtattaataatgggtagttagcattgggagagcctgaaactgggtatgggaaatagcatcaattttatgtctctaaaactagttaaaagtgaatgtgtatgttgctaactgacctacatctacctaacccccaccatcagctggattgatctttccaacagattaatgtttctaatagaattkctcagatcgcctatctctaaaatagcttacaaaaatatctctcaaagggtgatttacatcattgatattaaaaaatgggcatggccctcggaagaggaaatcaatgttaaagacaaacaaa

SEQ ID NO: 513464 - DNA, 540 bp, Homo sapiens
tattaaaataaaaagtggtctgtaggatttgtgcctccaataaatgagggtctatgtccactaaaggcatgtacaaaaatgttgcatagcagttttatttggagtagccccaaagttgaaactactcaaatgtccaccaatagtagaaaaaacaagtaaattgtggaatagtgatacaacagaatattacttagcacttaaaaagagcaagctactgcaacaatgaagctgaatcccacagattaaagtttgaagaaaagaacccaggtaacgaagatgtgcttttccattcctacagaagagtcccagagcaggcaaatgaattgatgacagaggtcagaagggtgaacaatggttacctgtgggaagggacctgatgaggcaaggggcacaggaagccttctggaatgctggaaatggcttacatcttggtgtttatttatgttaaaatccactgagcttttcccgtaaamttcacctaagctgtttagctcagaaagagccctttctaaaatcatcacacctcaatgaaaaagaaaa

SEQ ID NO: 513465 - DNA, 572 bp, Homo sapiens
tctctggccttcagccacagactgaaggctgcactgttgtcttccctgcttttgaggcttttggacttgaactgggccactactggcttcctacctcctcagcttgcagacagcttatcatgatgcttcgccttgtgatcgcatgagccaattctccctaataaactccctttcatgtatatatatatccatatatatggatatatatatatatggatatatatatataaggatacatatatatggatacatatatatggatatatatatatggatayatatatggatatatatatatggatatatatatatggatatatatatatggatatatatatatggatatatatatatggttatatatatatggatatatatattaggatatatatggatatatataatggttttgtccctctggagaaccctgactaatacgtaaacaaactcatatttaacatagtgcattgattttgaacaaagagggcaagataattcaacaagtaacagaaaatcttttcaatacatgattctagattaaataaatacctgtataaaaaaataaacgtaga

SEQ ID NO: 513466 - DNA, 572 bp, Homo sapiens
tctctggccttcagccacagactgaaggctgcactgttgtcttccctgcttttgaggcttttggacttgaactgggccactactggcttcctacctcctcagcttgcagacagcttatcatgatgcttcgccttgtgatcgcatgagccaattctccctaataaactccctttcatgtatatatatatccatatatatggatatatatatatatggatatatatatataaggatacatatatatggatacatatatatggatatatatatatggatacatatatggatatatatatatggatayatatatatggatatatatatatggatatatatatatggatatatatatatggttatatatatatggatatatatattaggatatatatggatatatataatggttttgtccctctggagaaccctgactaatacgtaaacaaactcatatttaacatagtgcattgattttgaacaaagagggcaagataattcaacaagtaacagaaaatcttttcaatacatgattctagattaaataaatacctgtataaaaaaataaacgtaga

SEQ ID NO: 513467 - DNA, 572 bp, Homo sapiens
tctctggccttcagccacagactgaaggctgcactgttgtcttccctgcttttgaggcttttggacttgaactgggccactactggcttcctacctcctcagcttgcagacagcttatcatgatgcttcgccttgtgatcgcatgagccaattctccctaataaactccctttcatgtatatatatatccatatatatggatatatatatatatggatatatatatataaggatacatatatatggatacatatatatggatatatatatatggatacatatatggatatatatatatggatatatatatatggatatatatatatggatatatatatatggatatatatatatggwtatatatatatggatatatatattaggatatatatggatatatataatggttttgtccctctggagaaccctgactaatacgtaaacaaactcatatttaacatagtgcattgattttgaacaaagagggcaagataattcaacaagtaacagaaaatcttttcaatacatgattctagattaaataaatacctgtataaaaaaataaacgtaga

SEQ ID NO: 513468 - DNA, 572 bp, Homo sapiens
tctctggccttcagccacagactgaaggctgcactgttgtcttccctgcttttgaggcttttggacttgaactgggccactactggcttcctacctcctcagcttgcagacagcttatcatgatgcttcgccttgtgatcgcatgagccaattctccctaataaactccctttcatgtatatatatatccatatatatggatatatatatatatggatatatatatataaggatacatatatatggatacatatatatggatatatatatatggatacatatatggatatatatatatggatatatatatatggatatatatatatggatatatatatatggatatatatatatggttatatatatatggatatatatatwaggatatatatggatatatataatggttttgtccctctggagaaccctgactaatacgtaaacaaactcatatttaacatagtgcattgattttgaacaaagagggcaagataattcaacaagtaacagaaaatcttttcaatacatgattctagattaaataaatacctgtataaaaaaataaacgtaga

SEQ ID NO: 513469 - DNA, 635 bp, Homo sapiens
cgacaactcacccccaaatgcagggaaatggtaacagggctgagtgacaaagaacgcctgggccctggtggcacctgagcctcagaccaatccacttctgaagcttatcagttacatgaacttaaccattacatgagccagcaaatcccaaatgagatgcaaatacagaatgatatcatttacatgtagaattgacataaatgaaagctactttccagatgtttggaaaggccctttgaaaaacctgcaacactggacagaaattccaaccctttaaggaacgcaatgggtgacaacgtgatcagaatgcacagagggctcaaaatcctctccacgggcttcaaccaccaatctcacaaaatgttcaagatctttcwgtttcaaaaaggcagtctactaggttgtaaggttgtgggaaaaatcatttgttatcttgtagaatttgagagagtggagactaacctgggcaggggataatgagaaaacctaaaatactgctcagacctgtcctgcgttggaaccgcagtagggatccctttagtaatacagaaattacagcctttgtttcttttgtaacttgaaagttagaacagctcttcgcttccagaaggagctctgtataaagcgatagagac

SEQ ID NO: 513470 - DNA, 551 bp, Homo sapiens
cgacaactcacccccaaatgcagggaaatggtaacagggctgagtgacaaagaacgcctgggccctggtggcacctgagcctcagaccaatccacttctgaagcttatcagttacatgaacttaaccattacatgagccagcaaatcccaaatgagatgcaaatacagaatgatatcatttacatgtagaattgacataaatgaaagctactttccagatgtttggaaaggccctttgaaaaacctgcaacactggacagaaattccaaccctttaaggaacgcaatgggtgacaacgtgatcagaatgcacagagggctcaaaatcctctccacgggcttcaaccaccaatctcacaaaatgttcaagatctttcagtttcaaaaaggcagtctactaggttgtaaggttgtgggaaaaatcatttgttatcttgtrgaatttgagagagtggagactaacctgggcaggggataatgagaaaacctaaaatactgctcagacctgtcctgcgttggaaccgcagtagggatccctttagtaatacagaa

SEQ ID NO: 513471 - DNA, 635 bp, Homo sapiens
cgacaactcacccccaaatgcagggaaatggtaacagggctgagtgacaaagaacgcctgggccctggtggcacctgagcctcagaccaatccacttctgaagcttatcagttacatgaacttaaccattacatgagccagcaaatcccaaatgagatgcaaatacagaatgatatcatttacatgtagaattgacataaatgaaagctactttccagatgtttggaaaggccctttgaaaaacctgcaacactggacagaaattccaaccctttaaggaacgcaatgggtgacaacgtgatcagaatgcacagagggctcaaaatcctctccacgggcttcaaccaccaatctcacaaaatgttcaagatctttcagtttcaaaaaggcagtctactaggttgtaaggttgtgggaaaaatcatttgttatcttgtagaatttgagagagtggagacyaacctgggcaggggataatgagaaaacctaaaatactgctcagacctgtcctgcgttggaaccgcagtagggatccctttagtaatacagaaattacagcctttgtttcttttgtaacttgaaagttagaacagctcttcgcttccagaaggagctctgtataaagcgatagagac

SEQ ID NO: 513472 - DNA, 520 bp, Homo sapiens
gctggagtgcagtggtgcaatctcagctcactgcatctccaacctgcacggctcaagggatcctcccacctcagcctgccaagtagctgggactatagccatgtgccaccatgcccagctaatttttttttactttttggtagatctggggttttgccatgttgcccaggctggtcttgaactcctgarctcaagcaatcctcccacctcgggctcccaaagtgctgggattataggaatgaaccaccatgcctggcatcttccttctatttttaataaaacatttctcagcctgggttagggttctgccatctcagctggactgctatggagatgaggtggtgtctgtttcagaatttcatatctggaggcacttatgtcccatgggtgatgtgaattctgattgagacatgatctgactttcccattgtataattactctctttgtttcaggtacaaccaataagcagcctttgggcagctgagaagacaaggcgagtatcctgctcctaaactcagt

SEQ ID NO: 513473 - DNA, 528 bp, Homo sapiens
acaaatgtatcttgcatccttaaaatctatcctgtattaatgttttacattttcaggrtaatgcacatatctacagtatcttaactcagtttacctcccttttaccttttatgtaactgtcattacaaactttataaaatttaaaaccttgcaaaaatactattttaaacagttagcattcatttaggtttattcacctttttatgacttttgacattcttcaataccttatgtattatacttccatctaggatcatttgctgtttattggtgcttgctgaacctcagttttcatttatctgaaaaaaatcttttatttccttcatttttgaaggatgttttgcttttcattgaattctgttataatttattttctttcatcaatttaaaagatgtaataccattgagaagaagtttctacccttcctattaagaaataatatctttattgttttcagatgttttattatgctatacctatgtattaggttatgtattttgttttggttgtataaagcttctggaatc

SEQ ID NO: 513474 - DNA, 528 bp, Homo sapiens
acaaatgtatcttgcatccttaaaatctatcctgtattaatgttttacattttcagggtaatgcacatatctacagtatcttaactcagtttacctcccttttaccttttatgtaaytgtcattacaaactttataaaatttaaaaccttgcaaaaatactattttaaacagttagcattcatttaggtttattcacctttttatgacttttgacattcttcaataccttatgtattatacttccatctaggatcatttgctgtttattggtgcttgctgaacctcagttttcatttatctgaaaaaaatcttttatttccttcatttttgaaggatgttttgcttttcattgaattctgttataatttattttctttcatcaatttaaaagatgtaataccattgagaagaagtttctacccttcctattaagaaataatatctttattgttttcagatgttttattatgctatacctatgtattaggttatgtattttgttttggttgtataaagcttctggaatc

SEQ ID NO: 513475 - DNA, 500 bp, Homo sapiens
  misc_feature (1)...(500): n = A,T,C or G
aataggaagacaagtttccaggacattctgattgtctagcaaagagatctctgttccaggcatgaagaaaagcaaagcaaaaagttctttgtcctatacaggtttaatcaaagtaatatggggagcaacaaaagggcagttggctggatgaagagggttgaaaaatgtggtgcctttttttgttgttgttttgtgacagggtctcctatttgcgcccacagggtnncctttaacttcctgggctcaagtgacctgcctaccttagcctcccraagtgctgggagtacaggcatataccactgcacccacctggtcttaaactttacagaaagacagtagtgatgacgttaacagaaggagaggtgagaagaggagatctagcagcatttgtttagccggctattataaacatcaggctacagacaaatcgagagattgggcccaagatacagctttactattcatccacatggacacacagaacttctttgagggaagaa

SEQ ID NO: 513476 - DNA, 622 bp, Homo sapiens
aagtgtaaattttttctacttgaggtgtcatgtccatactcaaaaagtttcggattttggggccaggcacggtggctcaggcctatgatcccagcactgtggggaggtgggtgggttgcttcagcccaggagttcgagaccagcttgagcaacatagcaagaccttgtctcaaaaagaaaaaaagtttcagattttggaacatttcagattttaaattttcagatgagggatgctcaacctgtattggttcttttcttctggagaaatctgacaaatasagtgtcttagaaatattcttagtaattgataagtttattgaataaggctagtgatttcttccacatcctttatgtttacaaattccttccaagccattacttacttgtaagtcatctgccccttcagcttcattttttgattcggggcatcctaagaaaatagataaaagttaattaagtatagaatttttgtcttagagtccagtattaatgactaattgattatgtcattataatactttagaagactaatcagagatctttctggactgcctggcaattaaggtactggccacttgcatttgcccctgttagaataatggagaataatgtaattatttcc

SEQ ID NO: 513477 - DNA, 622 bp, Homo sapiens
aagtgtaaattttttctacttgaggtgtcatgtccatactcaaaaagtttcggattttggggccaggcacggtggctcaggcctatgatcccagcactgtggggaggtgggtgggttgcttcagcccaggagttcgagaccagcttgagcaacatagcaagaccttgtctcaaaaagaaaaaaagtttcagattttggaacatttcagattttaaattttcagatgagggatgctcaacctgtattggttcttttcttctggagaaatctgacaaatagartgtcttagaaatattcttagtaattgataagtttattgaataaggctagtgatttcttccacatcctttatgtttacaaattccttccaagccattacttacttgtaagtcatctgccccttcagcttcattttttgattcggggcatcctaagaaaatagataaaagttaattaagtatagaatttttgtcttagagtccagtattaatgactaattgattatgtcattataatactttagaagactaatcagagatctttctggactgcctggcaattaaggtactggccacttgcatttgcccctgttagaataatggagaataatgtaattatttcc

SEQ ID NO: 513478 - DNA, 622 bp, Homo sapiens
aagtgtaaattttttctacttgaggtgtcatgtccatactcaaaaagtttcggattttggggccaggcacggtggctcaggcctatgatcccagcactgtggggaggtgggtgggttgcttcagcccaggagttcgagaccagcttgagcaacatagcaagaccttgtctcaaaaagaaaaaaagtttcagattttggaacatttcagattttaaattttcagatgagggatgctcaacctgtattggttcttttcttctggagaaatctgacaaatagagtgtcttagaaatattcttagtaattgataagtttattgaataaggctagtgatttcttccacatcctttatgtttacaaattccttccaagccattacttacttgtaagtcatctgccccttcagcttcattttttgattcggggcatcctaagaaaatagataaaagttaattaagtatagaatttttgtcttagagtccagtattaatgactaattgattatgtcattataatactttagaagactaatcagagatctttctggactgcctggcaattaaggtactggccacttgyatttgcccctgttagaataatggagaataatgtaattatttcc

SEQ ID NO: 513479 - DNA, 607 bp, Homo sapiens
tgtccattttttcccttaggaaactacaccaacaatggctgcacagaaacatatgtaattgcttttcattgcagtgggagtaattcactgcgccttgaagttgttgaaatgctcttcctgggctccagccttttccagtttaaagatccttactggtggcatgaagagttaagcaaaatagtgaagtggctctgcttctgtttccttcaggtggcctgtttcctgttatctcttatttcgcttcaaattatgtataacaatcagttcattttaaatgacaggagaaaaatctcatttccttggcagcgggatcccaccccgtcccctcccagtttcgttgggctttcacatttggcgaggtggackcaaggtcggggtggatggccactctctggcccatggtggaacttttgttttgctgatcggggcatgccattgacagccagatctgaatctgaagagaggggtggaagaggagaaaagagagacagtgaagctggcgggaaaggcaacttttgagcagaggaaaggacacaaataatggaagaaattaaaattgttttgctatgtggtatgtgggaaagatattaattctactaaccatttt

SEQ ID NO: 513480 - DNA, 496 bp, Homo sapiens
tttactgcataatctttatccttattcccacaagcagtcaaaaatcccacaaccacatgaacctatcaaatagtaaagaagcatttgggaacaagagctaggcgcagaagctcacacttgcaatcttagcactttgggagaccgaggcrggtggatcacctgaggtcaggagttcaagaccagtctggccgacatggtgaaaccgtctctacaaaaaaatgcaacaaattaaccggacatagtggagcatgcctgtaatctcagctactcgggaggctgaggcaggagaattgcttgaacccgggaggtggaggatgcagtgagccgagactgcgccattgcactccagcctgggtaacaagagcaaaactccatttcagaaaaaaaaaaaaaaaagtatttggggacaagaaatgaattaatatgtgtgacggacaatgacttaataatacctaatctggttctactttcttcatcttgatttctacttttgatt

SEQ ID NO: 513481 - DNA, 496 bp, Homo sapiens
tttactgcataatctttatccttattcccacaagcagtcaaaaatcccacaaccacatgaacctatcaaatagtaaagaagcatttgggaacaagagctaggcgcagaagctcacacttgcaatcttagcactttgggagaccgaggcgggtggatcacctgaggtcaggagttcaagaccagtctggccgacatggtgaaaccgtctctacaaaaaaatgcaacaaattaaccggacatagtggagcatgcctgtaatctcagctactcgggaggctgaggcaggagaattgcttgaacccgggaggtggaggatgcagtgagccragactgcgccattgcactccagcctgggtaacaagagcaaaactccatttcagaaaaaaaaaaaaaaaagtatttggggacaagaaatgaattaatatgtgtgacggacaatgacttaataatacctaatctggttctactttcttcatcttgatttctacttttgatt

SEQ ID NO: 513482 - DNA, 528 bp, Homo sapiens
gccgtctcctacgtgactaacgcacttcctcataggaaggcctctccaggcggttgcgcctctcccacggcaagctttcccagaggcgcaggtggcagcagcaaggcttctgatgagcaagtctcagaaagccartggcttcgcttctcctacgttcacagagagggggctacacgggcaaatcatagcaggttttgcccacgagggcatggtgggagtgaggggagctggaaggagatgtcatttttgattagctaccacagccggaaaaaccaactgtatatattttcccattttataacgtttgcacgtttattaatatgtctaattttatagttactctcagaatttttgaggtctcttttatctcacttcctgctttgcatacgtttttaggactgtgtgggtaatatcccaaaagttggttaaatgagccttgagttgctgacagaggcttctgttaccgtctctaagtgagtgttcagtgccgtctttagaggagtatctttcctttcctttgtccagtga

SEQ ID NO: 513483 - DNA, 528 bp, Homo sapiens
aggtttctgtaacatttcttagtataaacgttctgtttctactgccggctattgttttgcaaggaaaatgggtgttagatatcaatttagatttgaggaggtgagtaaaagttcaaactatttttccagataaggtattttctcctgtggtttttaatagtacaaataaacaaatatcacgttgcyttttagagtgttttctgatttcaatgcagatacgcagtcctctgtggagcataaatctggatcagcctagaaactctgcttagactgagataagtgatgaagacttaaagaataattaaaattaaaagctaagttggtttcccgcctctgcctccaacaacttaactgatggatgggttccatgtgaagtcctggaagggtttagctaccctattcttcagagacccaggttctaatctgcagactccagcttggccctagtgcacaaagacattctgcttggtgggtaggatgccccgctcacctcaaaatcctgtgtgagcatggtatgagaattggggt

SEQ ID NO: 513484 - DNA, 617 bp, Homo sapiens
aatatggatgggtgtttcttctgggttatcttctctgttccattgttctgcttgcctgtccttctgtctgtgccacacggcttacatgttgtggcatctgatagggccagtccccctgcaggactcttctgcaaaattttctttgttgttctttcctgtttgttttttcagatgaactttggaaaatttatgttgaacttacagattatttggggaaaaactgtttatctaacaggttttagtctttaccaccgagcccatgacatgtactaagcatttatccaaatcttactttttatatttctcacaaaattttccaattttctctaaataggtcctacatatttctcattatggttattgttatgttattacttattttatagtttgtgttttgatctttttttactataytttcaaactggtagtatctggtaatttggttttgtatatctagtattgacctacttttttttttaagacatggcctctctctatggctcaggctggagtgcagcagccagtcacaggcacagtcatagctcactgcagcctcaaaatcctgggctgaaagaatcctcctgcctcagcctcccaagtaactgtgactacaggga

SEQ ID NO: 513485 - DNA, 525 bp, Homo sapiens
ttcagctgtctaattcccagctttttctttagctgtatccatcctggtgtttatcccttctatgtgttctttgttttaagtattatattttattcctaataaagtcagagggagattacacacacatacacacatgtatctgtctattttctcttagctctttgtgcatatttattatatttcttggtttgtcccaaaattccgttctattttacatgtgtgtgtgtatatatatatatatatacacacacacacacacacacacacacatatatatgtatatacatctgaatatttgtttctttaatgagtgtactccacaggtgtctattwattttggtattcctgataacatgttttggggtagacccaaaggctagccccttgcctgcgtctctccattgtgtttataaagaggggaagggacatgccccagggctgagaaacccaggccccacagcatcatgttaaccactatataagtctcctagtcaaagattcacttttaaactactttaaataagc

SEQ ID NO: 513486 - DNA, 525 bp, Homo sapiens
ttcagctgtctaattcccagctttttctttagctgtatccatcctggtgtttatcccttctatgtgttctttgttttaagtattatattttattcctaataaagtcagagggagattacacacacatacacacatgtatctgtctattttctcttagctctttgtgcatatttattatatttcttggtttgtcccaaaattccgttctattttacatgtgtgtgtgtatatatatatatatatacacacacacacacacacacacacacatatatatgtatatacatctgaatatttgtttctttaatgagtgtactccacaggtgtctattaattttggtattcctgataacatgttttggggtagacccaaaggctagccccttgcctgcgtctctccattrtgtttataaagaggggaagggacatgccccagggctgagaaacccaggccccacagcatcatgttaaccactatataagtctcctagtcaaagattcacttttaaactactttaaataagc

SEQ ID NO: 513487 - DNA, 613 bp, Homo sapiens
agtctgtgaggggtgggcagtcacgaggggtgaatggaaggtggtagtctgcatcattgcagcacagtctttttttttttttcatggaaacctctgcacaaaccaggtaggcatttacaaagcaagaggcagcttgaaacacttgccaggcccagagagtgcaacaccgtcatacagcaatgctggtcaagggatatcttcctttcacctttatttttgccctcagttccgccacactcctgctgctagggtggatcagaacccagtctcagtatgatggggagagagagagatggaggtaatgaggaccacatctccattcctggcttcttgtttgaggcaggctccaactggaggagttgagaaaatttaactttaatcaagtttggagttttgcatattaaatgcatttggacattctaatttctgaaygaagattctgtttggtgacttaagaatccatggtacttatttgcatagtcatctcatgccccaagatatagctcaggcagagaaagaaatcccttcaatgaattttaaagagacagaatacaaaattaagtggcattatggttacactccacgaatcctatacattcctaatgaagcttat

SEQ ID NO: 513488 - DNA, 654 bp, Homo sapiens
ccctgtatgatttcattctttttagatatataaagatttattttgtgggtttttttaaaatagtgtatcatttctcttagtgaatgtctcacatgcacttgaaaggatgatatgttctgtgtgtgtagtagtctttaaatataccttagttgctagaattgtttgcatattttatatttgtattgatttcttgtctatttgttccrtcaatttctgaggaaaacatatgaaaacccccaaacccccaaatatgattgtagatttgactatttccccttttgttttgcccaatgtttactcatatatcgtaaagttctattattgtttctgtacagatttaagattcttgattttattccaaagtctgtctttggaataaaggcagagacaggccttctgatggcaagaaacttgggaatttatgtgttattgacaaatttacccttatatcattataaaatgtcccttttatatctagaaatgttctttgtcttaaaatccactttggtattaatttagtaaaatcaacattctctaattactgtttacctaacacacatttctcaccattttcttttaatcagtttgtgtctttatatgtgagggatattattttaaagagcatatagttgagctctaatttttaaaattcag

SEQ ID NO: 513489 - DNA, 565 bp, Homo sapiens
attttaggtaaatgtgattctttttagggattactgccatattcttctaaaagtaataccttccttaagtccttgtggctttgtgacttatgcaaactcccttaaccccagaacaaaatatccaagtactaatcctcagaacytgagaatgtgttattttatacgggaaaaggtagtttgtagatatgattaagattaaacaatttaacttggggagattaacctggattatccaggtgagcccaatcatatcacataaatttttgaaactgagactctttgccagaactgttctatcataagtaaaagacatgattattaacactcagagttggggaagaggtcagggagagattgggcgtcctgtctcttaagaggatttgacccaattattttttagccacaccttccttcccatttccagagtcatctgatcatctggggactctttagagcctttccctcctgcttatttaggattacctttccctgtctgttatttcactggcctttgctttcaggtattcaaataatttattctatctcctaccccatctttttatac

SEQ ID NO: 513490 - DNA, 565 bp, Homo sapiens
attttaggtaaatgtgattctttttagggattactgccatattcttctaaaagtaataccttccttaagtccttgtggctttgtgacttatgcaaactcccttaaccccagaacaaaatatccaagtactaatcctcagaacttgagaatgtgttattttatacgggaaaaggtagtttgtagatatgattaagattaaacaatttaacttggggagattaacctggattatccaggtgagcccaatcatatcacataaatttttgaaactgagactctttgccagaactgttctatcataagtaaaagacatgattattaacactcagagttggggaagaggtcagggagagattgggcgtcctgtctcttaagaggatttgacccaattattttttagccacaccttccttcccatttccagagtcatctgatcatctggggactctttagagcctttccctcctgcttatttaggattacctttccctrtctgttatttcactggcctttgctttcaggtattcaaataatttattctatctcctaccccatctttttatac

SEQ ID NO: 513491 - DNA, 609 bp, Homo sapiens
cattttattgtataaccttacctgtaagttatttttcagtcacactttgcaggcaattttttgaattacttccacagagggctaatgatttattatatcaaatgacaaaagatatatttattaattggaaggtttctgagaaggggttatctcatctacgaattgagaataaaaagaaaatgtagaattttaatagtaggcgcatatctccattttattttgcattccagaaaaaaatttttttaagacggggtcttgctctgttgctcaggctggaatgcagtgtcgtaatcatggctcactgcaacctcaacctcccaggctcaagtgatcctcctgtctcagcctccagagtagctggaaccacaatcatgtggtccacacctgattttttctttcttaatcttttgtaggaacagggtctccttatgatgcccaggctggtctcaaactccttggytcaagctatcctcctgttttggcctcccaaagtgctctgattgcaggcatgagccaccctgctaggcatcacccctggaactttttaaatggttgctactattatttttctccaaatattctactcagcagtccttctggtaacttaca

SEQ ID NO: 513492 - DNA, 617 bp, Homo sapiens
gaaataataatactgcatgtttatacaactttgacatttttcaaagcattttcataaatagtacgttatgctatcttctgtaaagtaaaaagcctggcttattactccattttacagatgaagaaatggagacagatgaactcaatcagtgaagaagcagatattagagtgatggtcttttgcttgtttgaccagtcttctttccagatgtttgcttatttttctgttggctaaataggcaaaatctaacatttgtgtagtgctgcctattacagttggacagcagggcgggtaggcttatgctcattttatagaggagaagactaatgacctgagaggtaaagtgaattgtctgtggttgcacggctagtaaatggtgggattcaaggacagaacctcytgctcttcccaagagccttggccacgaaaacctggcatattaaacaatcctgctccccttcctcctattcagctccctgcattatcatggctccaaacaaccctgtcagttaactcattgggtttgttgattttctctgaaagacttaacttgcaacaactgaggccctacaacctgtgaaatagggttgaaggctaatcagagataaccgtgtgca

SEQ ID NO: 513493 - DNA, 476 bp, Homo sapiens
ctgctttgaacccagtgatgagtgcatgcagtgttggggatgcagagctgaatacaaggtgacctctgsccttctggagctcaccggtgggtgggcacagtaggtgtgtacataaataatgatggtgcagtatcataagggtgctgagatcaacaagcactgggagccacagattcacaggggcagaagagactacctctgcctgggggaactttgcagacggaccatgagatcagcagtatgtgggataaaataaggaggacataaaactcgaagtaaggggtaaaattgggccatagtgcagcaaaatgatggaggctcgaagtagggcagaggcagcagaggtagggatgatgagtcgaggaaggcgggggtggaggcaggtgaatgggaaagagaaaagaccaagttgccttggcgagccctgtgtgtgtcaacattgtggagtgaaggctttcccttctcagtctcccctc

SEQ ID NO: 513494 - DNA, 447 bp, Homo sapiens
ctgagtctgccaaaagggttccctcatcaggggccacagtctttgttgccaagggcactasgtctgggatgaggttcgctggataaaatacaggacatctagttacatttgaatttcaaataaataacaaatcatatcacatgtaatatttggaacatatactaaaattattcattgtttaactgaaattcagatagacaactgagatttaagtaggtgtcctgtagttttgtttgcaaaatctggcaaccttacatgggcctcaccaagagctgccaccagactttagtcagggcactaccatgctcacatcaagccaggagcatgtcaagaccataagttacatgagccaaggacctcaactgccaatgtcaacaagatgcccaccgaccagggacttgtgtggacactgctgtcccgaaccagtggacagggtaaggactctac

SEQ ID NO: 513495 - DNA, 447 bp, Homo sapiens
ctgagtctgccaaaagggttccctcatcaggggccacagtctttgttgccaagggcactaggtctgggatgaggttygctggataaaatacaggacatctagttacatttgaatttcaaataaataacaaatcatatcacatgtaatatttggaacatatactaaaattattcattgtttaactgaaattcagatagacaactgagatttaagtaggtgtcctgtagttttgtttgcaaaatctggcaaccttacatgggcctcaccaagagctgccaccagactttagtcagggcactaccatgctcacatcaagccaggagcatgtcaagaccataagttacatgagccaaggacctcaactgccaatgtcaacaagatgcccaccgaccagggacttgtgtggacactgctgtcccgaaccagtggacagggtaaggactctac

SEQ ID NO: 513496 - DNA, 527 bp, Homo sapiens
acccaatgcactctagtaataatagccaacattaatctactgcttgctggttaccaggccctctgatatgcactttaataggcatcattttatttcattctcactatgaccttgggagatacagctaaggaaattaaggcttaaagaactgaagtgattacccaagatctcagagctaattaagaattgagattcaaatccaaggcctgagttcttagccaycaccctgtattggcaccagtgtgattccacaagtatataaatccatgaatttttcttaattaagaatatattagaagaagtaaaagttgaccatacatattttttcttattgcccatcacataaatggtattcatttgctcaaatgctcagctttctcctaatacccaaatccaaagtccaacctcttaacaacctctctaacccataacccctgtggcactgctgtatgttggctctcattctgcctctctaacccagttttcacactgcggtcagagttcttgttctaaaacacaaaggactc

SEQ ID NO: 513497 - DNA, 527 bp, Homo sapiens
acccaatgcactctagtaataatagccaacattaatctactgcttgctggttaccaggccctctgatatgcactttaataggcatcattttatttcattctcactatgaccttgggagatacagctaaggaaattaaggcttaaagaactgaagtgattacccaagatctcagagctaattaagaattgagattcaaatccaaggcctgagttcttagccaccaccctgtattggcaccagtgtgattccacaagtatataaatccatgaatttttcttaattaagaatatattagaagaagtaaaagttgaccatacatattttttcttattgcccatcacataaatggtattcatttgctcaaatgctcagctttctcctaatacccaaatccaaagtccaacctcttaacaacctctctaacccataacccctgtggcactgctgtatgttggctctcaytctgcctctctaacccagttttcacactgcggtcagagttcttgttctaaaacacaaaggactc

SEQ ID NO: 513498 - DNA, 457 bp, Homo sapiens
acatgaccacacctcgtttcagaggaggtaggaaagaacaatcctagaacaatcctattctggaagttcaaaagccagaatgatcaggtcaagagaacgaatgacaacttcagcagggaacagggagtcatacaaagttcttctaaaaacagaaaactggaaacatacggttgagaatacaaataaggtgtgaaggagcgcatagattacctgaaattgggtgcttggggaaagaaagctgggagacacatcggactcacagagagcttggagtttagggatctcttagcagtccttgcactgaactgtgccttcacattaagcaagatacttattctggcttcgcttcagtacctccaaggggaaaagagatacaamgatggtaatgtataccgccttcctgttagtctgagggttaatgaaagttgggggaagaggcacttaactccctgtttgc

SEQ ID NO: 513499 - DNA, 556 bp, Homo sapiens
gaccacaggtgagtactaccgtatctggcttttttttttttttttagaagttcggcctcactatgttgcccaggttggtcttgaactcctgggctcaagcaatcctcctgccttggcctcccaaagtgttgggattataggtgtgagccgttgcaccaaaaataattccagccaggaattctttttgtagtactcttgatgaattgttataaggattcattttgaatatttcatctgatggaacactgaggtcatgtagaagaggaccaagaagaaaacaaaaatttmccctattcctaccatgcagagacaactcataggtcctttctcatgttgaaccgaatctgggctcctcttctcaatggtcctggttctctgttctaaagatggatttctaataatgcatctgtgctccctcttctaggtaacagcctccgaacaggtaaacgcagattgtacatttctcttcagtcttctctaaattaagcagaattgaccttcaaatattccttaaagcacacagtttccttttgaggcttataaatttgacattgct

SEQ ID NO: 513500 - DNA, 556 bp, Homo sapiens
gaccacaggtgagtactaccgtatctggcttttttttttttttttagaagttcggcctcactatgttgcccaggttggtcttgaactcctgggctcaagcaatcctcctgccttggcctcccaaagtgttgggattataggtgtgagccgttgcaccaaaaataattccagccaggaattctttttgtagtactcttgatgaattgttataaggattcattttgaatatttcatctgatggaacactgaggtcatgtagaagaggaccaagaagaaaacaaaaatttaccctattcctaccatgcagwgacaactcataggtcctttctcatgttgaaccgaatctgggctcctcttctcaatggtcctggttctctgttctaaagatggatttctaataatgcatctgtgctccctcttctaggtaacagcctccgaacaggtaaacgcagattgtacatttctcttcagtcttctctaaattaagcagaattgaccttcaaatattccttaaagcacacagtttccttttgaggcttataaatttgacattgct

SEQ ID NO: 513501 - DNA, 293 bp, Homo sapiens
tatatagtcaatcattaactttggggatagactgtcatgcagcaataattaactgatacagaagaaaactgctttagaatcccggagttgtagttattttggaaatcatctgatggccttgccttacaacaaagggatactggaaactgggagtagacagtttaagagaggggatgacatgggcaggtttraggccagcaatttcatctccatttatgcattaatttagtaattctttcatcaagcattctttgaatgctcactgagcttggtgctcagaaaaatggaacagg

SEQ ID NO: 513502 - DNA, 342 bp, Homo sapiens
aattgcttgcaacagtaggcactaaacacagagattagcataattgtgattataactcccattagcatttgtaatgtaattatagccaagtaacgtgccaggatggaaagattctactaaaacttctctcgcaaagacacgaaaagtgcatgcccttcctccaggaggtagcatcacggggagatggctctgtggtgaggcctttaacctcccagcatctcacttttgcatcagcaaaacattttgtgattattcagtatacstggcaaggatacactgctggaagaaaactgtttctgcttaagatggagtcagattttgacttaaggtggacacattttg

SEQ ID NO: 513503 - DNA, 619 bp, Homo sapiens
attttgcctttaatcaatatctacatgtaatttagagtttttcttttctgctccatccccttttgarttggtggcttgtctcaggatcaatgttgatgtaaaattaagtacagtgtggtcatatgttatttttaaaatccttcgtgagttttataatttcttttaaaataccatcttatttagtaagaatttatggattatttgcatttatcaggatgtctgttttaatatggagttgattctgatggaaaatcttcattgattacaccttgggcccatctttgcttttagttctccacagaaagcctacatgaatgagccactttatcacttctcttaaccatggaagtaaagtctaagagacgaggaaataacacttctggaatgaagccatgcaatccctggaaaggaacttagcgtcaactcgggcagtgacccactgtgaccctgttggttggccataccaacacctgccgggcaaaaccccatgcctgaggacttctctgggctctgctactaccaaacctttaatgccgggtctaagatgaatgaaaatggttttctatgaagaccagtatataaggacagagcaagattcctcatcttcaaatatttatta

SEQ ID NO: 513504 - DNA, 619 bp, Homo sapiens
attttgcctttaatcaatatctacatgtaatttagagtttttcttttctgctccatccccttttgaattggtggcttgtctcaggatcaatgttgatgtaaaattaagtacagtgtggkcatatgttatttttaaaatccttcgtgagttttataatttcttttaaaataccatcttatttagtaagaatttatggattatttgcatttatcaggatgtctgttttaatatggagttgattctgatggaaaatcttcattgattacaccttgggcccatctttgcttttagttctccacagaaagcctacatgaatgagccactttatcacttctcttaaccatggaagtaaagtctaagagacgaggaaataacacttctggaatgaagccatgcaatccctggaaaggaacttagcgtcaactcgggcagtgacccactgtgaccctgttggttggccataccaacacctgccgggcaaaaccccatgcctgaggacttctctgggctctgctactaccaaacctttaatgccgggtctaagatgaatgaaaatggttttctatgaagaccagtatataaggacagagcaagattcctcatcttcaaatatttatta

SEQ ID NO: 513505 - DNA, 619 bp, Homo sapiens
attttgcctttaatcaatatctacatgtaatttagagtttttcttttctgctccatccccttttgaattggtggcttgtctcaggatcaatgttgatgtaaaattaagtacagtgtggtcatatgttatttttaaaatccttcgtgagttttataatttcttttaaaataccatcttatttagtaagaatttatggattatttgcatttatcaggatgtctgttttaatatggagttgattctgatggaaaatcttcattgattacaccttgggcccatctttgcttttagttctccacagaaagcctacatgaatgagccactttatcacttctcttaaccatggaagtaaagtctaagagacgaggaaataacacttctggaatgaagccatgcaatccctggaaaggaacttagcrtcaactcgggcagtgacccactgtgaccctgttggttggccataccaacacctgccgggcaaaaccccatgcctgaggacttctctgggctctgctactaccaaacctttaatgccgggtctaagatgaatgaaaatggttttctatgaagaccagtatataaggacagagcaagattcctcatcttcaaatatttatta

SEQ ID NO: 513506 - DNA, 655 bp, Homo sapiens
gcaagacagctgtagtctcatatgactgagagtgtcacatgcttttcccctgaggtgctgagtagaccgtataccagaaggaattctaaaaacagcaatgtgcatgctttctgctgcggaagcaccctgtcactttcttgtggcccaagcattccagagtgagaaacttggagtgtgtctgcattgttaaaagtatcctttgatttttttttttttgagacagtttcgctcttgtcgcctaggctggagtgcagtggagtgcagtggctcagtctcggttcactgcaacctccgtctcctgggttcaaacaattctcctacctcagcctcctgagtatttgggattacaggtgcccaccacgatgtccagctaattgtttgtgtatttttagtagagacagggtttcgccaggttggcgagactggtctcgaactcttgacctcaggtgatctacccgcctyggcatcccaaagtgctgggactacaggcatgagccaccacacctggcctgatttttagaaaattattatttattacagatttatagagcatgccttgttgtgccttgttgtgccttgaaaaagtattcttttccctgtggttgtagtttttaaaataaatttttcaacagcacatctcatagtattgggtaga

SEQ ID NO: 513507 - DNA, 473 bp, Homo sapiens
tccttagcaccattttacattcccactaacagtacacagggtaccaatttttccatacccttaccaatacttgttactttttgcttttttagtagtagccatcctagtgggtatgaggtggtatctcactgtgcttttgattagcactttcctaatgattaataatgttgaacatcttttcatgtgtttattggccattgtatgtcttctttggaaaaatgtgtaytcaggtactttgcccatattttaattgggttgtttgttttttagttgttgagttccaaccttttcaaaagctgtgtaaacattaactttcagtgaaatcgtttatcaaaacccaataagcaaaataggaaagggcagccctagcctgattgaattggattcatgtacaggactcagagctctgacatacttgcccaagaatttctcatcccagatcattccccctcttcccctccaacatttcccca

SEQ ID NO: 513508 - DNA, 473 bp, Homo sapiens
tccttagcaccattttacattcccactaacagtacacagggtaccaatttttccatacccttaccaatacttgttactttttgcttttttagtagtagccatcctagtgggtatgaggtggtatctcactgtgcttttgattagcactttcctaatgattaataatgttgaacatcttttcatgtgtttattggccattgtatgtcttctttggaaaaatgtgtactcaggtactttgcccatattttaattgggttgtttgttttttagttgttgagttccaaccttttcaaaagctgtgtaaacattaactttcagtgaaatcgtttatcaaaacccaataagcaaaataggaaagggcagccctagcctgrttgaattggattcatgtacaggactcagagctctgacatacttgcccaagaatttctcatcccagatcattccccctcttcccctccaacatttcccca

SEQ ID NO: 513509 - DNA, 304 bp, Homo sapiens
tgctgatacaaaaaaacagaagcatacacacacacgtgaattgttggcttgtgcaacttaaataaaactgtgcacatatacctgtaatttgccttttttctccctctcttaacactttcatggacaaccctgcagatttacagattatttaattctctctataaatgtactcatatatataatttttaaataaagggacactgcatttctcttcactgtggttttattttcctgttttcwtgtttgcttgcctccttcctattctccttctcttcttttccagcatcacctaaacatggatctc

SEQ ID NO: 513510 - DNA, 621 bp, Homo sapiens
agagaggaaggtatggctgagttggagcttgaaagataagtcagagtttacaagatagaaacatgaatcaggataaacaaaacacatgagcaaaggtgaagagatataaaatggcacataggagagaaaagaataatctggtttgttgggaagtggctggaaaagagactggcatgattgtgaaggtctgtccatgtcatgcaaaagaatatgaacttcatcctcaaggattcttaagcaaaagagggatacaagtacatcattaacaacatatactgggggtagaaaatggcctgctggatttggcgggagaacaaactaaaggctagaagaatagttcgaagactgttaaaataatctgggcagaggatgttatggttgtgagctaagcagtatgaattgaaagaaaggtaaaaattcaagatgtgatcttcttaccaactcaaagtcactgtaaaggtccaataatcctatccctctggcacaacctccattcacttgaaagtagcagtattaattttggcaaagcaagrcaccctagtaaaatgtaaaatatagataaccacctcaggctgcatcctagaatcgctgtgatgggtagtaaaagccatcctcagccag

SEQ ID NO: 513511 - DNA, 548 bp, Homo sapiens
caaaacggaccaggcacagtggctcacgcctgtaatcccaacactctgggaggccgaggcaggtggatcgcctgaagtcaggagtttgagactggcctggccaacatggtgaaacccygtctctactaaaaatataaaaattagctgggtgtggtggcagtcgcctgtaatcccatctactcgggaagctgaggtagaagaattgcttgaacccaggaagcggaggctgcagtgagccgagatcacgccattgcacaccagtctgggagacagagcaagactccatctcaaaaaaataaaataaaaccttttgtcttagaagctaccaataatctgagggttgtttattacaaagcatagtctattgtatcctgactgataaaatccttcagttctagaaaatctaagtcactctataacagctttatagttgtccttaatctgtcattgagtctggtagcaatttcccttcaagacccccaattcctccatcaaactctatgactctctaaaaatagctgatttctcacaaaaatatgtagaaaggc

SEQ ID NO: 513512 - DNA, 574 bp, Homo sapiens
gccaacttggtaataaacctattccacattctcaataggattttaaaagtttcacacactgtaaactaatctcatagaaaactcaaattgatccattgtattcattatttatcataatagttaccattattgggyactaactaaatagcaggatttatgttcagctttttataaacaagtgcatttttttcacaatagtcctgaaacaaatactaataaacctcatatggcaattgaagaaataaaagtagtgatgaaaatgatatcacagtggcaaagtgagaatgacataacactaaagagattatgattaagcttgaaaacagagtgaggaatccaaagatactgcaacagttaattcactaggcagaatgctgtcaaattggagtgaattcctgagagaagcattaagtcagtaaaaagatctgaaaaacaattgatgagacaaaattttaggagctgagaatagtgaacctggaggattttggaaaaaaaataggtgtctatttttgcttaattaatgggttgtcatatgaagggaagaatttcatttattcactgtattccagaatat

SEQ ID NO: 513513 - DNA, 574 bp, Homo sapiens
gccaacttggtaataaacctattccacattctcaataggattttaaaagtttcacacactgtaaactaatctcatagaaaactcaaattgatccattgtattcattatttatcataatagttaccattattgggtactaactaaatagcaggatttatgttcagctttttataaacaagtgcatttttttcamaatagtcctgaaacaaatactaataaacctcatatggcaattgaagaaataaaagtagtgatgaaaatgatatcacagtggcaaagtgagaatgacataacactaaagagattatgattaagcttgaaaacagagtgaggaatccaaagatactgcaacagttaattcactaggcagaatgctgtcaaattggagtgaattcctgagagaagcattaagtcagtaaaaagatctgaaaaacaattgatgagacaaaattttaggagctgagaatagtgaacctggaggattttggaaaaaaaataggtgtctatttttgcttaattaatgggttgtcatatgaagggaagaatttcatttattcactgtattccagaatat

SEQ ID NO: 513514 - DNA, 626 bp, Homo sapiens
ggcaaataaacctcctaaaatgattgagacttgtccgtcattgttctcaattgactcgggaaagacagaaatattcaagaaaacattcttatgatgtgattcatactgggaaacaatgcatgtggaattatatactttcttaagaaattgagcaattataattgtttcagcttaggcccaaaagtccaagacttttagggtattttttttttaatgtttgaatggtcaaatattacacattttctctagtaagcttgattaatctctgrcagattaaggtatcacacaaaatttcatcttttttttttttttttttttttttttgagacagggtctcatttagtcacccaggctggagtgcagtggcatgatcatggctcactgcagcctcaacctcctggcctcaagccattctgccacctcagtccctcaagtagctggaatcacaagcttgtgccaccacacccagctaatttttttattttttgtagagatgaggtctcactatgttgtccaagctggtattgaactcctacactcaagagatcctcctgcctcagcttcccaaagtgctgagattacaggcctgagccactatgcctggcccaaagtttcatctttatgtg

SEQ ID NO: 513515 - DNA, 626 bp, Homo sapiens
ggcaaataaacctcctaaaatgattgagacttgtccgtcattgttctcaattgactcgggaaagacagaaatattcaagaaaacattcttatgatgtgattcatactgggaaacaatgcatgtggaattatatactttcttaagaaattgagcaattataattgtttcagcttaggcccaaaagtccaagacttttagggtattttttttttaatgtttgaatggtcaaatattacacattttctctagtaagcttgattaatctctgacagattaaggtatcacacaaaatttcatcytttttttttttttttttttttttttgagacagggtctcatttagtcacccaggctggagtgcagtggcatgatcatggctcactgcagcctcaacctcctggcctcaagccattctgccacctcagtccctcaagtagctggaatcacaagcttgtgccaccacacccagctaatttttttattttttgtagagatgaggtctcactatgttgtccaagctggtattgaactcctacactcaagagatcctcctgcctcagcttcccaaagtgctgagattacaggcctgagccactatgcctggcccaaagtttcatctttatgtg

SEQ ID NO: 513516 - DNA, 526 bp, Homo sapiens
ggagaacatttcatcagtatttgagtgaatgctattttattgccttttgttggagtcttccttttcaccccaatgatttcacattttctacttgctgtctcattcttgacttcccactctttggattttctcagtggagcactttatctcactcctaagtagctccaatagtttcagtacacagttcagtgagtcaaattgatgaagcattaaggttgaaaacaccactggtgattttttcttaaaagttgtatttagatggaaaatattcttgagaaaacctygagaagcactagaatgcagtagaattttactttcatatgacttctatcaatgcagctagactggatttagttttcaagttgtcccatcctaaaattgatcctagtgagttcacagttaaaacttttatgtttttttccaagtgaattttagctatgttacctatcttctcattctgtacttatgtaattattttttgaacataaatacagggctttaaattcaccttttgagtttgagatcc

SEQ ID NO: 513517 - DNA, 582 bp, Homo sapiens
tgactctcatctcctgcctgtaccctgcttcctttggtaattgtagcatttctaagcactgcatccaaatgatataactgtgttgcctgggccctgtctacaagaggcattgtgacatatttggaggcccatcatttggatgacaagactctcctctccctgcttggacactgcccacaaaggacattgtgccacagagctggaccaagagcacaagttatgtgacatttctgacaggaccctgcctacaaagagaatattggaatatttctagcccaccatttagccctgaagtrgctgttctgcctgcttcataatcacagagggaatcgtaatatatacctaggcatgggtcacagacatgataatgactctcatatgtggactcagccaacagaggatattatgactcttataactaggtttagggacatgtgtgatgtcctaggtcaccttcttgtaaaaaggttacaaaagattacaacattctcacatattttacaaagtctttgggttatacagacagagtaaaagtagggctcagcacacaggcgaaattgtgagtcttttatgcagaaccag

SEQ ID NO: 513518 - DNA, 582 bp, Homo sapiens
tgactctcatctcctgcctgtaccctgcttcctttggtaattgtagcatttctaagcactgcatccaaatgatataactgtgttgcctgggccctgtctacaagaggcattgtgacatatttggaggcccatcatttggatgacaagactctcctctccctgcttggacactgcccacaaaggacattgtgccacagagctggaccaagagcacaagttatgtgacatttctgacaggaccctgcctacaaagagaatattggaatatttctagcccaccatttagccctgaagtagctgttctgcctgcttcataatcacagagggaatcgtaatatatacctaggcatgggtcacagacatgataatgactctcatatgtggactcagccaacagaggatattatgactcttataactaggtttagggacatgtgtgatgtcctagrtcaccttcttgtaaaaaggttacaaaagattacaacattctcacatattttacaaagtctttgggttatacagacagagtaaaagtagggctcagcacacaggcgaaattgtgagtcttttatgcagaaccag

SEQ ID NO: 513519 - DNA, 495 bp, Homo sapiens
ccccagaggacattgttaaaatagcacagtcagatcaccaaggtacttggcccaggtatttgtcaaaatctgatttgtgtgctatacctaggcagaattattaaatcactcaggagctgggcaaaagtatatgtcacaattacacttgtgggaagatttaaaaataagagtcaccatcctgcacatgtcctggccccaggcatatgagttcttattaggcttttgttagggtcttaggtatatggaacaatatcacctgtggccagagagaaggcaagaaagycacatcacctatatgggtatgggtccagtgagatgtcataatccaccttgcagccaggaccccggcagaagtgtcgcatcacctggatgctggtttcagtgacatctcaaaaccccctctgtggccaggactttggaaagataggagattcacttcacctaggcaattggcctatatatatgtcacaaagacccttatgtgcagtaccacag

SEQ ID NO: 513520 - DNA, 278 bp, Homo sapiens
atagatgggtgtgctgttttagctgttactgagtagctcgtctggttttgggggacttggttatggttctctgtgtaaagttatttctggttaatacattatgcagaaggtataagggtttgtctttgctttttaatgctgtattcagttctttcatctttcccttagggtattatgtctattatgccagggtgaaaatttctatcacctatagctttttctaaggtaaatggttggwttaagatggtttgataatatttttagtgaagtttgggttt

SEQ ID NO: 513521 - DNA, 505 bp, Homo sapiens
gctgcagcactgtgtccatgtgcctctttggtcccaaccccaacagtacacaggcttgttctaaagccggcattgtctatttccacatcaccaccaaatggacccgagtggacactgagctgatgaagtactgagtaggggtgtgcgggtggaagtgggggttgggggctgcttcccagactccagcaacagcagcaggatgaccccagagtctatcagtagagtccaaggcatggaggagaagccagggcacccagagtggtccctgacgttgcccgtgatggaagccatccttttgctttaaagcgtccactgtcacccatgcacctccctggggctttcttaccccgtgctcatcttacacagycagataaagtagcggagcaggtggctggggacctagagaggagggtgttgtaagacacccagagctactctgggttggtgcagttagtgggactcaatactaggaccccctgggcagctctaggttccttctctgcca

SEQ ID NO: 513522 - DNA, 456 bp, Homo sapiens
taatggaaccaaaagttagtgaggccgggcatggtggctcccgcctgtaatcccagacctttgggaggctgaggcaggtggatcacctgaggtcaggagttcaagaccagcctggccaacatggcaaaactgctgtctctactaaaaatacagcaattagctgggtgtggtggtgtacacctgtagtcccagctactcaggaggctgaggcaggaggatcacttgaacccgggaagtggaggttgcagtgagacgagatggtgccattgcacttcagcctgggtgacagaggacagagmgaaactctgtctcaaaaaaaaaaaaaaagttagtgggcaggtgtggatcttgctcttttaagaaaaaagcacagcttttccttccccatgaggcccttcccacaggcctttacttctgaacaactgcatagccacagaggaagttcagagccgaggg

SEQ ID NO: 513523 - DNA, 469 bp, Homo sapiens
acacacctgtaatcccagctacttgggaggctgaggaaggagaatcgcttgagctcaggaggcagaggttgcagcgagtcaagatcgcgccactgcactccagcatgggcgacacagcaagactccatctccaaaaaaagtggggggaggggctcataattcttcatacctcacttttgcatatgtcctagagaccttgttatacaagtacacacaaatctacctcattcttttatatgtgattccacagttttaattcattccgttatttactcatttacttgatgacttttattgaatacctactatataccatggagctatacagcagagacatagcagtgaagaagataaatgaggccccttctgtctggtccttgtatcttagygggcagtagacagaacaaacaaaacaaaagcaagcttcgttcagatcatcacagaactgctgtgtgaagatctgaattgt

SEQ ID NO: 513524 - DNA, 632 bp, Homo sapiens
ctgcattccctggcctacaagcctggctctcccttatggggtcagcagttttactctctgcctctggcacaagccatgccgaaccacatgtacagcgtcagcagggcagttataccttttacagacaatagtggctctgagccacttacacaaacagattacataacaagtggagttatgcgcctggcaaggactccctgagtcacgctggccctgatgtttgcctctgcctgttttgtttttgtttttgtttttgttttttgagacggagtttcgctctgtcgcccaggctggagtgcaatggtgcaatctcggcttactgtaacctccgcctcccaggttcaagcgattctcctgcctcagcctcccgagccaccacacccagctattttttttttttttttgtatttatagtagagatggggtttcaccatgttggccaggctggtctcaaacacctgacctctggtgatccacccgcctcagcctcccaaagtgttaggattgcaggcgtgagccaccgcacctggcyaacctattcttgaccaaagcacatccatgtaccttacacccacttaccttcccatcaagaacactcaacgatgtccctttccctacactctcgccagtat

SEQ ID NO: 513525 - DNA, 578 bp, Homo sapiens
tgcctcactagctgagtgccaggctccagggcacagcgcaggtgagtcatgttccactgcatcctcgacagagaaggccctgggggagaggtgcctgtgattgtcattgccacagttatccaatccgaaatgccatcttgatgaaccacacatacaatcatagatgcatgcacgtgcacacacaggcatgcacacrcacagtgttttcccagtccatgcccttcctgtctccatggaaacccccctccccgttcccacctctgcagggagggagctactcacccctcagttcagattcctgggtggacaagggctgtctgcctgccactgtctcctctacaaccccagggtccgagaggccctgaccccagaacatccctgacccaggcccatctgaggagaagctgggactttggcttgtattttccaggctgttttgctgtgggcggccccagcaccatgacagacaccgcagtggggatccctgaatgtgcagtgtcagtatgaggaggaatacaggactttcaacaaatactggtgcagacaaccactttttctactatgtgacaagactgtaa

SEQ ID NO: 513526 - DNA, 324 bp, Homo sapiens
ctgcacctgctctcaaggggcggcaccctagatgggagcagacattgactcgccaacagaaagactgaggaagacgagagggaagtgtgaaatgggtcatgaggacccctaaaaagcgagccaccataacccgggaaggtcaaggaacaygcaggcaaccctgtcggctggagccaggcagaggagtgggaggttgagggtctggacaaaggcccgagtggggagggtggcagcaccagtgtgaacctggatccaggaggctggagacacctaccaggtgctggggcctgccaggacctgtgtgcagaggccaggtcaggtggg

SEQ ID NO: 513527 - DNA, 408 bp, Homo sapiens
ctgcacctgctctcaaggggcggcaccctagatgggagcagacattgactcgccaacagaaagactgaggaagacgagagggaagtgtgaaatgggtcatgaggacccctaaaaagcgagccaccataacccgggaaggtcaaggaacacgcaggcaaccctgtcggctggagccaggcagaggagtgggaggttgagggtctggacaaaggcccgagtggggagggtggcagcaccagtgtgaacctggatccaggaggctggagacacctaccaggtgctggggcctgccaggacctgtgtgcasaggccaggtcaggtgggtgccatcctgtgacagcaggagccattgggagttcagcagcgcctccccagggccatgtgtgtgtgtcagggatcacattgctg

SEQ ID NO: 513528 - DNA, 618 bp, Homo sapiens
ctgcacctgctctcaaggggcggcaccctagatgggagcagacattgactcgccaacagaaagactgaggaagacgagagggaagtgtgaaatgggtcatgaggacccctaaaaagcgagccaccataacccgggaaggtcaaggaacacgcaggcaaccctgtcggctggagccaggcagaggagtgggaggttgagggtctggacaaaggcccgagtggggagggtggcagcaccagtgtgaacctggatccaggaggctggagacacctaccaggtgctggggcctgccaggacctgtgtgcagaggccaggtcaggtgggtgccatcctgtgacagcaggagccattgggagttcagcagcgcctccccagggccaygtgtgtgtgtcagggatcacattgctgattctgtggagaatgaaaggggtgggtatgagcagaaggggagaccaggtcagcccatgaaagagccgggatacttcaaagccaggcccaggccagacctgagcactgggctaattggaggccctgggattgcactgggctagagatagtcccatgatgtgagtctgggggcatcaacaccaatgaccccagtgcatgctgtgtccctga

SEQ ID NO: 513529 - DNA, 618 bp, Homo sapiens
ctgcacctgctctcaaggggcggcaccctagatgggagcagacattgactcgccaacagaaagactgaggaagacgagagggaagtgtgaaatgggtcatgaggacccctaaaaagcgagccaccataacccgggaaggtcaaggaacacgcaggcaaccctgtcggctggagccaggcagaggagtgggaggttgagggtctggacaaaggcccgagtggggagggtggcagcaccagtgtgaacctggatccaggaggctggagacacctaccaggtgctggggcctgccaggacctgtgtgcagaggccaggtcaggtgggtgccatcctgtgacagcaggagccattgggagttcagcagcgcctccccagggccatgtgtgtgtgtcagggatcacattgctgattctgtggagaatgaaaggggtgggtatgagcagaaggggagaccaggtcagcccatgraagagccgggatacttcaaagccaggcccaggccagacctgagcactgggctaattggaggccctgggattgcactgggctagagatagtcccatgatgtgagtctgggggcatcaacaccaatgaccccagtgcatgctgtgtccctga

SEQ ID NO: 513530 - DNA, 591 bp, Homo sapiens
gctgcacctgctctcaaggggcggcaccctagatgggagcagacattgactcgccaacagaaagactgaggaagacgagagggaagtgtgaaatgggtcatgaggacccctaaaaagcgagccaccataacccgggaaggtcaaggaacacgcaggcaaccctgtcggctggagccaggcagaggagtgggaggttgagggtctggacaaaggcccgagtggggagggtggcagcaccagtgtgaacctggatccaggaggctggagacacctaccaggtgctggggcctgccaggacctgtgtgcagaggccaggtcaggtgggtgccatcctgtgacagcaggagccattgggagttcagcagcgcctccccagggccatgtgtgtgtgtcagggatcacattgctgattctgtggagaatgaaaggggtgggtatgagcagaaggggagaccaggtcagcccatgamagagccgggatacttcaaagccaggcccaggccagacctgagcactgggctaattggaggccctgggattgcactgggctagagatagtcccatgatgtgagtctgggggcatcaacacca

SEQ ID NO: 513531 - DNA, 413 bp, Homo sapiens
ctggaatctttctatttctccatttattcactcatcctgtgctcgttcattcatttactaagtcactaattcactcactcaacaaacccttgagttcctaccatgcttcaggcctgaagggataggtccccagggctgaggtctctagggaaaggccttttcccagaaggcttgtaaggtcctccatcctggccrttgttccgggattcaacctccttcctctcctcttgtctctagctggtgaccattcagagctgtcccagaaccccaagcaggtaagggggctttagcaggaggtgtatcaggtggctgggcggagggtacagaggctgctggggagttggacagtcccatcggccaacggaggttggatggagcggggagctcacccagagcaggacgaatgatgctgg

SEQ ID NO: 513532 - DNA, 546 bp, Homo sapiens
gtatctttttggtatcttacctaaaatgtaatattatttcacttacaaacaaacatcactgcaccacctgggaaggacttgtggcgagaagctatgcaggcaattyacaaatattcaacttagtcccagagtcctgcgttgcacagctgagcgttgagaaccacactctgcttccctgaagttctacatcagagccagccagcccttctcttgagtctcagcctgggctccagcaggctgtttgttgcctgctgtgtagcaaagtgaccctcagagccagctgcccctccctgggccctgcctggggactcaggactcctctcccctgcagctgggcagagcatctgtttccagctgaagttttcctgcctccccaaagcttccttatttcactaggcttggagggttgcagcctccgactctcccccagctcctcctttccttccactcatgcctttgttctctttttaagtcaatttctgaaacattctaaaaccagacttccccactgcacacacacacaggcacaccacatccgcatatact

SEQ ID NO: 513533 - DNA, 546 bp, Homo sapiens
gtatctttttggtatcttacctaaaatgtaatattatttcacttacaaacaaacatcactgcaccacctgggaaggacttgtggcgagaagctatgcaggcaatttacaaatattcaacttagtcccagagtcctgcgttgcacagctgagcgttgagaaccacactctgcttccctgaagttctacatcagagccagccagcccttctcttgagtctcagcctgggctccagcaggctgtttgttgcctgctgtgtagcaaagtgaccctcagagccagctgcccctccctgggccctgcctggggactcaggactcctctcccctgcagctgggcagagcatctgtttccagctgaagttttcctgcctccccaaagcttccttatttcactaggcttggagggttgcagcctccgactctcccccagctcctcctttccttccaytcatgcctttgttctctttttaagtcaatttctgaaacattctaaaaccagacttccccactgcacacacacacaggcacaccacatccgcatatact

SEQ ID NO: 513534 - DNA, 587 bp, Homo sapiens
gtgggaggctgaggcaggaggatcgcttgagcccaggagttccagactaacctgggcaacatggtgaaaccctgtgtctgcaaatgcaaaagattagccaggagtggtggtgcatgcctgtggtccccactgcttggggggctgaggtgggaggatcgcctgagcctgagagttcaaggctgcagtgagttataatcgcccaccactgcacttcagcctgggtgacagagtgagacactgtcttcaaaaaattatttatttttaaatttaaaagaagacttggatgtatgtccaacgccagacatttggggtttgctctgtcagtgacagctcatcaacaggtcagaacttcatctgtgcctggatcatggcagtggcatctggagaggtcttcccagccccagcagcatcctccccaactctcctctcctgaggattatggccttcataatcttgtcttttgtgtttccaacctcatatcyaactcgccacccccaagatgtcctgcacactgacagctccctcagctttcctctccatactgctgcctgagttgggtactgagactgtctcctcctcctcatcag

SEQ ID NO: 513535 - DNA, 632 bp, Homo sapiens
agaagcatatatatgactaaattaatgtggctattattttgggcaagttctggttaattaagaattctatctgctragctggttgagatttcactgtagttagattttgcttaatataagtttgtgtctgttgttaattatgtaaatcctttcctatggaatggaaaacagctaattaccattttaatctaatagattcttgttatgcagatatttgtgcacatttggaatagatatgtttcagaaaagctgattataaagccaaattttatattatgaggcttaattttcccattgattttcattttaaaatataatttgggttccattggagtgccggggtgtggtgtgttcactgggccatggtccctgttgccctgctggattgatgtagaaattttgagtttagagaaccagagttttaaagtcccataactttgcatcttcaggtaatgtatactgaatttttctgctcagttaaatgtataagaggaaaattcagtctgtcattttgttttaagagcaaatatcctatcattatggggtttatatactcctttaaaacttctcttttttttttttaagagaataattctgatttcttcagaatctcctggagaggtagtattaat

SEQ ID NO: 513536 - DNA, 450 bp, Homo sapiens
gcaagcagctgtaacagggctgccttcactccggcatgagggtcagttaatgaagaactggtggtgggtacatgctggttttctgtccgataatctagatcttcctcagtgactggtggtggttcaggaggctcgggaggtcgttggtcaggaggcagaattcgaggccggtctggttctggcgttagctccaagatcctcatatcttgatgctggatgaggtcatcttgtcctaagtgaaacagagcaaaaacaaggtcaaaagttaccatggaaaactaaatattcaaaatactcagtgtttcctgtaggtagttctaaagatgattagaagttccatctctggcaaaatgttaaatgaaaaaagcaaaaagtttacaagtactatggtaactggtaaattttactgtatatggcktctctttaaaaaaaaaaaattttttttttttt

SEQ ID NO: 513537 - DNA, 640 bp, Homo sapiens
ctacatattgcttagaatttgatatacaatatataaaataatcttttacttattcctttttagtcacctgaatttgtttagtttctctacrattcaacatacttttaatttttaagattttttaaaaaatacaagacactaaaaatattttttaaagtaaaataaaaattaactatttgtagatagatttatataaatttaaacatttccttgagcctagttatccagttgcacttttataacaccattgtataggtttgatatactcatagatccttgatgtgtttgagaaactagttgtcataatttttacaaattttgttcttccacccagtaaatcatgtgtcatctaaagttagagggcaatatacattaaggtgcctgacctgtgcccagcattgtttgggctttgtgtgtggggttcataataaagaatgttacgaggttttttaactttctgggaaaatacaaaatagggagttaagacaggtaagtatgatgtaaatttaagaatgtgaagataaatatattattaatagagattagactttatgaatatgcatcttttactgtgttgtaaaggaagtatagcacttgaatgagaaaaatagggaaaggattttattaaaaggggataagg

SEQ ID NO: 513538 - DNA, 585 bp, Homo sapiens
taaaggcctggccacatttcttagctcatggccccattcctttttcaaagccagcaataggtgttcaagcctttctcacattgcattaccctgaaactgacacttctgtcttgctctttcgcatttaacagcccttgcagttacattgggcccacccagatactccagcataatctccttatcttaaagtgaaaaacttattagtaacctaaattccttctgataccttagttttcctttgccatataatttatcatattcacaggttctggggattcaagcattgacatctttgggagrcaattattctgcctaccatgtgcatttaaattggctttctctctctgagactggagaagaacctttttcacccttgtatgtgcctatttcaaaatggcaagaaaatctgtactccaatgggagaggatttttatgaatgtattcgtaagtatgcttgtgtccaggttgagcattgatgaatagaaaaattaaagggcttgctttttgtaagcttttggcaagtctctttaggagagacacatatttttgaagatttagtagatttttgttttgctgttttgtttt

SEQ ID NO: 513539 - DNA, 625 bp, Homo sapiens
caaaatatattaacgattgtaaagtttacatcattactttttctcctttagctcatttttccattctacttttcctagggtattttatcttaatatgatttaattcttaaaaactaaattggtaatctaattatattactttggtaaagtatgtgtgtrtatatatatatttagatatatgttatatctaaaaatatatatattatatatatgtattatatatatttatataatatatatttatatatagatatatattagatgtatattatatatagagagagatttttagaatcctctatgtctataaagctctaagtgttgaatttttttcttctggaatgaattattacaaattattaatacataatttatcaaatcataagcattaatattctggcaaattaaaatataaaatgttattggaaatgtatctcaataaaatgatagctgtttttcagtagtttaatattctagatgaattccattttttgtaagaatgagacagattttatcatcaattttcaaacattttattttatttttaaaatacgtaagcataggaaaaacttgttatcatacacgactaaattggcacgaaaggaattttctcataacaacgtct

SEQ ID NO: 513540 - DNA, 380 bp, Homo sapiens
cttgctacagttcttgagagaaatagcatggctaggctggccctcacaggttatgtagaagggcagtggtaggaatcagaagaaaacatgtttagtgggaattgcggatcatcagtgagctatgtggagctaggtcacagagtagcaactctggagtgttcacatttattaaacmacctctctagtagcttctctgaaatctggtgactcatatccacttcttgccctcagtaaaagttcagaggttaagacatatgtccaaataagtatgaccaaagatgtgggtcatagaaagggaataaaacaggagcctctggagtgaagagctgtgaggggcttcactcaggagctgttaaaccttctgatggttcataccacct

SEQ ID NO: 513541 - DNA, 634 bp, Homo sapiens
acctaatcctttaacatcactcctttgaaccctcttagcacttgaaccctcataccacctgattttaacagttcctttagactgcattgtagccatttggtgctgtgatcttgtccttcttggcctactttctctctacctttactaggccaggaatttcataaagactgagataaaagattatactcctctttatcattagtatttattgctatatgagaacataataggggctcaataactgtttgtggaattaaactgtttgtcttccatgtaaagcagaaaaagaaatgataaattggggaaaggcatgtaaaaaattaataattccagaatcaaagctcagctttttcattgataaaatgttatcgataagcacattttgtgtatagacaaggcttctagacgttctgagaagttggaaacatggattctaaaatgagacctgcaaataccaaagattcatycagacttgatttatgtaatacttttttaatagtgggagacgttcaacaaaaggaatagtctaaatgttattatttttgcatccataacactattaagactctaccacctcttaattcctatttacagtgtcttagttctgatcttcattatttttcacctggataat

SEQ ID NO: 513542 - DNA, 634 bp, Homo sapiens
acctaatcctttaacatcactcctttgaaccctcttagcacttgaaccctcataccacctgattttaacagttcctttagactgcattgtagccatttggtgctgtgatcttgtccttcttggcctactttctctctacctttactaggccaggaatttcataaagactgagataaaagattatactcctctttatcattagtatttattgctatatgagaacataataggggctcaataactgtttgtggaattaaactgtttgtcttccatgtaaagcagaaaaagaaatgataaattggggaaaggcatgtaaaaaattaataattccagaatcaaagctcagctttttcattgataaaatgttatcgataagcacattttgtgtatagacaaggcttctagacgttctgagaagttggaaacatggattctaaaatgagacctgcaaataccaaagattcattcagacttgatttatgtaatacttttttaatagtgggagacrttcaacaaaaggaatagtctaaatgttattatttttgcatccataacactattaagactctaccacctcttaattcctatttacagtgtcttagttctgatcttcattatttttcacctggataat

SEQ ID NO: 513543 - DNA, 615 bp, Homo sapiens
tgcgtgaagaactgggctcttccaatttcacataaaccgtactgtcattttggttcatgcaatattccatcctcgtgttggatccaaacgtgaagatccaaagacaggttgggggaaaacaaacagtttttgacacccttcttcttgaaattataaatcatccatggttcaatggatactccagccacagttataccttgtccttccttctctccattcccccaaaggttaaaggcatcgctcccaatctgaaagtttttactagaacttttcaaatctcttccaacttcagaatgactaagtatagctcaagcacttgaggraaagctgaagaggtcatgtcctaaattgctatttagcctcacctggcaggagttgatgaagacaagtagtgagtaaacaatgaaatatttttgaaaccctctcattctattcatctaataattgagcacaactatcatactatcatagcaacaataattctacaaatctgctttccatttgtttgtgttagaatcctataccctcctaggtcattttaacaattgtttttaagaagctggacaaaaattgttttaaataaggaaaagtgtcaagtctcagtgtgctctaatt

SEQ ID NO: 513544 - DNA, 624 bp, Homo sapiens
gcatatgcaattagtatactagacacttctccttggttgatgcttttcttatactcttagacttgcccaagaactttcctctttgctgggtaagggcagagctctggtgcttgcttgaacaatcayaatacgcaatccatatattccctaggcaaaatctgccgtgtagaaatctaaggtggaattcatcagaattcacaaatgctcccctgaaagatgatctgagttttctcaagtgggcctttgtgaaagacaaggctggagctaggggttagccccagaccctgagattaggaccacaggacaaccagacattattgagaagagctcaggaggcagaacaaacccaggcctcctcacgggtcatggtaattgagagaatcaaagtaatggtgattctcaaactcagataggtaattggttcatggttctgtgtgatggaggggttgattcaatttaagtagatcataaccagtatctgggagaactgaaaaagggtccaactcctgggaaaaaggacagaggaaaccaaccaagtgcattacagttattagcaacattctctttttaagagaagtcaacagggaaactaagctcaagtgcaatcattcaggctgagcattg

SEQ ID NO: 513545 - DNA, 511 bp, Homo sapiens
gtaataaagcagaagaatatttgcttgggccaaagaaagaccttggtctgccgattaaaagagctcatrttattctacacacagatcttgacacatcctactaaattcctgactctgtaagaaaatatttttacaagcttacaggtaggtagaacatagtacttcaggaaaaaaaaatcagaggcatcagacttctcacccgcgacaatggaagccatagcaatggctctagcaaaatactaagagaaaagtagcaaaccccaaacacaacatctgtcacttgtcctgaaaaaaaagtgtatgtatggatactcagaaaatacaccacccacatatgtcatatagaaaaacacctgaaaaagatctctgattgagggacaaatgaattagagacctctggggaaggacaggagagacaagagcagcaagaagtaaaccctgtctgtgcctgaacctgctttctctatagatacacagtttcatgtatctgtatctattccactagatagat

SEQ ID NO: 513546 - DNA, 600 bp, Homo sapiens
cctcaatgaatgttatgcatgcgtgcacacacatatgtatctaggttgcaatgtaaaatgtatttctcgctgtggataatggtccaaaaactttgaaagcccttgttctagtgaaaatggttcataaatgaccaggctataaaataatctaggtaggcattagctaatacaaaaatraaggagttactctcataattttatagattgactagtcatggagtgctcatacaaaatgcattttgaagagtatcataaaaattatttgtacttggaaataaattgttgaggtatatactaaaggatactaaattgagaaaaaacattactcattaacaaagtaaattatgagatgttaagtatcaagaagtatttcttataagtgatctgattttaaggcgtagtattgctcatttaatatagttttttggctcttttgttgtcttgtttgtttgttttactgtttcctatgtggtgcgtggtgaaaatagagttctctggcagtgtttcagggcatgatgtaacagctatccaatgagaaggtcacgttccattagtataacagctctcctttttagtgtgtgacaaaagaacaatgaagcc

SEQ ID NO: 513547 - DNA, 465 bp, Homo sapiens
ctgttctgtgaagtctagagtgacccaactcatgaatgacccaggacccaatccaaactatcagaatgttctgcatttaagatgcacaaataaacaagagcagcagcaaaactcctaaggaaatacacattgttgagtaaaagatgcccatctgaaaagactaccaattgtatgattccaaatgtatgacattctgagaaaggcaaaactatggagacagtaacaatatttaactgccagagsgtgggtagagagagatgagcaggttcagcacaggagatttttaggtcagtgaagctattctgtatgacactgtaatggtgggcacatgtgattatacatttgtcagaaccaagactgaactctaatgtaaactataaactttagtaataatggatcgatattgactcatcagttgtaacaaatgtaccacactaatgcaagatgttaacaataggggaaaca

SEQ ID NO: 513548 - DNA, 465 bp, Homo sapiens
ctgttctgtgaagtctagagtgacccaactcatgaatgacccaggacccaatccaaactatcagaatgttctgcatttaagatgcacaaataaacaagagcagcagcaaaactcctaaggaaatacacattgttgagtaaaagatgcccatctgaaaagactaccaattgtatgattccaaatgtatgacattctgagaaaggcaaaactatggagacagtaacaatatttaactgccagagcstgggtagagagagatgagcaggttcagcacaggagatttttaggtcagtgaagctattctgtatgacactgtaatggtgggcacatgtgattatacatttgtcagaaccaagactgaactctaatgtaaactataaactttagtaataatggatcgatattgactcatcagttgtaacaaatgtaccacactaatgcaagatgttaacaataggggaaaca

SEQ ID NO: 513549 - DNA, 617 bp, Homo sapiens
tactcaatcaatatttgttgaataaacaaacaaattacaactttagttcaatgtcttacattcaccacaacaaacctgaaccaaggaacattactcaggaaaaacaaaacaaaamaacaacaacaacaacaaaaaaaaaacactgaggcaggaccaaccatccaattaaaaacttttaaaaagaaaaaaatttaagacacaacgtggagttaacttttttaaaaaaggtagggaagctgacagacctatttaaaagcaaatgtcgaatacgatggattttcgattttcaaatagcacggggtgggggttacttacgcatttcccacattcaattgaaccccaaacactggccctcactggcttgcaatgttgagacaattatgcttatccaaggctggccaacaatctctccctcactcacttctagccacagctcggccctgcctgaggtccccatccacacgcctcccctgggagttccacgtggacactgctgacccgaggaagctgtacaagccacatatggatcacattcccagggagaaaggctatgccatcctaacatgggcagtgacttctaaggggcttgaggagttagttccatgtccacacggagg

SEQ ID NO: 513550 - DNA, 524 bp, Homo sapiens
ctagcatataaaagttttctctgttttttgcttctattgacatattttttcacatttaagtctttaacctgtttagaatctcccttcgtatttgatgttagttaaggatctagtttgcatttctcaacaaaatgatgatattaggtaataatctggttactattgctccacacagccaatttcatcaacaccatgtactgaaaaaacatttaatttgtcaatggatttttcatgccttctttaatatatgttaaattctgatacataagtggttgtttctaaattattctattccactggtctgttagttcttgacctcaaacctgctaaaatcacatgttaattctgttaatatcaggcagggcaaatttcaatatactcttctttttttttaaggtttaatgtttttaaagttgacttttattcacatttmagcatcagtttttagaacatgtggaaaaagtattgaaaatataagaatatctaataaaaataaaaaaacaaacaaaaaacagtaagtttat

SEQ ID NO: 513551 - DNA, 511 bp, Homo sapiens
aagcactgacaatttgagaaatcatttcaatagggataaataaaaatgatttttaaaatgtatttgctttgatggatgagttgattatcgattgagatcaagttatttaagattcagtttaaggaggaagctataaatatttaggattcttgaagttgaaagtgcttgagcacatggaaytgaaaggaaggatgaggagtcatttagctcttacataggagaaaataggaattagacgctatccccgcagtatcagttctcccaggaaaaactaccaggcttgctccttgcccctgaggtttgcggtctccaaagtgtttcttcatccctaataattcaatttctaaggggctccctttacataaaacataatgtgacgatgcccctagagtcacataaccaagtgacctgcctctaccacacacaccaaaatgctctaaattcacctccctggtacagaggtattacaggaacctgcaatttgccacctggaatccccacaacaccagac

SEQ ID NO: 513552 - DNA, 591 bp, Homo sapiens
ggcctacgcacattagggaagaaaatcatctttacttggtctaccaattcaaatgttaatctcatcaagaaataccttcacatacacacatgccaatcatctttactcagtctaacaattcaaatgttaatctcatccagaaataccttcatacacacacgcgtacgcacacatgtgcacacacacacacagaataatgtttggccaaatgtctggacacctcatggcctagtcaagctgacatataaaatcaaaactgtcacagtccccctataaattgatrtataataatataaaaacatttttgttgtggacaaaaaaataatatatttcttcacaactgtacaaaaatgtcattaaagattttttatggtatccaagaaatggaaataatctaaatgcatatcgtgtatgaatttaaaaaagtattttatccatgcaatagaatattgctcagcaataaaaaaggaatagcctgtttattttattctaaaaataaaagtaattacttttgctctaacctaatatttatgcaaaaacctgggtgaaactcaaaaaatggtgaggagtaaaagaagtcaaacacagagc

SEQ ID NO: 513553 - DNA, 591 bp, Homo sapiens
ggcctacgcacattagggaagaaaatcatctttacttggtctaccaattcaaatgttaatctcatcaagaaataccttcacatacacacatgccaatcatctttactcagtctaacaattcaaatgttaatctcatccagaaataccttcatacacacacgcgtacgcacacatgtgcacacacacacacagaataatgtttggccaaatgtctggacacctcatggcctagtcaagctgacatataaaatcaaaactgtcacagtccccctataaattgatgtataataatataaaaacatttttgttgtggacaaaaaaataayatatttcttcacaactgtacaaaaatgtcattaaagattttttatggtatccaagaaatggaaataatctaaatgcatatcgtgtatgaatttaaaaaagtattttatccatgcaatagaatattgctcagcaataaaaaaggaatagcctgtttattttattctaaaaataaaagtaattacttttgctctaacctaatatttatgcaaaaacctgggtgaaactcaaaaaatggtgaggagtaaaagaagtcaaacacagagc

SEQ ID NO: 513554 - DNA, 664 bp, Homo sapiens
gaggcctacgcacattagggaagaaaatcatctttacttggtctaccaattcaaatgttaatctcatcaagaaataccttcacatacacacatgccaatcatctttactcagtctaacaattcaaatgttaatctcatccagaaataccttcatacacacacgcgtacgcacacatgtgcacacacacacacagaataatgtttggccaaatgtctggacacctcatggcctagtcaagctgacatataaaatcaaaactgtcacagtccccctataaattgatgtataataatataaaaacatttttgttgtggacaaaaaaataatatatttcttcacaactgtacaaaaatgtcattaaagattktttatggtatccaagaaatggaaataatctaaatgcatatcgtgtatgaatttaaaaaagtattttatccatgcaatagaatattgctcagcaataaaaaaggaatagcctgtttattttattctaaaaataaaagtaattacttttgctctaacctaatatttatgcaaaaacctgggtgaaactcaaaaaatggtgaggagtaaaagaagtcaaacacagagcaccaaacatgtaattccatataattaaaatgcaagagtagacaaaacaaccatggtgatagacagatatca

SEQ ID NO: 513555 - DNA, 585 bp, Homo sapiens
cttgtttagatcccacttaaaacaaaatattcaagataattttgaaacaaaaacaattattcgtagctaagcatgatggctcacacctgtaatcccagctctctagtgagctgaggcattaagatctcttgagcccaggagtttaagaccagcctgggcaatatagtgagacagttgtctctacaaaatagtaataataataaaattattccaaaagattagttgtgatttgaacaatggatatttgatattttagggaattattgctaattattttaggagtgctaatggttctgtggttgttccattttatctgttgcagcgtaacagtggcttaaagcaaygaccattttattacatcttacaactttgcgagccaggaattttgaatagggttcagctggatggtttttctgcttcatcatggtactcacttggcagatgggcagatctaaaaggtctaagatgatttgacttatatgtctggtgccttggaaaggaagactggaaggctaacctcaactgagactttatactagagcactgacctgtgatctcatcagcgtttcagggttttcagatttc

SEQ ID NO: 513556 - DNA, 585 bp, Homo sapiens
cttgtttagatcccacttaaaacaaaatattcaagataattttgaaacaaaaacaattattcgtagctaagcatgatggctcacacctgtaatcccagctctctagtgagctgaggcattaagatctcttgagcccaggagtttaagaccagcctgggcaatatagtgagacagttgtctctacaaaatagtaataataataaaattattccaaaagattagttgtgatttgaacaatggatatttgatattttagggaattattgctaattattttaggagtgctaatggttctgtggttgttccattttatctgttgcagcgtaacagtggcttaaagcaacgaccattttattacatcttacaactttgcgagccaggaattttgaatagggttcagctggatggtttttctgcttcatcatggtactcacttggcagatgggcagatctaaaaggtctaagatgatttgacttayatgtctggtgccttggaaaggaagactggaaggctaacctcaactgagactttatactagagcactgacctgtgatctcatcagcgtttcagggttttcagatttc

SEQ ID NO: 513557 - DNA, 613 bp, Homo sapiens
tgtgaacttatctgtgaatgtgactatctagaaaattagcaaatcagttaccatttatcttaggtaatgctgtttcgtgtagtaaatgatcagtataaactatttttgttcaatattacagtgaatataaatgttatatataatcaatataacatataagtactaaaaccttttcctttacatgccttctttcttttttccactgagtacttgaaaaaacaactcttgcacatcttctaggattcagccccatgaacaggaaatgtgatttaacagcacttaagcttctgagagttaaatgaatctggctattgattgcttaccagcattaggtgggttatcagaaatgtatgctgttaatttggctggcaatgggattgacagtataacagcactaccaccgaaagcagctttggttttaatctctagaacttttgtaccaaagcagcttggatctgccagggatttgtgttttaaagggattatgttaaagattattaaagttgaaccctcaagggacaaggctggatattcatgctagaaatgcaactcyggatctctaccggccaagtcacttctgaatgtttgaggattcctgtcacactctaagttg

SEQ ID NO: 513558 - DNA, 549 bp, Homo sapiens
tgctgggtattagccatgatataaacatggctagcaggctagccatggatgaatggagactcatttcttagagaaggggacatggactggacagatttattaaaatatatctcaaaatgtatctaacacaggtggatacaaatccaccagcagtgcaacaaagatttggagatcacagataattgtcttcttcaaactgactctatttatcttctctttgctacgtacttaatggcatcagagatatagaagaatagagggtgtcagagacaaaataaaaagaaagtagcttaaggtgatgttatagatcaccacccataggtataggtatatttgaacactctgcagaaacttttgcatgcctgatttcctttgtggaaatgaaataacatagagagaaagtaactaacttttgcatcaagaagggaaagtaaggtgtcttctccacacctccctgcatccgcccacttccctattccttataaagtataactttctggcaggaggcacaaagagaatarccataactatctcatgaaggaatgagcc

SEQ ID NO: 513559 - DNA, 523 bp, Homo sapiens
tttgccatgtaacctaaacatatgtataggttctgggggttaggatgtaagtatctttgagggaccagtgtccagcctaccagggtgggaaaaaaatgttttatgttcttgctggttatctttattttgtgactttctacaatgtacatacactgcttctgtaataaaaagctaatcttcatttaaaaataaatataatggtggaggagaaagaaatacaataagtggtaatattgtggagatcctgaatacacacctacagtaggaatgaagaaaacaaacttaattatatgtgagaataggtattggtgaggtggaaaactgccactgaaagaatcatatttaaaaatgctacagttcaaacagtatgtatgaatgggcagatgatttattctggaaaatgttaagtatcaaacagtgactctagctatgacaagsacactgtgataaaagattcctgtgaaaagtatgcataaaaattttcagaaaatattaattcaagtcccagcattgtcatcactta

SEQ ID NO: 513560 - DNA, 587 bp, Homo sapiens
tgtactctagataactgggtggtatagattctttcctctatgaagtccagttctactgaagtctcaggggtcaaaatcttgggactgtggagattggaatctccccacagcatagaaaacaagttagatagtgmatgggtcagaatgcctaaagtaggtcttaaataattaatattacccaaaagtttttggaagtaatttaaagttttcaaagactctcttctaatttgaactttttgaggtcgaatatgttgtttgtcgaccaccatttctaaatattgaacaggaggggtctgttgaatttcatcctgagtgatgtgaaatccagcctctgtaacatggtggctcactctttgataacagtcaattaattctttatcagtggggacagcaattaaaatatcatcaataaaatgaagaatataggcctggggaaattgggctccaactggtgaaagcacttgttcaacataaagctggcagatggtagggctatttagcattccctgaggaagtatttccattgataatgagctgcagcctcctgattattgatacatggtacagtaaaagcaaatttttcacaa

SEQ ID NO: 513561 - DNA, 587 bp, Homo sapiens
tgtactctagataactgggtggtatagattctttcctctatgaagtccagttctactgaagtctcaggggtcaaaatcttgggactgtggagattggaatctccccacagcatagaaaacaagttagatagtgaatgggtcagaatgcctaaagtaggtcttaaataattaatattacccaaaagtttttggaagtaatttaaagttttcaaagactctcttctaatttgaactttttgaggtcgaatatgttgtttgtcgaccaccatttctaaatattgaacaggaggggtctgttgaatttcatcctgagtgatgtgaaatccagcctctgtaacatggtggctcactctttgataacagtcaattaattctttatcagtggggrcagcaattaaaatatcatcaataaaatgaagaatataggcctggggaaattgggctccaactggtgaaagcacttgttcaacataaagctggcagatggtagggctatttagcattccctgaggaagtatttccattgataatgagctgcagcctcctgattattgatacatggtacagtaaaagcaaatttttcacaa

SEQ ID NO: 513562 - DNA, 585 bp, Homo sapiens
tatactgatatgtaaataagtggtttaataaaaataatagtgacaagtctstcttacaaaataatttcaaataatttatgtaaatggtctccccatttttcaaacaagtgggtctgaactacctaacccctgagtgagctgtgtttaataactcctaaagagtacagcgtgggaagaagggaaaatgagtaactttacagtggagaaacttggcagacactaccacaggtgatcaagttttaacatcatgaagagtaggtcatattgataagatgtgcccttaatatgatgcgatgagaatggcacttatggagtctttggatatagagggtgtttcaattataaagacattctggggccatctgagaatcttgggcataattgatcaacagatcttccagtccttgcattgagatccttcttcagattaactagaagccattttatgtgtgcatactgatagaggaaggatagactgcggtatattgttttatttaagttactactttccatgtacaactccaacacaatggaagtgtacagataagtgtttggttgaatgttatacacagaggataccccaac

SEQ ID NO: 513563 - DNA, 628 bp, Homo sapiens
caggaaggaagtaggcaggggtcactaaagtggctggtggcccagcagatggaaacagaagtatggccccgagggaaggaggcaggtccagggctacagtgctttcaggtactggtgtttctataggggcatttgccacccacatctttggaaactcccctggcctattgtgacatggcagggctgcctggttcttgaaggtagagaaratgctagtggggaggagctgagcctgtgacgtgcatttgtaccaggtccagatgggaaatgatgaggctgcaggctatgatggggccactgtgcactaaatgcttggtaccatcctatgaggggacaaggtgcagacccacattcccataggcacttaagcagtggtggataggaggctaccccaggggttcagctgtccttcaggtaatcagcttacccccaagaaggactgagaggaatatgagtaggacagttggcagatgacaatttcctttgcctggctcacgggagaagtctggttgggccaggtatgtgggtgtttggtgcctccatctggatagtgccagcaggtacaccaccctgccttatacctgaatggccagctaaataaccatagagcttaaggtctggctcaggt

SEQ ID NO: 513564 - DNA, 620 bp, Homo sapiens
cttagagacaaaaaaaacatcactcagaagccaaacgtctgcaaggaaaaatctgtaccctgtgcttagccctgcggcctggaagttcagagaaggctgaaagtgctccctgtgaggaaaccagggcatgtttagacagagctttaatcatgtctaaccaactcagagcagtggcagcagccatcttgctgaagatgtcgcctccttctggatttgcactggagtgtggrggagtgggtgagatctagtgtcagataagctcataataattcctactgcttcctagttattcaaaacatcaaaactgcaaaatcttcttagagagttcagcaacttttttttaactcgaggaactgacatctactgactttgacttctgtcaaattatttatctattctggtgttttattttttccactatatgagaataatcatcacatctattgggatgtcgtgaaaaacttagtgaacccaatgctaaacgatgaagtggactactttcccagaaatctttactctgtctaggcaagggagcttcaacaataccgcccatgcctgttctttacttaatactaagtagctaaagttagaataaattgcagattaagaccactgagaat

SEQ ID NO: 513565 - DNA, 419 bp, Homo sapiens
gtgttgaagcattgcagttggtagacagagaagccaagccacacatggtaagctctgtgggcccctgccctcaccacagggagctaagtgctcctaagtttcatctgagtcacagcaaatttctatgaatgaatatctcataaagtttattctcaaattttagtaacatttttggactttcagaattctcagaatataatgatcaggtctgaaaaaattgaggttttttaaaattttaattaaaattttaaaagttgaaataaaaaaactaaaaaattaaaaatttttaaattaagagaaaataaaaattaacttagaaaatyagcataatgtgataaaaactagaacatcatataattctctataatcctctctgaacctttccgatactcttattttatacctaggaggtgaggcca

SEQ ID NO: 513566 - DNA, 419 bp, Homo sapiens
gtgttgaagcattgcagttggtagacagagaagccaagccacacatggtaagctctgtgggcccctgccctcaccacagggagctaagtgctcctaagtttcatctgagtcacagcaaatttctatgaatgaatatctcataaagtttattctcaaattttagtaacatttttggactttcagaattctcagaatataatgatcaggtctgaaaaaattgaggttttttaaaattttaattaaaattttaaaagttgaaataaaaaaactaaaaaattaaaaatttttaaattaagagaaaataaaaattaacttagaaaatcrgcataatgtgataaaaactagaacatcatataattctctataatcctctctgaacctttccgatactcttattttatacctaggaggtgaggcca

SEQ ID NO: 513567 - DNA, 419 bp, Homo sapiens
gtgttgaagcattgcagttggtagacagagaagccaagccacacatggtaagctctgtgggcccctgccctcaccacagggagctaagtgctcctaagtttcatctgagtcacagcaaatttctatgaatgaatatctcataaagtttattctcaaattttagtaacatttttggactttcagaattctcagaatataatgatcaggtctgaaaaaattgaggttttttaaaattttaattaaaattttaaaagttgaaataaaaaaactaaaaaattaaaaatttttaaattaagagaaaataaaaattaacttagaaaatcagcataatgtgataaaaactagaacatcatataattctctataatcctctctgaacctttcygatactcttattttatacctaggaggtgaggcca

SEQ ID NO: 513568 - DNA, 598 bp, Homo sapiens
gttcccagggaggctggtgaatgcaatgctaaattttcactacctctttgatgtttttctttatttgctttatgtcatatataacttgttttactagaacatcttgaacaggaagtggactgtcaggacactattaaaaacgtggtggtattgacaggatataaacagggagatgagaaggaagaaacaagtagccaagaggaaaatattagatgacagttaaaatttawatgataacataaaagaagtcagctcagaattgctctatccctgacacactaaccctagtgcctggcacatagcaggtattcagtagtataatttgaaatttgttaataattctcagagcaaaccatggtggcaagactaagatcaaaaggtagtttgggggacatatattattatatattacattatatattattacatgctgtatataatatataaccttgatcttctgagccactgtttttcatcaataaaaacatgaagacaatatccaccaaaaactttcattatgaagatcagaagaaatagtttatgtgatgcatccagtaagtaccaagaactagtaggcaatcaataaatggctatgatt

SEQ ID NO: 513569 - DNA, 514 bp, Homo sapiens
gttcccagggaggctggtgaatgcaatgctaaattttcactacctctttgatgtttttctttatttgctttatgtcatatataacttgttttactagaacatcttgaacaggaagtggactgtcaggacactattaaaaacgtggtggtattgacaggatataaacagggagatgagaaggaagaaacaagtagccaagaggaaaatattagatgacagttaaaatttatatgataacataaaagaagtcagctcagaattgctctatccctgacacactaaccctagtgcctggcacatagcaggtattcartagtataatttgaaatttgttaataattctcagagcaaaccatggtggcaagactaagatcaaaaggtagtttgggggacatatattattatatattacattatatattattacatgctgtatataatatataaccttgatcttctgagccactgtttttcatcaataaaaacatgaagacaatatccaccaaaaactttc

SEQ ID NO: 513570 - DNA, 450 bp, Homo sapiens
taccttaactaattaatatctacaacaattctacttccaaatagggtcacattttaggggaatgcaattcaacctattgyatatggcttccaatattcttagtgtggggagaatcccattaatgaaattggtttcagagctcagttgatcaaagtttcagagctcagttgctttaataacacatttctatggaagactcttggctaaattatgcagaaccaatgagtttgctgttattctgctgtctctttctgggtccttttgctcttggtgggtctgctacccttaattcttttgtattacctgcccttcagaacagatacgtaatttataattaaacttctaccacagcctttgtcgatttagggaacatctctgatctctcttgctaatcatgacagaattttggagtctatttaacttcttagctggtagctctatctgacatgc

SEQ ID NO: 513571 - DNA, 450 bp, Homo sapiens
taccttaactaattaatatctacaacaattctacttccaaatagggtcacattttaggggaatgcaattcaacctattgcatatggcttccaatattcttagtgtggggagaatcccattaatgaaattggtttcagagctcagttgatcaaagtttcagagctcagttgctttaataacacatttctatggaagactcttggctaaattatgcagaaccaatgagtttgctgttattctgctgtctctttctgggtccttttgctcttggtgggtctgctacccttaattcttttgtattacctgcccttcagaacagatacgtaatttataattaaacttctrccacagcctttgtcgatttagggaacatctctgatctctcttgctaatcatgacagaattttggagtctatttaacttcttagctggtagctctatctgacatgc

SEQ ID NO: 513572 - DNA, 450 bp, Homo sapiens
taccttaactaattaatatctacaacaattctacttccaaatagggtcacattttaggggaatgcaattcaacctattgcatatggcttccaatattcttagtgtggggagaatcccattaatgaaattggtttcagagctcagttgatcaaagtttcagagctcagttgctttaataacacatttctatggaagactcttggctaaattatgcagaaccaatgagtttgctgttattctgctgtctctttctgggtccttttgctcttggtgggtctgctacccttaattcttttgtattacctgcccttcagaacagatacgtaatttataattaaacttctaccacagmctttgtcgatttagggaacatctctgatctctcttgctaatcatgacagaattttggagtctatttaacttcttagctggtagctctatctgacatgc

SEQ ID NO: 513573 - DNA, 672 bp, Homo sapiens
gggacttcaggagctgtaaacattcacccctagacactgccatggcgtcagagctccacagcctgcccgtctgtatgctcccctagaggtttgagcagcagggcactgaagaagtgaggcataccccatcatacaccctgtgagggggacaagggaacttttctcgttttaattaaagtttgagatttcttgcaactttctcactaaaaacaaaccgcaatgctcaatcagtacgtggataagaaaacagaggagatatatatgtaaaatgaaatactactcagccacctggatggagttggggaccataattctaagtgaagtaactcaggatatgttctcacttacaagtgggagctaagctatgaggacgtaaaggcataagaatgatacaatgcactttggggactcagggagaagggtggaaggggggcgagggataaaagactaaacattggatacagtgtacccatcttgggtgatgggtacaccaaaatctcagaaatcaccactaaagaacttatccatgtaactaatcaccacctgttctccaaaagcagatatagwtatctgcttatatatgcaaaaataaatattggaaagtgaaaccaaaaacaaaaatagttacatattgggtcagggaaggagggagatggaggggaaggggtaaga

SEQ ID NO: 513574 - DNA, 495 bp, Homo sapiens
tgaaaaacagagctgcttagtattctggggctgtgggtttatgactcatgtgcacttccttctgtgagttgtcatttctctgagagatatttggagttgtgacaaaatttaactccatattctgaggggatgttgactggatctcaggagaattcatttctgtaagttcctcgatctgctgcagcagatctgcagtgacatgcagaggacttggagactaacatgacttagcagcaacacactctgagggtttactggcatgctgattgaatgcagtgagcagagccacctgtgtcagggtaatcraaaattctcagacagccggggataaacaaataccctcgagtctctctcttactttctgtacaaaaggaagtattaataatgagagtaagtggttttgttaacccccctcctgaatatttaatatgtgtcctaaaaaaatatgaggtctgcaatcagaaggtgagggcgttagtcttaggtatataaact

SEQ ID NO: 513575 - DNA, 630 bp, Homo sapiens
gggaaagactgaggaagtgtcacatattggagtggattaagaaaacatacaattaaatgcaatgttggatgctgcttaagatcctggaagagaaaaaaagacaatgaaattccaaaaagatctattgtattagtactgtacccatgttaattccctggttttgataattgcactatggtgatgtaagatattaaaatgatctcatctaaatgtctaaatatcctttatactccaagcaaggcagtcatttaaatggtaaacatgttttttgaatgagtacgcaagaagtaattaccctgataatcaccaaacgataatgaggtaaccaagatagatgtgtgtggtgggcagttttcttctttttacctttcatccatcatttttctgtgctatggtagatttactccaaggaacctaacacakgttttcaaagcaaatattccttggtccataaaggggtttaatcagaagacacaaaatagttcaaagagttatctttatactctcccttcttttaaaaggttagaaataacaattgtcagtttagtaaaatcatcttgtaaataacatcccactaatttgagattacacagtgaaataattgtatgccattctaggtctcaggaaagc

SEQ ID NO: 513576 - DNA, 626 bp, Homo sapiens
ttcattaccatgctggacagcacctttggagttgtcagaggactgctgatttcttcttcccctctccatgcagtactttcctcttgccttcaaccaaaggagagggctttgagagaatcactctgagagcttaatatgagcctcctggaaactggaagattcatgagctggtatctgacctgcttctgaagataagagactacataatgacacttcaacaacctgcaaagtaaaacagcacatttcctacargttggatagcggccccacagaagttatccttgaagaggacgttcctagaaaggggtggaggacaagagccggatgaggccagagtgaagaagtccatcatttctttcttccccacttttgagcttgtgataggcctggctagccaagggaacaagctttatatttgattagaaattgaagttttgatatttttaattgaattatacaacaaaaattgagtgactagaaaagttttgtgagttttctggaactttatccacaaccagagaagcaagtatcaacagagatgctgaacagagcagagatacaatgacgtgctgcacaatgtgactgagttcatattcatttatcccacaaaaatacttagatccttc

SEQ ID NO: 513577 - DNA, 615 bp, Homo sapiens
gtctagtgtcatgagaggttctaaagtatccaagtggtagccttaggtttactgtaattcttatatccccttgtagaagcattccctcccctggaactaatgtctctagtgcaacagtgactaaatttatatagacaggmagtgcacatttccaaaatagacattgagaatgatggtatgaggaaaccatttctacttctactttttggttctcaaacctatatattacaactaatggggatacaacaccaaataatggacattgactggaagtattaatcctcatcttgaataataacacacttaaaactatatagtatcatgtttaagctggttccttacaatggtttaagaggctattccagcacactcttatgctgctagcttttagcttatgtgataatagtactactagtatattcaatggtaatgtgtcctttatttcatctccttcattgtcaactgggtcctttggtttgaggcaattttatatggaatttgttgaggctaaatcactttatgtttctgagatagtggtccagcacaaggaaaatccatatttagaatatgtagcaattgtaataaataaaatatctatcttttccaggatggaat

SEQ ID NO: 513578 - DNA, 519 bp, Homo sapiens
gctggttttgaaaaacacagaaaaacaaagtgcaaaagaaaaataattgtcaatcaagacttataaacccaactaagatatcactgaagaaaaagactaagataaagacatttgcaggcaaataaaaactgagaaattttgccatcaacagattcttactaaaggaatttctaaaaagaagtacttcagaggaagaaaacaaaattgccggaaagttctgagctgcaggaaagaatgatttttacttagaataagaattttccattgcttcctaattattaggtttatatataaatttgtgttactttaaccatttaaatgcagtgttaagatttgaaaataaatgttagaagttaagggtcttttggtttttttttttttttttgacatttatccattaaagtcctattaaaatttaggcctttaaaaaaggaaggaagaaaagaagcaaaaatagacccmaaaaaaatgcatgaggatatcattacaaaacaaatgtttgttttaaataaaaggcat

SEQ ID NO: 513579 - DNA, 615 bp, Homo sapiens
taccgggcccccaatggttccatcttcccagcctgaggctaggccgtgtgcacacaaaccagatggagaaccgagtaaaaatacccaaggagtggctggtgcagcccctgggagatatgtgagcccctgggagtctctgttgccccaggactgggcactggatgttggctgggaggcacactccaaaagcagccctcaaccctcctaggctagcatgtcccagaggggacatccarctttctccttcctccaggggaagcctatcacccctcaatgatgcccattttttgttggccttacgctctagctgagcaagggaaggtagcagccagtcacatcccacttgacaggaacaccaatgacagcagttcatggcaaaatgggaaccaccgagcccggaagatggaaggatgcttgcttggagacctcctgtgaaggcaggtgttgttatagcactaaggttgagagcctgaaccctggaggcatcctcccccaggtttgaatccaggctctccctcttactagatttgtgacctttggctgtttcttaacttccctgagtcttcattttctcatatgtatgagtggaaataatagtgatacctacttcataga

SEQ ID NO: 513580 - DNA, 529 bp, Homo sapiens
gaatgaaacacagtggagtttacagatacacagacagtcctcgacttacaatggtttgattgataacttttcaactttatggtggcacgaaagctatatgcattcagtagaaactgtacttcaagtacycagaaaactgttctgttttccactttcaggccggtattcagcacattacaagacattcaacactttattataaaataggccctgtgttagatgactttgcccaactgcaggctaatgtaagtgttctgagcatgtttaaggtaggccaggctaagatgtgatgttcagcaggtgaggtgtattaaaatgcattttagacttagaatattttcaaattatgatgagtttattgggatgtaactccatcctaagtcaaggagcatctttatagggttcacagaagaggccaacttatttctagatgctgggattcctgaatattttaaaccttcacttgccttatttctaggtaactatatccagagtacccagaatagagtaacgcttttttgccaaccag

SEQ ID NO: 513581 - DNA, 569 bp, Homo sapiens
actttaaaaaaagccaaaaaaatacaaaaaaaaatatgcattacctcttttgaagcggtcatgctggaatgctagcacttaactcaataattattcaaaatcacttctataatctctctgcaagggtctacagttccagggatattactatgagtggcttagggtgtgccttggccttggcagtctggcacatgcatcttgtatagatacccccttttatggggaaatttgatctaaaaagatcaactgatgtgtccaaagtcacagagagctgggaccagrgccaagatctgttttccaggatagcatttttgccacagcatccttctgcctttttccttcgtgggtggacttaatttttggagagaaaaaagtgtaagttgctcaaagccaaatccagtgaataaaatgggtgatcaactccgtgcaatgtggcaaaccttctctgggtaccagctatatacaaagcatcttgacaaagctgcaggggacatgagagattctgaggtgcaggtcgtgacgttaaattaactgcaatcaacaggtcaaaaaaatgagctatgcttaca

SEQ ID NO: 513582 - DNA, 612 bp, Homo sapiens
ggggtgataagagaggggatcggctgtgggacagccaaactccaggggaagatcatcttcctactccatcccccttccagctccccatccatcctgctgagagccacctccaccactcaataaaacccctacattcatccttcaagtccatgtatgacctaattttttctggatgccagacaaggacttgggtaccaagagggtccactgagctgtctaacacttaagctgtctgtggacagcaaggctaaaatagcacactgtaaccggtccccacctrggcttcaggagtcacagacatgcacccctagacacaaccatggggccagagcccaaaaagaacttgccctggctcctgcacctgcccatctgcatgctcctcctcccataaggggtttgagcacatggcggccacacacaagccacacccctgtcgcatgtgctgcaaggggggtcagggaactctcccatttcaatgatgactttgttaaatggtccataagggctatccccccacacctctaccacaccatgccccatctgttttcttccagggaagtccacatactttctatcacccagctctctctaatcatgtcactctttcaataa

SEQ ID NO: 513583 - DNA, 595 bp, Homo sapiens
gctccattttttgggaaaggtaaagggtagattttgtgtcagtggtagyaattgctgcttttccggttagttctgcaataattctgagaatattcctaagaagttccagttataatcttgtaccaccctttacaaacatatgttactaatacctggaaataagttcctgctacttaatctagctagggttatttatgttttctacactgaagaactctgcatgccacagtctatcaccttcataaagtgttctatttctgactacaccggtttggtaccatggtatttttgggtgtatgttagctcattatatttagaaaactatcacaacagtattcaatgccatttgcaccatgtactaagcaaaagaccaggatagaaactttacttctatgagtgtagaaaatgagtctcttattttgaaaccacatttcaaatgtggtttgttatgagataactaagatttaaaccagggttatttttcaccataaagtccttacctcataacatattatattggaataatttgtataattattatcttacaattctatattattttcataaaaatatataagatattttgatccaatgc

SEQ ID NO: 513584 - DNA, 562 bp, Homo sapiens
atgtagtaataaattatgctggaaaaaccctacacacatatttttattttctaagtcatttaggtagaaacagagagtagcatcctagtccaatgacattgaatatattaattacaaaggactgaagatttcaagaaaataattagaattaacccactgatttatttctatattttgggaaagcttagtcatttcctttgtatcagaaaaatattcatcaattaccaatgatcatcaaaactaaaatgtccctgagaaaaacaccaagcaataagctttttagggacaaaaaaaatgtgtctgatttgtctttgtatctcccatacctagagcaatgcctgatcacatatgtttgataagagtaagaatgaacagttgagtatgtgcataaagtgaataaccttttccttatttctccatcacttttcaaagccagttagtcattgtcagttttaccctaaaaatgtctgaaattttccacttaagtctccccacaaaattccatcagagyttgattaccttgtattcttacaataatcactccagtagtttcttcccctgt

SEQ ID NO: 513585 - DNA, 554 bp, Homo sapiens
ggaagggtgggggtgggaggagggagaagatcaggaaaaataactaatgagtactaggcttaacacatgggtgatgaaataatcggtacactaaacccccatgacacaagtttacctatgtaacaaatctgcaaatgtacccctgaacttataataaaagttaaataaaagtaaatggataaaataaaacacaggccaaaaagccaatgacttcagtgtaggaggatggagccaagtcaaaagccaggttataacatcgtcaccaaaccctcagattaggtgttcattctgctcacttccataaatggctgtcattaaaaaaaatttctctagctgctccatgaaaataaacagaaaaagggcatagtcagaaaatggaagagaagtttggaatcaactgtggcttaaacatggtgacagcagttggtggtaagaattggtagagttttagatacattttggataaatttgtcagaatttgacaacagattgcttgtagattgtgggagaaagagaagaatcaagaygatgatgagatttgggcctgggcaaag

SEQ ID NO: 513586 - DNA, 458 bp, Homo sapiens
tttttaattatgaactcattttttttatacaaaatacctggttatattmttaagtttctagtgtgtgtcaaaaataaaaaacacattttgatattaagaaaaacacaataccaactgattaagtcaaatgatatgcctacaactaaagaccacactctgaagattgggcaccctcaattttcacgcttttcaaagataagaatcataattgtaagtacatatttcaacaaaacatttttgacaacaaagaggtactaagagattatatcttctccctaaagaaatttctaatcataagcaggaatacaaaataatattttattgtaaattaatattttgcaatatattattttaatttttaaaattattccaaattcctccttaatacagcagctatttagaaaaagttttgttactttgcttccactgaagtaaacacaatttattttttggtggtg

SEQ ID NO: 513587 - DNA, 636 bp, Homo sapiens
tgctaataataatcagtcttaatctgttcactggttgtactacaatatgacatccttatgcccagaatccagaaatttcagtcaagaattattccagagaaagccttcaatccatgggactctggtgaatgaatgcttgggaaggtgtctttggagggataaatagtaaacaacatgtaaaaatctacgagaaactccagataaattttgggcttcctactataggcattcaaaagtttctcaccaatgttggagatccaccaggtagcatctgggctgcatctgggktgttaatgtaatgcaggtaaagagtggtccacaatgccaggaacagaacaagtcctcaacgaatattagttccgaatgacctacagagtagtgcttgaaaatgcagcctcattgattggcttcataatcatagtttggccagtaaggttgttgcaggactttctcctcagttcagctaaaaactgggttcttgtcacatgaccaggaggatggaaacatagaaggatgagaaaaattgaatttattgggtaaaaaaggaaaaagagaaaaacttttagcagagcaagggggaagctggttggagattctccagtgagccctttttacttggctgtctcattcccccct

SEQ ID NO: 513588 - DNA, 721 bp, Homo sapiens
tggctcttcttttaaaataattactatttgtatgactatcagaaaatatagaaaagcaataagatgaaatttaaaaaccaatatttaattaatatatggatgtatattctaaccagtgttaattgcttatttatgtctgtattttacaaagtaaagatcataccttcatattgatttgtttatatatagtcataatttataatgtaatatatttttcaaaacaatttcaatgaaagcagagtattttatcaggtaggtgaccatactatgttgacttaatccccaattaaacattaagttttcctgttataaacaatagtatagggagcatttctgagcactgtctgcatcttttaaaggatcttcacattaactgtttctcaataatttaatgagggattaatatcttaagaaaaaagcttatgaacactatttttgcaaagtatatcaaaatagaaaaaactagaagtgctatgtgctatttatttcataagcaaaagcatcagtcaggtctaaattcaatacatggttatcaaataatagtagtctaaattttatctttattgcaacagttgaaaaaaaaaccttattactcagattattccagtttcagtttagcgtatttgaaatkataatttcatgatgtttatatatattattaatgagcccatgtaaaaaaaaatagagagatagcatattcttttcaaaaaaatttccaagt

SEQ ID NO: 513589 - DNA, 497 bp, Homo sapiens
ttggccttaaaattgtatgatatgaagcactttcacatgaatacattaaattagtgtattcagagaaaaggctttkctttgtttttgcttctcttggtaggtctttttgatgatgctcattgcacagggcaggggactgtttagagcgctggaagttgacacgggagccgccaagatcctaatgctgtgtagttgttgagacattcagctgttagtggacagagcattcaacagagttaagtagaactaagtgccttcctttttaatataatgactgaaagaagagaaaaaaagcacaagataaaagagcaaatctgcatgtcaccaaccaaaaacaatggaggtagcatatttccaaggagttgaaatgcttcttttatattttttcaatttataaagaatagaaatttattatttatggttctggaggctggaaggtccaaggtgccagcagatttggcaattctgattccaagatgacactttgcacactgcat

SEQ ID NO: 513590 - DNA, 497 bp, Homo sapiens
ttggccttaaaattgtatgatatgaagcactttcacatgaatacattaaattagtgtattcagagaaaaggctttgctttgtttttgcttctcttggtaggtctttttgatgatgctcattgcacagggcaggggactgtttagagcgctggaagttgacacgggagccgccaagatcctaatgctgtgtagttgttgagacattcagctgttagtggacagagcattcaacagagttaagtagaactaagtgccttcctttttaatataatgactgaaagaagagaaaaaaagcacaagataaaagagcaaatctgcatgtcaccaaccaaaaacaatggagktagcatatttccaaggagttgaaatgcttcttttatattttttcaatttataaagaatagaaatttattatttatggttctggaggctggaaggtccaaggtgccagcagatttggcaattctgattccaagatgacactttgcacactgcat

SEQ ID NO: 513591 - DNA, 568 bp, Homo sapiens
gcaatgagcgtggatttaagaaggtttatagagttggttataaatatttcttagtttggccaggccccgtggctcatgcctgtaatcccagcactttgggaggctgaggcaggtggatcacctgaggtcggcagttcgagatgagcctgaccaacatggagaaactctgtctctactaaaaatacaaaattagccaggtgtggtggcggstgcctgtaatcccagctacttgggaggctgaggcagaagaatagcttgaacccgggaggtggaggttacagtgagccaagatcgcaccattgcactccaatctagacaacaagagcaaaactccatctcaaaaaaaaaataataataataaaataaaataaataaaaaaaacttaatagtttatggcttccactatccccatgaaagagctgggagagacaaaggtgttgggtatgtgaggttaaaagtgaaaagagaacttctgaaaccacaactgtagagaatgcatgaaccaactagcacgcattggagttctcaacggaagtcgcaggctgagttacgctgatacggcagcatc

SEQ ID NO: 513592 - DNA, 568 bp, Homo sapiens
gcaatgagcgtggatttaagaaggtttatagagttggttataaatatttcttagtttggccaggccccgtggctcatgcctgtaatcccagcactttgggaggctgaggcaggtggatcacctgaggtcggcagttcgagatgagcctgaccaacatggagaaactctgtctctactaaaaatacaaaattagccaggtgtggtggcggctgcctgtaatcccagctacttgggaggctgaggcagaagaatagcttgaacccgggaggtggaggttacagtgagccaagatcgcaccattgcactccaatctagacaacaagagcaaaactccatctcaaaaaaawaataataataataaaataaaataaataaaaaaaacttaatagtttatggcttccactatccccatgaaagagctgggagagacaaaggtgttgggtatgtgaggttaaaagtgaaaagagaacttctgaaaccacaactgtagagaatgcatgaaccaactagcacgcattggagttctcaacggaagtcgcaggctgagttacgctgatacggcagcatc

SEQ ID NO: 513593 - DNA, 621 bp, Homo sapiens
gccagcagtggcagcctccaccccagtgaaacagagcggccctggacggcagaaagctcaggtggagcacgttacagcgattttagcccatttgctccacttcttaattgacggcggttggccrgttccttcctcattatactcaatgagttgatatctctcaccaaagcacccccgctttctctctctaaatttcttccattaagaaactcagacttgttgcaacctagcatttgtcacatgcctgctctgtgtctgacagtgtgcaagggagcgtgaggatgcaaaataagactgacatgcttcaccccttagggagtctagtaattttggaaagacatgatccatgaaatctttggagaaagatataagacaagatataatcaagtgtcacaatgtagtagaggaagcaagggccacggcccgtcagacaaggtagagatctgggccagggacgaaagagaagatggggcagggaaggcaccaggaaggaagaatgggtctggatgagaaagaaattacacacaatccatttaggacgtgggattttcatagaggcgggcaatgaggaccccaggataccctgtagacttctgtgggacagaagggagaggctgcctc

SEQ ID NO: 513594 - DNA, 493 bp, Homo sapiens
tattataaacatgatgggtatgtatgggatgacatccggaagttcactgtttccttcaggctgtgtagacctcacttattccatctccattgaactatgtggtagctaatacagctcctagcacatagaagatgttcataaatatgtgttacaatgatggttgcacttgcacaaatatgatgatctctcacaagagggatggaggcatcttgccatactgagagtatcttctatcttcctgactactaatacatgactggatcatttcrtctcagaatgtggccctaaagaaaacagaacttctcactatttggttgacttcaaaaaatgatacataatattttatatatttatgggggtacatgtgatattttgttacatgaatgaatgagtaatgatcaagtcagggtatttgaggtatccataacctagagtatttattatttttatgtgtaagaacatttcaaatcctctcttctagctactttgaaat

SEQ ID NO: 513595 - DNA, 600 bp, Homo sapiens
atggggatagaatgagaaaatacatgtaaagcacataaactattccttacacatatttagtactcagtaaatgttagctattattaatgctttttatataaaacaaggcaccactgggaataatcatggtatacaatccatcccaccaattatttatgaacaactgttatacattcttttgtgaaaacgttattgtgtacgatatatttgacatatttacttcttacgatamcaatgaagtttcagaaaatccacagtgtgttatcaaatgtgattgtcttcaagagctatggggtatgatctcaatcattagagtggaaaaagttcactttgagatcacatggaataccccatgaaattctctgataaatacccacctcttaaacaatacctacaccttcacatatatagcgaaaggtactgtttgtctcatcgtatgcatgctaaaaagcaaacaagaaaatctatgtctccgaaaatacaatgttggctttttatgccaacatacgtatttttacttggggaacatctagtacagagacattcagattttacagttgctcatttgtggctctgtattttaacttagcatctcagtca

SEQ ID NO: 513596 - DNA, 511 bp, Homo sapiens
aaggatggaggcctgcatttttcaaaagcttcaggttattctgggccaggcctttgcacagttctttgaggtctgtttcttccacggaagaagcactatcaggtacaagaagaacgggrcctgaaagttgagtttcagctctaatgagagactgctaaagagacagcactagtttgaatttcacaaattaaaattcaccttgaaaaattgcaacctttctcagctcagttaaagggaagaggaaagagttaatgctctcagttgatcaggtgtgggtctgctggtggctgccggtactccagtctgagaactgataggtataggtattaattgtttggggaacatcatttagtaaacaggtattagaattctataattcatcatttaagaggctgtattttaactcagcatcactcttttgctcctacaagccagttcccttaggctcgcacttctttaaacccagaaggacttgtcaaactagtctaggtgatgggacaaacctcagcag

SEQ ID NO: 513597 - DNA, 511 bp, Homo sapiens
aaggatggaggcctgcatttttcaaaagcttcaggttattctgggccaggcctttgcacagttctttgaggtctgtttcttccacggaagaagcactatcaggtacaagaagaacgggacctgaaagttgagtttcagctctaatgagagactgctaaagagacagcactagtttgaatttcacaaattaaaattcaccttgaaaaattgcaacctttctcagctcagttaaagggaagaggaaagagttaatgctctcagttgatcaggtgtgggtctgctggtggctgccggtactccagtctgagaactgataggtataggtattaattgtttggggaacatcatttagtaaacaggtattagaattctataattcatcatttaagaggctgtattttaactcagcatcactcttttgctcctacaagccagttcccttaggctcgcacttctttaaacccagaargacttgtcaaactagtctaggtgatgggacaaacctcagcag

SEQ ID NO: 513598 - DNA, 627 bp, Homo sapiens
cagaagacactaactaagtgaagttactagaaagagagagagagagtcaatggaataaggaggaaggtaagaccgacagtagtagagagaacrgataaagaggggagcagtacattccctgtctgagactggtgaagaggatgaaagaaagggtgtaaggagagatgcttggaagctgaaggcagaggagatgaggcacctctaatgtgtttccagcatagataagacagtaacatgagatgtctgctgcattaaacagcgtctgtggatcaagttgcagtgcggatgtccaaattgctttactccccatgagacctcacagaagattatgttactgcaaactgatgtttgagctaggaaaaacatttaaaaggacacacagtctctgctgtataccttagcttttaactttcagtgaaaatggggcaactgttggtgtttttatgacaagaagtagataacgcaatctcatcatgacttaatatgtacaacacaacttgtcatcatttatacagagtaaaaatacagatttaattgaaggtgacataaatttcataactgtgtgctgtgaaggatgtacacctttttctgggagaatcccagagaagtcaattatcaagtttggca

SEQ ID NO: 513599 - DNA, 627 bp, Homo sapiens
cagaagacactaactaagtgaagttactagaaagagagagagagagtcaatggaataaggaggaaggtaagaccgacagtagtagagagaacggataaagaggggagcagtacattccctgtctgagactggtgaagaggatgaaagaaagggtgtaaggagagatgcttggaagctgaaggcagaggagatgaggcacctctaatgtgtttccagcatagataagacagtaacatgagatgtctgctgcattaaacagcgtctgtggatcaagttgcagtgcggatgtccaaattgctttactccccatgagacctcacagaagattatgttactgcaaactgatgtttgagctaggaaaaacatttaaaaggacacacagtctctgctgtataccttagcttttaactttcagtgaaaatggggcaactgttggtgtttttatgacaagaagtagataacgcaatctcatcatgacttaataygtacaacacaacttgtcatcatttatacagagtaaaaatacagatttaattgaaggtgacataaatttcataactgtgtgctgtgaaggatgtacacctttttctgggagaatcccagagaagtcaattatcaagtttggca

SEQ ID NO: 513600 - DNA, 621 bp, Homo sapiens
aattgtggtatcttcagaaaatacatttagttcaaagaggaatcctggatttgagttatgttgtttctaaatatagatatacatcaagacaaatatagggkgtgtgtgtgtgtgtgtgtgtgtgtgtgtaacatatttttcctatctaaacactaacaggaatccacatcacataatcatagaacattaaatgtagaaggaattttaggaatcagctcattccaatctgtgttcctgccccaccactccaacaaaacattctcattttagccacctcaaccactgtgagctaaactcagcatttttcaggaatcaccttgtttgaactctcagcagcactcaagactgttgacaacttcctcaccatgcaacgccctcccaccctagctttcgcgaggatccactatccccatctccttctccccctctggctgctccttctctatctctttgcatattctctacctgttatgtagctgttcatcaagatcagctccatccccctttatctcctcattctgcaccctcctcctagaaaactgcattcatatccacacatttgataccacctcgaagctgtaatttacacatttatatctcccatccacacttcccttctga

SEQ ID NO: 513601 - DNA, 652 bp, Homo sapiens
tgtgcatctggggaaattgtggtatcttcagaaaatacatttagttcaaagaggaatcctggatttgagttatgttgtttctaaatatagatatacatcaagacaaatatagggggtgtgtgtgtgtgtgtgtgtgtgtgtgtaacatatttttcctatctaaacactaacaggaatccacatcacataatcatagaacattaaatgtagaaggaattttaggaatcagctcattccaatctgtgttcctgccccaccactccaacaaaacattctcattttagccacctcaaccactgtgagctaaactcagcatttttcaggaatcaccttgtttgaactctcagcagcactcaagactgttgacaacttcctcaccatgcaacgcyctcccaccctagctttcgcgaggatccactatccccatctccttctccccctctggctgctccttctctatctctttgcatattctctacctgttatgtagctgttcatcaagatcagctccatccccctttatctcctcattctgcaccctcctcctagaaaactgcattcatatccacacatttgataccacctcgaagctgtaatttacacatttatatctcccatccacacttcccttctgagctctggatctttgcat

SEQ ID NO: 513602 - DNA, 569 bp, Homo sapiens
atagaaggttcgttctctcaggacgacagaagagaggatctcttgggtgcatcagatacaaaccatggcatgagcacttcacagaaagtaggagattctttcaagtcagcctgcataatgaatattgaggtgtccccccgacattttccaratttatttggtgcccaaaccaccaggagccaggttcgtgccccaaggccaggtgttgagaaactcctctgaaggaggaacctaaaaatactggcatgaggaattccccaaagggcaacccaacaggattatccctcaaagaaacctagagtcaacaagttcccaccacacatttggggctgcccagtcagcttgtggacccctttgacattcgagtggaaaaataagggtcactggacatctgagaaagacatccaacagagaagatagaacagtaaatgaaaggtgacaacatctggagaaaacagactgtatggggttaaaaaaaatctccaaaaatatggcatcattaatggcctgggagagaaaatcaccttctatcttgttaaagtcactgttgctgacattccttgtaatat

SEQ ID NO: 513603 - DNA, 391 bp, Homo sapiens
ctgggcgcgtgactttcagcattgtcaccacctaccatgcccctttgaaatctcaggcccagttccccatggcagcagccagggagctgcactggagagtgtctcaggcctgaaccccacactggctgaggcgtccccagggtccctgaccggctgtctgcttccctcctcagaggtggctgatggcctgtgctgtgtgctcaccacgccctgcctgacacaaagcacggctgccccagcagtgagggcctccagctcacctgtcaccttgcgtcagaagactgtggactggaggagagtgtccaggtgagtatggtgtgtgtrtgtgtgtgtgtgtgtgtgtgtgtgtgtgcatgcaagtgctctgtgaacatgtgagcacaaaacggtg

SEQ ID NO: 513604 - DNA, 532 bp, Homo sapiens
aatccatatagctttaaacaattaagttggtggtaattcattatggcaacagtaagaaattaatacaatacgcaaaatgatggcatgtgacttgaagaaagtctatgtctacatgaattgtaaatatatctttctaaatgcataccattaayatttttaaataagaaagtattacataattgtttaattacaaaacattttttcttggtgataagtaaaaaatagttgtattatctcaaatttgatgaaatatggaatataatttcatatgctggagtttacattataaacacataataatcaaatatatatatatacacacacatatgaattaagaagtgtttaagcatatttactttctttcatcagaatccattctttagttcatagagattaatatccataagactaattgaaagacacgtttatgaaagtgatggcaagtgagttcctttggattaatgggcctcactggcattgactactgtaatcattaaccattgtgaaagaagtagaactttgctactattca

SEQ ID NO: 513605 - DNA, 652 bp, Homo sapiens
gcaaaactgttgcagctcgactgaattttgttttttactatttcaccaacagtaatctgcactgcttttatagtgcttccaactaaaaaggattatctagtcagaatatatcagtacataataaatgtgcttcatttcttccaagttcttatagctgacagccaaaatgaatgtttgcctcagtgctggcaccaggggtacttctgcagaaactatttcatggtccattgaaccctaaaggacattgtttttaaargcattttatcagaaacagagaagcaagttatcggagaggctattacaggtactactgaaacttgagtatgtacctctagcttagttgatattttgaagacactactatcttaaagttttcagctataattgtgcatttctcaaaacctttataatttacccatctgataaaatatctatatgtatgtatttggaaggttgggtaagaaagcataaaagttgtagtgccttaaattataaataacgacagataggagacatttgcccctcctttaaaactttcatcagatattctgtttccatgaatccttacctgattttcccatcactagaaagagttatacacttggtgaccttgcttttctcctctgtgctgctactgtaatatgtttaagac

SEQ ID NO: 513606 - DNA, 663 bp, Homo sapiens
ctgtcttggtgatactttgagctacccaatatcctttcaataaattatttttctgctgaaagtagacaagctgtttctgttgattgatagagctaagctgtagacttgaccaagtggaggaaagtagaggatagtggggacatatgttaagccaacactgacaatggcactgcacaaagacaaagaaccagggtcctcgatgacaacactgtgatgttgccgaatcaaccaaayccagagtgtgtccttctgcacctctttattatgtgagtaatgagtttcattgtggtttaagccagtttgaatcagatttcccattacttgcagcacaaagaatccagatggagatagtgcttcataagccatagttattaccatctacccacctgttagtgttgggagaagtgaatcagctattccaagcaaaagacttgcctagggcctgataaatagtgatccttcatgaatgttaatttcttgttaattttacctgcagttgtcggatactgatgcgcaagtcagattcattaaatccatatggaatattccaaccaagaggaccaaatttctttctctcttgcacaagggcatgaaaaaaacaaactccaaacagtaacttctcccaggcctttaatataaaaagtacataacaagaaaaaaaat

SEQ ID NO: 513607 - DNA, 620 bp, Homo sapiens
agctgcttagctccaggcaggagcatgctgtcttaaaacaacaagaaaaaagaaacagaaaaacgtacaagagtttgtttctcttgttagtatctaaaaactaaacaaatatttatatatatagtgtgtgtatatacacatgtgtgcatacatgtgtgtatagtgactgaaatgttattgatggtgtaacagtgaatattaatttcctrtcaagaagtaatcaaatttctatccttttttctcagatcttatatgttgctgagaccaatagtgtaaatacgttgccttgtctaacttgtagaatgcattaagaatgctttatttgaataaacagacaacctttcgttcatgatttaccttcaaatgtcttcttttggattctaaaaaaaaaattagtctgaggaactcttgtcataaattgcttaaccacatggcacctctcttagttatggataaagttcactgtacattttcagaatgtctatactcttttaaaaataaaataaacatctacttttgtatgttcattgcataattttcttatttctctaaagagataatttaaattaaaaatttatccccatgttctacctagagaaaccaagtagatattccagttg

SEQ ID NO: 513608 - DNA, 620 bp, Homo sapiens
agctgcttagctccaggcaggagcatgctgtcttaaaacaacaagaaaaaagaaacagaaaaacgtacaagagtttgtttctcttgttagtatctaaaaactaaacaaatatttatatatatagtgtgtgtatatacacatgtgtgcatacatgtgtgtatagtgactgaaatgttattgatggtgtaacagtgaatattaatttcctatcaagaagtaatcaaatttctatccttttttctcagatcttatatgttgctgagaccaatagtgtaaatacgttgccttgtctaacttgtagaatgcattaagaatgctttatttgaataaacagacaacctttckttcatgatttaccttcaaatgtcttcttttggattctaaaaaaaaaattagtctgaggaactcttgtcataaattgcttaaccacatggcacctctcttagttatggataaagttcactgtacattttcagaatgtctatactcttttaaaaataaaataaacatctacttttgtatgttcattgcataattttcttatttctctaaagagataatttaaattaaaaatttatccccatgttctacctagagaaaccaagtagatattccagttg

SEQ ID NO: 513609 - DNA, 640 bp, Homo sapiens
tgctcgtgacaaaataaatttgtcagcttgtctttgaaaggtaaaataaccagggggaactggtgctgcttcccaccacttactgacaatagtaagcaacacccttgtgtttgtgttcagtcaacaccaatcaataaacatctgttggratgagcattggtgcctctttacgattcattatgcttcattaggaattggttttgtcttcaagggaagaaaaaagaaatctcatgtaattaaagaatagtgtcttgtgctctcatattttcccccttaaagacctaaattcttttaaagccgttttttacagtacatttatctgtatttaaatgtaactactttaccttgaaaagaccatctgttcataaagaccatcctttttgtcttgccagaggtaaacttgggaaagaggtagtgttagctgggaactatggttaaatggaaatagatgagacttaaggcaggttagggaggttccctacccagcaaaatgatattcagttatgttctgggtggggtgaaaagaaaacacaattttctggagggagatgtgcatttgacatgacgttctttggaaatggttttatttcaaagggaggtgtacttgaaattcccaaggccagttaacttcaacgatcct

SEQ ID NO: 513610 - DNA, 364 bp, Homo sapiens
gttagttagagcccataacaacctgtgacaaacccatattattgaaactcaggtaagactggagtaagtacatccacacagacacttgaggcgggaagatggagctctggatgtcaaatatgaatttctcttctgaactgtcttatgactcacacacacacgtgcctggaagtccaaagtgtagttggtttttaaatgcttctgtcaggtaaccatggccttgggaaaaattatattatgttttcataactgcagtgaaatgcaaccacagagaggggaaatatgccaagtacaatcagtcattccttttattatactagtttttaaaggrgaggaagtgctcatggctgcatttatatgaggc

SEQ ID NO: 513611 - DNA, 606 bp, Homo sapiens
aaagttaacttcaaattcaattctaactctatctccaacttagctctcttgaatctaactgaagattcaactttcttaactctaaacttaacccttgaatcccaactcctagctttcacctctcaagtgtcttaactctaacttaaagtcaaacttagtctcttgaggaggtaattaaacttcaacaactaattggaatgagttcttgtgaactgagagcttggcttatcaacacatctggtcttcagaggttaagaaaaaactcactttctgttattgtaaacttaacaccagagtaatgttttatttcagctatgatggtaatattttttaaattatgctattatccacttaaaaaatccatgatgtaaggtataaagtaacataatgctccttgatggtgaaagcacatcttaggcaccatgctttggagaaaaactgtggatctggagggaatctcctcctcccaccctaaaccacacatacctaaaccacacacagcaccgggtatacctcagtcttcaacataaagaaccaactcggcacgttccatttcattygactcacttgcttagatagcttaggaaaccaatctgctcaacatta

SEQ ID NO: 513612 - DNA, 439 bp, Homo sapiens
gctaatggatgatgcaatgccatgagaggcttttttccagcctgctgcgggttagaaatttaaaccaggcagcccgacttcaggttagatcttcacaaaatatgcccaggaatctatgaacatgccaatacacattttatggagcaaatattgcctagtaagccaccagagaggaaaagcctagaaaaggcagagacactagtactataccacttccactgaaaagagggattttatgaagcctgaaccaaaaagggaggacctcgtgttctttagagagattcatttactagatggtgaaaaatgaatgctycgggtaatttcattttgaattgatttatttctaaatggggggaaactgacacttggtgaagaaagtaacaagtggttctctggaaagagccagccagtctcaggtataatccaattattccaacac

SEQ ID NO: 513613 - DNA, 439 bp, Homo sapiens
gctaatggatgatgcaatgccatgagaggcttttttccagcctgctgcgggttagaaatttaaaccaggcagcccgacttcaggttagatcttcacaaaatatgcccaggaatctatgaacatgccaatacacattttatggagcaaatattgcctagtaagccaccagagaggaaaagcctagaaaaggcagagacactagtactataccacttccactgaaaagagggattttatgaagcctgaaccaaaaagggaggacctcgtgttctttagagagattcatttactagatggtgaaaaatgaatgcttcgggtaatttcattttgaattgatttatttctaaatggggggaaactgacacttggtgaagaaagkaacaagtggttctctggaaagagccagccagtctcaggtataatccaattattccaacac

SEQ ID NO: 513614 - DNA, 600 bp, Homo sapiens
tcagttatataaattaagaaacataaaaaaagtcaaacttaggttccataatataattgtttaaaagacatgtattggccaggcatggtggctcacatttgaagtcccagcactttcagaggctgagacaggaggatcacttgaggccaggagtttgagatcagcctagtcaacatagtgagaatatgtctctacaagaaacaaacaaacaaaccaaggtttttaattagctgggtgtggtggtgcacacctgtagtcctagctatttgggaggctgaggcaggaagatctgttgagcccaygagttcgaggctgcagtgagctatgattgtgccactgcattcccacctgggtgacagagcaagattccagctcttaaaataatgtatgtagtgcttacccttttataggcattatgttaggtagtgaggtcacaaagttgaagaaatatggtccctagcctagagagtctcttgggaagaaaagcaaataagcacatagtaatgatgtcataactgatgcagacactgatgcagtaacaacaaaggataacgggcaatataaactgaagtaagacaaagtcaatagaagaacaccaaa

SEQ ID NO: 513615 - DNA, 611 bp, Homo sapiens
aaatgtttcaaataatatatgttttgtatgataaaggaggaaagaaaaaaggaagttcacagtcaataagatacatgttctttttggtgatattaacatgctattttgtcaaaatcttgagtttattgagcagattttatgtaaatgtgtcatgaatacagtactatctgttctatttcaaagtagagccaagataccaagacacaggttgagtatggacaggctgcatcctaaatatyttccactttcagttctactctcttgttggaagagccgggaaaattcttttaccaggccttagtaaatgaaagggaatgtgtcatttagtggtctaggtatttttatccctctttttacaattaattcaataacatctggaattatctttcaatgagtcaatacatatttctcatacttagaaattatagtttaatatttttatcaatattgtttaaaatcttggtgtaacttcatcttatgttttctatgtcctgattcctggctatagccttattgatcatcagcatcattattaatactaataaacttgaaatagtatttcattactacattagtatagtagaatgcacaagtgtactcaaagaaatgtt

SEQ ID NO: 513616 - DNA, 489 bp, Homo sapiens
atccctcatgactgagtgggcccagccaagagcagcagtgcgatcagccaaacgcagccaagatcagccaacacayagacatcagggctgagcaacagctgattaaacatccctgaaattctggggctgtttgtgatgaagcactgctgcagcaaaagctaacaaagagaggccataggaaagacaggccataggaaaatcccttgcaggggcctgacattcctggactctgggtaatgacttttccttaaatgagaacaactggcattggagatctgtgaacactgttcccaggttgcacaccaagaccccagtatgccgcctttgagagacacacacacgtatggtcagctaagctttgctcctgcttaaagctcctttagaaatcatgcctgctggctttcagaatcccttaggaggagggtagaaacttgtcccctcagtggtaagataattgtatctgggtatcatcattgaaaaatgttttgt

SEQ ID NO: 513617 - DNA, 619 bp, Homo sapiens
ataagtaactttttcagtcaaaaataattcctttgaaagctgaaatgacctgagaattcaattttctgcttactctgttagccagttagaaacactagtattgattcactatgaagcatattgacagtgttttaggaaatcaagtatgcaaggattaatttttgtgaataatgctttctgggagacttaccaaatgacctatggtcatacaaaagaaacaaacactttactattaagtattaaactaccatatatgccaacaacttggcaacaaatattttgaagtaattggcattcatattaatrctattattataaaaaagcaatgaggaattgctataatatatatggtataatttggtaggtactataggagttatgtggtaggataatcataaagaacttagacaatgagaaaatatttcatgggagaagtgagatttgagaacttaagaaaggttaagagttggtaagcatatatgaaaaaaagaacattctaagacagtggaagggggagtagagagagggaagggagacactagcaagaggcagaaatgaatgtggcttctctggggaacaactaggagacaatctgactaaaccagaaaatccagcatgg

SEQ ID NO: 513618 - DNA, 657 bp, Homo sapiens
accagatatattctgttatgtattccaaataacttggaagtcactcttatgacaaaaacccagggactttacataaccctctaactgttcacagacacaaagagtgttccaaaatcaaagagcatcacaggcaggcagagaaaatgttattagcaggatagtatttcagagtgtacattagaagagaccaacctcccttacattttcagcatcattcaggagccatgagggatagcagcacctggggcaatggagacagttggcaaagattctgcacatcaattgtgaactttggacaattgaagatggtgagatgctgctttctcgcaataaatataaatgctcttccccataatggaagtgacaagtacaacatgactacatgaatcacaggagaagcccacaggtgacatggaccaagaagataaaagaaatrtcaccaaaggaccagaaaaaagacatttacttaaatcatgtctaatttacactttccccaatttcttaatgaggagatagtagaattaatgctagaatctcattccgcagtatttgtataactttcattttgttttgcccaagtgttaagcaagccgactctggcacattctatagttccttctctcatatgcttatgaagcccccgctagagaacccatt

SEQ ID NO: 513619 - DNA, 525 bp, Homo sapiens
tatatgagactgataatttcaggaaaaatgtaagctaagcacatagcttatattggtcactaaaatcgatttctgataaacagaggaggaaagaatcaagttgcaacaaagggacttagaaaaattacaaataaaaggatggcaaaaaaatccagaaaaaaaaaaaggttagaggctgggcacggtggctcacacctgtaatcccagcatttygggaggccgaggcaggcggatcacgcggtcaagaaatcaagaccatcctggccaacatggtgaaacccagcctctactaaaaatacaaaaattagctgggcatggtggcgtgtgcctgtagtgccagctacttgggaggctgagacaggagaatcgcttgaacccgggaggcggaggttgcagtgagccaagatcacgccactgcactccagcctggcgacagagcgagactcctcaaaaaaaaaaaaaaaggttagtaatgttaatgtcagcatagctaaattcaaggcaataaaaaagagtattaaatag

SEQ ID NO: 513620 - DNA, 509 bp, Homo sapiens
aaaaactgaatctctcccaagaataaacaataaagggggtaattcttcattagaaagagggatgctccttggagacacaggtgagtttcccttgtgaactggaatcattgcctttataaatattcagtttcctcataacttgaaatgttacactttctgatttataaaactaccttcaaatacaggaatactttcacacatataaaatctcatcagatttttttttttttttttttgagtctcactctgtcgctcargctggaatgcagtggcacaatcttggctcactgcaacctccacctccccagtttcaagcaattctcctgcctcagcctcccaagtagctgggattaaaggcgtgaccaccacaccctgctaatttttgtatttttagtagagatgaaattttaccatgttggtccggctggtctggaactcctgacctcaagtgatccacccacctcagcctcccaaagtgctgggattacaggcgtgagtcaccaaaccca

SEQ ID NO: 513621 - DNA, 604 bp, Homo sapiens
tatgaggtccttctgactactcattcatgtgtaaagttggccagagttaaaccatggatacattctacatggataaaaattgcccctcctcagactggtctgtcacataatggacctgaatgaacctgtgaaacaactgaaaacctgaagctgctttttaagaaaatctacacagataagtaaaaccttttgtcatttaatcatgagattctggctaatccccacagtaatatatggggttaggctgtttgctgaaactaatcatttcctaccatgggcgcattatgcagatagctgaaaacaggaaacttattgggtttggggctgttccagtctctagcatttctggattaccttagtgggtctcacccctacaaggtaataatggattacaaacctttatgaaaaactattcacaagaaaatcagacccctgggatcctaacaaaaggaaatggaaggtgatggcttggcattaatgtaacccttcaccatgcatgtcacagaaaaccttgtrtatacatcagagaattcaacaaattctgagtgtggtatttctctcctgatggagtttccctcagtagaactcataattttgtctatta

SEQ ID NO: 513622 - DNA, 634 bp, Homo sapiens
tcaactagcccctcaatggttaagaccctatgaggtccttctgactactcattcatgtgtaaagttggccagagttaaaccatggatacattctacatggataaaaattgcccctcctcagactggtctgtcacataatggacctgaatgaacctgtgaaacaactgaaaacctgaagctgctttttaagaaaatctacacagataagtaaaaccttttgtcatttaatcatgagattctggctaatccccacagtaatatatggggttaggctgtttgctgaaactaatcatttcctaccatgggcgcattatgcagatagctgaaaacaggaaacttattgggtttggggctgttccagtctctagcatttctggattaccttagtgggtctcacccctacaaggtaataatggattacaaacctttatgaaaaactattcacaagaaaatcagacccctgggatcctaacaaaaggaaatggaaggtgatggcttggcattaatgtaacccttcaccatgcatgtcacagaaaaccttgtatatacatcagagaattcaacaaattctgartgtggtatttctctcctgatggagtttccctcagtagaactcataattttgtctattaac

SEQ ID NO: 513623 - DNA, 582 bp, Homo sapiens
gtgagaacagtgagtaatgttattttggttttgttaaagtgtagactttgtgcgtttgtatatgagtgtctgccttttgtgttaatgtgtgtgtttgttgaaggggtggttgctggtggctggtgacaggaaagaacgccagaaatgcattccggggatcctgaatgtttcatgagtcaggttaaagaatttggactttattgcatagacaatggcaaggaataaaagtattttaggayggctcaatttaatgtggtacagtggccctaagtatccatagggggatcggctccagggtgtccccgtccccctagaggataacatgtcttgatataaaatggtgtgtttttatataacctatgtacattctactgtgtacttttaaatcttctctagattatgcatattatctaatctaatataaattatgtgtaaatagttgttatatttctaatagatattcatttttattattgctttgtatctttccaatccaagatgggttgaatttgcagatgtgaaaattgcatataaggaaggctgatggtataactattaaaaacaaacaaaaacacaaaattg

SEQ ID NO: 513624 - DNA, 621 bp, Homo sapiens
tttttcatatattatttgacttttgaatttgatattttctatgtatttattcatgttcttagagcatatttttcaacttgaccatttatttttttctgacaatttgtaagtagtctcatatgacactgacagtattcctttgtctataatttgtgtgaccaatttttttgatatatgttatgtttattgattttggttttgatatattgcccaatgcaacttctatattttctccatttatcagtaccaatgggttaagagaaaaaaaatctgcaytctttaatcaaaagataggaaaggggatgacagaaagtcagaaaatatttataaaataattctggtacaattaaactgcccaggaaactatctggctccacccatacctacaataccaaagaggaagcagagagcctagatttccacccttagcagactataatgaagcactctcaaccttcaactggcgtggtgtgagaaaaagctaaatagagagccaagacttttattcctgccagactataacttctcttctctcccaaattgcttcctctgctaggaaaagtggtgacaacatgggcatatggacattcattcccaccttcagcagagggaggatatgtg

SEQ ID NO: 513625 - DNA, 618 bp, Homo sapiens
tcaaaatgaatcacagacttaaataccatagaaaaaaaaaacagggcacctgtgtgttctagcaccagttagagagttctttgaccrgattctgaaagcactatccataaaaagaaattttggtaaattgaagttcattaaaattggaaacttttgttctgtgaaagaccctgccaaaaagatgagaaaataagctacatgctgagagaaaatatttgcaaagcacctatttgacacagggttagtatctagagtatataacaaactcaaaaagctcaaaaataaaggaaaaaaaatccattagaaagtaagcaaaagacagagagaggcaattcactgaagggagtatagaaatgcaaattaacatcataataagatatcactacacatttatcagaatgactaaaataaaaagaaaaatagtgacaacattaaacgccagaaagagtgagaagaaactggaacacagactttgctgctagaatgttaaatggtaaaaatattttcaaaaattgctgagcagttttgttgttgttgttgttgctgcttaaataacaacaatacacaaaaacatgtaactacaatacaatccagaaatttcactcttaaccctgtaac

SEQ ID NO: 513626 - DNA, 618 bp, Homo sapiens
tcaaaatgaatcacagacttaaataccatagaaaaaaaaaacagggcacctgtgtgttctagcaccagttagagagttctttgaccggattctgaaagcactatccataaaaagaaattttggtaaattgaagttcattaaaattggaaacttttgttctgtgaaagaccctgccaaaaagatgagaaaataagctacatgctgagagaaaatatttgcaaagcacctatttgacacagggttagtatctagagtatrtaacaaactcaaaaagctcaaaaataaaggaaaaaaaatccattagaaagtaagcaaaagacagagagaggcaattcactgaagggagtatagaaatgcaaattaacatcataataagatatcactacacatttatcagaatgactaaaataaaaagaaaaatagtgacaacattaaacgccagaaagagtgagaagaaactggaacacagactttgctgctagaatgttaaatggtaaaaatattttcaaaaattgctgagcagttttgttgttgttgttgttgctgcttaaataacaacaatacacaaaaacatgtaactacaatacaatccagaaatttcactcttaaccctgtaac

SEQ ID NO: 513627 - DNA, 618 bp, Homo sapiens
tcaaaatgaatcacagacttaaataccatagaaaaaaaaaacagggcacctgtgtgttctagcaccagttagagagttctttgaccggattctgaaagcactatccataaaaagaaattttggtaaattgaagttcattaaaattggaaacttttgttctgtgaaagaccctgccaaaaagatgagaaaataagctacatgctgagagaaaatatttgcaaagcacctatttgacacagggttagtatctagagtatataacaaactcaaaaagctcaaaaataaaggaaaaaaaatccattagaaagtaagcaaaagacagagagaggcaattcactgaagggartatagaaatgcaaattaacatcataataagatatcactacacatttatcagaatgactaaaataaaaagaaaaatagtgacaacattaaacgccagaaagagtgagaagaaactggaacacagactttgctgctagaatgttaaatggtaaaaatattttcaaaaattgctgagcagttttgttgttgttgttgttgctgcttaaataacaacaatacacaaaaacatgtaactacaatacaatccagaaatttcactcttaaccctgtaac

SEQ ID NO: 513628 - DNA, 618 bp, Homo sapiens
tcaaaatgaatcacagacttaaataccatagaaaaaaaaaacagggcacctgtgtgttctagcaccagttagagagttctttgaccggattctgaaagcactatccataaaaagaaattttggtaaattgaagttcattaaaattggaaacttttgttctgtgaaagaccctgccaaaaagatgagaaaataagctacatgctgagagaaaatatttgcaaagcacctatttgacacagggttagtatctagagtatataacaaactcaaaaagctcaaaaataaaggaaaaaaaatccattagaaagtaagcaaaagacagagagaggcaattcactgaagggagtatagaaatgcaaattaacatcataataagatatcactacacatttatcagaatgactaaaataaaaagaaaaatagtgacaacattaaacgccagaaagagtgagamgaaactggaacacagactttgctgctagaatgttaaatggtaaaaatattttcaaaaattgctgagcagttttgttgttgttgttgttgctgcttaaataacaacaatacacaaaaacatgtaactacaatacaatccagaaatttcactcttaaccctgtaac

SEQ ID NO: 513629 - DNA, 580 bp, Homo sapiens
ctggtcgccagtctccatataataacctttcatatacttgaaaacttttattaagccacccactagtttctcttttccaagctgaataatcctagctcctttaacctttcttcataagtcttatttttccaaccttttaatcagttttgttctccccactgtattctcttcttgctctaatttatgtaaaagccctagactactggaagtgaaatctgagctgttaaggcactgaagtggactggagaggtagttcgaggcctgtgaagcaggagctagagatggcaagctgggatgacacagaaaaaactggagaaagaattcacatagtcaagatagtcttaggagtggtcttaacagccattctgaatttcccctgayttcttgcagagtcatcatatttccgaagctgtcattggataacattacatccagctttaaattctgtgaatgtcagtcttgaccaacatttggagaacatgttttccaaggcacccttcagtacaactttagactgcaataaaataggtcatactggctgactcagaagaatgcaaatctccagtaactcatcagctaa

SEQ ID NO: 513630 - DNA, 453 bp, Homo sapiens
tttattagaatgccctgcaccactgttaacatccccctactttctgttcatttgcttcctgagaatttcaatatctgtttgttatagaaaggtcacagttgaagtgtcgggaaaatgataatctctcaaagcagttcccaagagccagagaggggtttctgctcagatttctggttggcacaattcctggttcactaggtcagcaggcagatggtgacagagttgtgaagcatattcttacctctcaccatactaattcttttattcaataaagaggtatggtatgctatgagtggaagctctacatgccttataaataggacctatttctcccagattctattggtattagtttctagcgccactgtaattttttattatttcttgtgttttcatgggcattragagataaattatactggaaactgctagtcagatcaattttgatatggt

SEQ ID NO: 513631 - DNA, 641 bp, Homo sapiens
tagctgctgaagttctaagtgcacatggctcatatccattgtctcatctcacttgataaaggtaaagaaccgaacgcaggaagcatttgtgacttattacttgtttgtgatccaggcagaattaaatgcaagaacttaagcttcgagttctcaatttctttccctatgttgaaaatccatgaggctaactacttcctaggaataattatttgtcttttaacaaaatcttcattcttattcttcatatagattagggagaaactttggatatgaaaacattggtgatgttacccattctaatataatctattacactgaagatttgattataccaactcaaggcaagcaaggtcaacttacagataaaataattatgtgatattggcaagatgtgattaattatatgaggtctacagttgccatcaaaacaatgcaaggcaatgaatttctaaggtattttrgttttgtgtaagatttagtaatttaactaaactcatacctctctgtccctccagaatgtaagtgatactatatctgctcatggacaacacaagtggcctataacatttaacaaaattgcctaaagaaattaaaagccaataactgtaggatgaatatggaagtcctgaatagttccacca

SEQ ID NO: 513632 - DNA, 684 bp, Homo sapiens
tttatgcaattttagaaacattctttttttaaaataaaaaattgtatatatttaagctgtacaacatgatgtttatatatgctaatatgttaatatataaatatatatgagatattttttctatatattatatatgtatatatgtgcatgtgtgtgtatattgtgtgtgtgtatatatatatatatatatatatatatatatatatatatatatgctgtacatggtgagatagttactaaggtcaagctaatttttgtatccatcttctcacgttgtaaccatttgtgtatagtggcgggtgaggacactaaagctatctgggttttgtctccctccttttgcctaccattaagcgtatgtgtgttctggtgattagtgtcataacctaaaatattcagcaagagggagaaaaaagtgggacaagagatctggagaatcagattcatcaatatttcgactgttgggagcaaccccttctctttggtgggaaggcagctctttcgtggatgaagatctgcrgcattgtcgcatgtaacccacaatcacaggccaccttctggatgactcagcctccttgccgaaaaggcatgcttgtgactgctgcccccaagaaggctccttcctcaatgaaagggtgaggtcaaggcccttagctcaaaatacaactggacggcagcaagtac

SEQ ID NO: 513633 - DNA, 621 bp, Homo sapiens
gtctgcactttcactccacaacacatgcagtttcaggcagctctctggtaaaaaaaaaaacaaaacaaaacatttggacaaatattataagaatgaaaatgaaaatttgaaaagtaaactacatctatggtgaatttggcaattaaattcttccaggcagaatgaacagaaaataagacattttggggtacctcacaagaggtttagtttcataatgacttgaggaagtagggtgaatttattggaggagaaaaggtactatcgtgattaaatcacaacactaagcctttttggtatttaagggaggctcaggaaacttccatacacaggaagataattttacatttsataaattatttgcaaggcttagagtcctgtccagtgttctctataagactataaatgctttggatgccagacataaagaaagctctgggaaaatgttgcttcattaatgtgtcctgtttagtcctaagatctaaataccttagagcaatggttaaaccttggtttagcactacagggtcagttcttccagacttctgaactatctccaggattacagtaaatgtagtttaccttgcagtagatgtctttccaataggcattagcctcacctgt

SEQ ID NO: 513634 - DNA, 413 bp, Homo sapiens
tgtgtttttctctcagctccacactctcaaagctgggtgggaactctgagccagcacacagtggagttgatcctgggctgaataatccagagtgaggagttggacgggactgggagtgatgaaatccagaggggaacctggagtcagcagttaggagggccccgccttccccaggtgcatataaaggtctctggggttggaggcagccacagcatgctcttagccttcctgagcaccttcccttttttcagccaactgctcgctcgctcacctcyctccttggcacgatgagcacctgcagccaccagttcacctcctccagatccatgaagggctcctgcagcatcgggggcagcatcaggggcggctccagccgcatctcctctgtcctggccggagggtcctgccatgcc

SEQ ID NO: 513635 - DNA, 459 bp, Homo sapiens
aggttgcagtgagctgagaactcaccattgcactccagcctggatgacagagtgagactccatctcaaaaaagaagaacaaactacagcggggagagggcgaggggaagaagatagtgggggaaaaagagcaccgagaaagggagaagagatggggagagctctattgtgtcactgaacattcctcagttaaagttaaaatgttctcataagtttgtgtgttttcaacttttgctcttccagttggtatattcttttcttcctccatctcctttttatacctccaaccacctttctctttttattttccaatgtttttctttcttctaagaacattsttaacgctggtaacactttacaatgttgcaaagctctgaacctatttcctgtcatctcttcatgctttcccattgagatatcaggagattttccttttactttgtttacactaggaacattt

SEQ ID NO: 513636 - DNA, 567 bp, Homo sapiens
tcccctgctatgtggggccctagctgagtcagggaggggccggctctgccccagcccagggctgcccggagccagggtcctcgtggtgctatgcagggagcgctgctccaggagggacgaaggggccagttggggtcgttccaattcccggtcccttccctgagctaacaaggcgcttgaaacggcccccttggccctggcctcactgccgctctgccaggacgcattttatttctgacccagagcacagccccaagtccctgaacaaaaatcttcagttgtgccaagttgatcttttattgttgctattaaacatttattaaatactctgtgcagagcyggagccggggagagcagtgatgcgggatgagccaggcccaggcagtgcaggctgtgcccggggctcctcctcacaggggctcacagcagccctggcctcacgtctgcaggggttcgagtctgccgggggtgggcagaaagaggggcttcgggggccccgagcagagggagaggcaagagtggagggcgggagacgctgcagggtcggggttctggcttggcagtgag

SEQ ID NO: 513637 - DNA, 547 bp, Homo sapiens
gggccgtctgtcttctcctgcctgcatgtttctggtgctcaggccttcagagttggactggaatccacaccactgaccccggctttcaggcctctgaaggacacccccagctctcccgggtctccagctcgcggatggcggaggatagaacttctccggctccctgacttataaacagcttcctcgtcacgtcattctctgtgcgttgctcttggttctgtttctcgggagaaccttgactgcccccgccgcagcctccacccgcccacaaaacgggccccatctctcctctgcttccagcatttcctcaccgcatctgcctctcttcaagaaaggctcccaactcccgcctcctcacggccatccttccctctccccagacaccctctgacctggcccctcccacggcagrctacgcctcttcctggagctcccagtgtctgtgtagtcgtgtccttagcccagaatgccggccccacgcacccaccgtggggagccccccagacttgcacagggtcccgcctggctctgcagccagcttgttctt

SEQ ID NO: 513638 - DNA, 561 bp, Homo sapiens
ctggggctgggggatgggtgtaaaagccaacttggaaagcaggagaaccaagaaggaatgcttgctttaccagatgttaagagttttccaaaatcacaataatgatgatgagaatgatagtagtggcgtaaacaatggcgtaaccctaaacactgaggacctgtgggtggcaacacaaatcaatagttgtgatgggtaatgctgaatgtcaacttgattggatggaaggatgcaaagtattgatcctgggtgtgtctgtgagggtgttgccaagggagattaacatttgagtcagtgggctgggagaggcagacccactctcaatctgccagtgcagctaggatataaagcaggtagaacaacgtgaaaaggcgagactggcctagcctcccagcctacatccttctcccgtgctggatacttcttgtcctcaaacatcggactccmagttcttcagttttgggactcggactggctctccttgctcctcagcttgcagatggctcatggtgggaccttgtgagcatgtgagttaatacttaataagctcccctttttata

SEQ ID NO: 513639 - DNA, 608 bp, Homo sapiens
gagaaacctagttttatttacctttttctccgagggcaacagtaaagagcatcccactcgccctggagaactgggggaatgtcagccacgctgatccccccccagaaaccctcagcctcagtccacacgcctgtggcttggcagcttcgccatcactgtgcccaagcaaagtcggcgtccagcttttcactcgttcagtctcgagcactgcctgkgtggccacacagcccttcaactgctcctctgccatgcctgaagaataattattcgggaagcctccagaagttcaccacttcgaaacagaaaccccagcactgccaggactccctgtgattggtggcggtgctgagtgcggacagcaggatgcagcaagagtgctcgggtgattaggggaagtgagcaggttctcgttccaacaggatccccaagaaggcgctgggaaccggcaggctactttcaggagtgtggggagatgcgccagcgggaagccggcccagctccagctcttcctaacaagactgcctccctgccgcctgcctcgcgattccccagtacaacattaatcacccggctcccagccgtgtttctgcagaaggagctctttctaa

SEQ ID NO: 513640 - DNA, 454 bp, Homo sapiens
agcttcgccatcactgtgcccaagcaaagtcggcgtccagcttttcactcgttcagtctcgagcactgcctgtgtggccacacagcccttcaactgctcctctgccatgcctgaagaataattattcgggaagcctccagaagttcaccacttygaaacagaaaccccagcactgccaggactccctgtgattggtggcggtgctgagtgcggacagcaggatgcagcaagagtgctcgggtgattaggggaagtgagcaggttctcgttccaacaggatccccaagaaggcgctgggaaccggcaggctactttcaggagtgtggggagatgcgccagcgggaagccggcccagctccagctcttcctaacaagactgcctccctgccgcctgcctcgcgattccccagtacaacattaatcacccggctcccagccgtgtttctgcagaagg

SEQ ID NO: 513641 - DNA, 608 bp, Homo sapiens
gagaaacctagttttatttacctttttctccgagggcaacagtaaagagcatcccactcgccctggagaactgggggaatgtcagccacgctgatccccccccagaaaccctcagcctcagtccacacgcctgtggcttggcagcttcgccatcactgtgcccaagcaaagtcggcgtccagcttttcactcgttcagtctcgagcactgcctgtgtggccacacagcccttcaactgctcctctgccatgcctgaagaataattattcgggaagcctccagaagttcaccacttcgaaacagaaaccccagcactgccaggactccctgtgattggtggcrgtgctgagtgcggacagcaggatgcagcaagagtgctcgggtgattaggggaagtgagcaggttctcgttccaacaggatccccaagaaggcgctgggaaccggcaggctactttcaggagtgtggggagatgcgccagcgggaagccggcccagctccagctcttcctaacaagactgcctccctgccgcctgcctcgcgattccccagtacaacattaatcacccggctcccagccgtgtttctgcagaaggagctctttctaa

SEQ ID NO: 513642 - DNA, 608 bp, Homo sapiens
gagaaacctagttttatttacctttttctccgagggcaacagtaaagagcatcccactcgccctggagaactgggggaatgtcagccacgctgatccccccccagaaaccctcagcctcagtccacacgcctgtggcttggcagcttcgccatcactgtgcccaagcaaagtcggcgtccagcttttcactcgttcagtctcgagcactgcctgtgtggccacacagcccttcaactgctcctctgccatgcctgaagaataattattcgggaagcctccagaagttcaccacttcgaaacagaaaccccagcactgccaggactccctgtgattggtggcggtgctgagtgcrgacagcaggatgcagcaagagtgctcgggtgattaggggaagtgagcaggttctcgttccaacaggatccccaagaaggcgctgggaaccggcaggctactttcaggagtgtggggagatgcgccagcgggaagccggcccagctccagctcttcctaacaagactgcctccctgccgcctgcctcgcgattccccagtacaacattaatcacccggctcccagccgtgtttctgcagaaggagctctttctaa

SEQ ID NO: 513643 - DNA, 608 bp, Homo sapiens
gagaaacctagttttatttacctttttctccgagggcaacagtaaagagcatcccactcgccctggagaactgggggaatgtcagccacgctgatccccccccagaaaccctcagcctcagtccacacgcctgtggcttggcagcttcgccatcactgtgcccaagcaaagtcggcgtccagcttttcactcgttcagtctcgagcactgcctgtgtggccacacagcccttcaactgctcctctgccatgcctgaagaataattattcgggaagcctccagaagttcaccacttcgaaacagaaaccccagcactgccaggactccctgtgattggtggcggtgctgagtgcggacagcaggatgcagcaagagtgctcgggtgattaggggaagtgagcaggttctcgttccaacaggatccccaagaaggcgctgggaaccggcaggctactttcaggagtgtggggagatgcgccagcgggaagccggcccagctccagctcttcctaacaagactgcctccctgccgcctgcctcgcgattccccrgtacaacattaatcacccggctcccagccgtgtttctgcagaaggagctctttctaa

SEQ ID NO: 513644 - DNA, 488 bp, Homo sapiens
taggagggtggagactgttcacacctgacagccaggaggaaccctcagaggtggcagcagtgcacagagatgggagggtggagactgttcacacttggtggccaggagggcccttggttgtgtcacagtgcagcagaggccacagtgaaatagaagcagactccatgatgtacagagatggcagaggggayatcaggagggcctcagagagggaaccccctcgagggcagaggacgcaggagtgcctgctatgggtaaacagcccccaaagctgctccagtgagcataggtgttaggggcatggtgatgggcgtggaagcccagctaggaggcgggtgactgggcttgagtacaggtggagctgataagaagggttcagagtctgggtgtttcaagggtggacccccccaggtttcccaacccactgaatgtgagccctgagaaagaggggccacaaggaccccagttttgtgcctttgccggggatg

SEQ ID NO: 513645 - DNA, 505 bp, Homo sapiens
ctggccttgcctgggcttggagacattcttcactatagctgtccactcaggtccaggattcgagttccacgattgcctgcgtcctggctcacgggaggagtgggtcttaggggcacctggcatctggggtcccaggtgagtcacggcaaaagggaagtgtccggcaatggggaagaggaaggaggagtggagagaggcacggggacagtggggagctgggtgggggaggggacatggagcccctgaggacccaggaggagggtcccagtgaagagtccaccctgctgttgctgaagtttgtccaactgctgattagttttggccagataatttttttctagtgaatcaagattttaaatcagatttcctytggaggcctccgaataccaatcaaaaatggctgtcccctgggcctgatcaaccctattcccttggtaaagttagggcgtttagaaagacaggtgcaagaattaggattgtaaggaaagtgcctctgagaagaagg

SEQ ID NO: 513646 - DNA, 378 bp, Homo sapiens
caaacactctcggggccacagacatggctgatttctattttccaggccctgcttgactcttttctcatgtccgtgacaactcttcatccctttcaaagatgtcccagccgctctgctctgtttaattaaacatcttgaaattaagtgttagcattttcaacacaaactacgtggtggtttccatgcaaactcygcaccgctttcccggggaagcttccagggggatctcccacagacaggttgtccaagagctccatttagctttgcacatggccaagggtgaatgcgtgctgcagggtcacagggcctggctgtgctgggtcagtgagtgcatgtggcggtggggggacgcaggggtgtgggggctgggctcacagc

SEQ ID NO: 513647 - DNA, 581 bp, Homo sapiens
caggagacacagaatcagtggcccagctgtgctggcatctggtgggagggttccagcaccaacactccttatctccggaagccatttatgccccccactcctttccttgacttccccttctgtgacgtttatcctcttcttcttcttctttttttttttttgagatggagttttgctcttgttgcccaggttagagtgcagtggcaggatctcggctcaccacaacctctgcctcccgagttcaagcgattctcctgcctcagcctcccgagtagctgggagtacaggcgtgtgccaccacacctggataattttgtattttttagtagagatggggttttaccatgttggccaggctgatcttgaactcctgacctcagatgatcygcccacctcggcctcccacagtgctgggattacaggcgtgagtcaccatgcctggcccatttatcctcttctttatataactcttagtaacttcttattcaacttattgatctacacttaaccttcctgtgactaccatcaatgaaaatcactacattacatgttctaacgtgttttttgcttccttacaggga

SEQ ID NO: 513648 - DNA, 672 bp, Homo sapiens
gaatcaaaaatacttctggagtttttaatctgtttcgctttttacttgttaggtcagagtggtgacttccgtgttccttacatgtgaaactggaactcaccttaatttttaaaaagcagtttctgtgcatctgatagtcttggtttctgatttttcctgttgccactcgactttgccgtcccactcgactctgccgtcccactcgactttgccgtcccactcgactctgccgtcccactgtcttcggacccgcattgcttctgatgagaagtcatgtgttcatctcacctggaatccctttgtgtgacaactgatctttctctttgttgctttcaggattggtctttgtccttttaaaaagcatttaatgatgacgtgtttgccaatgtctgtttgccaatgtctttgcctttatcctagctcatggagctagatagatatgtgtagataacaatttttcataaatttggggaagtttcatggtttttccagtcatttttctgctttatctcttttttcttgtattctcaggacacatatactggtgctctgaatggttcttcatgcctctgaggttttcttcctttttttcatttgctattctttccatttctcagattgcygaacctctgtaaatctatttttatgtttgcagactcttctgccaactca

SEQ ID NO: 513649 - DNA, 609 bp, Homo sapiens
ctgcctcctggctctggcccgggagctctccaggttgccaggctagttttccttccagacgctgggtgcctttaagagagcgacggcagctcattggccgagcaaggctaccccacctctttaccttagcggggagcacagctaggctagaggcagagagactcaggtgagtaaacaaatggtggcaacccgctgagtctcccctcctccacagccctrgtcctgggcttccttcctcacctccactctccaccctggaaaacaagctggggctaaaggaagagcaaaacactctgcaaagtgcttagtgcggttcagactacatgatctcacagtgaccctggggcagagttattagtacatcttctcttttcagtggaacaactgagtccttggaggggtgaagtggcttgtccagttcacacagcccttgcaaggaaggtcgacagagagggatggtgtgaggatccaaacccgagtctcctgcttttgacttcccatacggttctgttggaccacaccactttcctgtttgcaaagcctttggcaagtcactcactgcctcagtttccacatctgtagcatggtatagtcatgctagtgatcctc

SEQ ID NO: 513650 - DNA, 585 bp, Homo sapiens
ttcctaaatggcgacccaatatcaagaacaaaataagtagttaccttaagctgctaagttttgggagtaatttgttaaatagcaacaaataacatgctcaacaatatatgctaaggaattatctttttcattacttraactcaaaagataagtacttttttcagtcatttatgaaacaacttctctcattccacatatgttttgaacatgccaacattgctcaaatatcacctcacattagtacttaccttgataccaaaagtgcatactgtcattatgattttaaataggagtgccaggcattagtgcattgagctgaatatactccaatgcctactggattatcaggaatgtcatagaaaattttactggcattcatgtcattttggtagtcacaaagagaagaggattccaggggaaaacagtgtgtaaaaaactctttgatcagttcactggtgtttaccctggtgtatggattaggaaaggctatcacagccataatggctgcaacgataatgatttccagaatgggatactttccaaatttggtggacttgtgtcgatgacaccaggcaatacttaccc

SEQ ID NO: 513651 - DNA, 585 bp, Homo sapiens
ttcctaaatggcgacccaatatcaagaacaaaataagtagttaccttaagctgctaagttttgggagtaatttgttaaatagcaacaaataacatgctcaacaatatatgctaaggaattatctttttcattacttaaactcaaaagataagtacttttttcagtcatttatgaaacaacttctctcattccacatatgttttgaacatgccaacattgctcaaatatcacctcacattagtacttaccttgataccaaaagtgcatactgtcattatgattttaaataggagtgccaggcattagtgcattgagctgaatatactccaatgcctactggattatcaggaatgtcatagaaaattttaytggcattcatgtcattttggtagtcacaaagagaagaggattccaggggaaaacagtgtgtaaaaaactctttgatcagttcactggtgtttaccctggtgtatggattaggaaaggctatcacagccataatggctgcaacgataatgatttccagaatgggatactttccaaatttggtggacttgtgtcgatgacaccaggcaatacttaccc

SEQ ID NO: 513652 - DNA, 567 bp, Homo sapiens
  misc_feature (1)...(567): n = A,T,C or G
nnnnnnnnnnnnnnnnnnnnnnnncgcaggcccgggcgcgggggcgggcccgcagatactgccagaaaggctgtgggggctacgcaggtggctttggatgacagccagggtaccaggaggcagcgcgtttcattcatgcagtgactattaagcttgctgtgtgtccggggkctgcggtttgctgcggggaccctgcccaggtcgctgtttcgcgctctgtaggggattggaccaggaaagtagcgcctctgcattttctgcccagctcctcttggcgcatttcctggggaaacggattaagccaaccaacgtttcattcattcgcccacccagatagattgggaaccgattacataccagacattgtgcggggccctgcggatttggggtcaacccgcctgccccttctccatgtagagcctccggcctggggaggaggggcacaagcgaatatgcattctactgtgacttttttgtttgggattataatgctggtgtgtagaaagtgctatggaaacactgaaggaggatttaacaagtcccagggggtgttaaagaagactttta

SEQ ID NO: 513653 - DNA, 576 bp, Homo sapiens
atttctaaggttctaaatgatgaaagtcattcactctggcagtcaggaatgagatgagtccctgtgactcaggctgttggccaccccgtaggataaatcagctttgagaaggcccagagcccccacagcattataattctgattcccaaatatgctataaagtaggacttcttttaggggctattgatagtgggccacctaattagggacatatgggtgattgtattacacaggaaacagatttgggaagaataaattttttgtctaaattgctgtaccaaaagtcagcagaagcttcaggcagagctgatcccctatcattgttactgatgggctgcaaatgagctgtagcattaatctttgacaccacactcttgtccttaccttcgaccactttgactctggcaaattatacagctaaatggtgatgaaactggtctgcccaattatgcttaatccagatcagttaccctgggaccatgtaacctttagttagcactagctagatgatccaaacacgtctttgaaaggccccagagkttccccagtcttcatatttacagtggatgaaaagtc

SEQ ID NO: 513654 - DNA, 510 bp, Homo sapiens
gcgtgagcatttttatcctaagcttgatgaagagtggaaagttatgggaaaatgtattaggacaaagatgtgtgagctgagggtggtaaactgggggaaagtgagcaagacctgcctgtgcagattccccattgtgtccctccattcttggagctaaggatactcctttcctctgggtatcaggagggcacttctctcacacaagggtactgtaacctgctgttcaggggagaaggtcagagagtctttccaccacatgccacttctcaaattcctccagttcaaaatattcaatgtgccaaggcaccctatttggggataccatgttctgaaccccatgatgaccaaggctgcaaagacagacatacctttgcctacaacacaaaytcattaggtttccttccttagatttccaatagctcaaactctaccctgccatgttttgcaaactgtgcttgtgaaaatgaatattttggagacgttaaaagcttgccacaaaaaaagttcacc

SEQ ID NO: 513655 - DNA, 565 bp, Homo sapiens
ggactcctgcggtagaggcttcattggtcttttggtcaacaggctctcctttcttttatcctctaccatgacttgggagtgactatccttaaaaatttttaaataaacgtacttgtctgtttagaaaaaaatttgtttccttttttttttttttttttttgaggcaggagagcagtggtaccataaatcactgtggtctagaaatcctggcctcaagtgatccttccgccttaacctcctgagtagttgggaatacaggcatgtgataccrcacgggactcattattttttaatagaaacagggtcttgctgtacggtccaggctgtctcaaacccctttgatgccataatcctattccaaggagtaccttctactatggcttgttgaagatctgaaatgctagtttgagttattctcttaaggcattgaaggtcctcacttcaaatgtaaacctcgttaaatcattagtggctactaaaactttatgtgaatgagctcatcctatcagtttcttcacagtgatttctctggagcttttatatctatgatcccatctaaatatgt

SEQ ID NO: 513656 - DNA, 608 bp, Homo sapiens
tgaaggaaccgtaggcgaaagaagatgctagtcctcaccaagatgcatcaacagaagccaggaaagtctgtataggactggatcccgagggcctggaccaaggggacagaatataaagttgaataagaaagtttattgatatgagaaaatgatgtaacactggcaacaaccacaggagatggtgttgatatgcatcttggatggctactgaaagcttgaagaaattgatgtctcaccataagtgaggtacaaatgccaggacttcctccagacagtggaggaaggagtcaaaaggctcagagaaggaggtgtgtagcattgytatagtacttgtggtgggcacaccgttacatgaccctcaatgagccatgcccttgtataatccctccgcttgagtgcagacagaacctgtgacttgcttctagccaacagtgtctggcaaaggtaatgggatagtcattctgtggttatgttacattatacagtactctaggttggcatcctggaatgagagattctcctgctggcttgaagaagtgagctgccatgttgtgagaggccctgcaggaaggaactgcagatcacctctaggaattgagagcagcacc

SEQ ID NO: 513657 - DNA, 483 bp, Homo sapiens
ctgtggtttccaataatttgcttctccttccccaccccactgatactaggcttacactcatgacttgctttggtcagtgaaatgtgatggaaatgatgtttgtcacttccaggcagaagagttcagaagcagaatgtgattcactgtgatctttttttgtctcttccwtgagaccatcaatagctccagagggagctgctttatcagcttgggtcctagagtgaagataatgtggaacagacctgcaaaacatggaacattgttcctttggaattactcagcccatcccaatgaatacacctacccacttggctttttacttccatgtcaccgccctccctaacatccacccagtaaattctcgacatagtattcagagggatattttgcaagggtaaattagatcatgtcatttccccactccaagtcctccaaagacttccacttaacttagaataagatccagttttctcatcttgtcta

SEQ ID NO: 513658 - DNA, 666 bp, Homo sapiens
attctaggatgtatttaccatttcatgccctatactttttatatattataagcatagttcaagttattacatggttctcttatcattttactagtatataacattctattatatggttttataataatttaataaactattctattgtttagaccaagggtcagcaaactacaattcatgaggcaaatctggcccatcaccttttttcatatggcttccaggctaaaaacagctttgacgtttttaaatggttataaaggacatcaaaagaataatattccatgatgtggaaattatatgaaattctaacttaagctttttaaaatagagttttattgaattacagccatgcttattcatttacatattatctatggcttcttgcacaatatagtagaaaacctgagtattagagaaagatgctgcataattcaaaaagcctaaaatatttaccatcttgcctttgcagaaaaagcttgccaacttctggtttatacaattccaatttttcaccactagaaaacaatactcccatgacaccttcatgaataactctctccttctttcagattattttcttgggataaactcccagaagygggtgtgagtcagagagtatgagtactttgctggcgctctatatgtcatgccaaattgccttccaca

SEQ ID NO: 513659 - DNA, 508 bp, Homo sapiens
ttttaaaaaatgattgcattatctcttcttgtatttttcttgtttatttacacattatatctttaatttcttatatggggtttcctagaaaaatgcccatcttatctggatttttctatttattgtcaaataatatatccattatttttatataacattttaatctcttcaatattgataaaaacctctcctaatttctcatttttagttgtcgtattctatagtgaactagaatagrcttgccaaagttgaatctattttattggtcatttccaagaaccagctttcatttttatggtttaagtcttctttattaatttctacttttatttttattaattccttcattgtatttatcttctttgactctgtaatcttcttggtatcttaattcacgtatttatttctccttctttcagtttttcttattttctaactcatgtattaaaatgtatttaatgtatataacgaatttaaagtttactctttcttctgaatagattttcag

SEQ ID NO: 513660 - DNA, 508 bp, Homo sapiens
ttttaaaaaatgattgcattatctcttcttgtatttttcttgtttatttacacattatatctttaatttcttatatggggtttcctagaaaaatgcccatcttatctggatttttctatttattgtcaaataatatatccattatttttatataacattttaatctcttcaatattgataaaaacctctcctaatttctcatttttagttgtcgtattctatagtgaactagaataggcttgccaaagttgaatctattttattggtcatttccaagaaccagctttcatttttatggtttaagtcttctttattaatttctacttttatttttattaattccttcattgtatttatcttctttgactctgtaatcttcttggtatcttaattcacgtatttatttctccttctttcagtttttcttattttctaactcatgtattmaaatgtatttaatgtatataacgaatttaaagtttactctttcttctgaatagattttcag

SEQ ID NO: 513661 - DNA, 545 bp, Homo sapiens
ggctgtctcattgcttcctagaagttataattttccactggttgcagaacttgtgtgtctgtgtgtttctgtctgtcataaactatacttatgtcatgtgtttctatgtgggaacaggtagagacagaaaaagtattctgaccatcacattaagtatattcatgctataaaggtacaattgttgagttktatgaattgcttagattacctgaggcagataaaggtggggagataggggcaaaatatcttttcatcttctacctggaaggtagttctgctattttatgagatggaaaatgaatgagtgggccatcatttgtataatgtaatctttgaaaagattacttttaattttctatgccatgaatttcaatattttggatcttcacaagaactctagtgggaaacttgagataatgcatattggctgtggaccagcagtacattcagctacaagtaagaagcctcagctataatggcttaaataacaacagttttatttttctcttataacaagaagtctacacttaagcagttgctgacac

SEQ ID NO: 513662 - DNA, 545 bp, Homo sapiens
ggctgtctcattgcttcctagaagttataattttccactggttgcagaacttgtgtgtctgtgtgtttctgtctgtcataaactatacttatgtcatgtgtttctatgtgggaacaggtagagacagaaaaagtattctgaccatcacattaagtatattcatgctataaaggtacaattgttgagttgtatgaattgcttagattacctgaggcagataaaggtggggagataggggcaaaatatcttttcatcttctacctggaaggtagttctgctattttatgagatggaaaatgaatgagtgggccatcatttgtataatgtaatctttgaaragattacttttaattttctatgccatgaatttcaatattttggatcttcacaagaactctagtgggaaacttgagataatgcatattggctgtggaccagcagtacattcagctacaagtaagaagcctcagctataatggcttaaataacaacagttttatttttctcttataacaagaagtctacacttaagcagttgctgacac

SEQ ID NO: 513663 - DNA, 451 bp, Homo sapiens
ccctcaattacaaaggcaaaatgaggccgggcgtggtggctcacgcctgtaatcccagcactttgggaggccgaggtgggcacatcacctgaggttgggagttcgagaccagcctgaccaacatggagaaaccctgtctctactaaaaacataaaaaatttagccgggtgtggtggcacatgcctgtaatcccagctactcgggaggctgaggcagaattgcttgaacccrggaggtggacgttgcagtgagccgagatcacgccattgcactctagcctgggcagcaagagcgaaactctgtctcaaaaaaaaaaaaaaaaaaaaaaaggcaaaatgaagggaattctttaagagttttggaaaaaggctgggttgaggggtgtttgctggagggttctggtggtactggtgagaggggtaggcccataaacctactctgtgggataaag

SEQ ID NO: 513664 - DNA, 595 bp, Homo sapiens
ctgcatgttgcaacataaactgcttttttgcaaggttgcatctcacagagaatggcctaactggtccattaggaagttgtgtctcatatgagctttttcaacggtgtaaagagatataaaatgtcttagtgaagatattttagtgrcatagtttagctatcgaaagcatttcagagaggatttcatttcagaatcctttcttttatttacgtttttaaattcctaaaataataatgtagatattttgtctgtgattagttactgtgtatttgaaaagcaacatttataagttttaataaattttatatctaaaacctaaaataatgagtaccaacttttaaaacttaattaagcatcttttcactaagacgttttagctgggatgaaaggctctgtcttattctcttgagtttgcatgttttgcatttgcatgaatttcatttagcaacattcattgtgttttcccaaaatattagagatgagtaaatgtatatgcatattatggtagtctgtttaaaatgcagtagaaatgaaaacatttctgtactttaggtgaatggaattgccatctgatttttataatctctaccaagat

SEQ ID NO: 513665 - DNA, 592 bp, Homo sapiens
ttatccttctccttcttcaaaaagtaacgcagagggtacttacttttcaaccaaaatgaaagtgtattactgaaaatagttcttgaaaggctggtcccctaggttgcctgggaaggaggcacgtttcccaggctgggatcccctgggtcatggggctgcctcacctccatgctggaggacagttgtcttcatgcagaagttaatgtgtagcagctacattattcttagttgaatgagatttgtgcaggttcctgtttaaagtgccgtctttaatgtcaaatgcaaatgtgtgggaaaagacatacttctctcatcgtaaaaagagacccttcaaaggccgaagagctacgattttatttgtgcattttctttccctcatgcctcagatgtaactttatttgtgcattttctttctgtcgctatatwtaccacttctccccaagtcaggattgcataaccacacaaggcaggctgggtaatttccatgctgtcaggccactgggcaaaacacacacatacacacacgcagtgacacagacatcagcagaagtctaattactttcaggcttggatttcccggcctgcagcagct

SEQ ID NO: 513666 - DNA, 622 bp, Homo sapiens
ggtgttacttcagggctcccattgtgtgggaaccaaaaattactgtagtgctaacttgactgtctactgttagacatcatgttgctttatctctgtttcaacaaaagtagtttttgaaaactgcatcttttttagcattgtattggttaaccttttctgtaagaccactttatkgggaaatatctgttcaggaagctgacacagaatggaacattaaaacttaggctttggtgagagaaaaattctttaaacagtggtctatatgcagtgcttaagtccttgcagtaaaaataagaattcaattacacttattgttgatcatgttctaaacctttgaaagctgtttatcaaaagtaatcaagaactcattatcactatgttcatgacaatcccaaacctagctaataagaaataggtctatatccatttgaatgacttaaaaaggacccttttatgcagaataagtgaaaagtacgactaccaccatattcttgtaccattacacttcagttccattcaaactactgagtttcaagagacaaatttcacattgattgatttaaatataatagtccttacaatattcagttatgctctcatgaattttattgtaattggttaa

SEQ ID NO: 513667 - DNA, 518 bp, Homo sapiens
agcatgttttctcttttacatcatattttcactataccttttctacgtttagatacagacacttaccgttgcgttacaactgcctacagcattcagcacagttaatgtgctgtgcaggcgtctggtccagaagcaacaggccatcccgtcccccacagcctgggtgtggggcaggctgtctcatccatgagcgcggggcacactctgatgttgcaggatgatgaaatcacctaacaacgcatttctcagaatgcatctgcactgttaattgacacatgactgtgctttctcgtgaaccaccttttcccagaatgatgaggtccacaatatagttttccaagcaaaaacggcaacaaggaaaggtcaagcagaaatgagctgggggcaagtcagcagagggctcagcttctcctctgggactctcttctcaatccacctacacaaggctcttctgcacaaggcccgggttcctcgttctgtgacagttgtggccctgragagtagccgcagcggatggc

SEQ ID NO: 513668 - DNA, 584 bp, Homo sapiens
tccacatcccaggtccacaaaggactgcctggcagttagtcycctctcagccctttcttcttcccatagaatctaagtgaagagaaaaacaaaacaaagtcaggtggtaattcactctacgcaagaataatttagacacaaactggtcaaagaaaactctgagtgaaaggaaacttgaaatcatctacactaaacattcttttttttttttctttttttgagatggagtgttgctcttgccgcccaggctagagtgcaatgatgcaatctctggtcactgcaacctccgcctcctgggttcaagcaattctcctgcctcagcctccccagtagctggaactatgggctcctgccaccacgcctggctaattttgtatttttagtagagacagggtttcaccatgttggccaggctggtctcaaactcctgacctcaagtgatctgcccgcctcggcctcccgaagtgctgggaattacaggcttgagccaccaaacccagcctactctaaacattcttatagataagtaaaccaagatgattaaatcagagggcatgtccaaatgtagccagctagcgagccag

SEQ ID NO: 513669 - DNA, 615 bp, Homo sapiens
tgcccagtttggtagcagcttcccccatgccacagccgcacactcagaacaccccacctcgtgagaaaaaccttgcctcggtgccaatggccccagcgtgctccagcctgttacttgaaagccaaggaatgccttttccagtatgatccggtcacagtcagcgccctttttaaggagtggaaattattcccccattctcaccacacagaatatatttatacttgcaaaaacattcccgtgagtttcaaaggaaagcaaacttccacgaattctcargggatcccttctgttccacaaaagctattacagtggtggtcacatgtggccaactcaaatacaagccagatccagtgtctccagcgggagacgtgtgcgtgtgtcacaggtgtgtgtgtgcacagcacaggagttgtgtgtgtgtgtcactggacatgcacgtggcacgggaggcctgagtgtggcacagaaaccctcactccaatcccagaagcgcccagacctcagcacacaccccgcgccctggacatcttgcttcttattgcagcagcttccttcctcctttggggcctggaagggccccccaagcccagcccagccaagccgccagagcaggcc

SEQ ID NO: 513670 - DNA, 518 bp, Homo sapiens
ttcagatggggacacggccccatgggacccatgaaaagcctgtgaagtgtcttagtaaaaggcccacatgaacaaagtcaaggaggaaggcagtttctggtgacgaggaggtggtcctatggcacatgctgtccccacacagtgctacgtgtagctaggtgttcactaaaygctggtcagatggacactccctgctggccggcagcccaggggctggaaccacctaaaacctggagggtggggtggatacacaatgatgggggaacgtgattcacgcttgggctgagccgtcagaagtgcatccaaaccaagtttccaagaggctgctccatgtcaactacacatcctaaaatgaaagagttcccacgcctccgccaccatcaagatccttagcagtgacagccgcaaagacctcaaccccaagatatttctgggctttcacagatgatggggtctggctgatttttatcttcttcatccgcctgtggttttgagatgtctctgcaggcatgcatccc

SEQ ID NO: 513671 - DNA, 452 bp, Homo sapiens
gctgaaattaagaatctcttaacccctccatccttttgtgctttttgcytaggacggttctgccggctgcagtgtggtagtgctactgtgccttaggctgtgtctgacacaggtattttcaaagcagtatttcttcgtgttccgtgtatgcacagcagttccagaaccatactggttttgcaaaaaatttttaaatggaattgcttgatcataggcacgtttaggaaatcctgacaatctccctccctgatcaagctttacaagtttctaggaaattccttttctccacatgcttgccggtacctgacatttccacacttttgcttgttggccaaatgctggctgtcaatcagtgaggctgagatctttctcaaatgccttttagccataggcttcctctccatgaagggcctggtctcattaagttctcactttaatatagcagtgtttgt

SEQ ID NO: 513672 - DNA, 510 bp, Homo sapiens
ggttctgaacaagaaaggtagagtaaatattttatttttttcaagtctgtttccagaagaatgaattttctgcattgtaaacmaacttttaaagttttgttataatcccatctttgatgtagtttggtccattgccttttgctcttaactgcctcctccggccatcagccttggatgtggatatcaacaagcacagttcgttccctagctcaccctctgacagccaagctctttcctaggtcttgggagactagcccagtcagtgatcttcccttccaatgaaagagattttcatttttatacaagggttcatgctaagttccctctccccgatgggtcaacccaaagctggagtctgcagaagtatgtgaggagtccatattcaaacacctgggcgggcctttacctggactaaaaccagggttgtgcaggagctggcttgcataggctcacaggaggtgactctgagtacctctcccaaattctgtctgcagggacagcactgcggta

SEQ ID NO: 513673 - DNA, 510 bp, Homo sapiens
ggttctgaacaagaaaggtagagtaaatattttatttttttcaagtctgtttccagaagaatgaattttctgcattgtaaaccaacttttaaagttttgttataatcccatctttgatgtagtttggtccattgccttttgctcttaactgcctcctccggccatcagycttggatgtggatatcaacaagcacagttcgttccctagctcaccctctgacagccaagctctttcctaggtcttgggagactagcccagtcagtgatcttcccttccaatgaaagagattttcatttttatacaagggttcatgctaagttccctctccccgatgggtcaacccaaagctggagtctgcagaagtatgtgaggagtccatattcaaacacctgggcgggcctttacctggactaaaaccagggttgtgcaggagctggcttgcataggctcacaggaggtgactctgagtacctctcccaaattctgtctgcagggacagcactgcggta

SEQ ID NO: 513674 - DNA, 596 bp, Homo sapiens
catcttcatggattgcatatcatacttttccttatagaccgatacttattttgctgtttgttttttgtttttttgtttgtttgtttgtttgtttgagatggagtctcgctctgttgcccaggctggagtgcagtggtgtgatatcggctcactgcaagctctgcctcctggcttcctgccattcttctgcctcagcctcccaagtagctgggactacaggtgcctgccaccacacctggctaattttttgtatttttagtagagatggggtttcaccrtgttagccaggatggtctcgatctcctgacctcatgattcccctgcctcagcctcccaaagtgctgggattacaggtgtgaaccaccgtgcctggcctgtttgtttttttaataaaaataaatgattcatggcaatgtattagcaattcctgtgaattatttagaaagggggttaatataatattcacattaagatgtaaataagtatacaggaaatatactacccaagagaggatgcaaaagcataaacgtatcctgagggctaaattccaaaattcatggcctcatcgccgcactgtttttgactttgactaccca

SEQ ID NO: 513675 - DNA, 440 bp, Homo sapiens
attttcttttaagctgtttcactctctaggaaaccaaaaaggaggcagaaaaaaatggtgagttcatggaagcatgtgcacgtttttgaaatatttgttttatttttaaaaatgaattataattgaaattgttcctgcttatcactaacattttagaaatgcattcttctgggtttagttctattattcatttactgaggtatcartttactcatttatctgcttgttctttatccattcacatacccgcatttgaataatttaaatgaggtccaccacatattgtaaaatacaaattagcctataaaaacaaaatgtcaaagagggaaatggatcaggacataactgagggtcaaacatgaggcttttgtggtttaaatactatgggtgaggtcacacaaagcacccttctgtccagttcaaagaggaacgacattatg

SEQ ID NO: 513676 - DNA, 440 bp, Homo sapiens
attttcttttaagctgtttcactctctaggaaaccaaaaaggaggcagaaaaaaatggtgagttcatggaagcatgtgcacgtttttgaaatatttgttttatttttaaaaatgaattataattgaaattgttcctgcttatcactaacattttagaaatgcattcttctgggtttagttctattattcatttactgaggtatcaatttactcatttatctgcttgttctttatccattcacatacccgcatttgaataatttaaatgaggtccaccacatattgtaaaatacaaattagcctataaaaacaaaaygtcaaagagggaaatggatcaggacataactgagggtcaaacatgaggcttttgtggtttaaatactatgggtgaggtcacacaaagcacccttctgtccagttcaaagaggaacgacattatg

SEQ ID NO: 513677 - DNA, 440 bp, Homo sapiens
attttcttttaagctgtttcactctctaggaaaccaaaaaggaggcagaaaaaaatggtgagttcatggaagcatgtgcacgtttttgaaatatttgttttatttttaaaaatgaattataattgaaattgttcctgcttatcactaacattttagaaatgcattcttctgggtttagttctattattcatttactgaggtatcaatttactcatttatctgcttgttctttatccattcacatacccgcatttgaataatttaaatgaggtccaccacatattgtaaaatacaaattagcctataaaaacaaaatgtcaaagagggaaatggatcaggacataaytgagggtcaaacatgaggcttttgtggtttaaatactatgggtgaggtcacacaaagcacccttctgtccagttcaaagaggaacgacattatg

SEQ ID NO: 513678 - DNA, 440 bp, Homo sapiens
attttcttttaagctgtttcactctctaggaaaccaaaaaggaggcagaaaaaaatggtgagttcatggaagcatgtgcacgtttttgaaatatttgttttatttttaaaaatgaattataattgaaattgttcctgcttatcactaacattttagaaatgcattcttctgggtttagttctattattcatttactgaggtatcaatttactcatttatctgcttgttctttatccattcacatacccgcatttgaataatttaaatgaggtccaccacatattgtaaaatacaaattagcctataaaaacaaaatgtcaaagagggaaatggatcaggacataactgagggtcaaacatgaggcttttgtggtttaaatactatgggtsaggtcacacaaagcacccttctgtccagttcaaagaggaacgacattatg

SEQ ID NO: 513679 - DNA, 394 bp, Homo sapiens
taactgggtgtgctgtatttttatctggttaaacctggcaaccccacccccccaccagtggtgaaatgcatggttggtgaccacacaattaataaacaacccacagtctcatgggctgagtctaagacccaatccgaaggcgcggggaaggtgagatatggcttctcaggggccagagaaacctgggcaataagtccaaggctttcgcttagaaggggccaaaaaaaaaaaaaaacaaaaaacctcaaagccaagtttytacaaagtccaccttacaacacagacaacactgagcaacagctcctcctgcgcccagggcgcggtgctctcggaggcatgacctcaatcgtcctcaataacccgaggggacctggaagccaagcacaaaaccccg

SEQ ID NO: 513680 - DNA, 552 bp, Homo sapiens
gccccagggaagagcaggcccggtattgccaaagctgattcttcaaaagaagctagaaatcaatcctgttttaagctcaatttttaaattttgacatcacattcaaatttaaaaaatgatactgcagggttytgtatagccagattctcacaccacgggctggatagagtctgtctgcatctctgccaatgagtccttcgttccagtgtctgtctcccctgctgacctatgggttcttggggtgcaggaagcagagtgcagctatgactggggccctggcgccagcccagagcctccttgcacaggggtgcggatcagctctgcagcaggggacagcctttctcctagaaccacactggctgctcccaggacacacacgccctgagccctggggtggccctagctgcaggctggtcacatttgccattccacattccatgctcgccagctcctcatgggtgtgcaaggcgctccagacctggcctgccctccccagacccgctcagccactgctgtccctccaggtgcccagagttgccctcaggtccgcac

SEQ ID NO: 513681 - DNA, 386 bp, Homo sapiens
cattctttttaatggctgcatagtaatccaagatttatttctttaaatgctttacatgtgaaaagcagaaatagttttgtcttgctctgatctttctgcaggaagcccacctctcgctgggcaggggcctggccacggactctctgttggccaggaaggcctcccctagaacactgggccacttctattaccttcaggatggaaatgcctgctgatatttacgtttcagggcaagacccaacatactgagggcttctcttcaaagtgcaaatttccaaattccctcggggtctttatcagaacagaaattgtcccygtgcttcttggctcaaattacccccctcgttatgggtgaggctgaaccacttggctacagacctccatcc

SEQ ID NO: 513682 - DNA, 570 bp, Homo sapiens
tgggccaccacaccgggcaattttttgggggggatgggtatagataggatctctctatgttaccctggctgctctcaaactcctgggctcaagtgatcctccccaacttggcatcccaaagtgtttggattataggcgtgagctgccacaaccggcttacctgcactttaaacaacagtttacatgaggaacatttccctgagatgcttcttgactctgcttggggcttcttgcatctaggggtgcttctgcagcacggtcatgagggacggctgcaccctccgtgctccacagtccagacaagcacccagcttccaaaggtgccccattaacacctgstaggttaagagcaactagacagcgagactaacaaggataataactccctccattcactgagctcttcctgtgcacccagcaccgtgcccagggctgcgtaggcatcaatcccctcctcaaatcctataaggctggccgggagtggtcgctcatgcctgtaatgacagcactttgggaggccgaggcgggcagatcacttgaggtcaggagtttgagaccagtctgaccaac

SEQ ID NO: 513683 - DNA, 513 bp, Homo sapiens
ctccctctctgtggcctccaggccaggcccaggcccaatcccaacaagctcagtgagcagcaaggccacttttagccatgtggctctggagcagagccaggtaaaggccagaagtgacacagaggagcctgtccccagcaggagcccctgaggggaaaggctagcaagagcacctggtcctctgagaacagcctgcagctcccggctctggtgttcagagctcccctacatcccctacctcctggccaccgtcaactgaccccagaggggccwgggggctgtactggcatttctccaacacaagctgggaaagagactccctctctctgtggtgagagctataatttgtgaaatttgggaactgtcagcagccatcttcctgctgagtaaggaaacccagttctgcagagaatgaagccaacagcagggccaagtagacagcaagtgctgtgagcaccaagtgtgccgctgtccgtgaccttcttgtggtgtagctacatgcgatcccaacga

SEQ ID NO: 513684 - DNA, 199 bp, Homo sapiens
ctctttaagacctctgataataacgctaagccctgacagtatgcttagcctcaagagytaaacaatcaccttctcactctttgacacacaggtgagcatatgacggaggaggagatgttggattgctttgcttcactgtttggcctgaatcccgagggatggaaatccgagcctgcaacctgctccgtcaaaggtaccc

SEQ ID NO: 513685 - DNA, 451 bp, Homo sapiens
cctcagcctcccgagtagctgggactacaggcgcctgccatcatgcccggctaatttttgtatttttagtagagacggggtttcacygtgttagccaggatggtctccatctcctgacctcgtgatccggccaccttgacttcccaaagttctgggattacaggcctgagccaccacgctcggcctaatttttgtattttttagtagagacggggtttcaccatgttggcaaggtggtcgcgatctcttgacctcgtgatctgcctgcctcggcctcccacagtgctgggattacaggcgtgagcctctgtgcccggcttatgcagcatttttccttctagaggatttcagagaaaagtgaaatcttgattacacccagcctgagtcattcattcacatgatcacagcgctggcccctcatacatatgcctttgagttcatggctgtggat

SEQ ID NO: 513686 - DNA, 609 bp, Homo sapiens
ctcccaagtactgtgattacaggcataagccactgcacctggccgagggtcttatagataggtaatattaacaccattttgcaaaattttaaaaataaggcaggaaaggtaaaataagttgtacaagttcaacaagtagtaagtgaaattcagccagactttgaacatagacatcctgttttagaatctcaatgttctttctatttttcccaaagcaatctcactaactaatgtacgtattagattgcactgatatagtaaggacaaagaaaacccattttctgtgtatattgctattgccttagaaaatacaaatagctactgaaaagaccaatgctatgaagcagtttggtartacctattaaaaattttaaatctctgctacactgtattaatattttatatcttaaaaagttaaagaataatagagcctaacttagatccttccaaatttgtaactcttcaaaatctaaaatgaatttctaattcatggcttataactgctcaagtaggaaacttatgacaaaaccagagacaagcccttccaacagtgcctatgacatcacagatatacaaatctgccccattttacagtacccaaagaagacc

SEQ ID NO: 513687 - DNA, 546 bp, Homo sapiens
tggaggtcttcaaactactagtatagattgattttgttatttctattgttgggaagggaaaacaaagacagaatgatgaaaacttgtcagatatatcccatgttaccaggaaaaacaggattagcacacagtctcttattctctgatctgctgatagtctgttgagctagtgttttcctagcatgaaaggaagaaacatctattcatttccaattattattttctggaaaaggtattatggagatggttctctttatgttcaaaataaataaaatgtccgagtgattcctggaacttgggagaaaggggaaggtaaaccaaaaactagggccagagagcaagaaggaggtaaaggagataaaattcgtggtgggtgaatcctcatccrtcattacatgacagaagtatttaaaaaggaaagctactacctctcctcatctgaggcttcctccagaaccctgtaggagaggaagatacactgctgagtcttcatttggggagcagcaggagaaggcagtgcctccttagccaaatgaacctttcctg

SEQ ID NO: 513688 - DNA, 631 bp, Homo sapiens
gtttaactgaatatcttcctgtaatttttttcttatgcacgagaacttagagaataatctttatcattttgcaggactttgtttcattatttttcaagggcttttcacatcscttattccatttagcagctaactgagcctgtgaggtacacaggacatatatgatgacttaggccttagagatgaaaaaatgtcagagaggggagggcttggcctgaaacgcatggctaggaagtgacacctttacccccaaccagtgtactttctcccctgccataacccatcaacttgacagtggggaaaatatttttaaggctttgcatcttttatgtactctggaggaaggggtataatttctgcctttataaaatggatttcataatgttaaataatgaccgtttctggctcccttgtgttatgcataaggtaggtactatgctagtgactatctagtttccttttatatgcagtgggtttcactgttctgtggaagactggaagtttctcacaggcctcctgagaccatcaatgtggttagggaagagggatgaataagtcaaactatagacttcatccctgctccagctggaacatctctaccttcatctgctttacatatggaactttttca

SEQ ID NO: 513689 - DNA, 631 bp, Homo sapiens
gtttaactgaatatcttcctgtaatttttttcttatgcacgagaacttagagaataatctttatcattttgcaggactttgtttcattatttttcaagggcttttcacatcgcttattccatttagcagctaactgagcctgtgaggtacacaggacatataygatgacttaggccttagagatgaaaaaatgtcagagaggggagggcttggcctgaaacgcatggctaggaagtgacacctttacccccaaccagtgtactttctcccctgccataacccatcaacttgacagtggggaaaatatttttaaggctttgcatcttttatgtactctggaggaaggggtataatttctgcctttataaaatggatttcataatgttaaataatgaccgtttctggctcccttgtgttatgcataaggtaggtactatgctagtgactatctagtttccttttatatgcagtgggtttcactgttctgtggaagactggaagtttctcacaggcctcctgagaccatcaatgtggttagggaagagggatgaataagtcaaactatagacttcatccctgctccagctggaacatctctaccttcatctgctttacatatggaactttttca

SEQ ID NO: 513690 - DNA, 631 bp, Homo sapiens
gtttaactgaatatcttcctgtaatttttttcttatgcacgagaacttagagaataatctttatcattttgcaggactttgtttcattatttttcaagggcttttcacatcgcttattccatttagcagctaactgagcctgtgaggtacacaggacatatatgatgacttaggccttagagatgaaaaaatgtcagagaggggagggcttggcctgaaaygcatggctaggaagtgacacctttacccccaaccagtgtactttctcccctgccataacccatcaacttgacagtggggaaaatatttttaaggctttgcatcttttatgtactctggaggaaggggtataatttctgcctttataaaatggatttcataatgttaaataatgaccgtttctggctcccttgtgttatgcataaggtaggtactatgctagtgactatctagtttccttttatatgcagtgggtttcactgttctgtggaagactggaagtttctcacaggcctcctgagaccatcaatgtggttagggaagagggatgaataagtcaaactatagacttcatccctgctccagctggaacatctctaccttcatctgctttacatatggaactttttca

SEQ ID NO: 513691 - DNA, 589 bp, Homo sapiens
tgtctgtgctcctccctaccccacctgtcatcaaagctgattgctagggcctccccaccttcccccgtcccygagccgcctctgtccctcagcactgaactcctgcaggcactcatccttccggcctggtctccccaccccacgtggctggcaggtggcaaggcctacatttaggccagggactcaggtgccagagtctgtactctgagctgcaaacctctacatactgtcagaactctggagaggcaatatttgaagatagatggctgacaattttccagaactggtgggagacatgcatctacagacacagaaagcacaacgatgcatgaaaaagcagaatggaatcaagacaacttcaaagcgaaacagcagaccactgagacagagttcagaagaccccgcaatatgggcaacgttatccaacaaatgaaatgcagtcacagaagccaggaccagtgagcctctgagaactaagagaaagccactgtcaagctagaatcgcattcacagggaagctattctgcaagaaagctcaggatataaacatataccaggctgaaaactaagaaagtttaaaaaactcacc

SEQ ID NO: 513692 - DNA, 589 bp, Homo sapiens
tgtctgtgctcctccctaccccacctgtcatcaaagctgattgctagggcctccccaccttcccccgtccctgagccgcctctgtccctcagcactgaactcctgcaggcactcatccttccggcctggtctccccaccccacgtggctggcaggtggcaaggcctacatttaggccagggactcaggtgccagagtctgtactctgagctgcaaacctctacatactgtcagaactctggagaggcaatatttgaagatagatggctgacaattttccagaactggtgggagacatgcatctacagacacagaaagcacaacgatgcatgaaaaagcagaatggaatcaagacaacttcaaagcgaaacagcagaccrctgagacagagttcagaagaccccgcaatatgggcaacgttatccaacaaatgaaatgcagtcacagaagccaggaccagtgagcctctgagaactaagagaaagccactgtcaagctagaatcgcattcacagggaagctattctgcaagaaagctcaggatataaacatataccaggctgaaaactaagaaagtttaaaaaactcacc

SEQ ID NO: 513693 - DNA, 541 bp, Homo sapiens
ttgggcaaagaggtgggacccctaacttaatgatgctcatggtgtgatccagctcatagatagagtggagtggggcctactggcttctctttggggatgtagaaacagagagaccaggtgcaggagcagccaggtcatgggttatgtggggctgcagtggctctcttgtgccatgcaagctgatgtcctggggacaacagcccatagagakaggagaatggagtggacgcacaggcagaaacagattctgtgtgtgagggaccatgtggccctgagtggctgcccagcttccttgtggcttgctggttgcttccatttctagtcaatgactgtatttttaataaaccctactttgcttgaggtgaagggaagaactactcttctttgaaacaagaagagcccttgccaaagcctcgttcacatggaataaccaccttgaatctgtggtctcccactgtagcagatccatggttccccaatgagatacgctacccttcttgctccctgctagactgtaaaacttcttgagaacctgcatgtt

SEQ ID NO: 513694 - DNA, 541 bp, Homo sapiens
ttgggcaaagaggtgggacccctaacttaatgatgctcatggtgtgatccagctcatagatagagtggagtggggcctactggcttctctttggggatgtagaaacagagagaccaggtgcaggagcagccaggtcatgggttatgtggggctgcagtggctctcttgtgccatgcaagctgatgtcctggggacaacagcccatagagagwggagaatggagtggacgcacaggcagaaacagattctgtgtgtgagggaccatgtggccctgagtggctgcccagcttccttgtggcttgctggttgcttccatttctagtcaatgactgtatttttaataaaccctactttgcttgaggtgaagggaagaactactcttctttgaaacaagaagagcccttgccaaagcctcgttcacatggaataaccaccttgaatctgtggtctcccactgtagcagatccatggttccccaatgagatacgctacccttcttgctccctgctagactgtaaaacttcttgagaacctgcatgtt

SEQ ID NO: 513695 - DNA, 541 bp, Homo sapiens
ttgggcaaagaggtgggacccctaacttaatgatgctcatggtgtgatccagctcatagatagagtggagtggggcctactggcttctctttggggatgtagaaacagagagaccaggtgcaggagcagccaggtcatgggttatgtggggctgcagtggctctcttgtgccatgcaagctgatgtcctggggacaacagcccatagagagaggagaatggagtggacgcacaggcagaaacagattctgtgtgtgagggaccatgtggccctgagtggctgcccagcttccttgtggcttgctggttgcttccatttctagtcaatgactgtatttttaataaaccctactttgcttgaggtgaagggaagaactactcttctttgaaacaagaagagcccttgccaaagcctckttcacatggaataaccaccttgaatctgtggtctcccactgtagcagatccatggttccccaatgagatacgctacccttcttgctccctgctagactgtaaaacttcttgagaacctgcatgtt

SEQ ID NO: 513696 - DNA, 561 bp, Homo sapiens
taatgcaattataagcattggaaaattgcccagatgctcaaaaaggaactaagggtctactttagaacatccccacccccttttctaaagaaatacttgggcgataaaggcaaaataactgaatggggtggggctcagcagtttccaatgtcagatcagagagctgtggaatttcagagctggaaagaagcttagaggtcatctcaaggccgttttacagatgcaaaaactgagccccagagaaggaaggaacttttccaggttcacacagtggccatgaatcttggggaatctccgtcttgatttgttcatttgtgcaagaaatatttaactgatatcctatttggggccaggcagtgtactaggtgtgagaaattcattagtaaatcaaamagatgtgttctctgcccttgtaaaaataaacattctactggggaatcagacagttgatgagtaaaccagtgaacaagtatataatcaatggccagaaggaaacaaattgttgtgatagagagctgcttatatgtagtggtcaggaaggcaactctgagaaggtgatat

SEQ ID NO: 513697 - DNA, 537 bp, Homo sapiens
actctgtgaatatactacaaaccatttgattgttttctttaagtgggtgaattatatgatacatgaattatatctcaacaaagcttttcaaaaagaacccatatatttatctaataatctaagacaagatcatgagtcatgaagactgataacagaatgtactggtaatagaaagcctatgagacaggaaatcagaatccttgtgaccacattgagaggtgacagtgtgctggcagcacgcgcagccctcgctcgctgtgggcacctcctccgcgcccactctggcagcgcttgaggggmccttcagcctgccactgcaccgtgggagcccctctctgagctggctgaggccagagccggctccctcggcttgtggggaggtgtggagggagaggcatgggtgggaacccgggatgcgcacggcgcttgccggccagtgcgagttccgggtgggcatgggctccacgggctccgcactcggagcggcagccggcaacaccggccaggcagtgaggggcttagcacccaggccagcag

SEQ ID NO: 513698 - DNA, 557 bp, Homo sapiens
tgaccccgtgaaaacttaacgtttccacttctaagtgtgttcatctctgttgctgcttgttggcatctcagtgttaagtcctgatactgctaggcttctagatagtactggaatggaagaccctttgctcaagtagccttacctaaaaagcaaaatttttataacatttttgaaatgtgartacattttgtctgctctttaagggaaagacaaacccaagggtgttgtgacttaaatggttttataccaagttgctgaagactttggatacttgctgggtgggaagtgagggaagttatctcatttcagatagtcccaaaccgagccatcagtttaattgcgtaagacctggtgagccctagctctatccaggccacatgtgtaagccagaaacatatgttccctttgaacctaatggcctcaagagtcagtggcccagatcagaggcaaaaactggcgatcctcaagccaaatggggcctgcagatatgtgaaatcttttcagttttttttttttttttaagtaataaagcaaccctgaatgggccaaacaaaaca

SEQ ID NO: 513699 - DNA, 487 bp, Homo sapiens
ctgactggaaaggctgccaccagccgcccacacatggccctgaaccagcctgtgcgcctgccttgtggagcctttgtccttttgcygatgtggtttatcctgaacttgcatttgcaccccaagcttccctttccgtcgttttttgctatcatatgtgaaaaactcttaccaggcagaatccaacacgtgtgctctgcaaaaaatcagttcatctgaagaacaagtgaccacagggcagtctccgtaatcaaaccacaggacaggctctataataccttttccaaaccacaggacaggttggaaacagtggcttactcgttatttagtaaacggcatttcctccacaagccaggtctgaaacggtgactacttgttatttaataactggcctttcctccacagggcaggcttgaaacgggtggcttactcgttatttaataaactggcatttcctccccagggcaggcttgaaacggtggcttactcg

SEQ ID NO: 513700 - DNA, 471 bp, Homo sapiens
gactggaaaggctgccaccagccgcccacacatggccctgaaccagcctgtgcgcctgccttgtggagcctttgtccttttgccgatgtggtttatsctgaacttgcatttgcaccccaagcttccctttccgtcgttttttgctatcatatgtgaaaaactcttaccaggcagaatccaacacgtgtgctctgcaaaaaatcagttcatctgaagaacaagtgaccacagggcagtctccgtaatcaaaccacaggacaggctctataataccttttccaaaccacaggacaggttggaaacagtggcttactcgttatttagtaaacggcatttcctccacaagccaggtctgaaacggtgactacttgttatttaataactggcctttcctccacagggcaggcttgaaacgggtggcttactcgttatttaataaactggcatttcctccccagggcaggcttgaaa

SEQ ID NO: 513701 - DNA, 474 bp, Homo sapiens
agctgactggaaaggctgccaccagccgcccacacatggccctgaaccagcctgtgcgcctgccttgtggagcctttgtccttttgccgatgtggtttatcctgaacttgcatttgcaccccaagcttccctttccrtcgttttttgctatcatatgtgaaaaactcttaccaggcagaatccaacacgtgtgctctgcaaaaaatcagttcatctgaagaacaagtgaccacagggcagtctccgtaatcaaaccacaggacaggctctataataccttttccaaaccacaggacaggttggaaacagtggcttactcgttatttagtaaacggcatttcctccacaagccaggtctgaaacggtgactacttgttatttaataactggcctttcctccacagggcaggcttgaaacgggtggcttactcgttatttaataaactggcatttcctccccagggcaggcttgaa

SEQ ID NO: 513702 - DNA, 487 bp, Homo sapiens
ctgactggaaaggctgccaccagccgcccacacatggccctgaaccagcctgtgcgcctgccttgtggagcctttgtccttttgccgatgtggtttatcctgaacttgcatttgcaccccaagcttccctttccgtcgttttttgctatcatatgtgaaaaactcttaccaggcagaatccaacacgtgtgctctgcaaaaaatcagttcatctgaagaacaagtgaccacagggcagkctccgtaatcaaaccacaggacaggctctataataccttttccaaaccacaggacaggttggaaacagtggcttactcgttatttagtaaacggcatttcctccacaagccaggtctgaaacggtgactacttgttatttaataactggcctttcctccacagggcaggcttgaaacgggtggcttactcgttatttaataaactggcatttcctccccagggcaggcttgaaacggtggcttactcg

SEQ ID NO: 513703 - DNA, 447 bp, Homo sapiens
actaacagactgtgggctccaaaaagcgggaggggtggggatgagcaattacctgctgagtacaacacacacgacttgggtgacaggtacatgaaaagcccagactccaccacctcccagtacatccacacaaagctgcacctgcatccccctagatctgtttttaaaaaaacaaaaccagtgcagggccaggtatgcagccagcctgctcactccagagcgagtccaggctcttaccttctgcatgctgagtcgcagttccgatgttcttatgcttcttccatcagcaaatctcaatttgtcaasattcgtgacagattcttccccagcatttggtttaattggagggactttatctcctaaaacaacaacaaaaagagctagaatttaacttttgaaaaccgttttaaaaaaacaaatggatttagtactacacacaaaaatgta

SEQ ID NO: 513704 - DNA, 575 bp, Homo sapiens
gtttttaaaaatcagacggagagctcagggcactgaccgagcgaggactccaggacctgtgcttgcctgtgcgctgagtacctcgagggccgggctcggcttagtccaggatgatggtcagggttatacttccctgagcccttgctctctgagtgtctgaatgtgccctctacgattgcatcttcagaatcggccttctaggatttyatttaatcaagcgaaattggataggtttagttgtttggttcttttaaatgaacttagccacccacctcttaattacaaagtaattttaaattgcagagtaaaaatctcaatagaggaaccaaggcattcagcaatattgatttgaattatgcctgtgattgtgcaattttctcctttttgaaatagttattgaaaatctctttgaattaaatgtgaggattagtcatacagccatcctgtcaacatcggaaagcgtgtaaaccgttctagcgtgttgctgtggttggtgctgactgagcagagacccccgccgcatcttgggctcttaggagctgctgggagggcgtccacaagcaggaggtgaagcc

SEQ ID NO: 513705 - DNA, 618 bp, Homo sapiens
tccctgcgtatccgtggcaggttgggtccaggacccccacggacaccaaaatccgtggatgctcaagtccctaatataaaatggcagagtatttgcatataacctatgcacatcctcctccatattttaaatcatcctcatttcaagttttacatttaagttgtacagcaactccaggattactcatagtacctaatacaatgtaaatgctaggtaaatagctgctacactgtgttgcttagcgaacaatgacaaggaaaaaaaaaagtctgcgtgtttgtaaggatgcaattttattttcagtacatagttggttgaaaccacacatgtggaaccgatggatacggagggccaccatattmcaagaaaccatccgacttcttttttttttaatataaaaatgtaaaacctctaaaggccacaccagataccagcagatatttagcaagtgttatcacattaaagaacagggtcaggcaatgaaagagctgcaaactgttcttctgaaaggcaaatgacccacacactttgaaagctgccgaaaaacatctgtgggtatcagacaccacacccaaggctcacacgccgacttcaggttgggtgcgtgtctctctctcc

SEQ ID NO: 513706 - DNA, 618 bp, Homo sapiens
tccctgcgtatccgtggcaggttgggtccaggacccccacggacaccaaaatccgtggatgctcaagtccctaatataaaatggcagagtatttgcatataacctatgcacatcctcctccatattttaaatcatcctcatttcaagttttacatttaagttgtacagcaactccaggattactcatagtacctaatacaatgtaaatgctaggtaaatagctgctacactgtgttgcttagcgaacaatgacaaggaaaaaaaaaagtctgcgtgtttgtaaggatgcaattttattttcagtacatagttggttgaaaccacacatgtggaaccgatggatacggagggccaccatattacaaraaaccatccgacttcttttttttttaatataaaaatgtaaaacctctaaaggccacaccagataccagcagatatttagcaagtgttatcacattaaagaacagggtcaggcaatgaaagagctgcaaactgttcttctgaaaggcaaatgacccacacactttgaaagctgccgaaaaacatctgtgggtatcagacaccacacccaaggctcacacgccgacttcaggttgggtgcgtgtctctctctcc

SEQ ID NO: 513707 - DNA, 602 bp, Homo sapiens
atttccattattacaactaggaagagaaaggatcgccctcccctgcccactggaatcagctaggagctttaaaaatcttgatgcccaggactgactcccagagattctgatttaattgatctaaaggtgtggcctggacatcaggatttttgaaagctctgcatgcaatttcaataggcagccacagttgagaaacgttggtttctctgttaaaaacttcatggtggctctcaactctggcagtgtcagaattaccttttggccctttctttaaaatgcccaggccccatttgcagagagattttgattggggaggtcccaactgtaggtgagacccactgggctgcttggggctaagacgcactgttcttggagctcttctaggtcatgacctggagtcccaaygatgaggcagttacccaggtgcctcccaccttggggaagtgttcgctcagaagcatgttgggttccctcactgtgtgggactgggagttgagcgtttgcagctattaacactagagtgataggcattcttgttggcatgaagactttcctaaggggctggggctcctgctggggcggttttaaagcagagctgattt

SEQ ID NO: 513708 - DNA, 624 bp, Homo sapiens
acttaaggtctatgttgttgttaatgctggtcagcttttcctgaattccaaaaggcaggagggcattatgaggcaggtccaacccccacttcccctcatggcctgaaaacagttgttcaggttaactttggagtggcctggccaagaggagggagtctcttcagatggtgggggtagccttagatttttatttttggtttacaacaaacacacacacagagtcccatacacacatatgtgtatatatacatatataatgcaacataacagagcaattcacaagccatatgaagataatgagtttacagcacaccatagggctggtaatggkagcaagtttaggatgcatgtcttcacctgatcccgcacagtgaggctgaatgtagctctgacaggtgtgtgacccacacatttaaagtctgtatctgaggccctacataatctgaggccttagccaaatgcccccccgcagtccactgcctactctccacccccatcctcatggtccaggccaccaagaaatattatactcaatgaaaagtggagaagaagccagggagtccaaagttactggggctcttcctccagttcccaacttgccaccacagtagagaaagactctca

SEQ ID NO: 513709 - DNA, 546 bp, Homo sapiens
gctaatttttgtatttttagtagagaaggggtttcaccatgttggccaggctgctttcgaactcctgacctcaggtgatccgccctcctcggcctccctaagtgttgggattacacgcgtgagccaccgctcctggcctgtccatttatttttgttttcttttgtcacacwaaaatataagctccatgagagcagtgactctggatctgtgggcccggaataaacagcgactgacgccgactgccttcagcaagagtccgctggaggatggctggatatttctgggagggtcgctctggcaggggccgctggagctaccccagcaacgccatccaaatcaacctgaacgaagaagtgcggacactcgccctggcccctccgtcctgaaaagctgacccgcgcaaacagcagcgaacagcaagactcagttctgggtcgctgccgccgaactttcccaggccggaaacagcgtggaaacgttgccggaagtggagactgaaagcggcggaagggacgctggaatgtggagcggttgtggggcggcag

SEQ ID NO: 513710 - DNA, 555 bp, Homo sapiens
aagttcctaatttcaagtctctacttgccctggctttactttaaaaagtaaattttaaacagacattttagtcagcatacagtgttgaggattagcaatcacttaattttcttggcctttgctgaagtgccatgagatacccaacatgaaattttgtctttcatactattagcacataccaaaagattgcaagtaaaaatacaatgaaaatagtctcatacaatggatccccttagggacccamgtgttcactaatgcagcctcaagactctgtctttatgtcgataggattctaagcttaaatcagtcatgatgttatgacattatcagtgttacagtcacctgggcagcttttacaaatactactgtctgggctctagccccctggatattctgatataattagattgtgatgctcatttctgagcaaagtgtatttaggcctttctatgatagattaggggattgcttttttttggcttgcagattttatccaaaataaccatgtttccagaattttggtgctgttgtcttttatggggctactaagtagtt

SEQ ID NO: 513711 - DNA, 645 bp, Homo sapiens
tgggattacaggcgcccaccaccacrcctggctacttcttgtatttttagtagagacaggtttttgccatgttggccaggctggtctcaaactcctgacctcaggtgatccacctgtctcggcctcccaaagtgctgggattacaggcgtgagccaccgcacccagcctaatacatacaaagaattttttttctccaaagaagttgatgtgacagaagaagcagctcaggacagtgctcacagagttgctcagtgctgcaggaatcaggcctagagtacaatccatcttgtgcactgactatatacttagaaatttaggatttgggtctaaaggagttcagaaaaaaatgacagatgaagcacttcagagaagtaaaactattccaggccaacaatgtaagtttccgtcatcaatgacttttcaaatcacaggttaggaatatctccatttgttaaaaatttctaaaatacttcaatgggatggatctgttatctctggaaattaatttagttatgtttgaagaagataactaggtaagccaagccaatgaaacaaattcctaggaataatgagcacctctctcccttgttttctggtacataatgcattttcttcacttgatagaatgtttttctactatacag

SEQ ID NO: 513712 - DNA, 548 bp, Homo sapiens
gctgcagcttaggcatgacacactgatatgtgtgtggtgatggtagaggggttatttaaggcccaggctcaagacacacgcactgcacaccttccagcagcaagtgcacatacaatcattcttgccaaccaagatgcctcatgaactggtttcttcttggaaaatgccaagaaagaggaagcaaccccactcttagaaaaatctattttggtttgtttgacttgtcacatccttccctcaatggaaggggacacgaaatggaaagggacatgaaatggaaagggacacactaggaaatgagaagtgtgggctggggaaagaaattctgggcaatggatagagtagcttaccggccagagagcagcagggacaggcggttgatgggtgtctcaccctccacagcataggtctgttcagtggccagagttaagacctgctcctcrcagcagtgaacaatctccttgtatgtctgtaggggcacctgcaagggcaggcacagcgtcttgtagaggaggtcaaactcctcagggagggtgtcctcacgcagg

SEQ ID NO: 513713 - DNA, 628 bp, Homo sapiens
cactctatatgaagtatttgtttaatgaatgaatgtccaaatgcgcaaaaagaaaaaatagggtattggttaaattatggttaagtcacagatgaatttatacatagtcaatacaaatgacaccacagacctatactcactgatggtaaaataccttaggggcaaaacatgataatgttataacctcattaaaaatatgtagcatagaaaaaaaattttattttgttttaaaaaatgtataaaggcataggaaaagtctagactagtatatatcagaaattaacaatgggtgataaggttatcgatttttttgttttcttttttgcagttccaggacatattcaagcagagtttggataaccacctgccaaagatctgtattgggtgggaagttggttcatacctgtcttaattgtccargattctattcttcacctagattatctctgtaaatcatgaagtgcttactaaaagtattatatccaaatgaatattccagtaaaaatattaccaatagaataatagagaatgctaatagcagtgctaaatactgtgtatacatcatttttaattagtactgacaatctcgtaagttaggtattacttctatacctttttttttttttca

SEQ ID NO: 513714 - DNA, 556 bp, Homo sapiens
ctttctttctttcctttccctttcttctcttctcttcttttcttcctgatgcttgaagtacrcaagtggctttcttctatgttatctatttatttactaaactatagcgaacgcctgaaaacccaccatccaacttgagaccaaaaacactgacagtaacttaggtaaatctgctggtatgatgtcacctatcctgtccctctctttcccttacctaaggtaatcactatcactatcctaaatttgtggttagcatttccttgctttttaaaaggtcgtcttttacatgaggggcctacccctttgctcttgagaatggtttctcatgtcctcctttctggccttatcctttgaacattgactcttaagtctgttacaggtaagggctccatgaagttgtgtttcccttttctttctggctacctaaactcaatacataaatagagaaggctttgcctaacatagaactttcgttggaaagggtctagatggggagagagaaaacataaatctggtcaaggagaggagatcttggagaaaggaaaatgctgcctaa

SEQ ID NO: 513715 - DNA, 524 bp, Homo sapiens
agctggtgatttagtagacattcacaggacatttttagaagagttttgaaagctttcttactggagattttcagtagtcttctagacatctctgatgggaaaatcttttgcacatctacctacacaagtccttcaacaaacgtgttattcacagagaaaggatttctaagatgacgctatatgaaagaaaacagagaggaagtgaaacaattttaggacattctgttcatgttaccatctattctgggtcaatgacataaacacatgaccatgaaattcatagatgtcttggtattttataactattcatttgtttaaaaagtatttattgaaccttattttcctagttttgacaactgtaccatggctacgtaagctgttatcattaggggaagctgcatataagatatacgggaactcgakgtactatttttaacttttctctgagtctaaaattatgctaaaaacttgaaaaaatttaagaaaacattaaaaatatatgcagatgtggtaaactgagacat

SEQ ID NO: 513716 - DNA, 533 bp, Homo sapiens
aacgtcaaacttaatagataatataccactggagaggggggataatatggggccctgcattggtgcttcttctctccaggtggtcagagtcggagacctgggtatgagtcccagtctccttcctttctagccctgtgaccttggaccagtgccttcaccagtttctttgggtgtaaaatgggtctgacaatacttctaagcagggctatgggctggactctgtggcttcacacctggcatatagtagaggtttcataaacacccctgtcctggctcctttatcctccctccatcagggcagtagaggtggagttgtggggagggacagggcttatccaggtgcctgcagtttggttttggctctccttgaaagtgctctatcctgatttagtgctttgtaattataagtgggcatgttttgttgtttttctgtctctgctagggacagagaaagagctgagagctttaaatcatcrcagaagagactgaagttagagatgagaacttttggacaactggagtggtgtggccac

SEQ ID NO: 513717 - DNA, 499 bp, Homo sapiens
gagtgtggtggctcacgcctataattccagcactttagcttagctactaagtacaggtaaaaagtagtaagactgtgggattgaaccagggttgggattatgccaagtgcttacagtggtcggggagaagcgtgagggagttgtggttgactgtagtgtggtgattttaatgatggacaatggaatctaagctagatcaaatgggaagtgtggacataagagggtgagggactgtaaaagagtctagggagccatgatgaagccctgaatcaagggttagaaagatgggaatgatttggagactatactataggaaaatccactcgtccttgctgactgggttcactgggactctcaaaccataggtgggtcctyagcgcaacctggcgattataatatattcccatggtcaactcagtcaccaactgtccctgcaagctctttcacaaagcctctctcctccaacctccattgccctctgccccacatcccctcattc

SEQ ID NO: 513718 - DNA, 408 bp, Homo sapiens
gatatattcataattaaccacttacagcagtaaacattatagtgacagactctgataaacaggcaacgtrgatgatggacacataaaatgtttagacatctctcttactcttaccttaatctccctagggtgtacattctaatctttctatggagtgaataataaatgatatccacttggagtagtttatccagtcagatgtttggatttgcagtaatttattctcactctccaaacccttccattcctcatcctgtgccctttgacacagtatcaagatggatcatcagtactcaggatatgatccccattcttgaattcctagcattatgttctaggaattaaccagccttatcacagggacatgggttgtggacactgcaaatatttaacatttttactcggaag

SEQ ID NO: 513719 - DNA, 618 bp, Homo sapiens
gaattcttgatggctctgcccataacttgtttgagctttgactgtaatatcttcttgaaacaagacactcggatggcaataagcacgcatgagttttaatgttgrtgatttaccaatgattaaagaaacattctgcacagtcagccctccatatccctaggttccatatctgtggatcaaccaactgcagatagaaaataatgggggaaaaaaaggatgcttgcatctatactgaacatgttctgctttttttgttcttattattccctaaagcataacaactatttacgtagcaatggcattatattaggtatcataagtaaactagagatgatttaaagtatacaggaggatgtgcgtaggttatatgcaaatactatgccattttatataagggactggagcttccatggatttgtgggggtgggcaaggggggagggtgttgccctgaaaccaatcacccatagatactgaggaaacaactctgtgtgatactataatggtggaaacacgtcatcatacatttgtccaaatccatacagtgaacaacaccaagagtaaaccctaacgtaaattatggaatttgggtaataatgatgtgccaatgtctgttcatc

SEQ ID NO: 513720 - DNA, 618 bp, Homo sapiens
gaattcttgatggctctgcccataacttgtttgagctttgactgtaatatcttcttgaaacaagacactcggatggcaataagcacgcatgagttttaatgttggtgatttaccaatgattaaagaaacattctgcacagtcagccctccatatccctaggttccatatctgtggatcaaccaactgcagatagaaaataatgggggaaaaaaaggatgcttgcatctatactgaacatgttctgctttttttgttcttattattccctaaagcataacaactatttacgtagcaatggcattatattaggtatcataagtaaactagagatgatttaaagtatacaggaggatgtgcgtaggttatatgcaaatactatkccattttatataagggactggagcttccatggatttgtgggggtgggcaaggggggagggtgttgccctgaaaccaatcacccatagatactgaggaaacaactctgtgtgatactataatggtggaaacacgtcatcatacatttgtccaaatccatacagtgaacaacaccaagagtaaaccctaacgtaaattatggaatttgggtaataatgatgtgccaatgtctgttcatc

SEQ ID NO: 513721 - DNA, 440 bp, Homo sapiens
cggcagcatgtggaacgcgacgcccagcgaagagccggggttcaacctcacactggccgacctggactgggatgcttcccccggcaacgactcgctgggcgacgagctgctgcagctcttccccgcgccgctgctggcgggcgtcacagccacctgcgtggcactcttcgtggtgggyatcgctggcaacctgctcaccatgctggtggtgtcgcgcttccgcgagctgcgcaccaccaccaacctctacctgtccagcatggccttctccgatctgctcatcttcctctgcatgcccctggacctcgttcgcctctggcagtaccggccctggaacttcggcgacctcctctgcaaactcttccaattcgtcagtgagagctgcacctacgccacggtgctcaccatcacagcgctgagcgtcgagcgctacttcgcca

SEQ ID NO: 513722 - DNA, 647 bp, Homo sapiens
ctctggttggttgaaatgttttcttgtttctattttccatggtttccaacatttctacaaagaatgtgtattatccttgcgataatggaaagtggcagaatgagttattacaagacagcgactggctctctcctggccctgctccagatcctgctctctgctctcagcctctaactgtatctgggacctygggtttgcctggcttctgtgaggaccgtggtcctcagggagacagcttccatgtccagccctaactctgagctctgggcctctgcaggtccttgctaggacatttgctcttccctggcagtgacagtttcagggaggtggtagtgggagagcaaagccagccagcatcaggcctatattccaattctgctgctataactatgtggctttggcaagtttcttaacctccatccatataaagtaccagacacttagtaggtgctcattaaatggccacagtgatcctttggttacttagcaaagtataaagtggccccattttgtgcccccatttcctaggtactctgttgcctagaatacttcttcagaattctctatcttcccctgacccaactgggaaggtcttgcagcaacttcattgatcatttacagaattttacagaggctcataaaagcag

SEQ ID NO: 513723 - DNA, 647 bp, Homo sapiens
ctctggttggttgaaatgttttcttgtttctattttccatggtttccaacatttctacaaagaatgtgtattatccttgcgataatggaaagtggcagaatgagttattacaagacagcgactggctctctcctggccctgctccagatcctgctctctgctctcagcctctaactgtatctgggacctcgggtttgcctggcttctgtgaggaccgtggtcctcagggagacagcttccatgtccagccctaactctgagctctgggcctctgcaggtccttgctaggacatttgctcttccctggcagtgacagtttcagggaggtggtagtgggagagcaaagccagccagcatcaggcctatattccarttctgctgctataactatgtggctttggcaagtttcttaacctccatccatataaagtaccagacacttagtaggtgctcattaaatggccacagtgatcctttggttacttagcaaagtataaagtggccccattttgtgcccccatttcctaggtactctgttgcctagaatacttcttcagaattctctatcttcccctgacccaactgggaaggtcttgcagcaacttcattgatcatttacagaattttacagaggctcataaaagcag

SEQ ID NO: 513724 - DNA, 620 bp, Homo sapiens
tggctcaagtcaggctttcgtttcccaaggttttgaccttttcacatctggctgaccagtaaatccagaggagccactgcaggctggacatgttggggggctggatctgtggcaaacacgacaagaagaaaacaatctccctcaacccccacctcatctgggctgcccaccattttggccctaacagaccctgaccatgctctaccctaaggctgcctcctctctcagtctctcccactagcctgcaagctcccaagggcaagaacctctgggattcatccccaatctcctagaagccagctagttatagggattcaggagatgcttaccaaattataattacatgaaagaatctgcattctgaactctctttttgcaaaggttatgtaattttttkgttgatgttggtgagttgattcatcttccattctccttagtttcatgatctaaacttcctttaacagaaaaacacaaaccttgcctcagccaagctaagtggtaaaggaggctgctgtactttggccaggccaggatcactcactggaggacctgagattcccaaagctggaactctagaggtggctgccaatggggaggggaaggagggaagaattcacgca

SEQ ID NO: 513725 - DNA, 613 bp, Homo sapiens
taaggatttggaataggtaacaaatgataaaattttctttttaaaatacttactttggttataatggaaaagacagatgcaacagaagggaagtagttaagaaactgttcaaacattcattcaatttagatgtgacaccaaaaaagctaagtgaaaaaagaaaaaataggtaaattgaacataatgaaaatgtaaaacttttgtgcttcagagggcagcctcaagaatgtgaaaagacaaaccacagaatsaaagaaaatattcataaattatatatctgatgagacttgcatcaagaatacaaaaacaactcttacaactcaacaataaaaagagaatccaatttaaaagttggcaaaggactcgaatagacatttattttaagaagatatacaaataatcaataaacacatgaaaagatgttcaatattattagtcattaggagaatgtaaatcgaaaccacaatgagattctactccacatccactaatatgtctataatcataaagacagacaataagtattagtgcagatatggagaaattgctggtgggaacgtaaaatgatgcagccactttgaaaaatagtttggcaggtcctcatcgagttaag

SEQ ID NO: 513726 - DNA, 613 bp, Homo sapiens
taaggatttggaataggtaacaaatgataaaattttctttttaaaatacttactttggttataatggaaaagacagatgcaacagaagggaagtagttaagaaactgttcaaacattcattcaatttagatgtgacaccaaaaaagctaagtgaaaaaagaaaaaataggtaaattgaacataatgaaaatgtaaaacttttgtgcttcagagggcagcctcaagaatgtgaaaagacaaaccacagaatcaaagaaaatattcataaattatatatctgatgagacttgcatcaagaatacaaaaacaactcttacaactcaacaataaaaagagaatccaatttaaaagttggcaaaggactcgaatagacatttattttaagaagatatacaaataatcaataaacacatgaaaagatgttcaatattattagtcattaggagaatgtaaatcgaaaccacaatgagattctactccacatccactaakatgtctataatcataaagacagacaataagtattagtgcagatatggagaaattgctggtgggaacgtaaaatgatgcagccactttgaaaaatagtttggcaggtcctcatcgagttaag

SEQ ID NO: 513727 - DNA, 644 bp, Homo sapiens
acagcactgactttgagaagtccagttgtcaagccttcaaaaacttgtttatttgtatttctccccaaaatagtattattttcatctggaacataaacctagatgaaaaaaaagtacagtaaatatgtttcaataaaaccaccaaaaatgggcagagacagtttagaacatttctggaatcataagtaattttgacaatctaaaatgttcaagagtgttggctctgaaatcagactgcaagttcaaatctgagctttaccctcagtacctgatgtccctggataaggttactatttcaaaattccaatttctcatctataaaacaaggataatgagagtacctgtatcatagaatttttgtgattattaaatgagctgatacatataaaatgcttagaacatgcacaggcatgctgtaagtattcaatacttaataaattatattaaaaatttaaatgaactcagaaaayagataaaatgacagcactgtttcttattacagtgtattaaaaaaatctaacctgaattcctctatcaggatgaaatttgcatttcctactacaaaatggcaaaatagttctttccctagtacataatgccacactcagctctctttgtgtatagtttacaagtaacgtggttat

SEQ ID NO: 513728 - DNA, 586 bp, Homo sapiens
ttctgaatgtagctttgagagtaaagctctatacacacaacatcccttaactgttctcaccaactttaaaaatgggcagtccgttaagtaaaataatagaaagttaacttaggatttaggagacctgaatttgcatcccagttatagtgttaacaggctgtagaacttgggcaagtatccaaccccacatatctcccatccctctcctcttttgaagtccattatcctcatctataaaacgagtggactgaaatagactacatactatgaagacctcctctccagttttgaaattctgtgtcaataagacatatggcacaggagacataaacagagttcacacttytgctgaaggaaaaggcaacgtgtcctagatatgctgagcaagtaccgtactatatagtgaggaaagaaggaaacaagatgcaactggaagagtactgttacctgtagtgttgagggatttttgctcccatgtaattaactatggagtctatgttctggcaactcaatataaagaaacaatgtggtgaatggagagttccaggccttgctgctgtaatgaaaatcaacaggcacctggatg

SEQ ID NO: 513729 - DNA, 586 bp, Homo sapiens
ttctgaatgtagctttgagagtaaagctctatacacacaacatcccttaactgttctcaccaactttaaaaatgggcagtccgttaagtaaaataatagaaagttaacttaggatttaggagacctgaatttgcatcccagttatagtgttaacaggctgtagaacttgggcaagtatccaaccccacatatctcccatccctctcctcttttgaagtccattatcctcatctataaaacgagtggactgaaatagactacatactatgaagacctcctctccagttttgaaattctgtgtcaataagacatatggcacaggagacataaacagagttcacacttctgctgaaggaaaaggcaacgtgtcctagatatgctgagcaagtaccrtactatatagtgaggaaagaaggaaacaagatgcaactggaagagtactgttacctgtagtgttgagggatttttgctcccatgtaattaactatggagtctatgttctggcaactcaatataaagaaacaatgtggtgaatggagagttccaggccttgctgctgtaatgaaaatcaacaggcacctggatg

SEQ ID NO: 513730 - DNA, 507 bp, Homo sapiens
aatgtttctgagaaacacagaaggtctcaatttcacaaataagcatctaggaaatgaaactgcttactaagccaggttgttaggtaagattttcttatacttgatgaacagaacttgtttaaaatgcctctaatctgatcatgagtctgatgcataagcactatttcacaagtgcatctattctttgaggaagggtgaggggaggacaccctgaacagaggcatrtgtaaagacttgcaggctgaaaaacacctggtagttttgagaatccagaaggccaatatggttggagtaaagtaagtggatgaaaggtggccagaaataattttggaaggatacgccaaatctatatccctgtccaccattagaaaaatgtgagagactaagtctagtgggaagtcactgagggttgatactctctggcttccatgtgtagggtggactggaggtattagaagacaagtgggcaccctatacctacatgttcatgtgtcacaaggttaacac

SEQ ID NO: 513731 - DNA, 578 bp, Homo sapiens
ctggcagtggtcaagtgacaaaattctggtcaaggacatwcaagtggaaatacttaggaccgtcacaaaaacaccttatagggatataactctgctgggagggcctctcctctgtctgcacttccatctttcttccttcatgcagactgcaacttcgatacaactggctagggcactagcagtcatcgtaaacaagaggtgaccagaacatgaataccttatattaggataatagcaacagaaatcaggatccatgataattccaagaagctactaagcaagccatcgggccttttcctccagacatttttacacaagggaaaaatgatagaaaaaacttctatcatttttaagtcactgttatgttgtgaaagccatattttatttcacaatatgaaaaattgaaaataataacaatgttagcaaaataaaacctctcttacttaaattttttttactcttttccaactaacttgtacatcccaaaacacagaatcagaactaaaattactatctacgttgacaaaaatgaaaaaaaatactacatgtcaaaacttatgggaaagtagtaaaagctg

SEQ ID NO: 513732 - DNA, 612 bp, Homo sapiens
ataatccagatttatagagatttataatgttcaaaacttagaaatattaagtttgaaagtctaaactgttaaagtcgctaaggcactagtgctttgtataatttacccactacagaaatgatttgtttctatggtgggtaaggaaaatgtagtttcaataaatcgttggcagttcttgccaggcactyggttttcggaagtcaggaaaggaaagcaatagcttggatacattaaaggaagaaagtatcaccactcaccacttccattgtcccttcatttttttccatgaatgggcattttggacttgatatcaaatcctatcttccacatttttctctgtatacttgttgaagttttttgtccgttaaaactcagataaatctgttaaatgttttagaatacaatagagttctaaatccggctcacggcagcctcaacccccactatttgcagcctcaactcccactattgaaacgaggcatcacacccatgaaaacatatgaaacagagcagtgcatacaatttcacaagcttcacggtaattcaaaacgtttgtaaattccatttttccccagcacgctgccagtattcacaacaaattaaattctcatt

SEQ ID NO: 513733 - DNA, 482 bp, Homo sapiens
acaaactggggtcaggttggagattatttggggcatgaataaaagcatttatattgattctggaggcagattagagaacaagtacatacagaggtgtgagaggctaagtgtatcatcttgaataaagtcaaacttctctttgtgttggcattcatcctgtctgccaagtataatagctgagtgtaacccaaggcattttagaaatgttagaagtgtcaggaaccatgtaccacacatagacctcaaagcaatgttgctatattagtcttttttctttaacttacctgtaatcataaaatattgatttaaaaaccaagactactaatatttcacaacactatattcacttctaacatactactgtcaggttaacatttgataattccaattaaaagggtttamaatttttataggatttaccatggcagtatcccaaggaaacatcgtaccacccagcttggccaagcacctaggccatgttt

SEQ ID NO: 513734 - DNA, 606 bp, Homo sapiens
tgagaatttttttttaaacttcattatatgaacatttggtgtctcctataaactgacaatccagtttgttagagatacaatatgcaaattaggaaattagcaacaatttctgatgctagtcattactatcctattctccacttcagatttgcaaaaacgcaatgatgcagtaaactataccaacggaygttttgctacggctattaatggacaatattttattgtaatgttaaatttactgcaaaacttgggaatttacaatagcatacattatcctacacaatctaatataattcaatttcctttgtcctatgagaaaaacaaataaaggcaaaatatattgcaaacatactcacttgtgtgctaactttaccatcttattaactattcagtcaaattcagtatcaccccaaatgctgtgaacaaatttcatattcttcaatgggaaattgaagaatttttggacttcataatattggtgaacattctaagctttagccatgtttttctgcttaatctaatttcaccatctctcctctgttcattgattattcctattgttactccacacactgatgcctaactcccactcaagaggtactaagt

SEQ ID NO: 513735 - DNA, 451 bp, Homo sapiens
tggcaggaccaggcatggcacctccctgctccaacactgagattacaccaagggtctcaaggatggtggggcagtggtttggaggaccccaatccctggatggctgtgaggctcakcactgccctgccaaccctggccattcactttagaactgtgcagtgaaaaagaaagaaacttcagtcctccataagccacttacctcatccttaccctgactagtacagatgtttatgttcagctgggcactgtgtccagagtactttacccatctatgccagttatatttaagaatattgtgggccgggtgcagtggctcacgtccgtaatcccagcactttgggaagctgaggcagacagattgcttgaggtcaggagttagagaccagcctggccaacatggcaaaaccccatctctactaaaaatacaaaattcagccaggcatggtggcac

SEQ ID NO: 513736 - DNA, 451 bp, Homo sapiens
tggcaggaccaggcatggcacctccctgctccaacactgagattacaccaagggtctcaaggatggtggggcagtggtttggaggaccccaatccctggatggctgtgaggctcagcactgccctgccaaccctggccattcactttagaactgtgcagtgaaaaagaaagaaacttcagtcctccataagccacttacctcatccttaccctgactagtacagatgtttatgttcarctgggcactgtgtccagagtactttacccatctatgccagttatatttaagaatattgtgggccgggtgcagtggctcacgtccgtaatcccagcactttgggaagctgaggcagacagattgcttgaggtcaggagttagagaccagcctggccaacatggcaaaaccccatctctactaaaaatacaaaattcagccaggcatggtggcac

SEQ ID NO: 513737 - DNA, 582 bp, Homo sapiens
attgacataagatgaggacgagggcacacaaagtatgttcatgtacacacacacacatacacacacagactgagtcaataggtggttgattgccactagtgcattaagagagggacacaaaacgtgcaaggagaatttctgggaaacaaaactcccatcatatccatgaaagctttcttacggggtgctgcagtgctacctctctgggccagtgtgtggacctcaggtgtctctgcctccctaggtgggcctccctttggtctttgctgccatctctctggctgctctgtccttctcttaagaacagggtaaaaccattttccattcttttcaatactgaacagcaggctgacatttgcaaaaattctttctctgtaaataggagcaaatcaggaagagctgaattctcttagctctggctaactttagtgcccggatggggtccatactctgtcccaagggagcctgttttactagtagctgccattcaytgggcacgtcctatgtgccaagcaccatgtgaagtgctccaggtatgtgatctcatttaagcctcaaaacagatctgtcgggcaggtattg

SEQ ID NO: 513738 - DNA, 472 bp, Homo sapiens
tcctgtagtcccaaaatgaactgtggataccccttctgagtgcccccaccaggccagcctctgtcctacagggatgagtggggtgaaggtcaggctatttcttcctgtgttagaaatcagagcccagtggtctaatactaacagctaacatgtagcaactgtttacgtgatgtccaattctgtgctaagtaattcacctgcatcctttcattcaatcagcacccaygcggtaggaacaattactcctgttggcaagtgaggaaactaagactcagaggtgaagtgcttgccacagccaggaagagatctgaacccagacagtgtgaaaatgaagtccatattcttaactagcacattatactctttcttctgaggaaagtggcacccatgggaaataatccacagcagaccacctggggctcagagcccagtgatgaggaggagctcggaggagggagaggtggacagaagg

SEQ ID NO: 513739 - DNA, 512 bp, Homo sapiens
ctgctggctcgcggttctgagagtgcctgaatagaaaaccrctcatttcccttcgcaaaagaggcgcccaaagcagatatttcaatatattccaatttagccgagggaagccagaacatggatgttgttgccaaggaaaccacctccttcctcctgtgtgctgtgcatacgtgtatcacttcatctctctgctctccaaggtaatatcatagctccgtgcttggggaagggtttttaaaaaggcatataaaacctcttagcatcaagaagattcattaaatgatctcattccagagaagcttaaattattctttttagatccttttatgctgaggatggggaaatggctgagtcagtgctatctctcgcagcccagcttggtgtcttcgtggagacagtttttcagaaataaacaaatcagagttcgcaagcttagacagggcgagtgtgtgtgtaataagaacgaggccgtcatgtagctgtaatgtcacggtctaatccctcctagagga

SEQ ID NO: 513740 - DNA, 557 bp, Homo sapiens
gggcaacaccataattaggaatcctgggttaataaccttccctgattggacgtttccacagctcctcttccccagctgtttatcttgagatcgctgctgaaggggaagggaggagactgggaaactgtaccagggaggaagggaatggaagcagaaaggaaaaggggaagaggaaagagcccagaagtaggctttaccaagcaaacctgggtcaggcccagaacaggayacctaataccatacggtgatctcacctcccacccacccagggctgcaaatcgtccccaccccgccctgggactaggtctcctccaggggccccatcctggttaatgtccccactcgtcccctccctgccagcagactagataccctggagtgaccctggactcttatctcctgagaggccctctcctcacacaccagtcgatcagtcaccaggccacggccattccagccatcccctgtccatctccttagtgccgcagccttgatggggctcctgctaccccctcttctggcttcttccaacagcctgctagtgagtggccctgcct

SEQ ID NO: 513741 - DNA, 557 bp, Homo sapiens
gggcaacaccataattaggaatcctgggttaataaccttccctgattggacgtttccacagctcctcttccccagctgtttatcttgagatcgctgctgaaggggaagggaggagactgggaaactgtaccagggaggaagggaatggaagcagaaaggaaaaggggaagaggaaagagcccagaagtaggctttaccaagcaaacctgggtcaggcccagaacaggatacctaataccatacggtgatctcacctcccacccacccagggctgcaaatcgtccccaccccgccctgggactaggtctcctccaggggccccatcctggttaatgtccccactcgtcccctccctgccagcagactagataccctggagtgaccctggactcttatctcctgagaggccctctcctcacacaccagtcgatcagtcaccaggccayggccattccagccatcccctgtccatctccttagtgccgcagccttgatggggctcctgctaccccctcttctggcttcttccaacagcctgctagtgagtggccctgcct

SEQ ID NO: 513742 - DNA, 557 bp, Homo sapiens
gggcaacaccataattaggaatcctgggttaataaccttccctgattggacgtttccacagctcctcttccccagctgtttatcttgagatcgctgctgaaggggaagggaggagactgggaaactgtaccagggaggaagggaatggaagcagaaaggaaaaggggaagaggaaagagcccagaagtaggctttaccaagcaaacctgggtcaggcccagaacaggatacctaataccatacggtgatctcacctcccacccacccagggctgcaaatcgtccccaccccgccctgggactaggtctcctccaggggccccatcctggttaatgtccccactcgtcccctccctgccagcagactagataccctggagtgaccctggactcttatctcctgagaggccctctcctcacacaccagtcgatcagtcaccaggccacggccattccagccatcccctgtccatmtccttagtgccgcagccttgatggggctcctgctaccccctcttctggcttcttccaacagcctgctagtgagtggccctgcct

SEQ ID NO: 513743 - DNA, 596 bp, Homo sapiens
cagctgctagtattgtttttctaaaatagaaatgatcacactagcacttacctaaacccttcaggggcctgctgccatgtccagggaaattcaaggccttcacagcctggacctcacctccctcaccakctccttctcctctcacctcctccctcctccttcccacctccctcacatcactgtccagaaacttcatcagttcactcatggacacgcacacacacacatgctcatgtgcacacaggcccacatgcacacatgctctcacacacacaatgcacaggcacacatgcacacacacactgccttttcacctttccacttgctgttttctctgcctggaattctcttcttccctcaccttgtgaagaagctcatagtctgaagaagctttaaaaatttgctctaaatctcgagtctctgcaattgcattcaggagtcagcctctgtgacctccccaccctgaccctgcaccctcctgctgccccatcctgctcctctacctgtctcgacctggtttgtgccttacctccctaactagctgtgaactcctggcagcaaagacctccaagaccacctcagggcatagcatgggg

SEQ ID NO: 513744 - DNA, 596 bp, Homo sapiens
cagctgctagtattgtttttctaaaatagaaatgatcacactagcacttacctaaacccttcaggggcctgctgccatgtccagggaaattcaaggccttcacagcctggacctcacctccctcaccatctccttctcctctcacctcctccctcctccttcccacstccctcacatcactgtccagaaacttcatcagttcactcatggacacgcacacacacacatgctcatgtgcacacaggcccacatgcacacatgctctcacacacacaatgcacaggcacacatgcacacacacactgccttttcacctttccacttgctgttttctctgcctggaattctcttcttccctcaccttgtgaagaagctcatagtctgaagaagctttaaaaatttgctctaaatctcgagtctctgcaattgcattcaggagtcagcctctgtgacctccccaccctgaccctgcaccctcctgctgccccatcctgctcctctacctgtctcgacctggtttgtgccttacctccctaactagctgtgaactcctggcagcaaagacctccaagaccacctcagggcatagcatgggg

SEQ ID NO: 513745 - DNA, 608 bp, Homo sapiens
tgctccccagtgctcaaaacattgtgacccaaacacccctccctccatgtgcctgcacagaaataccatcttgtatggagtgttcacctgcacacaccccaccacacagatttgctttcttttctgagcttctgtgcacccatgcattgacccaaactcttctctgccctgaaatgatctttcttccttctccttcaagtgccaagccagtctaagctcaactcagcaccatccataaaactctttctgctcaggcctcttactcctctgagtccccaggccrtgggaccctggttaattccactctgcagcaatggcatttctggacacacactagctgccctgccacgggcctgttcatgctgaaagacagtggcattttctgaatggcctcagtgtcctctgtgctgtctcaaatgttgctgtgcacacagagagagggaagggcgcaggattgggggggagtcccactctgtgtcaggaacactgcctcattcatcctcacaggatgaggcatgtagggcgcatggccacatcgctggggtgaaaagccatttgcgcaggcccacaccagttagtgattaagctgggtgcacatggagctcccc

SEQ ID NO: 513746 - DNA, 624 bp, Homo sapiens
cctcattactctgcagggtggagtaactcaggagaccctccaaagatgcagggagcctccatgcggccacaggacccaggcacagccctgtcacccctctgcaggtcaagggggcaagatgcccaagcaaggcacaaggcccgattctgccctttcccttcccctccttcctccagacccttcaatatagaatygattaaaaggtcatcacagttgcaagttgtgcttgatttggggaggaaggcaaaagttggctttgagaaatggggacttttcaccttcatggctccctagtgggcactacagcctcctgcctaggaactactgagtagtggcaagtagcttcctacagacggctgcaaggaataccccacccacccacagcccaaacaatccccaacaaggggttcttagggacaggccacatgaaacaggacagaaacctgccagtcacaagggttacagcactagtttgttgcaggattcacagacctaggtgaaatctctgtcccatgcagagcccaagacaatgttagaggaaagaaaccttgtgaagcctacctacaccatggccaccccccgagtgggcgcgtgctctgccccaaccctgctaggctgtgaggg

SEQ ID NO: 513747 - DNA, 359 bp, Homo sapiens
gggacttttcaccttcatggctccctagtgggcactacagcctcctgcctaggaactactgagtagtggcaagtagcttcctacagacggctgcaaggaataccccacccacccacagcccaaacaatccccaacaaggggttcttagggacaggccacatgaaacaggacagaaacctgccagtcacaagggttacagcactagtttgttgcaggattcacagacctaggtgaaatctctgtcccatgcagagcccaagayaatgttagaggaaagaaaccttgtgaagcctacctacaccatggccaccccccgagtgggcgcgtgctctgccccaaccctgctaggctgtgagggc

SEQ ID NO: 513748 - DNA, 451 bp, Homo sapiens
ctctaatgatgttggccagcagaagctctcttatctatggaatgcttttagcgagacgtgccctatctgcctaaaaccgctcgcggtaaacaaacctggaacctatggatttatgtcagatggctccctggaaaatgttgtgcaagctatgaaactagcagagaaaaaagtgaagatgtttcaggacccaaatagctacsctttcaagaaggatggctcgcgtgtagcacgtagagacccctagtgataagtctgggccagggcacagcctaatgtggcaaaaaagtcctgggagctgtattgtggttcagacttcacactttacccgggcctcacaattatttgtatccttgcagttattagtaaggcttagtactggttgagatctctgattcttatgaatccaactggacaagctgaccctttttattttagctcaataacagaaact

SEQ ID NO: 513749 - DNA, 645 bp, Homo sapiens
ccagcacctggagagacctcaaatgcgttgttactatcatcgcccttctcttcctttcacagatgaggaaactgagtctcagagaagtcgagggactggctcagagatgtacagcatggcattgctggagccggcctggaagacaagcagtctccctccaattgcacactgttttctctgaggctctgcattgttggaggaagggtcagaggggctggagaggaagaaacaatgcaaatatgaggcagcagaagggaaatmgaggtactgggggcttccagcctcatgctgcttgctctctcctgaatccatcgttggtctttctgtcctaatccgaccactccatcgccagcctccattcctctgaatgttgatagaagagctccggactctttccagctttccagacttttccactcacacagactcaagggtcctcccaactgtcttgtgaaaagaggccatcccattccacaggaggggaaactgaggcttggaaaaggcacatggtcccatgtagcgtcactgtggctcttcggactcttccaggtccctctgcctgtcctgggcctgccattgttccacctccaggtctgcccactgcctgcacctctcctccccgtctcaccttgccctgcactgcag

SEQ ID NO: 513750 - DNA, 524 bp, Homo sapiens
gcagctgcctctgacctgtggagccaggtcacccgccacaccatagctgccaggggctagtgggcaactgaggcttagccccgccatgagtccctgagaggatgggacacacctcgccatcgcccccactgtggggtgagggagcccaggcaggcacttacccagttcctgtctctygcttggtaaaggctgttcctggggtgtgtcaactccctggcactctgccgtgccatgcacacagggcagaggtgatgtattcctccaaagtctccccaggaacatgaggggtttcaggggagtggagggactgaggatggaccctgaggctctgctgcccctacccccagcttcagcttgggttctgctatgttcactgtacttctacgtgggggtttgtggagcgccaatctcatattatactaaacgtcgacacccatttggtccaacactgaggtgtttggaggccctaataggggttcaaggtcacagtgagtgagcgagtggctgtggtgcatgaacccagg

SEQ ID NO: 513751 - DNA, 641 bp, Homo sapiens
gcagaggagagatcattatcagtgctgcctggccgccatcagcaccacaaggaaataggcacgtctggtcgtgggagtcacctaacycatggctggtcattggaggcttatgggcagggctccaggaatgccatcttgcaggggaagagtgggcaggtagctggtcatctacccctgggctgaggcaggaggcagccagcttcagcttacagtgagtgttacccttcatggctggggcaaggagatggagtgggtttggctcatctgtctctgcttcctccatagcacaaggctgggccaatgtgctgtgtgtggacacgtccatgtgtgcaggatggaacgagttgccctccctatcatctcgtgaccttgctcatgatacttagcttctctgaaccttgatttcttcatctgtaagatgatggtgaccttattggattgttgtgaagtttaggtgagaaaggcgtgaaagtgcttagcctggaggctggcacagagtaaagttcaatacacactagatagtaatattatgacctcctaatttgtaagctagggaggcagtgcctgccttgcagggttggctggaggattaaatgagatggtctacataaatgctgagcacaggttttggctcatagtac

SEQ ID NO: 513752 - DNA, 641 bp, Homo sapiens
gcagaggagagatcattatcagtgctgcctggccgccatcagcaccacaaggaaataggcacgtctggtcgtgggagtcacctaacccatggctggtcattggaggcttatgggcagggctccaggaatgccatcttgcaggggaagagtgggcaggtagctggtcatctacccctgggctgaggcaggaggcagccagcttcagcttacrgtgagtgttacccttcatggctggggcaaggagatggagtgggtttggctcatctgtctctgcttcctccatagcacaaggctgggccaatgtgctgtgtgtggacacgtccatgtgtgcaggatggaacgagttgccctccctatcatctcgtgaccttgctcatgatacttagcttctctgaaccttgatttcttcatctgtaagatgatggtgaccttattggattgttgtgaagtttaggtgagaaaggcgtgaaagtgcttagcctggaggctggcacagagtaaagttcaatacacactagatagtaatattatgacctcctaatttgtaagctagggaggcagtgcctgccttgcagggttggctggaggattaaatgagatggtctacataaatgctgagcacaggttttggctcatagtac

SEQ ID NO: 513753 - DNA, 493 bp, Homo sapiens
gagctcctacaagctatggcaggcagagcagaggcacccaggtgagagggaggagcagcacgctggagacgctgagagctccatgtgtctgacgcagagtgaagggcaaaggaggagagaaaactggcagggtaggcaagggctagactatcatggcctctgaaaagggtcatacggcatttggagttgttttcagatgtcgtttgcagagtgtaggtaagggaaccacatgagaagatttccattttagacagaggctcctggctgccatgtgaatcatacaatagaagagcagagggaggaaagacaagtgacccaagcaagacctgctcatggatgcagttcagacagcagtggctgagggacaggaacagacccaggagaggcacaagagctagagcccacacacatgtgttsctgctgcatgcctgttggaggagaagggaaggggaattgagaataactcaagccaaggacagtgctggagaagcag

SEQ ID NO: 513754 - DNA, 531 bp, Homo sapiens
tacgatgtatcattagtgagctcagcctctgatgaggcaggtgtcagtattagcccccattttacagatggggaaggggaggcacagagaggtcaggaactggcccagagtcactcagtcccctagctagacatgaacccaggcagtctaattccagagtgtgcactcttaactactgtgtgatgtatgtggactagaaagcaggacacacagcgagcagggaaattcactccgtgtggtgtgggcacttagcacgacttcttagggaccagagaggctcccactatcatattttgttttcattagtaatggttttttaaaatgtcaacaatcgctgagccaacttctcataatcaatcctttatatttaaaaaaaggtcaaaacaaagttacatcgtggatgattttaaatgtttacatttcacaaattaatgcttttagccttatcaatacaaygcaataaaaattatgctctttccaagatagctacattattttaaaaaataatgtgatttcagagtgcactcaagt

SEQ ID NO: 513755 - DNA, 587 bp, Homo sapiens
ccgcttcacctctccccacccctggttcttattccctcatatcaccatgaaagtgatgggaaatgaatcaggtgtttcaacaacgatgaagaccgtattcctctgcaggtgtatgatggtatgtggttttcaaagtgctttcctatctttgatctcttcaaattcctgccccgtctgtctacctcatagggttgtttcattattcccacatttttccagaggaaacgaactctgtggaattaaatgctgcctcaaggtcatggagccaggaaatggctgagctaagacttcaactcaggtcctggattatgcggctgaacagcttttaatatttctcagccacttaataggttacctctcccaggagtgtttgcattttaaaagagaactgagagagagaaatgtataatccaaatgaatgaatgaatggtgtctagtgcaaaagcaggtgcacaggtgatacttttgcacaagggccagagggacayggcagtcctagaagactcttaacacataggctttcagggccaacagatctgggtccagatcgcttccattccacttactgacccagtgatctggagcca

SEQ ID NO: 513756 - DNA, 587 bp, Homo sapiens
ccgcttcacctctccccacccctggttcttattccctcatatcaccatgaaagtgatgggaaatgaatcaggtgtttcaacaacgatgaagaccgtattcctctgcaggtgtatgatggtatgtggttttcaaagtgctttcctatctttgatctcttcaaattcctgccccgtctgtctacctcatagggttgtttcattattcccacatttttccagaggaaacgaactctgtggaattaaatgctgcctcaaggtcatggagccaggaaatggctgagctaagacttcaactcaggtcctggattatgcggctgaacagcttttaatatttctcagccacttaataggttacctctcccaggagtgtttgcattttaaaagagaactgagagagagaaatgtataatccaaatgaatgaatgaatggtgtctagtgcaaaagcaggtgcacaggtgatacttttgcacaagggccagagggacacggcrgtcctagaagactcttaacacataggctttcagggccaacagatctgggtccagatcgcttccattccacttactgacccagtgatctggagcca

SEQ ID NO: 513757 - DNA, 587 bp, Homo sapiens
ccgcttcacctctccccacccctggttcttattccctcatatcaccatgaaagtgatgggaaatgaatcaggtgtttcaacaacgatgaagaccgtattcctctgcaggtgtatgatggtatgtggttttcaaagtgctttcctatctttgatctcttcaaattcctgccccgtctgtctacctcatagggttgtttcattattcccacatttttccagaggaaacgaactctgtggaattaaatgctgcctcaaggtcatggagccaggaaatggctgagctaagacttcaactcaggtcctggattatgcggctgaacagcttttaatatttctcagccacttaataggttacctctcccaggagtgtttgcattttaaaagagaactgagagagagaaatgtataatccaaatgaatgaatgaatggtgtctagtgcaaaagcaggtgcacaggtgatacttttgcacaagggccagagggacacggcagtcctagaagactcttaacacrtaggctttcagggccaacagatctgggtccagatcgcttccattccacttactgacccagtgatctggagcca

SEQ ID NO: 513758 - DNA, 520 bp, Homo sapiens
ctccccacctgccagtccttctcactactgaccacagagccttgttattctccttacagtatctgtctccactcctccccaggtgttttaatttgttgtctgtattcctccttgctgggatgtaagttcygtgacagcaggaacttgtctgaattcttcctcactgatccccagagttcagcacattgtgggtgctcgataaatatttgttaaagaatgaatatgaataagtgaatgaatagatgaaatgagcagcatccttgggcagggactcatctccaagttgactggaatcccctgagaaatccagccagagtgggccttggtgagccccccaaatgacccactacttggaatcttacctggtttttcgctttttgtaaaaggtgatatcttcgttttcttcggggattgactgtgaccaaatacaaagaaggggctgggaaggtcatgctggaaacctgaccccacgggtggcaggggagacagggaggtggggaaggtggtgcaggtgcagtca

SEQ ID NO: 513759 - DNA, 520 bp, Homo sapiens
ctccccacctgccagtccttctcactactgaccacagagccttgttattctccttacagtatctgtctccactcctccccaggtgttttaatttgttgtctgtattcctccttgctgggatgtaagttctgtgacagcaggaacttgtctgaattcttcctcactgatccccagagttcagcacattgtgggtgctcgataaatatttgttaaagaatgaatatgaataagtgaatgaatagatgaaatgagcagcatccttgggcagggactcatctccaagttgactggaatcccctgagaaatccagccagagtgggccttggtgagycccccaaatgacccactacttggaatcttacctggtttttcgctttttgtaaaaggtgatatcttcgttttcttcggggattgactgtgaccaaatacaaagaaggggctgggaaggtcatgctggaaacctgaccccacgggtggcaggggagacagggaggtggggaaggtggtgcaggtgcagtca

SEQ ID NO: 513760 - DNA, 639 bp, Homo sapiens
aggaaagtggcttaatggtgacaatagtggcccaaatgcctacctgatctgggcccactgtctccctgatgccttctccgttctcctstcctactttactccagccagaccagcttctgcttccttgctgctgctccaacagagtgggagcgctcttgccttctggactttgtatttgctgatctacccgcctgagacatctttcccctgctgtgtgcatagttcctgtgtagttctttgctcaaatgtcatgttaatggccatgtcttctgtgaccacctttcaaaaatagctatcttcccactgcagcctgggcacttgacaccttccccatctcccatccctccccactggaggtcagctccaggaggggggccaccatgtctgtcttgttcactgttgtatccccaaggcctaaaaaagtgcctagccaatagttcacactcaataaatatttgatggctggctggatggctgagtggctgacatggcctaagttagagaacttaagagaacagagcactgctccaggacagaacttatccctttctctgatttgtaaaatgggagaacccagcagtcaggggaatctgtagggaacctgtcacccacccttggaggcttctctcctgcccactg

SEQ ID NO: 513761 - DNA, 639 bp, Homo sapiens
aggaaagtggcttaatggtgacaatagtggcccaaatgcctacctgatctgggcccactgtctccctgatgccttctccgttctcctgtcctactttactccagccagaccagcttctgcttccttgctgctgctccaacagagtgggagcgctcttgccttctggactttgtatttgctgatctacccgcctgagacatctttcccctgctgtgtgcatagttcctgtgtagttctttgctcaaatgtcatgttaatggccatgtcttctgtgaccacctttcaaaaatagctatcttcccacwgcagcctgggcacttgacaccttccccatctcccatccctccccactggaggtcagctccaggaggggggccaccatgtctgtcttgttcactgttgtatccccaaggcctaaaaaagtgcctagccaatagttcacactcaataaatatttgatggctggctggatggctgagtggctgacatggcctaagttagagaacttaagagaacagagcactgctccaggacagaacttatccctttctctgatttgtaaaatgggagaacccagcagtcaggggaatctgtagggaacctgtcacccacccttggaggcttctctcctgcccactg

SEQ ID NO: 513762 - DNA, 390 bp, Homo sapiens
ctgcttggaaagcacataggcattgaagacsctcgcttcaaaaatgtccctgactgctgcgggctccactatgtttcgaatgacaaatttcttaatagccttgtccttgggcatgcatcgggcacagttcatgcagcaaataggctgcacatggctgtggccctttttggtgaggccgttgttccttttctttgtcatcttggaggcacggactggagagaggacatctggtttctttacagctaaaatgggagtgttgcaaggtgagttgcttgggtgcaataatccatgggttgaaaactttgttactaggggctgtaaccctttttgttcttctagtttcaagggctattggggggttctggggaacttattgggatttttaagctg

SEQ ID NO: 513763 - DNA, 465 bp, Homo sapiens
ctggttacacctttcacccggaaatcaaatgggtgctccagtgggtatcctgctttctccataaagacgatgaggaagcctcccagacaagcgtcracatgaaggggtattttgtatttgacagccagcttgttccaaaaaacaaagaacataagagaatttcctttatagccctataataaaaactgcaagacatgggtggaaagatgggctataaacacaaggctattttgtattatgcctcccatgtttttaaaaaatggctatttttaacattcccaacaaaatttatctttcaaatgtattttcccttcaaaataattcatctgaaatatggtatcaattttatatttaaatatgcatgacctcaaacgctctgcggtatcaagcaggaaatgagtagagctctgatttaggctgcctctcgcacaagggaaaggtcctgcctcagtcactgcaggatga

SEQ ID NO: 513764 - DNA, 559 bp, Homo sapiens
cttaatgcctgacttgactctcagtaaaccttgaccaacacaggcatgtcatagccacctggctatttttttaaaaaataatatatgagaatgaatcattccaaaacaaacaaaaagccacaatactaaactagttggacaacttcttagacttaccatctctgaagattcatacaatctttgaaaggttttttcaatttacaggtgagaaaactgagcccttgaggaattaaagtgtttcactcaatgtcatacattagcatctgttgataagaagtaaaactttctacgttttcatatttagtgtagcttaatacaagatggaatcagagaaagtgaccactgaactttgctaaaataatatccacacatagaacaaaaataccattggatacaaaatccctgtggccaggagttatatggaagatgaactgagaaaagtcattttttgactcaggaagtctttatgaaacatgtgaccrtcaccaaaaaataatgcacccaacttgggcatgggacacttgtaggtcactacatttctacgctgcagaagacaaag

SEQ ID NO: 513765 - DNA, 559 bp, Homo sapiens
cttaatgcctgacttgactctcagtaaaccttgaccaacacaggcatgtcatagccacctggctatttttttaaaaaataatatatgagaatgaatcattccaaaacaaacaaaaagccacaatactaaactagttggacaacttcttagacttaccatctctgaagattcatacaatctttgaaaggttttttcaatttacaggtgagaaaactgagcccttgaggaattaaagtgtttcactcaatgtcatacattagcatctgttgataagaagtaaaactttctacgttttcatatttagtgtagcttaatacaagatggaatcagagaaagtgaccactgaactttgctaaaataatatccacacatagaacaaaaataccattggatacaaaatccctgtggccaggagttatatggaagatgaactgagaaaagtcattttttgactcaggaagtctttatgaaacatgtgaccatcaccamaaaataatgcacccaacttgggcatgggacacttgtaggtcactacatttctacgctgcagaagacaaag

SEQ ID NO: 513766 - DNA, 597 bp, Homo sapiens
aaacggtgacgaagacaggactctggacatgagygctccttaagtggcattgcccaaattcttgatgataactagaaaacttccctgcattatacacctagaaagaaaacctccttgagatgaaggtgggtgctcgtcgaggaacacttcagggatgccgctgtagcctcctctaagggagcaatcatcagcctatcatcatcaccatcatctgacctgtacttaacaaatccagatgcttgacaactctccggaaatccttatgtgcattttggagataaccaaatgggtattcatagaggttaagcgacaacactattatttcgactgagcccagacctaagcacaacagacattcaatgttcttttcttgcttttttccctgtatgcctcttgcacgaccaccaagcttgcagctagctacccttccaccctcaagcatgctttgtgccagtctacaggcacatcttcccatcttgcttaacctatcgacagcatgtgatacagtgacaataccttctgcttcacttccttcccgtggctgccaggataggaaaccttcctagggccttcctccctcactgcatgtgctttcaa

SEQ ID NO: 513767 - DNA, 651 bp, Homo sapiens
cagttagggcggacgaagcaggagccgcggggctgggaggattccagtcggaacgcaaccgatcctggggaggcgagaggtgaatcaacctggacccttccacagcctggctgctaggccagcagtgcgactcccttccgagctgagcttaccctgggcgcaaacgagcgagcaggggcgcgagtggaagctggagttccggggtgggcggggaggcgactgtccgtggtgctgagcgccggcgagagcgggcgcggagcggctgatcrgctccctcgaactggggaggtccagtggggtcgcttagggcccaaagcccccacccggctccaaaagctcccagggcctccccaggcaccggtgctcggcccttccttcggtcagaaagtcgccccctgggggcagttcgtcccaaagggtttcctcgaaagaatctgagagggcgcagtccttgaccgagggaatctctctgtgtagccttggaagccgccagccccagaagatgcctgccttcaatagattgtttcccctggcttctctcgtgcttatctactggggtaagtaccagcacctcgccatgccggatgcaggtaacagtaacaatgctaacaataataacacattgatgtcgttggtgacagaaaagagctc

SEQ ID NO: 513768 - DNA, 651 bp, Homo sapiens
cagttagggcggacgaagcaggagccgcggggctgggaggattccagtcggaacgcaaccgatcctggggaggcgagaggtgaatcaacctggacccttccacagcctggctgctaggccagcagtgcgactcccttccgagctgagcttaccctgggcgcaaacgagcgagcaggggcgcgagtggaagctggagttccggggtgggcggggaggcgactgtccgtggtgctgagcgccggcgagagcgggcgcggagcggctgatcggctccctcgaactggggaggtccagtggggtcgcttagggcccaaagcccccrcccggctccaaaagctcccagggcctccccaggcaccggtgctcggcccttccttcggtcagaaagtcgccccctgggggcagttcgtcccaaagggtttcctcgaaagaatctgagagggcgcagtccttgaccgagggaatctctctgtgtagccttggaagccgccagccccagaagatgcctgccttcaatagattgtttcccctggcttctctcgtgcttatctactggggtaagtaccagcacctcgccatgccggatgcaggtaacagtaacaatgctaacaataataacacattgatgtcgttggtgacagaaaagagctc

SEQ ID NO: 513769 - DNA, 651 bp, Homo sapiens
cagttagggcggacgaagcaggagccgcggggctgggaggattccagtcggaacgcaaccgatcctggggaggcgagaggtgaatcaacctggacccttccacagcctggctgctaggccagcagtgcgactcccttccgagctgagcttaccctgggcgcaaacgagcgagcaggggcgcgagtggaagctggagttccggggtgggcggggaggcgactgtccgtggtgctgagcgccggcgagagcgggcgcggagcggctgatcggctccctcgaactggggaggtccagtggggtcgcttagggcccaaagcccccacccggctccaaaagctcccagggcctccccaggcaccggtgctcggcccttccttcggtcagaaagtcgccccctgggggcagttcgtcccaaagggtttcctcgaaagaatctgagagggcgcagtccttgaccgagggaatctctctgtgtagccttggaagccgccagccccagaagatgcctgccttcaatagattgtttcccctggcttctctcgtgcttatctactggggtaagtaccagcacctcgccatgccggatgcaggtaacagtaayaatgctaacaataataacacattgatgtcgttggtgacagaaaagagctc

SEQ ID NO: 513770 - DNA, 432 bp, Homo sapiens
cgggaggacttaggtgatttctaactatgtctgagagtaggggaaatgggatcaaagaaaacatctcagaagacatgaagcttgagcttatgtcttgaaaaatttaaagtttaacctaaccaaggataaagaatcagaagaaacagcatattcaaaagctaaagaacacgggactcttgtgtgctttgcatgtacacacgtgtgtgcgtgtgtgtctgaaaggattggagaggagggcgaagagaataacaagatgaacgtcaacctaatgtagaatgtttgaagtttgtatttcacttaacaagacagcggggagtgatggaaggatcttagataggaaagggacatgagcacgtttgccaagagagctcgttctgrtcatagtgggtacgtgaaggtgacaaatctggaggcagatagctcacatttgga

SEQ ID NO: 513771 - DNA, 541 bp, Homo sapiens
ttgaccaacattttattttatttttgagacatggtctcactgttgccaggctggagtgcagtggtgcaatcatggcctcgacctcccaggctcaggtgatcctcccacctcagcctcccaagtagctgggactacaggcacgtgccaccatgccaggctagttttttgtwttttttgtagagacagggtttcaccatgttgcccaggctggtcttgaactcctgggctcaagcaattttcctgccttggcctcccaaagtgctgggattagaggcatgagccttggccaacataataatctaactaaatgctgaagacaacctggataaatgagaagctatacactcctggtgggtgttcgtgtacatatatgggggaaatgattattttaatctgcagaaaaggttgtttttctcttgagaaacacagcagaaggaaatgcagagctgttctgtagatccttgctcctgtgccctgctccttccccatcttgtgttcccacgctgggcactgaagctctgattccctttccctgtgtcct

SEQ ID NO: 513772 - DNA, 541 bp, Homo sapiens
ttgaccaacattttattttatttttgagacatggtctcactgttgccaggctggagtgcagtggtgcaatcatggcctcgacctcccaggctcaggtgatcctcccacctcagcctcccaagtagctgggactacaggcacgtgccaccatgccaggctagttttttgtattttttgtagagacagggtttcaccatgttgcccaggctggtcttgaactcctgggctcaagcaattttcctgccttggcctcccaaagtgctgggattagaggcatgagccttggccaacataataatctaactaaatgctgaagacaacctggataaatgagaagctatacactcctggtgggtgttcgtgtacatatatgggggaaatgattattttaatctgcagaaaaggttgtttttctcttgagaaacacagcagaaggaaatgcagagctgttctgtagatccttgctcctgtgccctgctccttccccatcttgtgttcccacsctgggcactgaagctctgattccctttccctgtgtcct

SEQ ID NO: 513773 - DNA, 493 bp, Homo sapiens
ctccaccataagaaaacgctgctccggccagcacagggcgcgggagggcccgctccttctccctggtacatargcattatctcttttttaaaatctgtatataatatatatatttatattctgtatatatatatatttatatatatatatttatatggtctatgtacatgtattgcacaggcctcttgcagccaccctgttcctgccttgtcaatgatagcgattcctcttttcttcactttccgacgtgtagtcgcgggacctgatgccgttctgaaggttgatgagcgagtccttcatctgcaagacagaaaaccccaccccaggcctgggtctgcgcttttagtgggattctccaccgagcagccctctccccacacccgcctagggcaggcctccaaccacgccatggggctgaaaagagtcgggcacctaaagcaagggtggttctcaacactgtttcaaacagaaaggggacagtcaggctgggtgc

SEQ ID NO: 513774 - DNA, 493 bp, Homo sapiens
ctccaccataagaaaacgctgctccggccagcacagggcgcgggagggcccgctccttctccctggtacataggcattatctcttttttaaaatctgtatataatatatatatttatattctgtatatatatatatttatatatatatatttatatggtctatgtacatgtattgcacaggcctcttgcagccaccctgttcctgccttgtcaatgatagcgattcctcttttcttcactttccgacgtgtagtcgcgggacctgatgccgttctgaargttgatgagcgagtccttcatctgcaagacagaaaaccccaccccaggcctgggtctgcgcttttagtgggattctccaccgagcagccctctccccacacccgcctagggcaggcctccaaccacgccatggggctgaaaagagtcgggcacctaaagcaagggtggttctcaacactgtttcaaacagaaaggggacagtcaggctgggtgc

SEQ ID NO: 513775 - DNA, 343 bp, Homo sapiens
cagtactcaataagctcctctaggtttgcagtggaggaatgggtatagcacagtcagaggccccttgaggttgagacatttcacttttcactgtagtgaaaagagttctgcatttgaagtataacatatttgacctcaataattttagtttccttatttgtaaaatggccaaaataagacttgctttgtagaagtttttgaggatggtsgggggtggcgggggggaacaactcatggagtatctgacacagtgcctggcacataggaggtatcaaatgccattggttttcccatgcccccagcacagagtgtcctgaacattgtaagaacaatagatcattgc

SEQ ID NO: 513776 - DNA, 652 bp, Homo sapiens
tcagtactcaataagctcctctaggtttgcagtggaggaatgggtatagcacagtcagaggccccttgaggttgagacatttcacttttcactgtagtgaaaagagttctgcatttgaagtataacatatttgacctcaataattttagtttccttatttgtaaaatggccaaaataagacttgctttgtagaagtttttgaggatggtggggggtggcgggggggaacaactcatggagtatctgacacagtgcctggcacataggaggtatcaaatgccattggttttcccatgcccccagcacagagtrtcctgaacattgtaagaacaatagatcattgctgatgtgactgaaatgtgcccattgagatgaattccccaaaggggtggcctatatttctagtcaaagactgaaggaacaaatgaaactgaaatctgtattaagacacagtcaggctatggcaatggagaaaactggaaaaacatcacaaggtcaatagcagtagcagctcaactactgctttcccatgaagcgaaccccaaacagaggacagaaaaacagacatgtggcattagttctgccatctctccttgtcatgctcatgcaccattactaactgatcacagacgtctgccctctctactcagat

SEQ ID NO: 513777 - DNA, 652 bp, Homo sapiens
tcagtactcaataagctcctctaggtttgcagtggaggaatgggtatagcacagtcagaggccccttgaggttgagacatttcacttttcactgtagtgaaaagagttctgcatttgaagtataacatatttgacctcaataattttagtttccttatttgtaaaatggccaaaataagacttgctttgtagaagtttttgaggatggtggggggtggcgggggggaacaactcatggagtatctgacacagtgcctggcacataggaggtatcaaatgccattggttttcccatgcccccagcacagagtgtcctgaacattgtaagaacaatagatcattgctgatgtgactgaaatgtgcccattgagatgaattccccaaaggggtggcctatatttctagtcaaagactgaaggaacaaatgaaactgaaatctgtattaagacacagtcaggctatggcaatggagaaaactggaaaaacatcacaaggtcaatagcagtagcagctcaactactgctttcccatgaagcgaacccmaaacagaggacagaaaaacagacatgtggcattagttctgccatctctccttgtcatgctcatgcaccattactaactgatcacagacgtctgccctctctactcagat

SEQ ID NO: 513778 - DNA, 437 bp, Homo sapiens
gctgcctgagaagaagctgcaacttggaatagacttggaagcccccaacacacttgcttctgcaatttatcctgagcctatgtcaggtgatttcrcagtcctcaattatagctttgagaggctacagggtaggttgtgcagtggatatacagggatgtgtgtgtgtgtgtgtatgtgtaagctggtttctgaggccgacccatgctactagacagaattgcttgacccatattcatctatgatgtggtttggatttgtgtcctgtgtacctgcccaaatctcatgtcaaattggaggaggtgcccagtgggaggtgattgaatcgtgagggtggatttcccccttgctgttcttgtgacagtgaatgagttttcatgagatctgatggtttaaaagtgtgacacttctccctttgctgtctctctctcctgctacta

SEQ ID NO: 513779 - DNA, 523 bp, Homo sapiens
gtcccctgtgctgacttattcttaggcaggctctccccagtgatggcgaaagtgatcacaagccaaacttacttttaaccagtttcaaaacctcatctggaggagttcacttccttcccaataattcaagcagcaatttggggactagctctgggccatgtgcctagtatgggtatggacaattctctaaaggaaaattgaggtcctgttaccagaagaaggagagatggacttgggactgttgaaaaccaactaaacaacttacccactgggctttttggatactccattttaattattaactagaagcagaagttgcacarttgaagatagccctttatttatctctttacacattgactcataatcatctatgatttctcctcaggaaaatatcaaagactatgatacactagggcacctgagtgtcatgccattttgaagcttagacagaataccaatagaaatgacaagttcttcctgtgagtttgctgacacagggttctttaacacccatgctaaa

SEQ ID NO: 513780 - DNA, 580 bp, Homo sapiens
taatacctagaaccctaattaatactacatagcatttgtattaccctttgtacttttcaatgcattgtcccatttattatctcagtccatcctcataatgatctcatttccctattacagataaaaaatgaggcagaaaggtagcaggacttgataaaagtcacagagctggtygagcacagagaagggatcagaactggggccccatctgcagccctgggctctcctggtgctgctactgctgggctggtaccatgccctgtcagacaccatcaggcacacatcaccatcaacactcacaaatctgcttgctgcacccaaaggggattgtgcaggatgttgatgagtttcattcgggaaagaaatagaaagcttaagtagcaggtgctttcattcactctgtacatctggggtattcacaggttcctaccaaatcaggataaaagaaaaaagctattattatgtaaaattataactgctccttaaagagagaaaagaaaaaatgaggagtgactagtaaacaccccttgatgtacaaagatggacctgatggtgagtttagaagaaggctagcaagagc

SEQ ID NO: 513781 - DNA, 580 bp, Homo sapiens
taatacctagaaccctaattaatactacatagcatttgtattaccctttgtacttttcaatgcattgtcccatttattatctcagtccatcctcataatgatctcatttccctattacagataaaaaatgaggcagaaaggtagcaggacttgataaaagtcacagagctggttgagcacagagaagggatcagaactggggccccatctgcagccctgggctctcctggtgctgctactgctgggctggtaccatgccctgtcagacaccatcrggcacacatcaccatcaacactcacaaatctgcttgctgcacccaaaggggattgtgcaggatgttgatgagtttcattcgggaaagaaatagaaagcttaagtagcaggtgctttcattcactctgtacatctggggtattcacaggttcctaccaaatcaggataaaagaaaaaagctattattatgtaaaattataactgctccttaaagagagaaaagaaaaaatgaggagtgactagtaaacaccccttgatgtacaaagatggacctgatggtgagtttagaagaaggctagcaagagc

SEQ ID NO: 513782 - DNA, 580 bp, Homo sapiens
taatacctagaaccctaattaatactacatagcatttgtattaccctttgtacttttcaatgcattgtcccatttattatctcagtccatcctcataatgatctcatttccctattacagataaaaaatgaggcagaaaggtagcaggacttgataaaagtcacagagctggttgagcacagagaagggatcagaactggggccccatctgcagccctgggctctcctggtgctgctactgctgggctggtaccatgccctgtcagacaccatcaggcacacatcaccatcaacactcacaaatctgcttgctgcacccaaaggggattgtgcaggatgttgatgagtttcattcgggaaagaaatagaaagcttaagtagcaggtgctttcattcactctgtacatytggggtattcacaggttcctaccaaatcaggataaaagaaaaaagctattattatgtaaaattataactgctccttaaagagagaaaagaaaaaatgaggagtgactagtaaacaccccttgatgtacaaagatggacctgatggtgagtttagaagaaggctagcaagagc

SEQ ID NO: 513783 - DNA, 502 bp, Homo sapiens
atatattgttccaaagctgcattttttttgcttcagaattaggtttgtgaggttcatacttgttgatctgtatagctctaattcatttcattttcagaacttacttgctcattctcctgatggatatttacgttgtttcaagttttttcctactacaattaatgctacaatcacggtagtttttgtgtgccgtttttttctcatttgtaaaagaaaatcaaacctctgtgatgtactgcctgtatcataatatcccgtacaatgacatttttagagcattttccagtttataaaatgcctttccattcattgtagcctactacaggtggagaccagattcatactgaggttttctgggtctcaaaccaagaatcattatgctgtgacaagctctttataaactctgaagattttcaccartataaaatggcatcatcattgctagaaattaactgttgcaatagcttaaagcccacttattctgtctgcttatcttttaaac

SEQ ID NO: 513784 - DNA, 582 bp, Homo sapiens
agctggctctggcaatcttctctgagaaacagccctgaaaaagggacagtgcacctaatggatagctgactgaaggatgcaggtagaactgccttagtccgcttgcattgccatcaaggaatgtctgtggctgggcaatttgtaaggaaaagaaatttatttggcttacagttctataggctgtagaagcagcatggtgccagcatctgcatctgggaaggaactcaggctgcttccactcatggcagaaggtgaaggggagcagacatyatgtggtgagagagaaagcaagagagagagagagagagaaagagagagagaagggaggtgccaggctcttttaaacaatcagctcttgtggatctaatggaatgagaactcattaattactgtgggaatggcaccaagctattcaggagggatcggtctgcatgacccaaacaccttccaccaggccccacttccaacattgtggatcaaatttcaacatgagatttggagggaacgaatatccaaactatagcagaaccccagaggcttggaggatcacagggcagtccggacagggcactcagggagaaa

SEQ ID NO: 513785 - DNA, 582 bp, Homo sapiens
agctggctctggcaatcttctctgagaaacagccctgaaaaagggacagtgcacctaatggatagctgactgaaggatgcaggtagaactgccttagtccgcttgcattgccatcaaggaatgtctgtggctgggcaatttgtaaggaaaagaaatttatttggcttacagttctataggctgtagaagcagcatggtgccagcatctgcatctgggaaggaactcaggctgcttccactcatggcagaaggtgaaggggagcagacatcatgtggtgagagagaaagcaagagagagagagagagagaaagagagagagaagggaggtgccaggctcttttaaacaatcagctcttgtggatctaatggaatgagaactcattaattactgtgggaatggcaccaagctattcaggagggatcggtctgcatgacccaaacaccttccaccaggccccacttccaacattgtggatcaaatttcaacatgagatttggagggaacgaatatccaaactatagcagaaccccagaggcttggmggatcacagggcagtccggacagggcactcagggagaaa

SEQ ID NO: 513786 - DNA, 556 bp, Homo sapiens
tctccactatgcagatgatttcctacatgattcattcagtagatattttctggtttttatttctgcagcatctggttttgttggttgctctctccttcttaaggtgttctctctttgtattcacaacaccacatacttttrtcttttacttctatacccatctctttagggtattctcaggttctatgtttttaatcctcatttcatgtcagcaccagaatttttatataggaatggcttcctgacttggaaaaaggaagatgatgggtgagtgggtagatgggtcgaagccgtgtttgcaaacattttggcaagcgattgtcctgtgaaagactagggttatggatcaatgagagtaaggtaggccaaagagtcttacccttagttgcacacctaacctttcacaattgaccaatcataagctgatgacagctaaacgtctagaaaagcaattatatacccaagactgaaagagttaatatgtgataataggcacatatattgagctaactgcaaaattaacagaacacagtatttctcccaaggtctcattgca

SEQ ID NO: 513787 - DNA, 556 bp, Homo sapiens
tctccactatgcagatgatttcctacatgattcattcagtagatattttctggtttttatttctgcagcatctggttttgttggttgctctctccttcttaaggtgttctctctttgtattcacaacaccacatacttttatcttttacttctatacccatctctttagggtattctcaggttctatgtttttaatcctcatttcatgtcagcaccagaatttttatataggaatggcttcctgacttggaaaaaggaagatgatgggtgagtgggtagatgggtcgaagccgtgtttgcaaacattttggcaagcgattgtcctrtgaaagactagggttatggatcaatgagagtaaggtaggccaaagagtcttacccttagttgcacacctaacctttcacaattgaccaatcataagctgatgacagctaaacgtctagaaaagcaattatatacccaagactgaaagagttaatatgtgataataggcacatatattgagctaactgcaaaattaacagaacacagtatttctcccaaggtctcattgca

SEQ ID NO: 513788 - DNA, 436 bp, Homo sapiens
aaggcaccacccatcttgctatggtatacttctcatacttcgatttttaaaatactgtggtaaatactaagtttggaaagcagaccatataggtgtgtttctatcttgcaagacctaaaaggttaatttcaagttagttagacattttcttttctcattaatgagttcagtcctttttaaaaccaatgaacttttcatatttcttcatttctgtgggttcatgctgagttaaaagagatttcatgccaccatccattcaaccattttactttttcatttttatttaatgtagccaaaaaagcacagaatttttcaatcatgaaaacctaaaacatcaraggatatttgatattcatggtttgaatttcatgattttaggggcaactcttccctaatgaaatgctccagaatgggctccctgaaaatgctgcaatgg

SEQ ID NO: 513789 - DNA, 621 bp, Homo sapiens
ctgctgacaaagacatactcgagactgggtaatttataaaggaaagaagtttaatttactcatggttctgcagggctggggaggcctcaggaaacttgcaatgatggtggaagaagaagcaagcatgtccttcttcacatggctgcaggaaggagaagaatgagtgaggaaaagcctcttataaaaccatcagatcttgtgagagctctctcactattacaagaacagcataygggaactgcccccatgatccaattacctcccaccgggtccctcccaacacacatagggattatgagaactacaattcaaaatgagatttgtgtagggacacagccaaaccatatcactaggttaggattgtgaagccagggagtggggcagtgaagtatttaaggccttctggggaaacagcacagcatagcactgtggttaagggacaatactttgggagccagataggtctggaaggaaatcctagctcagtactcagtatatatgcaactttggacaaatgacttaacttttttagtctaaatgagctcatctgtaaaatacgagcattattgcctaccttgtaggtctgttgtaaagattacatgagatagtgtttgccaaata

SEQ ID NO: 513790 - DNA, 372 bp, Homo sapiens
gtgtgtgagctacacaaaagacactacaggttaacagcaggtcagtgacatgaagaaggaacttttctaatataataataataattgttagcatttactgaaggcatagtattctggtgacatatatctattagcaatttaattatcatgagaagcatacaagtaagacactattattatttttattttatgaaagatgaaactcaggcagagaacattttaatcattactatatggatccattgtgtgattgtaggtattcaaagataggcactctgaaatcagagctatgcatataactatcataccatattgyttctctagataattgttataaatgttagtataattttgaaaaaaaaataggtcaag

SEQ ID NO: 513791 - DNA, 518 bp, Homo sapiens
accagcctcttccctgagacaccatggtgaaggtgaaggccagagycaacggattggactatattgggcacccggtcactagggctgcttttaattctggtaaagtggatattgtcaccatcaatgaccccttcattgacctcaacaacatagtctacatgatctagtatgattccacccatggcaaattccatggtacagtcaaggctgagaatggaaagctcgtcttcaatggaaatcccatcatcatcttccaggaccaagatcctaccaaaatccaatggggtgatgttggcactaaatgtgttgtggagtccgccagtgtcttcaccgccatggagaaggctggggctcatttgcagggggagccaaaaaggtcatcatctctgccgcctctagtgatgaccccgtgtttgtgatgggcgtgaactatgagaagtatgacaacagcctcaagattgtcagcaatacctcctgcaccaccaactgcttagcacccctggccaaggtcatccatg

SEQ ID NO: 513792 - DNA, 605 bp, Homo sapiens
gctcagcccctccacagtccacctcccaaacacccagctctccaagggtgccgggacctgggcatggcacccacctcgtccgccgcctccagcttggggtcaaactggcagaagatctgctccaggtccttgcggatcacgttggccagcacgttcagccttcccctggagccagaggggccgggctctcacctggcaaagcccgcaggcctcagggttccctcccccactgtggaggcctggcctggcctaatacagccccttcgtgcccagagccctcctcagrccacccaatcaccaggcaccatcctctcctgctgctgtaatggcccgaggcttaaagccccatgctttcttgctgcctcaggccactgggccagctctgcctaactctctgaccagacactgggcattcccaggccccccatgacagacaaaccccaaagtcctggcaggccagccacgaatggggacccctgcaccatgcatttggatgccctcatgctgatgtagccctgggctagtccaaccacaagcagctctctggtcacgggaaaagcccagggcccttcccacaggccactctgcacatctgcacatgccca

SEQ ID NO: 513793 - DNA, 488 bp, Homo sapiens
tttgaatcccagggaatccctgggttcgtcctggcttgtgagaaggatgggtgggggcatggaggatatactgagaaaggctaaatttgactggagccactgccacttggtgactgygtgcagcaagctctatcttgtcttctgtttaggctttgagctgggctatgccatggccagccccaatgccctggtcctctgggaggcccagtttggggacttccacaacacggcccagtgcatcatcgaccagttcatcagcaccggccaggccaagtgggtgcggcataatggcattgtgctgctgctgccccatggcatggaaggcatggtgagggctgcggtggtggctggtggcttggtgggttctggcgggccttgaaggggcgggatggaccctgggccccttgtcgggttggacggtatatgccttccaggcccctggagcacgtgggtctgtgcagggtggggtctgcacatgtgcatgctgc

SEQ ID NO: 513794 - DNA, 584 bp, Homo sapiens
agctgcaacaaggcaaggtgtggagtccaggggaccacatagactgagagtggggagaggcagggaggcagtgacaacagcagcccctgtccaccacagtggccaaaagagacagccatgtcttccctgctccacagtgacaaggctcttccagccaccagaacctgagggagacagttttcccagccggtcaactgataatccccgagagagatgccatggaaatgtctgcaacagtttgtactaagcactcttccccgagacattcaaacattttccaacatgttttattaagtaagaatgccacactggccctcgagcaactgttgggtgttgtgtccagggctggcaggatggagcattgattgccatcctttgttaactgtgtgtttgttgagggctcactatgggacaagtgctatgstgggctctagggtaggaggcacaaagacgtggggcgtgggggaggtgacatgctgctgctttgaggagctctatgaccctcccaagacacacagacacacacacacagacacacacacacacacacacacacacagacacacacacacacacacacacac

SEQ ID NO: 513795 - DNA, 629 bp, Homo sapiens
ccctactttgtcctgtgtgagaaggaacttgtgcaagcagtttcatggtccccagtggtctttgaagttctggggtgcaggagggtttgaggctgcctggggcgatggttaggactgctctcagagcaggtgaagccgcaggtctctgagcgatcctgaaagccctgctccttcagcacaggtgccccgggtccagagttttctgttagggaatctggttttctccccgtaggtgtgaggccttcttaccatgacctcccatttgacgtcattagatcartatctgcatttccccctctctgttactctatagttaagaatatatactacacattggtgcgtaagagtggaaagtaaaaatatcatttcgacatgactgattttcacactgaacatagtgaaaaccctctttaactctatggggctgtgttctactccagagggaccagggaaccatctcacattctgctgaggactcttttgcgccctcctcagacgatattaatgcaaaagaaggcaggtcattttcttgttttagatgagagaaattgaagatttgattttggctaattttataatagcaatttaaaatatttattccctcaggagtcagaaataaatctgtagga

SEQ ID NO: 513796 - DNA, 597 bp, Homo sapiens
ctcctaaccctaacatttctgaggtgcctctatggaaaccactatcataaaagcaggctaatctatgggaagtccaaccagaggacctatggtaaatatcaaacccaagaaggactgtgtcactgcaggagaattacaagcataatggaaacttggaagtaatactgtctgggtgtccattttccatctcttttacatccacccataggatctacaatgccccagtgattttcacagtctttactcccttaagcagtagtcctttctttcagcaaaaatttgtggaaattcaatacataaaacatayaaaggcagagctgctggttgatgggacaataaggaggtcctccttattgtcaataaggcaattattgataataaggaggctttgtcctccctcaccccttacctactcacatgacactatggaatcccaagggaaataaggaaccatgtctgaaaagtaatggtttggtgaggatcatagtgatttaacttaatatagtctttaagagaacaagaagtacataataagtcatagtcctagcttcacaggagccttttctgagtagagtgcttctgttacatgttcaccca

SEQ ID NO: 513797 - DNA, 650 bp, Homo sapiens
  misc_feature (1)...(650): n = A,T,C or G
tgtggaatttgggggtgaagggtgtgaggaagtggtataggacaagttgcctagtctcctttgctgcacatgggattattttctttaaaatgactatggacaagagatctattgtacttcatgatgactccagtaaataaccatgtattatatgcttgaaaattgataaaagagtagatttgaagtattcttaccacaaaacaggatgtgtgaggtaatgcatatgttagttagttccatttagctattccacaatgtatatgtatttcaaaacatgttatacatgataaacatgtacaatttttatttgtcaattaagaataatttaaaaagaagcagaaacaatatgggttatatttttgagctaagaaatatgtttacattgagatagttrataaaataatttttngtttncttaaaattannttgtttnnccttnncagaagnnnganatannanctgacnntnttatttnntgtttacttcttacataatatttatcagtattaagtgttacaattttaaagaggaaagaaatgatacattttccccaagtaaggtttttaccaatttatattcaagaacacttatttatactttaaggtaattatttatgtatatctcttccactagacttagaagtccttaac

SEQ ID NO: 513798 - DNA, 628 bp, Homo sapiens
atgttttaaataaattaagaaaaaaagtcttttatgttaacatacaatgtattatttccaaggttcctcattcctttctatgggtttacatctatatctggtatcattttgctttagcttgaagagcttccttcagcatttcttatagtgtgggtttactggcaacaaatctctcattttcatttgtgtgaaaatgtctttattttttaaaagatttttttgttgtatatagaattctaggtgggcattcagtcttttttttctccttctctttagatgttgattattgttttctggaygcctgtttcgaatgagatgtctgccatcattcctcttcttcttctcatatgttgtctttttttctctggctacttagaaacttttttgttgttgttgttatttttggttttcatggttagtgttctagcagacaaaaaccacaaactttggctcaaatagaagaactgtgtttaaaattgagccccgtcacttagtaagtaggttaacttaggcatgtcactgtatttttctgaacttcaggcttttctttggaaaacagggatgccttatctacattagggttgttgcaaaagtcaaagcatctaagtgctagtctagctattatttg

SEQ ID NO: 513799 - DNA, 628 bp, Homo sapiens
atgttttaaataaattaagaaaaaaagtcttttatgttaacatacaatgtattatttccaaggttcctcattcctttctatgggtttacatctatatctggtatcattttgctttagcttgaagagcttccttcagcatttcttatagtgtgggtttactggcaacaaatctctcattttcatttgtgtgaaaatgtctttattttttaaaagatttttttgttgtatatagaattctaggtgggcattcagtcttttttttctccttctctttagatgttgattattgttttctggatrcctgtttcgaatgagatgtctgccatcattcctcttcttcttctcatatgttgtctttttttctctggctacttagaaacttttttgttgttgttgttatttttggttttcatggttagtgttctagcagacaaaaaccacaaactttggctcaaatagaagaactgtgtttaaaattgagccccgtcacttagtaagtaggttaacttaggcatgtcactgtatttttctgaacttcaggcttttctttggaaaacagggatgccttatctacattagggttgttgcaaaagtcaaagcatctaagtgctagtctagctattatttg

SEQ ID NO: 513800 - DNA, 590 bp, Homo sapiens
gacttttcctatatacatttatggaaaagtaaatattctaaacttatgagataaacatggcttgttttctattttgaaatttttgctcatagaacactaaggaaaccattctyattaagtgcagtttgaatagtaaagcaggaagctcaaattatctgcattaaaataggcacaggcaaagatttcatgaagaagatgccaaaagtagtctcatcaaaagcaaaaattgacaaatgggatctaattaaactaaagagcttctgcacagttaaagaaactatcagcagagtaaacagataacctaaataataggagaaaatttttgcaagctatacatttgacaaaggtctaatatccagaatctataaggaacttatacaaattaaacaaacccagccatctcattactgggtatatacccaaaggaatataaattgttctattacaaagacacatgcacaggtatgttcattgcagcagtattcacaatagcaaagacatggaatccacctaaatgcccatcagtgatagactggataaagaaaatatggtacatacataccatggaacactatgcagccatccaaaag

SEQ ID NO: 513801 - DNA, 590 bp, Homo sapiens
gacttttcctatatacatttatggaaaagtaaatattctaaacttatgagataaacatggcttgttttctattttgaaatttttgctcatagaacactaaggaaaccattctcattaagtgcagtttgaatagtaaagcaggaagctcaaattatctgcattaaaataggcacaggcaaagatttcatgaagaagatgccaaaagtagtctcatcaaaagcaaaaattgacaaatgggatctaattaaactaaagagcttctgcacagttaaagaaactatcagcagagtaaacagataacctaaataataggagaaaatttttgcaagctatacatttgacaaaggtctaatatccagaatctataaggaacttatacaaattaaacaaacccagccatctcattactgggtatatacccaaaggaatataaattgttctattacaaagacacatgcacaggtatgttcattgcagcagtattcacaatagcaaagacatggaatccacctaaatgcccatcagtgatagactggataaagaaaatrtggtacatacataccatggaacactatgcagccatccaaaag

SEQ ID NO: 513802 - DNA, 644 bp, Homo sapiens
tttttgcggtaatgtataaggaagctccttattgtcaccaaagtagatagatatttagtttattctattaaaatgacaatsttatattttgtctaacatataatttaacaaaaaagcatatagacttttggaattatccttaggaatataagtgattgttaaattacttgagggcatctaggcatgaaactagtaaaaataaaatgtaagacatttattgagaataataaactttattgaaggacataagataggaataaatgcagagttataccatgttaatagatatgaagaatgaatttataaactcaatgcaatgctaatcaaaaccccagtaggagctgatcaacttacttaaaaattcacatgaaagagtaaagctatataaaaaactaagataaatttggaataggaaaacaagggggcatgtggtacctaagcacatattaagatgtatttctaaaactataataatcaaaacaatgaagtattagtataggaaagattgttggatcagattagaggaagcttgcatatatagaaatctgacatgtgattgattagcattgtaaagccaaggagaaagggcagactatttaataaatggtgctattacagtcaacttctctacattacaaaaataa

SEQ ID NO: 513803 - DNA, 518 bp, Homo sapiens
gccgtcatccacttgctgggccttcactgtgcctaggcattttcagtggaggtggtcagccctgctgcagggcagctttactgaggtatatgtccaagttgggcttggaattggcattcttcttcagtgataagcaccaaagaaaaagcacaacaatgtaagacattcgttcagttttgagtagaagataaacattccaaattaacagtgaaagttgctgttttwtttttttttttgccatgactatttagcaagcctcacaaaactaattataatctctcaaaatcactttttctttttttttttttaaatttcttaggcagttcctaaggataaaaattagtgtgaataaatatgtgcttgtcctttggtacttagaattttagagtttttgaagtggacacagtgtatcttttgggatctcacagtagtttccaaattgaagaaaatataagcatatttaaataagacaatgtcaccgcatgtaatcattaacataagtaaggatttgtcttatg

SEQ ID NO: 513804 - DNA, 621 bp, Homo sapiens
tgtttcatttgaaagctaaatacgtagaaatgcagaaataaagatttatgcattttataatattaaaatgcagaaggtaaagagttaactgctccttaattgccaatgaaaagagcctcttttattataagctattacatgtttgaagacagcagcagtttatagatgtaaatgatctaattarttagtgaatacttggttcatttgaggagatattgacttaaataaaagattattaggttcatttaaaaatagatatttaaaattgttagctttgtaataaaccagtgacagtaattaaagaatttgacttaatatgttacaagtattcagtagtagcaacagtattttaaagttgggctaataggttttaaaagtctcttaagtagtgagatatatatatgaatacagataacaacacatgtatgtatggggaaaaaacattagggaagaaagcaatttatttatatttgagtgacagaataatttgttgaaaattttccataattcgtaattgacttttcaattgtcctctaaatacagtaatatttaaaccaggaagtttaaatatgagataaatttctaatgttaatttcgaaactgtaaactttgacctatttt

SEQ ID NO: 513805 - DNA, 621 bp, Homo sapiens
tgtttcatttgaaagctaaatacgtagaaatgcagaaataaagatttatgcattttataatattaaaatgcagaaggtaaagagttaactgctccttaattgccaatgaaaagagcctcttttattataagctattacatgtttgaagacagcagcagtttatagatgtaaatgatctaattaattagtgaatacttggttcatttgaggagatattgacttaaataaaagattattaggttcatttaaaaatagatatttaaaattgttagctttgtaataaaccagtgacagtaattaaagaatttgacttaatatgttacaagtattcagtagtagcaacagtattttaaagttgggctaataggttttaaaagtctcttaagtagtgagatatatatatgaatacagataacamcacatgtatgtatggggaaaaaacattagggaagaaagcaatttatttatatttgagtgacagaataatttgttgaaaattttccataattcgtaattgacttttcaattgtcctctaaatacagtaatatttaaaccaggaagtttaaatatgagataaatttctaatgttaatttcgaaactgtaaactttgacctatttt

SEQ ID NO: 513806 - DNA, 513 bp, Homo sapiens
ccaagcagaacatttgctgaagtccagaacaactaattgggtacacgtgttaaaactatcacaggctccttcttccactgaaccaaaaacatggcttaacatttttctaaaaacaaacccatgagagagactttttacaatacttatgggaatgctttttttggtatccttcttcttgaatactgttggraaaaaaaattaagagcaaaactgaaatataaaaatgactggagtaaatataggagaatggcactaaaacagatagtttaggtgtggcagtttcaaagactgatgggtgaaccgggaggctttatatacatccgtatcttaagttccttttgccttgttagcagaattaggattttaaaacaaaatctcttaagctaggattacacttttttagtatatttttcactcaacctggaagaaacatttttcacatattacattcaaatgatagtttttttttttttcttttttaatgaaccttttctttcaacccttccctgttta

SEQ ID NO: 513807 - DNA, 669 bp, Homo sapiens
cagactgttttataatacatgccccgttggtcaaaaacaatacaacaatcagctagaatttggtggaggtcaacaatggaggctgagtgtccgatcatgtgttagtctgttttcacgcggctgataaaaacataccagaggctgggtaatttataaattaaaaaaagtttaatggactcacagttccacgtggctgggaggcctcacaatcatggctgaaggcgaaatgcacaccttacgtgtcagcagacaagagaagacaacttgtgcagggraactcccctttataaaaccatcagatctcatgagacttattcactatcatgagaacagcacaggaaagacctgcccccatgattcaattacctcccactgggtccctcccacaacaggtgggaaatgtgggagctacaattcaagatgagattgcgttgggaacacagccaaaccatataagataataagaggcagatgagccagttaatcaactgagaaagcaaaggtcaaagagacatcctggctaaattaccagtcctctcactggtagtcagggacttaatacaaacccacgctgcacaatataaggtatgacatcagaagctgcatactgtggggtaaataaacttcacccaaatcctccattcaaatcagtaaacaaacaagtaaaca

SEQ ID NO: 513808 - DNA, 535 bp, Homo sapiens
aatagacaaaagcatctgtatctttcatgacagtagaaagtgaatacagagaygttaatcattattatagtccctcaaaaggtactgctttttcattccaaaatatctcttactttttcttgacacagtcaaatgggttcgctaatttacctaataaaaacaaatccttaggtaaattattggcttcctttaaaaggaagctaaagtaaattaggatgggtcaaagttagacctagaaacttcaaaagtgactatttaattgagtgtatttaacttatctttccatgataattgataacaaaagcattcatctaattgaaaatctccatgaaataaagcaagacatactgaaacactattccatatttttttcatgaatcacttatctttaaagaaaaattgagttactgatgtatttaacagttaattttcagctaactgatgcagaatttaaacctttgacaaaaaaattaataactttgatgttttagttttaatattaacaaaggatagcagatttaagccatatttaaaa

SEQ ID NO: 513809 - DNA, 282 bp, Homo sapiens
ctgctggctggtgtgccctgtttctttttttttcaacctgttcttccattcacctattggctagactacctcattccattgataaaagaaatagagagagccagttttcatttaatagagagagccagttttcatttaaggaytgaagaatgaatttcacttcttgatgcgaaggatgtaaggccacttttactgtattacacatttcatattttggttgtgcttttattcttacaggtcctgtaggtcaggaactctgttaccacagtatctcctacattg

SEQ ID NO: 513810 - DNA, 634 bp, Homo sapiens
aaacaatcttgaaatagattcctgyaacgattcttgctaagttttaaagttgaaataaatctttatgtgttagcttaataaatctttacttattttcaaagcactttcctataaattatctcatttgatcatcaataacgttctgaatagtataactcagttgggatgctatcaggaagaagtggttgtattgaacggtctgcatataagatagaaagatatccattggagagagggaaaaaaaataagaaaaagaaataaatatgagtggagtataaaaataacagcttgatggaaagtgaaagaaataaaaagatataggaggttcaacataaaatgagagaaatcatgaggaggagacatatagattgagatcatctattgaaagagaaaacagaaaaaaagatatatgaaaagagaaaataaagatcaaggaggaaggaatgggatggaacagaaaaatgatagatttaatgagttctgaagtgtgttaatcaagttaaactgcttatgcctcattgtgccgtccacttaagctgtgactattaaaataagttacaatccataatttattacctctgtcctttgagaggctaattagctttcctacaattaagcactattcacaactcct

SEQ ID NO: 513811 - DNA, 595 bp, Homo sapiens
tttaaagttgaaataaatctttatgtkttagcttaataaatctttacttattttcaaagcactttcctataaattatctcatttgatcatcaataacgttctgaatagtataactcagttgggatgctatcaggaagaagtggttgtattgaacggtctgcatataagatagaaagatatccattggagagagggaaaaaaaataagaaaaagaaataaatatgagtggagtataaaaataacagcttgatggaaagtgaaagaaataaaaagatataggaggttcaacataaaatgagagaaatcatgaggaggagacatatagattgagatcatctattgaaagagaaaacagaaaaaaagatatatgaaaagagaaaataaagatcaaggaggaaggaatgggatggaacagaaaaatgatagatttaatgagttctgaagtgtgttaatcaagttaaactgcttatgcctcattgtgccgtccacttaagctgtgactattaaaataagttacaatccataatttattacctctgtcctttgagaggctaattagctttcctacaattaagcactattcacaactcctcag

SEQ ID NO: 513812 - DNA, 595 bp, Homo sapiens
tttaaagttgaaataaatctttatgtgttagcttaataaatctttacttattttcaaagcactttcctataaattatctcatttgatcatcaataacgttctgaatagtataactcagttgggatgctatcaggaagaagtggttgtattgaacggtctgcatataagatagaaagatatccattggagagagggaaraaaaataagaaaaagaaataaatatgagtggagtataaaaataacagcttgatggaaagtgaaagaaataaaaagatataggaggttcaacataaaatgagagaaatcatgaggaggagacatatagattgagatcatctattgaaagagaaaacagaaaaaaagatatatgaaaagagaaaataaagatcaaggaggaaggaatgggatggaacagaaaaatgatagatttaatgagttctgaagtgtgttaatcaagttaaactgcttatgcctcattgtgccgtccacttaagctgtgactattaaaataagttacaatccataatttattacctctgtcctttgagaggctaattagctttcctacaattaagcactattcacaactcctcag

SEQ ID NO: 513813 - DNA, 634 bp, Homo sapiens
aaacaatcttgaaatagattcctgtaacgattcttgctaagttttaaagttgaaataaatctttatgtgttagcttaataaatctttacttattttcaaagcactttcctataaattatctcatttgatcatcaataacgttctgaatagtataactcagttgggatgctatcaggaagaagtggttgtattgaacggtctgcatataagatagaaagatatccattggagagagggaaaaaaaataagaaaaagaaataaatatgagtggagtataaaaataacagcttgatggaaagtgaaagaaataaaaagatataggaggttcaacataaaatgagagaaatcatgaggaggagacatatagattgagatcatctaytgaaagagaaaacagaaaaaaagatatatgaaaagagaaaataaagatcaaggaggaaggaatgggatggaacagaaaaatgatagatttaatgagttctgaagtgtgttaatcaagttaaactgcttatgcctcattgtgccgtccacttaagctgtgactattaaaataagttacaatccataatttattacctctgtcctttgagaggctaattagctttcctacaattaagcactattcacaactcct

SEQ ID NO: 513814 - DNA, 514 bp, Homo sapiens
atgggagggtcaaactctcatatgccattagaagcctttctttattttgacactgattttttttttttttttttttttttgaratggagtctgtctcatgttgcccaggctggagtgcaatggcatgatctcggctcactgcaacctccaccttccgggttcaagtgattctcctgtctcagcctcctgaggaactgggattacaggtgcatgccaccatgcccggctaatttttgtatttttagtatagacatgttttcaccatgttggccaggctggtcttgaactcttgacctcaggtgatctgcctgccttggcctcccaaagtgctgggattacaggcgtgagccaccatgcccccgcccgacattggtctgttaaccttttaaattacgtttttcacccaagtgagaatccacacatgcctataactgagctaaatttccccacatctttttgtcactgatctgtattattcctatattattcacaaagataacttgagggagtttgt

SEQ ID NO: 513815 - DNA, 391 bp, Homo sapiens
taccctgatttatttcttttgtagcacttataacaatcagaaatgatgtgtttttcacatttgtttacttctattccakcacctaaaacagtgtttgggatatacttggaacttattattcattaaataagtcatacaataatagtgtttcatattttttttcagtagttttctgttgagaaatagagcagacggctattttcagcaaggtgtacccaccttttggaaaagaaaggaagcataaggatttctttttctggaagatctgaaatccttggcttaaaccctatcagttcagggcaagtaaggaacagtttttgaaatcactggctctgcactgtaagtgacaccttgagctacaggcttaaggctgatatgtttagcttttttt

SEQ ID NO: 513816 - DNA, 391 bp, Homo sapiens
taccctgatttatttcttttgtagcacttataacaatcagaaatgatgtgtttttcacatttgtttacttctattccatcacctaaaacagtgtttgggatatacttggaacttattattcattaaataagtcatacaatartagtgtttcatattttttttcagtagttttctgttgagaaatagagcagacggctattttcagcaaggtgtacccaccttttggaaaagaaaggaagcataaggatttctttttctggaagatctgaaatccttggcttaaaccctatcagttcagggcaagtaaggaacagtttttgaaatcactggctctgcactgtaagtgacaccttgagctacaggcttaaggctgatatgtttagcttttttt

SEQ ID NO: 513817 - DNA, 618 bp, Homo sapiens
tgctcaaagatgttctgcttgaatgtgaggagccagaactacctgggaattaggactctacaggagcagcccttgatttctcgttttatttggaggaacctgtctacaaggacatctttactcccattccatgggaaggaggatgacttatctgattggtgattttggatttagtcctgtcctttctcttcggaagccatttggtcaacaggaagtacataggctggtttcctctgtggcttttggtcaggccctcgggaagagatctggtcaggccaatgtcttcattgaaagaaatatctaattcaaggatgaagtttgtatctgtatatcttgctttctgacttttgcctctatctctcattttgttctgaactcatgaaggaagagggaggtcattaactattttgataaagctgtaacatttggcatttcagaagataaggggaaaaagaataataagaagagggtaaagaaaagggtaaaaaatcagaaaattgtcaaactcgctgaagttaaatccagttgacacttagaataaaataaaatgaaatagaaattatttgccatagcctaaaaggcatatgtacttmtgcacttcatctcccttttctcttc

SEQ ID NO: 513818 - DNA, 636 bp, Homo sapiens
  misc_feature (1)...(636): n = A,T,C or G
ggcaggagaggtgcatgtaagattttctctggggtttaccaaacaaggacaaaaatatgaatgttaatctgacaaaaatgtttgccaaacaactcatttcttttgccatttggtctttgtcttgattgtttcaagactgtttctttttattttcaaaaattcggaaaaccaaaggtcagagmggtttccatttttataattaattgctgagacatgggaactaatggtgacctagaggtgataacctacaagtgtaacaagaatgggttaagtttttatcacttcgcactgtcctgttgttcagtcttgagatggagaatcagagcaagcctggattgggaatgtcttacatcatacactttccttcttcgcttttcatttcacttggcaaaagtagaaccaacactccacattatctgactgggttcacaaagaactcctgtcatggtgtccctttaggagttatctaagcagggaaaaggatgatgaattccaggacagtgattgcatttttaagcaataagcgaatatcaagagacagttttagaaggtagtggtggtagtaggggactcttcctgtgctttgtgaaagtatttgtcttttatnnnnnnnnnnnnnnnnnnnnnnnnnnnnnn

SEQ ID NO: 513819 - DNA, 535 bp, Homo sapiens
agcagcgcttttttgggcggggggtggggcttggaggggtagggcagttagttttcctggttgtcttgcagagtccttttccgtgacttatactccttgctgctcagtgaccctaagggaggagaccagtgagatgmccatggtgagggtatttaaccttccttgtcttggatgcttcctcccttggagggctgtcccgcacagacactcctctgttccttactcctttcttcccctttttattttctctttaacttattccctgtaggtgttctcggtgcccttttgttgtcctgattctatcttgggatgtttcatgaatttctcttccatcctctcatgtatatgaatctcaatccacatattctcttcattaattttgttgatttctctgcttccattgtctgatggatgccaggcttcttcttcccctctgctctattggcattgctgagcaaagaggtgaggaggatcctgtaaatgggtcagcgttgagggcaggagggaaatcataagggatttttacttggtttgg

SEQ ID NO: 513820 - DNA, 535 bp, Homo sapiens
agcagcgcttttttgggcggggggtggggcttggaggggtagggcagttagttttcctggttgtcttgcagagtccttttccgtgacttatactccttgctgctcagtgaccctaagggaggagaccagtgagatgaccatggtgagggtatttaaccttccttgtcttggatgcttcctcccttggagggctgtcccgcacagacactcctctgttccttactcctttcttcccctttttattttctctttaacttattccctgtaggtgttctcggtgcccttttgttgtcctgattctatcttgggatgtttcatgaatttctcttccatcctctcatgtatatgaatctcaatccacatattctcttcattaattttgttgatttctctgcttccattgtctgatggatgccaggcttcttcttcccctctgctctattggcattgctgagcaaagaggtgaggaggatcctrtaaatgggtcagcgttgagggcaggagggaaatcataagggatttttacttggtttgg

SEQ ID NO: 513821 - DNA, 634 bp, Homo sapiens
ctgctccacctcacagcaggaggcttcatcttatggtatatcttccactgggtaagcactactattgatcacaaatatcagggtccactctcattcctagaatgagactactcctcccagcctctttgtggttaggcagggtcagatgactaatcctggccaatgaactctaacttgaggtaccattgtaacttctaggcaaagtggtaaaaaactcaggcacaagcctccagctcttccttcccctggcactgtggactggaatccacatgccaagataacaaagatgttaaaaagaagatgggattcctagatcactgcttggaagggagttgctcagtagagcatcaggacctgaaaaataccatgtagratcaagaaaaaattattcactgcaacaagccattgaggttgcaattttaattcagcctctcctgactcagctcctcctctcccacacctaccactccctgttcctattaggacagcgattgctgcctacccaggcatctcaccacatctgttataacagaaataggggcttcactctcactaaccagcttcctccaaaacccactcaaagaattagggtctgaagtattatcggatcatcggctttgtggtattatctgct

SEQ ID NO: 513822 - DNA, 586 bp, Homo sapiens
tctaggaatctctccttcagtctagaccccttttgccccctttcagcgatgaggttcwtatcttgtgccttctcggttctgtccctttccttttcaagctgcacagacacaccggatagtcctttatacagcacactcctggcacagtgtgcacctcatgggttccactctcgtgcttcacccatctccctttgcagtctctaggactcagctcacttccctcagtcccatcatggagtttagacttcctgattccaagttatcccctcaatcctgtgtgtgaactcctgtgtgtgtctgttgtgggtttgtgtgtatgcgtgcatgcacatgtgtgctgaaagacatcagtccccctattggtcatctctatgaccaataaaataagagattgccacaggaaacctaaggttggatacctgaggctaaggtggggctgggcaaagataagaactagagggcctaagaccaagaggaggtggagcttgggagaggactgtggtgctggaggcaggagagctcagtggcagagaccaggcactgtgcaggcttctgagcctgctggcacccaggattctatcctttc

SEQ ID NO: 513823 - DNA, 584 bp, Homo sapiens
taatatagccatgaaagcagataaatcaaggaagatattctgatgtcatagttagcctatcactaattctaggggccatttctggctatcaacacactaaattttcctaagaattttaccaaagcccagagctctcatgaccaaacacaraaagcctaagctgaaaacatgcaatggtgaaacatacaacattttcatacaccagaaggtgctaagggaggggtcaacagttacaggctgccacctgtttttgtaaataaagtttcattggaacatggtcacacccatttatatacctatgatctatgttgctttcttgctaactttcttctgttagttgtaacagaaacctcttgtcggcaaagtcaaaaatatttattttgtaaccctttataaagaatttttgccacccctctgctacagaaaagataggaaaaaaaaagcaaaatatgaggttacctgagctaaattgctatgctgcagggacctccttaactctggaagcttcaaagctcagattaaaaggatatcacttactgggtatttgagaatctgaagtatttatggtagatatagttttaaaa

SEQ ID NO: 513824 - DNA, 633 bp, Homo sapiens
accacaagctaaccacataaatggcctggctggatcctcgccatcatgtaatccaacccaycgcagagagttccacccctcggggccctatccaggccaatatgccccactcaagaacctcatctaaagcccacacatctatctattcattttccagaagtgatagggaccataaaattaacacttactcggcattcccgacagctcttggttaaaatccgctggccttctgcaagaacttttcctccatagatacattttgctgtaataaaacataaaaatgggtcagacagtcctgctgtgccacaaaatgacctcagaggtaccttctaactccaatagattccacagaaacctagattctctgcttctgagcaatacaaatctctttgtctaaagtgaaaggaattgtgtggaggataacccttaaatctcccaggcagacctcatcatgattgtgtttgcctggcctttacagccaggatatacaattatttcaatgttacagttgccaaaggaactagagaatgaactgatgtagtaagaagctaaaacaagaaagaactggtggcaatcgctgtggagtacagttagcagtagctttgattcagacactccagctaaaatgaactg

SEQ ID NO: 513825 - DNA, 633 bp, Homo sapiens
accacaagctaaccacataaatggcctggctggatcctcgccatcatgtaatccaacccaccgcagagagttccacccctcggggccctatccaggccaatatgccccactsaagaacctcatctaaagcccacacatctatctattcattttccagaagtgatagggaccataaaattaacacttactcggcattcccgacagctcttggttaaaatccgctggccttctgcaagaacttttcctccatagatacattttgctgtaataaaacataaaaatgggtcagacagtcctgctgtgccacaaaatgacctcagaggtaccttctaactccaatagattccacagaaacctagattctctgcttctgagcaatacaaatctctttgtctaaagtgaaaggaattgtgtggaggataacccttaaatctcccaggcagacctcatcatgattgtgtttgcctggcctttacagccaggatatacaattatttcaatgttacagttgccaaaggaactagagaatgaactgatgtagtaagaagctaaaacaagaaagaactggtggcaatcgctgtggagtacagttagcagtagctttgattcagacactccagctaaaatgaactg

SEQ ID NO: 513826 - DNA, 633 bp, Homo sapiens
accacaagctaaccacataaatggcctggctggatcctcgccatcatgtaatccaacccaccgcagagagttccacccctcggggccctatccaggccaatatgccccactcaagaacctcatctaaagcccacacatctatctattcattttccagaagtgatrgggaccataaaattaacacttactcggcattcccgacagctcttggttaaaatccgctggccttctgcaagaacttttcctccatagatacattttgctgtaataaaacataaaaatgggtcagacagtcctgctgtgccacaaaatgacctcagaggtaccttctaactccaatagattccacagaaacctagattctctgcttctgagcaatacaaatctctttgtctaaagtgaaaggaattgtgtggaggataacccttaaatctcccaggcagacctcatcatgattgtgtttgcctggcctttacagccaggatatacaattatttcaatgttacagttgccaaaggaactagagaatgaactgatgtagtaagaagctaaaacaagaaagaactggtggcaatcgctgtggagtacagttagcagtagctttgattcagacactccagctaaaatgaactg

SEQ ID NO: 513827 - DNA, 633 bp, Homo sapiens
accacaagctaaccacataaatggcctggctggatcctcgccatcatgtaatccaacccaccgcagagagttccacccctcggggccctatccaggccaatatgccccactcaagaacctcatctaaagcccacacatctatctattcattttccagaagtgatagggaccataaaattaacacttactcggcattcccgacagctcttggttaaaatccgctggccttctgcaagaacttttcctccatagatacattttgctgtaataaaacataaaaatgggtcagacagtcctgctgtgccacaaaatgacctcagaggtaccttctaactccaatagattccacagaaacctagattctctgcttctgagcaatacaaatctctttgtctaaagtgaaaggaawtgtgtggaggataacccttaaatctcccaggcagacctcatcatgattgtgtttgcctggcctttacagccaggatatacaattatttcaatgttacagttgccaaaggaactagagaatgaactgatgtagtaagaagctaaaacaagaaagaactggtggcaatcgctgtggagtacagttagcagtagctttgattcagacactccagctaaaatgaactg

SEQ ID NO: 513828 - DNA, 622 bp, Homo sapiens
tagtttttaaatggtccacattttgcattaattttttaaaacatattgaagaccataggaaagaactggaaagatttctgagacatctgaaaataatagaaaataatctactttatatcaagaaacattgaacaaaaatgaaataaataaaaaaattctgtggaagaagaaattaattcaacctcatatatttctcagtcaatttattcaataatgaggtcacttgatttacttcatgtgtacatttcaatgaatgactgcatgtctaaaatatattttatacttttttactgagattattcacacttcagtcttcctgttttggtacaaaatattttagacaaactattatacttgttcatgtataactgtcactttagttataaaaawgatgcttaagttaaaaataaaataattttaataaagaagtgtgagaagtaatatataacctctgagtcagtcagaatctagcaaagctttataggtcacattcattaaacattcttacattcactgtcagtggctctaattaagaatgatcatataaaaagatcttttcatttttcttggctttttctagtttgcccaaatcgcaccaattatttcttctatactgttggtt

SEQ ID NO: 513829 - DNA, 454 bp, Homo sapiens
ggaattacaggcatgagccactgttccctgccaaattaaaagtttttgtatgaaaaagatatacacaaagcaaagatacttttacagtatgaaagtgaattataattgagaaaaatatctgcaggccataatagaatagttctatttcaakagtttgcaaacaatttgttagttctgctgaataaaaaaatttccaacacttgttaaaatggttaaggatcactttatttaagattaaaatgataggtgtcaagatgattctaataggaagagagataaggttcaactctgaacacagcaaagatatctgggaagtgcagctaatgagcagagtgaaaggttgtcgatgaatacaaattactaagaggagacatcaagggtaggggatttcttgttagctaacgtaagaggattcttgctgacggcaagccagagtgatcagatatcaagagtg

SEQ ID NO: 513830 - DNA, 507 bp, Homo sapiens
gctgtctgaagatggcagagctaaaggagcactgtaatatgcccactggggcttcaggaatcacaggcacccccccwaaccccaggggctgctatggggcccacatggagtttgctcctgccaacaccccaaagctctcttcctggctcctatacctgctcacctgcatgctctctcctgcaagaggtggaacacagcaggtcagagtgggtgagttcactccttctggcaccaaagaggccactggttccagcactcatgtactccagttcctgccttattcaattacacactccctcccttgaggagttgagagcagtgggctgagtaaatggggcacccctgtcacgagtcccatgaaggggtcagggaaatgccctgcttcaggaggatctcttgagcccaggaggtgaaggatgcggtgagccaggatcgtgcaactgaactctggcctgggtgacagagtgagactctgtcccaaaataaataaataaataatttaattaa

SEQ ID NO: 513831 - DNA, 619 bp, Homo sapiens
tggccatcagagaaatgaaatttcagaaaagtgagccaaaatttctgtgtacaattccctcccaatagtttgttagttctttaaacttctgaacattgttggagagatgaagaatcagtgcagaaaattaataaatggagcaaagatttcagtagtcttatgttacttgaattattaagttggagaagactgtataaatatcccagtccttcagttgagactgatggcagcagcggctcatctggatttgctgctgagggaatgccagctgcagcatgacctgtgaccgagactacatgctctgtggagctggtgggggccaggaacaggaggaagcctcatcccctactgacttggcagggtgggagtcccgcactcctaggcacagctgcagctgtgcagccacagctctggacccaggcatccctgcgcttttagggrcccaggaagcccccctgcccctaaaggcttggaagtgtctgttcctactccctgtttctgctctgatgttgtagtaaagttgaagctaagcccaggcactgtcaggacctgaccaggtgttcatgtgctcagaacagtgcttacacaccagccctcccattgcctcagtctcctcgaa

SEQ ID NO: 513832 - DNA, 619 bp, Homo sapiens
tggccatcagagaaatgaaatttcagaaaagtgagccaaaatttctgtgtacaattccctcccaatagtttgttagttctttaaacttctgaacattgttggagagatgaagaatcagtgcagaaaattaataaatggagcaaagatttcagtagtcttatgttacttgaattattaagttggagaagactgtataaatatcccagtccttcagttgagactgatggcagcagcggctcatctggatttgctgctgagggaatgccagctgcagcatgacctgtgaccgagactacatgctctgtggagctggtgggggccaggaacaggaggaagcctcatcccctactgacttggcagggtgggagtcccgcactcctaggcacagctgcagctgtgcagccacagctctggacccaggcatccctgcgcttttagggacccaggaagcccccctgcccctaaaggcttggaagtgtctgttcctactccctgttyctgctctgatgttgtagtaaagttgaagctaagcccaggcactgtcaggacctgaccaggtgttcatgtgctcagaacagtgcttacacaccagccctcccattgcctcagtctcctcgaa

SEQ ID NO: 513833 - DNA, 641 bp, Homo sapiens
tgctcatatttgtttaagtttaaccttagttgatccactgaaaacaaaatggtctaatttgtcaatgccaggagacatttgcagttctctcgagacttccctaacatcctagaaatctgacactactagctcatgaggccagctactactgtacactcaaatacctcgccctgaagtagcataaataattggccaaatcagaatctaacatcagcactacactggcacacccaggggctttccttgcatgaactcagccccattaaagattttaacccacatcatcagagtaaataacactatgtccagcactagctcacattccataatattcaacttaaccttctctataagtgggatctattgcacctataccaaacaattccctagtttgctcaaaactctcaagaactattcatgagctcagagaatcttagaaccaaaagggtcaactatgtttacagatgaggagtcttagtggttaccccaggtggtgcaggagaagacttcaacctagaagcctgaagatctggctctggtcctggctgagctgttctctagctgtgtggccttggcagtgatttcatcttattgggcctcagygtctaaagtgactgggctgggctgcatgatacttaaaa

SEQ ID NO: 513834 - DNA, 576 bp, Homo sapiens
taaaggacctctctatagtccctaccagttctatgatgttaagaacatgaatagcagaaaggcttttgatgaaatggttttagcctcatggttaaaagtacaggctttggattcagtcacactagggtttaagtctcagctccaatacctaaccttttcttcctcagctctgaaacagggacaaaaatagcccctaccctgaagatctgtcacaagatatacaatgacataatcaacataaaggaaatcagcatggcagctggcccgtgggaagcattcagtaaatgatagctgctatcattatcaccatttttcatttacagtcatttctgaactcttagctcatcatgctaacactgcacagagaggctggtttcccttctcctgactctgcaaaggagactgatttattctgagtagcccttttaaagaggcagaataaaactcaaatgccagggaaggccagtattcttataagtttggtttgggattacatgtaatagcacagtggagaatcttcagattaggagccatctgtactcaccttggggcccatargtatagcccagctttggg

SEQ ID NO: 513835 - DNA, 516 bp, Homo sapiens
tagctgaaagcatggaggcccaggygaacggaaggagcatgacaagggtcggcccgggtcggccccgggcgtcctgggagagcaggaggcaggagaagcggcaggggctactgcaggacccacactgctttcttcctggctttctccagtccactggggctctaacatcttcagagccttcctgcccatgtgattttagaaggaaaatatccttttgcatcttgaaaggcatctcacatgttaatattttgcttaactgcaggtgaggtcttcattcaacaaagtggcaaaggcccaggaaggggactgtttgggagtggtgacacactggtgtagacccttttagccaaaggggaaataggagctgtcctaagttaccactgagggttgcagggcagccccagatggggaggggccggcctgggccttggactccctctccctccacactggttgctggctgggctgcttcctgcagccctgtctacaggatggggcaaatggcaggaccgcagg

SEQ ID NO: 513836 - DNA, 503 bp, Homo sapiens
aaatttaagggtgaggtgaaggagaagggcttaattattatatctccctcragaagaagaaaaacagatacctatctatgcccaagcgcagcaagtctttagcaatccacaccttgagttctttgggggaaaacatgacattttaaggactcaggacatcccacatctttctgaggcccttaatcaaggacttgcattttttctatgcacccgtttggggctggggagccgcagggcttgtaaaaatgaactgtgattactactctggaaaggtctctcatctgactggggagaagggccacacacacaaacaagagcagcaaagcatgtagtgcctgcggaaagagctgctgatggaaagacctgtcaagctcaaagtgcaagggggcaggttttatggcagacagagacttgacctcatcctctcctgagccccaacactgtttactgggctactgagctccttcagcctccctaagcctgactgcagagaggcctcatgg

SEQ ID NO: 513837 - DNA, 503 bp, Homo sapiens
aaatttaagggtgaggtgaaggagaagggcttaattattatatctccctcaagaagaagaaaaacagatacctatctatgcccaagcgcagcaagtctttagcaatccacaccttgagttctttgggggaaaacatgacattttaaggactcaggacatcccacatctttctgaggcccttaatcaaggacttgcattttttctawgcacccgtttggggctggggagccgcagggcttgtaaaaatgaactgtgattactactctggaaaggtctctcatctgactggggagaagggccacacacacaaacaagagcagcaaagcatgtagtgcctgcggaaagagctgctgatggaaagacctgtcaagctcaaagtgcaagggggcaggttttatggcagacagagacttgacctcatcctctcctgagccccaacactgtttactgggctactgagctccttcagcctccctaagcctgactgcagagaggcctcatgg

SEQ ID NO: 513838 - DNA, 574 bp, Homo sapiens
accaatattcagtcaaagagtgaaagaaactttctaaatgctggtcccgccatgactctactgccacagctctggtgcttccagttaaatgatgaatttctcctgcttcccagcaccctgaatatctaagcctttcagttcatttgcaaatgaagattaatttacaatttacatgctagagtcatgtttactgctccagcatacagccatctatgcttgctcagagttgatagaaacagtgccaaaaactgctgtatcactcagggtccctgcaggaaaagacggcacaaattgtgcacctgaaggaacttagtaatgggattatttacacaggtttgggtaaggtgcagggaggggagctagtcacagtgaggagccttargtcagaagggtcaaagggaaggactgtttactagaacccagagagaacagctattgggagaaggtccctcccaggagtggtggctttcagtagagggacaaaaccaatccaacaaccccttggcctattaatgcacgacacataagcagatagaaaagggtaggaactggacctgaagggcaggtggaaaat

SEQ ID NO: 513839 - DNA, 600 bp, Homo sapiens
agtgcctgtagtcccagctactcgggaggctgaggcacgagaattgcttgaacccaggaggcaaaggttgcagtgagtttagatggtgccactgcactccagcctggggagcagagtgggactctgtctctaaataaataaataaataaataaatatatrgtctttttggtgattctgttacctgagttaaatgctttcaaaatgccacttctccaaagagcacctggtgtatgaggatgttcactctatcattgtggaagcagagaagatttctgattggattcccttagtatcttacaaattctcaccctttgctccagattccatttggccattttctgggctggggactctcaagtgcgactgattccactgggaattttgagatttatgttagcatacggcatgtgagtgcatgccctggccactgtcatactatttctgcatcctcttctctctgactaggcctctgggcacccaaaggtcatctcagaaagtgcatattttctcactggtgtaagcagaaacgcctatatccattcacactgtaggtaggccatgtgcacctaggtgctgggctttagaatctgacgaagcct

SEQ ID NO: 513840 - DNA, 479 bp, Homo sapiens
ggctctcctccttacaaacagacgctaagctccatatcctggcataaaggacctttggtgatttggcccctgtgcagctcttgggtcgcccccaactctcaaatctgctctgtgccccggagatatccttaacacacctgcttgctcccaccctgagcctggcagttcctgctctccaccatgtttcacttgcacccaccttcaaatctcagagtgggaaacagctcccgaacaagaggaaaggcctaagccccagtgttggctctgccattgataagtcacatgacatattgattatacaatccttgagccccaactcatatgtaagcaaagagaggactttaaactgatttcagttttggaatacttaaaaaaaatcagaaatacaaacttcgtacaaatgtgtygtgaaaggtgcagtaacaagtcgtagccaccagagagcactagaggatctcattcagcacaagcgcggggct

SEQ ID NO: 513841 - DNA, 654 bp, Homo sapiens
ccagggactggtttcatggaagacgatttttccatggacggggtgttggcagggagatggatggttttgagatgagactgttccacctcagatcatcaggccttagagtcttataaaaagcatgcaacctagatccctcacttgcacagttcacaatagggtgaatgcygctgctgatctgatgggaggcagagctcaagtggtaatgctcatagtggtctttggcccgggggttggggacccctgctctacattatctacttttatagataaaagctggctaaaactttatctaaattccacatctagaatttccatggagaagttgatctggttattcccttaccaccgttacccccattatcagccagtggttgtcaggggaacagataaaatttcccaaactgacaattgagattcacaaaatatattacatctcatttgtttttatattgagatattaaagggaaaatcatagctaattaaaaacacccagaaagcaaatagattattaaccaaaacaacaacaacaaaaaaaagccaccactttctcctggcatctgttcattcactagtacacattcaacttgacatatctgattttttgaaaaatgtgggaaggataccacataaatgacatctatgtgttttctg

SEQ ID NO: 513842 - DNA, 654 bp, Homo sapiens
ccagggactggtttcatggaagacgatttttccatggacggggtgttggcagggagatggatggttttgagatgagactgttccacctcagatcatcaggccttagagtcttataaaaagcatgcaacctagatccctcacttgcacagttcacaatagggtgaatgctgctgctgatctgatgggaggcagagctcaagtggtaatgctcatagtggtctttggcccgggggttggggacccctgctctacattatctacttttatagataaaagctggctaaaactttatctaaattccacatctagaatttccatggagaagttgatctggttattcccttaccaccrttacccccattatcagccagtggttgtcaggggaacagataaaatttcccaaactgacaattgagattcacaaaatatattacatctcatttgtttttatattgagatattaaagggaaaatcatagctaattaaaaacacccagaaagcaaatagattattaaccaaaacaacaacaacaaaaaaaagccaccactttctcctggcatctgttcattcactagtacacattcaacttgacatatctgattttttgaaaaatgtgggaaggataccacataaatgacatctatgtgttttctg

SEQ ID NO: 513843 - DNA, 425 bp, Homo sapiens
tgaagatgttggctaaaaaagaggtgatacctgaactaatactatttctgaaagggatactgatttaggatgtcttgggaaggagygactgaaaacttctcccctccttcctccccctagacatgggatattgacttgctcacagagttgattttataatcttcttcctcaggtttcacttctacaaaactcattttgtcagaaacggagctcttgaagtttcatttttaggctaatagcttttccaagaagcaagatcttgaggaaccttgtgatatggatgaatcactgatttgaagggcaattagagagtccttttatagtgagggcataccaactccagaattaattgtggagcggatatcatacaaaagactatgcaatgtgcaggggtaatcactccaaggaaataagtttataacacg

SEQ ID NO: 513844 - DNA, 608 bp, Homo sapiens
gcttagcacagtgcctggcacacagcaattactgaataaacagaagctagcatttttgttactgttattattactacacgtattttgccagccacactgaaaatgtgtggaacccttctggaaaatcagtaggataaattcacataaagagtcataaaaagatttatttctacttctcaagatttcttataaggaataattcaatagaggcaagaatcaatgtgtaaattgcatttggtaatattatttccaataaccttttggtttaggcagagaagaatagctatccaacagctttctccctgaaaaacatggaaactggagccagaaactagcaactggtaagtttttttttcctaaaacactggaattgtttartgatcagtagtcaggccctgaagtaagtctgttttagggcttttaaacctattaatatctaccctgtgtgagttaagggagcacgctgcttttcatagggtggtatatattagtagatgcataataagtctattttgatggatgtatctgtttatactgaagatttcattagataaattatgccctataaatatgagataattgcaaaccttatctgatactaatactca

SEQ ID NO: 513845 - DNA, 608 bp, Homo sapiens
gcttagcacagtgcctggcacacagcaattactgaataaacagaagctagcatttttgttactgttattattactacacgtattttgccagccacactgaaaatgtgtggaacccttctggaaaatcagtaggataaattcacataaagagtcataaaaagatttatttctacttctcaagatttcttataaggaataattcaatagaggcaagaatcaatgtgtaaattgcatttggtaatattatttccaataaccttttggtttaggcagagaagaatagctatccaacagctttctccctgaaaaacatggaaactggagccagaaactagcaactggtaagtttttttttcctaaaacactggaattgtttaatgatcagtagtcaggccctgaagtaagtctgttttagggcttttaaacstattaatatctaccctgtgtgagttaagggagcacgctgcttttcatagggtggtatatattagtagatgcataataagtctattttgatggatgtatctgtttatactgaagatttcattagataaattatgccctataaatatgagataattgcaaaccttatctgatactaatactca

SEQ ID NO: 513846 - DNA, 639 bp, Homo sapiens
atacctatgacaattgggtcaataggtatgtatcatacatgtatatattttgtgtgtgtggcacataattctcataggtgttagcaatgattggtatgcagcacacacaatatggtagtggatgcttatggtgctattgacacaaatgacattcagaaagataacttttccagttcagacaatggtgattatagattccttcatccagggaaaggcacaaagttgatgctcagtggatgcccattacttgactaagatacgaacatcctttggaagccaaaataaatggctatatgagacttagagtcacagagacacattggtgcaaattttatggacttcctatgtcacagtgaggcagattctgcagtggtctagggtgagtgggccccagggagggaccaggaaggatgagtggtagatagctccattctcaagcctggctaaggccctgaataaagatagagagatttccaggaagagctatccctagatgtcttcctgtataaacaggccaaagattattattaagaaggaattgagtcatgatgaaaccagtataccttattttgatgatgactattgcattcaacaaatattgaggacttactacrgccctgcactattcttggcattggg

SEQ ID NO: 513847 - DNA, 535 bp, Homo sapiens
ttattaaatattgtaggtctgtttagaatgtcaccaacacatgcctttttgggaaaagaaatccagaagagaaaatgtaagccctttaaaatgacaacataccgtgtaaagaagataaaccattagaaatttgattacgctgacttttttttttttcatttctgaaaggggaagaaggtcttgattgtttttgctgactatagaagcaagacctacttctaatcgtgtttcttactgatgaagtctcagaggacagtggaggagatcgatcttatcatgatagaacttcctttttgatttgattgatacagaaaagctgcagcctgttggaggcttaaaacagccttcagaatatacatcaaacatctccttggcccatatggtgcctctgagttgcaggctttgargatttctttaaacacctctcctccttttccaggctctgtgtccacatcagaatgctctgcatccccatcagaacgttgtgtaccatggagaaacaatataaataaatcatgtaataaaatgacctttc

SEQ ID NO: 513848 - DNA, 621 bp, Homo sapiens
gccgactgtgaagctttatttttctcttcttagagctgagtgacgtctctttaatggttttggaatgactgttgccaactctttttgataatttttgttttgtttctctcaactgggatatttcttctcacctgggtgatttcccatcttaagaatttttcggctaatgtatgagggtttttttttttttttttcttgattgcctggaacagacatcaacttgtgttagctcactcacaaaatgaggatctagtgtaaagatggagagattgtgcaatggaagtgtaagcagaaatacagcgagggctcaggaaatactagaataggcaacatgctcttcctctctgcttctatctgcacatctgctttatttctttgcctcagcagactcaccatctctgctcctcatcccgcatggtggggaaggatgcccacccacasctccccaggccatctgttagagctccaaccacgtggaatgacggaatccattctgttctctatctctgctctagtttcaaattcctggggaaaaatgacccagctcacttcaggctcccactcttggtccagtgggctgcaaaatttccaagcgtagcttctgtcagttccttgctttgg

SEQ ID NO: 513849 - DNA, 621 bp, Homo sapiens
aaatgaacttgtaattctgtagataacgggggaaattccccagattgagtggagacattttgtttaaatgtagctaatgtttaaaataattaccttcttaagaagacctatactttcttctggagcatggtggtgtgtccttcacttggatttcacagattataaatgacctgataatgaacccagtatgagaaacagttgaagattttttttctccctgggttgggttgggggcagagggaatgggcttttgatcatttttgagtctcaaaattgttccatgtaggttagccatttcaaaagccaaaaaacccatctttttggataaacaatatccagtaaataaccctccactcttatctttaaatattgacaccaaatcctataaaaaaaactctgttatttgtaaataaaaggtacattggttcaaagggtcaaagtggagaaacatcataacragtcaagtgtccatggcataactttgaataagatcacttttataccatccaaagccattggatttcaagcagactgctaaatttaaccacagggaattgttaacattctaccatttttctgacctacaaaatgacaatttcctagggttgaaataacagatga

SEQ ID NO: 513850 - DNA, 667 bp, Homo sapiens
ggtcaggagtgctgcatcactgaaagtgtgcaggcagtggtgggggcggagtgagtggggcttgcctagatgagccccaggctaccacccacmacacttcctgagactgggactctagaaagcccaggttacgccaagtggcctctgtgcatgtaagagagagagagaaaatatatgtgtgtgtgtgtgtgtgtgtgtgtgtgtgtgtgtgtgtgtgtgtgtgtgtgtggagtggcaatgggaatgaataccctcttttccagtccccactgcagggctagagtgggatctagagaagacttgtcaagagactggggagtgttctttgtgaagatgtagtaactaaacttggtagttcctcctaaaagccagttgatcctacccatctaccggtctgtccatcccatcattctcagtggtttactgaggacctacagtgtgccagggtctgtgcttggcacagttagaggcgtctcttctccccaaagtaagcaagatgcatgagttagatggtgtatgtcatccttcttattagagtcgcaggaggtcacagaggaaggacccttactggacgccaacacactacatttcacaaatgagaaatgaagcccagagagggggggatgaccctgcacagcgcccaggtgcaaccttgagtgcatcgggc

SEQ ID NO: 513851 - DNA, 562 bp, Homo sapiens
ctctagaaagcccaggttacgccaagtggcctctgtgcatgtaagagagagagagaaaatatrtgtgtgtgtgtgtgtgtgtgtgtgtgtgtgtgtgtgtgtgtgtgtgtgtgtgtggagtggcaatgggaatgaataccctcttttccagtccccactgcagggctagagtgggatctagagaagacttgtcaagagactggggagtgttctttgtgaagatgtagtaactaaacttggtagttcctcctaaaagccagttgatcctacccatctaccggtctgtccatcccatcattctcagtggtttactgaggacctacagtgtgccagggtctgtgcttggcacagttagaggcgtctcttctccccaaagtaagcaagatgcatgagttagatggtgtatgtcatccttcttattagagtcgcaggaggtcacagaggaaggacccttactggacgccaacacactacatttcacaaatgagaaatgaagcccagagagggggggatgaccctgcacagcgcccaggtgcaaccttgagtgcatcgggctgggggg

SEQ ID NO: 513852 - DNA, 622 bp, Homo sapiens
ccaaagtaccttatagatttgggaaatactgattccttactgattcccccagtcgttaatataatatcccactctgccactaatttgatgctagaataaatagcacagcacctaaggaaaagtggtgatcctgtgaactgaatgagaacaaagtagggaagctactgagttttacactaacaaattcacagactactaaagggtcattctgatagcaaagtaaaaatcactttggtgatagtctcacaatatgtcatcacatcgtgtataagaaagattatcttatactaaaaatatgaatagttggctctgtcactaacttttgacctcagtttcaagatctgtacatgaaggataggagacaaagccctctcattcagtaggtttttctatttcagcctctatttctatttctgatgcttcaaggagygtaagagagagaaagaaaaagaaggaatgaaagagggagaggaagagaaaaggagacattggttagcttagagttgaaaacttggtataaaattgaattgaaggctcaagttttttttacctgggaaagtaaactacattcctgatgtgtaaaacaatcttcctgatcatcttagagctgctctaagtaaga

SEQ ID NO: 513853 - DNA, 622 bp, Homo sapiens
ccaaagtaccttatagatttgggaaatactgattccttactgattcccccagtcgttaatataatatcccactctgccactaatttgatgctagaataaatagcacagcacctaaggaaaagtggtgatcctgtgaactgaatgagaacaaagtagggaagctactgagttttacactaacaaattcacagactactaaagggtcattctgatagcaaagtaaaaatcactttggtgatagtctcacaatatgtcatcacatcgtgtataagaaagattatcttatactaaaaatatgaatagttggctctgtcactaacttttgacctcagtttcaagatctgtacatgaaggataggagacaaagccctctcattcagtaggtttttctatttcagcctctatttctatttctgatgcttcaaggagcgtaagagagagaaagaaaaagaaggaatgaaagagggagaggaagagaaaaggagacattggttagcttagagttgaaaacttggtataaaattgaattgaaggctcaagttttttttayctgggaaagtaaactacattcctgatgtgtaaaacaatcttcctgatcatcttagagctgctctaagtaaga

SEQ ID NO: 513854 - DNA, 421 bp, Homo sapiens
tgcacttcagcctgggtgacagtgtgagactccatctcaaaaaacaaaaacaaaaacaaaaaacacggtgtctctccattgcaacatactcactacctgtcagtgcttggcagagtatttggtatgtgggaaaaacactcaacaaatattcattccctttgcttttcccctaaagrgctttctatcccaacttgttggataaaagttattctccccattttaaaactatgaagaataatggccagagttggactatgaattgttcaaagatcaaatacaagggacctgagttgcattctgtaccttagcaggctaagccacctgctctgatacctgtggcaagcaggaaacaggttctggaggactaacaggattttggcctcttttttcaagtgaagacaaaatggcctcgccggctgac

SEQ ID NO: 513855 - DNA, 421 bp, Homo sapiens
tgcacttcagcctgggtgacagtgtgagactccatctcaaaaaacaaaaacaaaaacaaaaaacacggtgtctctccattgcaacatactcactacctgtcagtgcttggcagagtatttggtatgtgggaaaaacactcaacaaatattcattccctttgcttttcccctaaagggctttctrtcccaacttgttggataaaagttattctccccattttaaaactatgaagaataatggccagagttggactatgaattgttcaaagatcaaatacaagggacctgagttgcattctgtaccttagcaggctaagccacctgctctgatacctgtggcaagcaggaaacaggttctggaggactaacaggattttggcctcttttttcaagtgaagacaaaatggcctcgccggctgac

SEQ ID NO: 513856 - DNA, 421 bp, Homo sapiens
tgcacttcagcctgggtgacagtgtgagactccatctcaaaaaacaaaaacaaaaacaaaaaacacggtgtctctccattgcaacatactcactacctgtcagtgcttggcagagtatttggtatgtgggaaaaacactcaacaaatattcattccctttgcttttcccctaaagggctttctatcccaacttgttggataaaagttattctccccattttaaaactatgaagaataatggccagagttggactatgaattgttcaaagatcaaayacaagggacctgagttgcattctgtaccttagcaggctaagccacctgctctgatacctgtggcaagcaggaaacaggttctggaggactaacaggattttggcctcttttttcaagtgaagacaaaatggcctcgccggctgac

SEQ ID NO: 513857 - DNA, 597 bp, Homo sapiens
tatccagttcacccgccatgccagtgatgttcttctcaaccttaatcgtctccggagtcgagacatcttgactgatgttgtcattgttgtgagccgtgagcagtttagagcccataaaacggtcctcatggcctgcaggtgagggatctgaaaggaaagggtgggtaagtcaaagtggggtgatggtgctggcagccaagcaaggcagaacatgtgggccttttactgcatctgggatgacgtctcgctttgtctccagatctcagcaccatggcgtggcacagtaggctcccaagtgaatgaatgaatgaatggatgaatgcacttttagaaaagaaagagccaygttctgtgggcatagagggagaaaaattatatactgccccaagaaaggatgtgtttggggcagacatggagaataacttcagttaaccagtgaaaaaatgagaaaagatttcaaatgaactttctttgtctttaagtagcttaagcaagttaatttgaaatgttttgctcttttatgctataaatgtatttattttttgctacaactgaatttccatgggtgttcagagtatatgcaagagttagtgagag

SEQ ID NO: 513858 - DNA, 663 bp, Homo sapiens
tgctaagtggcacagctaggtttgcaaaccaggtctggctgctctagaccagggattcatacattggcatttgctgcctgttctttatgtaaactttcatcagcatctgggacaagttctttcttcagtaggctactcgtttgtgtatgatcctccaaaagtgtcataccaacattgtataaattcttttcctgtttccctatgtgtaaaatggagataataataaccacctttccttcctttcaggattttgcatgggtgaagtgagataagggctttgaaagttttatgtgagctataaaatttcataacatcagaagagctatagattcacacacatgcatagatatgtgccttaaacatacaagattatgtctaatcaggcatagatcatgccggaaactcacttcccttctctgggmctcagtcttcccaatttcaggctggatttccaggcttctagcataaatgcgttgtaattgtggttccctgctccagagccacgtcacctatgtctagctaattcaaacacagatgtggttatataagtgtcactggaaggtcatctatttaacagttctgatttggggccggtgtctttcctctttttttctttcacagtgaagcagagatggtttctgccatcaagcctcctcgtgaaga

SEQ ID NO: 513859 - DNA, 529 bp, Homo sapiens
tgttctgatagtcactcagactacagcctttctcagcaaattaatactgccttactacatctaattagttattgataactgattttcttcaattttgatggggtactcccctgcgactctgttaatgtatttcaaattatactgagatttcttgtgagataagaacctcccattagcttgccgttcccaaagtcttccatttctagtactcagtgcccatgaactctcaaatgtctttttagttctagtatccaaattcctgawgagatattttccatttttttctgttttgttttaacctaatactcgaatttgtcataattaacttttctaatataaaacacctttataaagggatttctctgggtcctcaacagaaaactactagcgtgaggaaagaactttggagtaagattgagattagtccaaattcttgtttcaaaacctaccagatgtatgatattgggcttattacttaaccttgctttgcttcagttttttacctgtaaaatggagttatctatagcta

SEQ ID NO: 513860 - DNA, 400 bp, Homo sapiens
cggagtttcctcccccgcgacctactcactcacccaccctgcccaacttccagccccttgcggctctgagcagctttgggagagaacacacggtgtttaagtggctgcccactgccctcatgagcctgctgcctgcccggcctgtccccttggggagggaggggatatgtcacactacacttctggcctcacctcagccaatatctycccggggaggtcgccgggcaggggcagacagcattttcaagcagtcacatgccataccgagcaggggtctccccccaccaagcattccttagggaggaaaagctgcatcccagttgtccacttggttcctcttggggtgctcgtgctggcggcagcatgcatgagactccaggaatcccaagtatgcaagatc

SEQ ID NO: 513861 - DNA, 495 bp, Homo sapiens
tgcaccaacatataattgtgctcctgtcataaaacatccataggcaaatggagcagtttattatctgtaaccttggaatgaagcggcagcttaaagactccataggttctttggcgagagtgaaatagcgcccaggaagtactggagtcaatgacacatatcgctcagaggattagaacttgcctgcaaaaatagcttttgaatcagagtttaagagtgagtggcagtaatcccaattttaccaagttcagtttagttgaaaagtgttggactagtgagtgacctaagtttcagcccctaattaatatgwcttgttatttatgtggttgtgtgacctggaacaatgctttcacttaagggcactaatccctttcataagggtaccaccctcatgaactaattacctcccaaaggccgaccttcagatactgtcacattagaggctaggagtttaagatatgacttttaggaggacacagacatttagtccgtaac

SEQ ID NO: 513862 - DNA, 495 bp, Homo sapiens
tgcaccaacatataattgtgctcctgtcataaaacatccataggcaaatggagcagtttattatctgtaaccttggaatgaagcggcagcttaaagactccataggttctttggcgagagtgaaatagcgcccaggaagtactggagtcaatgacacatatcgctcagaggattagaacttgcctgcaaaaatagcttttgaatcagagtttaagagtgagtggcagtaatcccaattttaccaagttcagtttagttgaaaagtgttggactagtgagtgacctaagtttcagcccctaattaatatgtcttgttatttatgtggttgtgtgacctggaacaatgctttcacttaagggcactaatccctttcataagggtaccaccctcatgamctaattacctcccaaaggccgaccttcagatactgtcacattagaggctaggagtttaagatatgacttttaggaggacacagacatttagtccgtaac

SEQ ID NO: 513863 - DNA, 585 bp, Homo sapiens
ggcacacacctacagtcccagctactcaggaggctgaggtaggagggtcacctgagcctggggagattgaggctgcagtgacctgtgattgagccacagcactccagcctgggtgacagagcaagactctgtcaaaaaaaaaaaaaaaaagaaaaaaaagaaaagaaaagaaagcaaatagaccaccaaacaagataattataaatggtgataagtrcctctaatgcactaaaatagagagttggaggagggggggttggcaggggtggcctcctggaggaggtggtgtttatattgatcctagaaaaatggccagatctgaggaagaacattctaggcagagacttgggggtggcaaaagaatcggcgtgttaggggaagagaaaggaggcctgggtggtagagactagtgagcgtggcggggagaagtgcaagctgcagagacgagttgtgcagaagagcttggtcaatggaggccgtgcacagggcgaggggctatttttctcttaacaactatggggagtcttgggggcttaagctggggagtagcatcatcagattttccctgtttgaaacccagtccag

SEQ ID NO: 513864 - DNA, 534 bp, Homo sapiens
cagttcaatgtgactcaagaacaagaagaaagaagaatgtatgaaggggagttctaggaaatcccttgaaaagtaattggtcatggaaacatggatttaaaaaaggaaagtaattgggatcaaatcaggaaaagtctttgatgcagtttgaatatttgtacccactcaaatctcatgttgaaatgtaatccccaatgttggatgttggaggtggggtctggtgggaggtagtcggatcatggggatgaattcctcataaatggtttagtgctatcccgttggtgctgtccttatgatagtgagttctagtgggatctgaccatttaaaagcatgtagtatctccctacccttcacttgctcctgctttcaccatgtgacatgyctgtttctccagagggtacaagccataaaccttggtggcttctacatggtgttaagcctgcaggcatacagagtgcaagaatgaagaatgcttggcacccttcacctagatttcagaggctgtatgagaaagtgtgggtgttcatgcagaa

SEQ ID NO: 513865 - DNA, 534 bp, Homo sapiens
cagttcaatgtgactcaagaacaagaagaaagaagaatgtatgaaggggagttctaggaaatcccttgaaaagtaattggtcatggaaacatggatttaaaaaaggaaagtaattgggatcaaatcaggaaaagtctttgatgcagtttgaatatttgtacccactcaaatctcatgttgaaatgtaatccccaatgttggatgttggaggtggggtctggtgggaggtagtcggatcatggggatgaattcctcataaatggtttagtgctatcccgttggtgctgtccttatgatagtgagttctagtgggatctgaccatttaaaagcatgtagtatctccctacccttcacttgctcctgctttcaccatgtgacatgtctgtttcyccagagggtacaagccataaaccttggtggcttctacatggtgttaagcctgcaggcatacagagtgcaagaatgaagaatgcttggcacccttcacctagatttcagaggctgtatgagaaagtgtgggtgttcatgcagaa

SEQ ID NO: 513866 - DNA, 494 bp, Homo sapiens
ccaaacgaaagtttcatggaaggcagaagagcatagtggtgaagcccactggtctctgccaattacaactgtgtgaccttgrgcaagtcacttaaattttgtaacctcaatatcctcgcctgtaaaatagaaatagtaatggtacctccctcacagaattactgatgagatccaatgagaaaagcatatcaagtctccagcatgaggtctggcacatagtaggtgctcagtaaatggtaccaagctatgccatagtcatggcctagtggtctgggcatggaggtgcaggagtaggcctgaaagagagccttgtgctggtggtttatagggaatgatggggctctggctggcagtggcagtggcagtgggggtgctgaggaaggtctctggggagtcctacagccctgcctttcttctcctcccagggggctttctgcctgtgtccccagttcttccctagacccaagccctcctctctgatgtctttttaggat

SEQ ID NO: 513867 - DNA, 494 bp, Homo sapiens
ccaaacgaaagtttcatggaaggcagaagagcatagtggtgaagcccactggtctctgccaattacaactgtgtgaccttgggcaagtcacttaaattttgtaacctcaatatcctcgcctgtaaaatagaaatagtratggtacctccctcacagaattactgatgagatccaatgagaaaagcatatcaagtctccagcatgaggtctggcacatagtaggtgctcagtaaatggtaccaagctatgccatagtcatggcctagtggtctgggcatggaggtgcaggagtaggcctgaaagagagccttgtgctggtggtttatagggaatgatggggctctggctggcagtggcagtggcagtgggggtgctgaggaaggtctctggggagtcctacagccctgcctttcttctcctcccagggggctttctgcctgtgtccccagttcttccctagacccaagccctcctctctgatgtctttttaggat

SEQ ID NO: 513868 - DNA, 494 bp, Homo sapiens
ccaaacgaaagtttcatggaaggcagaagagcatagtggtgaagcccactggtctctgccaattacaactgtgtgaccttgggcaagtcacttaaattttgtaacctcaatatcctcgcctgtaaaatagaaatagtaatggtacctccctcacagaattactgatgagatccaatgagaaaagcatatcaagtctccagcatgaggtctggcacatagtargtgctcagtaaatggtaccaagctatgccatagtcatggcctagtggtctgggcatggaggtgcaggagtaggcctgaaagagagccttgtgctggtggtttatagggaatgatggggctctggctggcagtggcagtggcagtgggggtgctgaggaaggtctctggggagtcctacagccctgcctttcttctcctcccagggggctttctgcctgtgtccccagttcttccctagacccaagccctcctctctgatgtctttttaggat

SEQ ID NO: 513869 - DNA, 494 bp, Homo sapiens
ccaaacgaaagtttcatggaaggcagaagagcatagtggtgaagcccactggtctctgccaattacaactgtgtgaccttgggcaagtcacttaaattttgtaacctcaatatcctcgcctgtaaaatagaaatagtaatggtacctccctcacagaattactgatgagatccaatgagaaaagcatatcaagtctccagcatgaggtctggcacatagtagrtgctcagtaaatggtaccaagctatgccatagtcatggcctagtggtctgggcatggaggtgcaggagtaggcctgaaagagagccttgtgctggtggtttatagggaatgatggggctctggctggcagtggcagtggcagtgggggtgctgaggaaggtctctggggagtcctacagccctgcctttcttctcctcccagggggctttctgcctgtgtccccagttcttccctagacccaagccctcctctctgatgtctttttaggat

SEQ ID NO: 513870 - DNA, 630 bp, Homo sapiens
cttgatgccactgtgattgcctaagctaatctaaatattgctttcatctttcttcagtctctccttgtggrtattttactgctgatgaaaaattatcttatttgtggccaacatatcttcacaatgaaaaggtgaaaaacacaacttgaacacagaataatccctgcaccaagcttatctcagggttgcaaccactcactctcaacagtagtgaagcactattttggctccatttgtctgtttcatttccccacatgctaatctgatttattccctgtttatagtaagatttctgatatttaccagagaaagagagaacactacatcgaaacccagaaattctgtaccactctcaatatacttcatttatcctaatttttagtgggatttcatgtctaaggaagtcttttgtcttatttctgtatcttgcaccatagtccgatgctggctgtataatgcatatttttcaagaataaccatggatctaaagacgttaatttctagtgtgtatttttcttcacgttcctttgtctgtttctccattccaagccacctgctttaagcttcatcaaaatcaatcccccaaaaaacataaattctaaaattccataaatcagtctgaaatgatga

SEQ ID NO: 513871 - DNA, 630 bp, Homo sapiens
cttgatgccactgtgattgcctaagctaatctaaatattgctttcatctttcttcagtctctccttgtgggtattttactgctgatgaaaaattatcttatttgtggccaacatatcttcacaatgaaaaggtgaaaaacacaacttgaacacagaataatccctgcaccaagcttatctcagggttgcaaccactcactctcaacagtagtgaagcactattttggctccatttgtctgtttcatttccccacatgctaatctgatttattccctgtttatagtaagatttctgatatttaccagagaaagagaraacactacatcgaaacccagaaattctgtaccactctcaatatacttcatttatcctaatttttagtgggatttcatgtctaaggaagtcttttgtcttatttctgtatcttgcaccatagtccgatgctggctgtataatgcatatttttcaagaataaccatggatctaaagacgttaatttctagtgtgtatttttcttcacgttcctttgtctgtttctccattccaagccacctgctttaagcttcatcaaaatcaatcccccaaaaaacataaattctaaaattccataaatcagtctgaaatgatga

SEQ ID NO: 513872 - DNA, 630 bp, Homo sapiens
cttgatgccactgtgattgcctaagctaatctaaatattgctttcatctttcttcagtctctccttgtgggtattttactgctgatgaaaaattatcttatttgtggccaacatatcttcacaatgaaaaggtgaaaaacacaacttgaacacagaataatccctgcaccaagcttatctcagggttgcaaccactcactctcaacagtagtgaagcactattttggctccatttgtctgtttcatttccccacatgctaatctgatttattccctgtttatagtaagatttctgatatttaccagagaaagagagaacactacatygaaacccagaaattctgtaccactctcaatatacttcatttatcctaatttttagtgggatttcatgtctaaggaagtcttttgtcttatttctgtatcttgcaccatagtccgatgctggctgtataatgcatatttttcaagaataaccatggatctaaagacgttaatttctagtgtgtatttttcttcacgttcctttgtctgtttctccattccaagccacctgctttaagcttcatcaaaatcaatcccccaaaaaacataaattctaaaattccataaatcagtctgaaatgatga

SEQ ID NO: 513873 - DNA, 497 bp, Homo sapiens
ttaaacactactcttagatttcaaaacaacacacaccttatttttctcttctctagctgatctttcctagattattttgtaaccttcttttcctcagcctgtccttaaattttcattttccgtatttgacagcctgagtgatctacagaccagcaacactggcatcacctgggagcctgtaacaaaagtcgaatctctgatcccaccagtgtcctacattttaacaagatgtcaggtgattcctatgcacattcaagtctgagaagcaatggtctatagaattcaggctgggcccactctatttctgactgttcactcccacactccaactactacccatgagcccattaactgtcaaatacttatctccagtctagatttttctaggcatcagatctacacagccctctccctcctgcaaatcctcatttgtatgccctataacaatatcaaactcatagtgtccayagctgagccttcttccaacaagcctgatc

SEQ ID NO: 513874 - DNA, 504 bp, Homo sapiens
accaagttcacacctgtgttccaacgctggggacgggagaggcctgcaaagagaggtcctcctcaacgccccctctctagtctattggccataaatgggtcacatggctacaggggaggctggaaaagtgactgcgatgtttcagcctctatagtgggagactagaaaggcagaggctccgtgaatgactatgagtaaccaattattagaaamccctaaatacaccgtcagtatcactgcctaaacttagaattgtccttttccaaacctgtgtctgtttaagtgattatagctaacattcagtaagtgcttgctataggccaggcagtgcttcaaatgctttatgagtattagttcttaatatttacaataactctgaggcaagaggattattctagcaatcgtacaagtgaggacattgaggctgatcaaggttcaaacacagggaacctgaccctggatcccacactcctagccacagaacaacactgcctctcaaggaac

SEQ ID NO: 513875 - DNA, 420 bp, Homo sapiens
gaggaatctacgtctggctggagggcactgtacacacaggatggcccttgtgcaaactcaacttccttcaccccattctggcaaaacatggtcagctctttctcagctttgataattgtcctagggaatagtctccgccaggagaggtggtggggagacagccagcaggtttctattagccaataagcstctcacaaaggggaaggtggtcgtgggcacatggaactgagtgtcgcaatcatcctgctgccaccatgctggagcagcttagagatccacctgagtgagccagaggcgagccgcaggaagggtactgcagagatgttcatgcaaatgcagggtgatccccaggtccctataccaagcagcaaggtgcctctgacaaatgttgcttaatattttttaagcaaatcaacaaac

SEQ ID NO: 513876 - DNA, 696 bp, Homo sapiens
ggctttctcatttagcactaccctaaatcctgtgaggtggttattrgcatccttccattagatgaagaagctgaggttcagagacgttaagcatcttgtccaaaggcagttgctcttaaatggaaaaactaaaattcctatctggaactctctgaatcccatgctccttccactattcacagtgcctctcaaacagaagaaagtaaaaaaggggagaaactgaagaagtcaaaacccaggattattcagaagtacggaattaaccatattttgggtaaatatgtgttttccagccattggatcaaccatgatgtgattcaaactggcttttatgaaagccaaagataccagatggaccatccttcaatctggtgtttttgtcatctaaacatggttctagaaatcaaaacaaatagaaacatgaaaagcatttttttaaaatatgggcaatctctattctagaataaaggcaaagaatgaaaaaataattatcaaaaccattcctagaatagacagggcctattttaacatttaaaaaggcagacacccgtccagtttccttccgcaaatagtcaccaatcactacttctgctgagtacagataaaaatacctgatgtggttttccaaagggcttctcacagtatttggcctattcaacctttgcatctgccttccctcttggctcctgacttttg

SEQ ID NO: 513877 - DNA, 597 bp, Homo sapiens
ctactgcaccaagaccaacactgtgactgaaaaacctctcagtttcctgcaaagtgaatgtgstaaattctcttcacattccccacctgcctcacactcagagctgtgtgtcagactgccctagcccaattctgagctccaacactcactagctataggggcttgagaagttccctcatcttttgtgagcctctgcttctcactaaaatgcagccagggctaataacttcatcaaaggattgttgtgaagatgaaatgagcaatgcatgcaaaggcatgactccgtgaccagcaagtaataagtactcagtaattattcctgggtctccttctgccctcacctgaatcctgagagtgccaggcagtgcacacagacaccactggccccaagctctatccagtggcctttgagcttggcttcctttgcagaccagagtaaagaagggaaacggttaggtgaactagcctctgcattgagttcctggcggggggactctcacattggtgattcaaccatttataggactccaagttcaggggagggccctctttcattcccagccccctgggatgagatcttacggggatgagcctaga

SEQ ID NO: 513878 - DNA, 592 bp, Homo sapiens
ccaacactgtgactgaaaaacctctcagtttcctgcaaagtgaatgtggtraattctcttcacattccccacctgcctcacactcagagctgtgtgtcagactgccctagcccaattctgagctccaacactcactagctataggggcttgagaagttccctcatcttttgtgagcctctgcttctcactaaaatgcagccagggctaataacttcatcaaaggattgttgtgaagatgaaatgagcaatgcatgcaaaggcatgactccgtgaccagcaagtaataagtactcagtaattattcctgggtctccttctgccctcacctgaatcctgagagtgccaggcagtgcacacagacaccactggccccaagctctatccagtggcctttgagcttggcttcctttgcagaccagagtaaagaagggaaacggttaggtgaactagcctctgcattgagttcctggcggggggactctcacattggtgattcaaccatttataggactccaagttcaggggagggccctctttcattcccagccccctgggatgagatcttacggggatgagcctagaagaaaatcc

SEQ ID NO: 513879 - DNA, 597 bp, Homo sapiens
ctactgcaccaagaccaacactgtgactgaaaaacctctcagtttcctgcaaagtgaatgtggtaaattctcttcamattccccacctgcctcacactcagagctgtgtgtcagactgccctagcccaattctgagctccaacactcactagctataggggcttgagaagttccctcatcttttgtgagcctctgcttctcactaaaatgcagccagggctaataacttcatcaaaggattgttgtgaagatgaaatgagcaatgcatgcaaaggcatgactccgtgaccagcaagtaataagtactcagtaattattcctgggtctccttctgccctcacctgaatcctgagagtgccaggcagtgcacacagacaccactggccccaagctctatccagtggcctttgagcttggcttcctttgcagaccagagtaaagaagggaaacggttaggtgaactagcctctgcattgagttcctggcggggggactctcacattggtgattcaaccatttataggactccaagttcaggggagggccctctttcattcccagccccctgggatgagatcttacggggatgagcctaga

SEQ ID NO: 513880 - DNA, 597 bp, Homo sapiens
cctgggatgcgttgccatctctacttgcagcctcttgtatagattaatttgatctttatctttggcctctttctggagccaaatcaaatccttgtaactttcaaataatcttgccccaaatgcattgcttccataaatgtttgtctgatagatcttaccaagatttctttctcccacagttttctccactcaaatatatcatacttcatttatgacagcatttcccaaaatgtgcactatggaataaatatataatgtagaaaatataagaattctatgattgagcaaattaagaatattccrtagtacacaaagttaaaaatgtcttttcagtagtaattcccagagcctataaaaatgcaaatgtgctttgtgactctcaaagaatatgtgagcatttcttagttttccatggaacttcagaagattcattctgtcacgaggcaagatttgcttgccttttaaaaaatgtatatttgtagtctccaatatttttgataattgttttcaaccatagatatgttgcagaaaagagaggcatagacaatcatagggtcatcaacttttcattttgcaaagatcattaaaaagcaaaat

SEQ ID NO: 513881 - DNA, 653 bp, Homo sapiens
tgtgtgtcagactgccctagcccaattctgagctccaacactcactagctataggggcttgagaagttccctcatcttttgtgagcctctgcttctcactaaaatgcagccagggctaataacttcatcaaaggattgttgtgaagatgaaatsagcaatgcatgcaaaggcatgactccgtgaccagcaagtaataagtactcagtaattattcctgggtctccttctgccctcacctgaatcctgagagtgccaggcagtgcacacagacaccactggccccaagctctatccagtggcctttgagcttggcttcctttgcagaccagagtaaagaagggaaacggttaggtgaactagcctctgcattgagttcctggcggggggactctcacattggtgattcaaccatttataggactccaagttcaggggagggccctctttcattcccagccccctgggatgagatcttacggggatgagcctagaagaaaatccagctgtaagtgcatggattctcatggcgctttaggatgcactgaacagaaagaaaatgcttataaccagggggcgatacataaacaggtgggtgttaggaagactgatgagtggcccagaacatgaactctttcttcagaggttcataaaa

SEQ ID NO: 513882 - DNA, 592 bp, Homo sapiens
ccaacactgtgactgaaaaacctctcagtttcctgcaaagtgaatgtggtaaattctcttcacattccccacctgcctcacactcagagctgtgtgtcagactgccctagcccaattctgagctccaacactcactagctataggggcttgagaagttccctcatcttttgtgagcctctgcttctcactaaaatgcagccagggctaataacttcatcaaaggattgttgtgaagatgaaatgagcaatgcatgcaaaggcatgactccgtgaccagcaagtaataagtactcagtaattattcctgggtctccttctgccctcacctgaatcctgagagtgccaggcagtgcacacagacaccactggccccaagctctatccagtggcctttgagcttggcttcctttgcagaccagagtaaagaagggaaacggttaggtgaactagcctctgcattgagytcctggcggggggactctcacattggtgattcaaccatttataggactccaagttcaggggagggccctctttcattcccagccccctgggatgagatcttacggggatgagcctagaagaaaatcc

SEQ ID NO: 513883 - DNA, 653 bp, Homo sapiens
tgtgtgtcagactgccctagcccaattctgagctccaacactcactagctataggggcttgagaagttccctcatcttttgtgagcctctgcttctcactaaaatgcagccagggctaataacttcatcaaaggattgttgtgaagatgaaatgagcaatgcatgcaaaggcatgactccgtgaccagcaagtaataagtactcagtaattattcctgggtctccttctgccctcacctgaatcctgagagtgccaggcagtgcacacagacaccactggccccaagctctatccagtggcctttgagcttggcttcctttgcagaccagagtaaagaagggaaacggttaggtgaactagcctctgcattgagttcctggyggggggactctcacattggtgattcaaccatttataggactccaagttcaggggagggccctctttcattcccagccccctgggatgagatcttacggggatgagcctagaagaaaatccagctgtaagtgcatggattctcatggcgctttaggatgcactgaacagaaagaaaatgcttataaccagggggcgatacataaacaggtgggtgttaggaagactgatgagtggcccagaacatgaactctttcttcagaggttcataaaa

SEQ ID NO: 513884 - DNA, 556 bp, Homo sapiens
ctgcttgatcagggctagcgtgaatgtcttagttgatttgatctgatttccccaatacctggcaaagtgactgacatatggtgagcgggtcacagttgagcgaatgaatgagtcttctaccaactgaccaacaaataaactaaaayaaaaacaacagggaactctaagagacaataccctgctgccatgtgaccaatgtgaagcgtagtagacaaagtaggattgtcatatttttcaagacagacgtgtactgcagcaccatttataccaaaaagtttgaaacaacctatgccctcaacatgagactagagaaattaattgtaggatatttagctgtttaaaaggaatgagcaagatgaatatcaacaggagggaccttagaaacacggttgaagggaaaaagcaaattgcagaatggttgtgcatcataatatttttatataaaagtaaaaagaacaggaagcaactctacacattttgtgtaaaaataacaaaacaacgatatacattttctcagggaatagaacatagatgcaatttaattatttgaattaaa

SEQ ID NO: 513885 - DNA, 554 bp, Homo sapiens
tgaaaaaaaaattttatggcatgtaagattagcccacactaatgcaaggtcaaaaataatagaatcaataggcaaactcaatactgttaacattttgagaaaattactaccagaaaacaatgtcaacaacagattgaaatgggtctccaaagtcgtcccattgatttcctttaactttggtgacaatctaactctttcttttatgcaatatggaatgttttagccttcttttcccccagctctgctttaaacacagaatatttctgttgtactctttttgactgatgtyaaacattacgtgtgtcagaaaaacgtatatggttgtccatatctaagacaactgaatatgaaaatttattccatcatgtggagcctttcatgggtctttaatttagggctcagttgataaattcaagagttattttaattatagcaaggcatccaaatgcaaatgtaaacagtgtcattaataaattatcaactaagtaaaaaccaaataatggaaacacacggacttgaacatagttttatatcaactatattgcaagcattgt

SEQ ID NO: 513886 - DNA, 596 bp, Homo sapiens
tgaaaaaaaaattttatggcatgtaagattagcccacactaatgcaaggtcaaaaataatagaatcaataggcaaactcaatactgttaacattttgagaaaattactaccagaaaacaatgtcaacaacagattgaaatgggtctccaaagtcgtcccattgatttcctttaactttggtgacaatctaactctttcttttatgcaatatggaatgttttagccttcttttcccccagctctgctttaaacacagaatatttctgttgtactctttttgactgatgtcaaacattacgtgtgtcagaaaaacgtatatggttgtccatatctaagacaactgaatatgaaaatttattccatcatgtggagcctttcatgggtctttaatttagggctcagttgataaattcaagagttattttaattatagcaaggcatccaaatgcaaatgtaaacagtgtcattaataaatkatcaactaagtaaaaaccaaataatggaaacacacggacttgaacatagttttatatcaactatattgcaagcattgtcatcacccttgatgtttgaaggagagtttacagtttggcaga

SEQ ID NO: 513887 - DNA, 676 bp, Homo sapiens
tgctcatttgctgtggcgaagaggcctcagggttagaagggaccgaactgctcagcctttaatgtttttgcaaaattatcttgttgacaagtgcagcattataaatttgaatccattagctaaaaggatccataaatatttgaataatggcctttttagattttcwccagtctatcaaacttgtcacatgtccacttcttacatttttttctactgctgaaaagaaaagaactgaactaaatcttatgggtggtttctagacatgggtattttgtccttgctttcaaaatggaaatgctttgctgaacagaagttgattaaccaaaccacaccagtgtgtatttggcagtaacggcagaaggtgtactatccactaacattttccttcccagtctacgcagtggcatctggccagcagggctccgtttcctggccttccatgcaggaacatcccagtgatgagctctggccaataaaacttgagcagatatgacctaagtcacatgcaaggagaggttttatggaacccatatgtctgctctgctgtctctttttctcattttcttgctagaaatggagaactctggggaagtgaatgatggagccataaactagaagtaacttggaattttgaaacacctcctgaagtcaagcgagccacatgcgaaccatgaac

SEQ ID NO: 513888 - DNA, 547 bp, Homo sapiens
aggcttcaaggctaatgctcttaagccataaatagggcagattcgctaagaaaaaggaatacaatgggctaagatgctcgaatcttaggtattgggtattttaacctcatcctcccctccactgtcaatattctaagactttcctgactgctaattttcagggagccaggaaataaaatcccttcacagagtgaaaacgcaagagttacattgtcaagaaaaaatggctaaggtaacacataggccagaaatcatggcaagtagatgctaacccaagcctataatttgctcataactaagagttttaatcttgagatcaaagtaaaatgccatgatcaaagtcaaaggaatgcgactgaggagaagaatgtaaagtaatctcaaagaccacgaaggcaagaagaaagtatgccccaattagaaatcagatgcagtgcaggttgcagtgtggttggctatacacatgggaatggccactgggggagaggagggaacattgacactsaaagatttaagacaggcaggaagaaataagcatgtgggcttc

SEQ ID NO: 513889 - DNA, 647 bp, Homo sapiens
gatagtagtgaagtcaggattcaaacccagtcccatctaaccccggagtcaacgatcttgaccatggtggcttttcacctcccataaataccatgcaaaagtaatttaagtcattagagtgactatgtatttgagcatgagcatgagcagcgatcatcaaaagcatttgtcatagagaagcaagcagattcacaaagcactgcttagtaaattatccacaggcacatgaaaaagctttgttacaaagaatgcttaaacatctggaattttacttccacgaccaactgaaaaagcgaattattcaggcttccaacactaaaatgatgcttctctgatcacatagattagctacaaagccaaatttggagaagactgaatttttaaagagtatcttggaagaagaaagaaaggagacaaacaaggacgctttaatgccaraattagggctactgtcctcacacagaacaccccaaaatctcaaggatcagtttgcagacttgaccagctccaagaagccacatggataaaatagggttgggaggatttggaaaataaagcttggaatccaccagcttgtgacagaaggaagaaggatgtatttacttggataaagagagttcaaaacaaaactccgaaaaaattacaaa

SEQ ID NO: 513890 - DNA, 647 bp, Homo sapiens
gatagtagtgaagtcaggattcaaacccagtcccatctaaccccggagtcaacgatcttgaccatggtggcttttcacctcccataaataccatgcaaaagtaatttaagtcattagagtgactatgtatttgagcatgagcatgagcagcgatcatcaaaagcatttgtcatagagaagcaagcagattcacaaagcactgcttagtaaattatccacaggcacatgaaaaagctttgttacaaagaatgcttaaacatctggaattttacttccacgaccaactgaaaaagcgaattattcaggcttccaacactaaaatgatgcttctctgatcacatagattagctacaaagccaaatttggagaagactgaatttttaaagagtatcttggaagaagaaagaaaggagacaaacaaggacgctttaatgccagaattagggctactgtcctcacacagaacaccccaaaatctcaaggatcagtttgcagacttgaccagctccaagaagccacatggataaaayagggttgggaggatttggaaaataaagcttggaatccaccagcttgtgacagaaggaagaaggatgtatttacttggataaagagagttcaaaacaaaactccgaaaaaattacaaa

SEQ ID NO: 513891 - DNA, 628 bp, Homo sapiens
atactctatgtgatacattacccattccattaattgttaacatacacgcaagtcaagatcttttattatgcgaggtcatcagtcagtgataacagagatattgatgaattagtctcctcatcagaagttgagcaacatttccattcaagatgatacatggacctttaaaacatactcaataatattgagtctcagtcttctgttgcttttttctgaatgtgcatttagacctttacacatctatttagtcatccattcattaaacattcagcattaattttctactcatagcaccagaaccgtgtttgtcttattcaccattgtacccttactgcaaggacctagaacatagtaggatctcaataaattcttaggattcaaaataaatgaatgaggatgtggtaggaagaattctaacatggcccccatgacattcatctcctgatgttactctgttaataatgttaccttacatggaaaaggggtcttgaagatgtaactaaggctaataattagtcaaccttaagacagggagattatgtggattaattttgtgtattaatcaattttacayaagaattttaaagtcagagagataagcatgtaaacatctctagataagagccca

SEQ ID NO: 513892 - DNA, 628 bp, Homo sapiens
atactctatgtgatacattacccattccattaattgttaacatacacgcaagtcaagatcttttattatgcgaggtcatcagtcagtgataacagagatattgatgaattagtctcctcatcagaagttgagcaacatttccattcaagatgatacatggacctttaaaacatactcaataatattgagtctcagtcttctgttgcttttttctgaatgtgcatttagacctttacacatctatttagtcatccattcattaaacattcagcattaattttctactcatagcaccagaaccgtgtttgtcttattcaccattgtacccttactgcaaggacctagaacatagtaggatctcaataaattcttaggattcaaaataaatgaatgaggatgtggtaggaagaattctaacatggcccccatgacattcatctcctgatgttactctgttaataatgttaccttacatggaaaaggggtcttgaagatgtaactaaggctaataattagtcaaccttaagacagggagattatgtggattaattttgtgtattaatcaattttacacaaraattttaaagtcagagagataagcatgtaaacatctctagataagagccca

SEQ ID NO: 513893 - DNA, 616 bp, Homo sapiens
gctgaaattacatatactgcatatattttattgtgagtgctctctttcagcatctgcaccaaggcaaattatagaaaattgttacatctgttcactctagaaaatcttcaaggaaaacaatccaggccacccttcaagaacatttcttttaagagagagggacattctttctcaagacctgcagctttgttgtgccacattttctagtgttggaaagaagatggttcctgggctttgtgagaaacttggaacaggagcaaggatgatatttcatatctctcccctaacttacctttgtaatgatggattcggtatgttaccagaaaaccctgacatgcgcacaatgcattgtaaactcctcatttactatttaayttatccttctttagatgtgatttgaactggaaggagcatttgtaagcaaacacatagtgtgcagccactgggtttatctaagcaaataatctgcagaacattctttttgaaggccaggttaaaactaaaacatgacaagagaaaacaggaacatcttcagcctactgcactttgcaggtagaatagacctctgttaaaatagcagtcttgttgccacaattcattctcacaaaacactgtg

SEQ ID NO: 513894 - DNA, 629 bp, Homo sapiens
ctgacctcaagtgatctgcccaccttggccttccaaagggctgggattacaggcatgagacactacgttggactctattccttcttttattcgtcatatcttcatttatacaacaaacatttattgagcacctactatgtagtaagttcttcttgcttttaagtatagtcagaagttttttcagtgagcatgtattatctttatgatataatcaaacaaatcttaaagttacttccatcttaggaaaactaaataataggcacgtgactgaccgttcttcagtcaccacatagccagactctgtgtgtgaggaagaggaggagcccaaagtcagactctgggaagtaaggcattttcagccacacytgagagccacagaagagttgtgtgagaaaaccctggagatgtttcttgtgtgaaatggaggaaaataaaacccatcctgcacactggaaaagctgcctaagccccttttcctctagtctttcatctgttaaatggggataatgatactttgtgtttacctacctcccagaggcattatcaggtctatttaaaggctcttccgatgaaagctgctgtgtaattaccaagaacagctatgataaagacacctaaatacaacagca

SEQ ID NO: 513895 - DNA, 611 bp, Homo sapiens
ctccttgttatttcttattttgcatattagtgtattctcccttttttcttaatcaaattagtcagytgttggtttttgttaatattttcccataaccaaaatttcaatttattaaaagtgctattggttttttattctctgccttcttaatttctgatcattactgggactaggtgaggggtacataaggctttgctataccagtatgtatgcatttcaaaattctccataataaaaacgtaaaaaatttatatatacacacagtataaaagcaaaagcatatacaagcatttatataaacaaacattctactaacctaccccacccttccatctttagccccacttctttccaatcatttacacttttaggtcttttgctggttatctctataactaaacatatatttaataaaaatgtaattaaaaactacattataattagtactttatcaactttagaaaatattgattctttgctaggaaacatgtggatttagctcatttgtactgtcctactttactcccctatcccaatatttgaggttatgatgttcagttctttggttgattatctttgtaagctgcaaaacttgtatttatccatctaat

SEQ ID NO: 513896 - DNA, 514 bp, Homo sapiens
ctgaattcaatgcttaccaatgtactatgtttccagagacgtcattagtctacaataatttgtgagcaattatacccaatatttgctggagtatgctggtttgaaactattgttttgaaggtcttcaacctgttagatcaattctccacctagcagcaaaatgaccttctaaatatataagtaggatcacagcacattccttcctaagctccttcaatggctttccattgttccttccataaaatctaaatttcttatcatggcctgaaaggccctacatgatctggtatctgccctgcctgttacaacttccrctttttattcactttgctcagcaatacaatgtcctttccctttcttgaaattgacaatctgttcacagcatcagggattttacacctgatattacctgtaactggaagaatcttcatctttcttttcttttggttaatttgcattcatcttttaaccctcagcttacatattttactttcagagaagacaccgttgacta

SEQ ID NO: 513897 - DNA, 604 bp, Homo sapiens
tgactaactcccaagagtggccagggttggacccaccaagcaggatcacctttcggggtcgagagatcagaactactcagctcctgaagtcacaaaacaacccgggccaaaggygtgggatgggaagtgtgatgcttgggctggaaggaggacagctactggtgaggtcagcaagttcctctgagaatgctccctcttcccaccttagtactgattctgtattagagtgatctgttagttgcctgcctgtgagttccttgagggcaagggccatgcttcattcattcattccacaaatatttattaagaccttcatatgttagaaacagactttaataggggtgaggcccagtcagccctcctagagcttccagtgtgtagggaggtaggcagcaagaccaggcagctctagtaaagtgtatcaaatgctgcaatggagaaccagcaggctgcctcacttatccccaacttgggacacccagagaggcttcctgcaagtgaagtctaagatagtgacgaacgaatcaatcaaaggggagtagggaggactgtttcagacacacaaaatgacacatgcaggcctttggtaggaacagaaaaggta

SEQ ID NO: 513898 - DNA, 518 bp, Homo sapiens
ctgctgcccgagctctgtaccttcgtggtgcgcgtgctgttctacctggggcctgtctacctagctggctacctggggctcagcataacctggttgctgctcggcgccctgctgtggatgtggtggcgcaggaaccgccgcgggaagcttgggcgcctggccgccgccttcgaattccttgacaatgaacgcgagttcatcagccgcgagctgcggggccagcacctgccagcctgggtgagccaagccgggtgggagtgggaggtggggagatgcctttcgaggttcggaggaacttgcggtcagcggggagctggtgcgcgcaaacccgaggcagggcgggagcccggcgacctgcacaccccgttccccaccgctcccggcgcgcagaccctggggacggtgaccgcccctcccgcggcgcgcagcaccctcacgtccacctctggtccgactgcggtgggagyggggaacttgggtttcatttaaggccccagagctcgagagaagagtcacgg

SEQ ID NO: 513899 - DNA, 582 bp, Homo sapiens
tgataatgttaatgagaaaaaaatgctttaaataggatatcagaaaggtccagaagaagaaaatagtacttcagtattcacaataattgtttcttaagtaattgcaagataatacaacaggaaaaatattttgagctagttacagtgataactgagccctagatcaaccagtttctagccatgtaaacttsgaaaagccacttcccttttatattatttattcacttataaacaagacacaaaacctactttccctacctcacagattgataatacagaatatgtatgtgtatacacatacatgtacacacgcacacactctacataatgtatattatatacaattatacataatagagcaaataatgagaatataaatattcaaatataaacatttataataaatacataatatagtgttttaaatataacttaaatagaatatatttctataatatataaaacaataaaatatgtagtaatcatatatgttatactagacttcattttatatatggaatattctgaaggtagatattttatataattatttatttttgttatatttatatattgaatatt

SEQ ID NO: 513900 - DNA, 301 bp, Homo sapiens
ttcaatagcacaattacatatctttaaaacarttttatacctgtagctaagctatagttgtatattttcttttaatatcatctttcctataactgaaaaagtcattaaaagaagaaaagattattgtttttgtttcaatttcaaagtaatcaaaactaagtgtactagtattaaatagttaaagctagtagatcaataaggaaatttaatgttattgcttttttctatctttttttgagtttactagtgatgtaaaagatttgagttatttgctgtgattatataaatactcttttgatgc

SEQ ID NO: 513901 - DNA, 518 bp, Homo sapiens
ccttcgattgacaccataatgaagctgaacacaccaagccttgttctttgtccaaagtgcacatgcccatagctcagtcccagccctccaaattataattatttgtttatgtgcttatctttactatgggattatgagtttcttgaaaacaagaatgtcattatattagtctctgtaactacagctcaacatgggggctggcaaggctcagtaccacataaatatttcatgaatattactaaactcattttctatcttaccttagttcatgcttcagtgaaatctcagataaaactctcacttctgtgttttttagaccagctctgtatctcacctgccctwattctatccctcctttcctttctttcgcttcttaggagtcataaaatcaccaaatgacaaaaagctgacaaccctagaggcacaattaagcaaagagcagcaagcccatggtaattcctcaccatgaccccagccccaagccctagacctaataggtaggctttgagctgaaacag

SEQ ID NO: 513902 - DNA, 235 bp, Homo sapiens
caaatataccactccagaatgctaaatactcttcccaaacacaggtaaacataggtggagtcaacagtcaggcatgtctgccctcaatgacaaaacagcactctgagctttggttggtacagattccctgcctggaatttaataaatattgtgggctctgtrtaccccaacattttaggaaaatctttttgtttagaaaactgttagttgaaggtcaaacacacaagaaagcctt

SEQ ID NO: 513903 - DNA, 608 bp, Homo sapiens
cattaatataaattatcatgatcattgattcaaacgtttgagtacctactcagtgccaagcactgtgataaccaatacaacacaagcaagaaaataaaaatggttcaaaagaatggagttgtttagcagagacataagtatgggaggctaaatggaagctctgaataggctttgaatacaaaagtgtagcggaggcagctaccttaatattgtgttcacagcacagtggggctcattggtgctcagtccttgtgtgcacagtcaccagcatgggagaactcagaatgctgatgtgaagttatgacttccagagcctgtcattaatagaagtggagcacctcccatcatcctgggatgcatgacaatgttaacattgttgtttcactggcatctcctctccagaaaatgtcgagttataattcactcaagsagagctatttagctgcccttcttctttgttctgttgtctgtgttttgtcattatgtacattcaattaagattgatatctgaactaagagaatctgagttctcaccaagccccaaagagaaattactcactgtgaaccaaagtactatggctccattatgttctgagggcaagtggcag

SEQ ID NO: 513904 - DNA, 599 bp, Homo sapiens
ctttggtctccacaatcctttatcttaacccaaayattctttctatagatcccaggtctttagataaactgaaccagttgtcaactagaaaacttttaaatatacctataagctggaagctcccacttcaagttatcccacctttctggaccaaaccaatgtgtttcttaaatgtacttgattgaagtctcatgcctccttaaaatgtacaaaaccaagctgcatcccagtcaccttgagcacatgttctcaggacctcctgagggctgtgtcacaggccatggtcattcatatttggctcagaataaatctcttcagataatttacagtttgactttttttgtcaacccaaagaatcctgttctctttgcctgaaacacttcctccctcagcttatccttcgattcacaaccttcatatcacttcctctgggaagccctacttctgccctcaccctagtcaagccaggcctcctgtgacactctcacagcacatttcacagttctcacaggcacaggacaacaccagactggaggcaggtgattgaatgttcaaatcctagcactcccctcactgactgtaggaccatgggcaaattt

SEQ ID NO: 513905 - DNA, 599 bp, Homo sapiens
ctttggtctccacaatcctttatcttaacccaaatattctttctatagatcccaggtctttagataaactgaaccagttgtcaactagaaaacttttaaatawacctataagctggaagctcccacttcaagttatcccacctttctggaccaaaccaatgtgtttcttaaatgtacttgattgaagtctcatgcctccttaaaatgtacaaaaccaagctgcatcccagtcaccttgagcacatgttctcaggacctcctgagggctgtgtcacaggccatggtcattcatatttggctcagaataaatctcttcagataatttacagtttgactttttttgtcaacccaaagaatcctgttctctttgcctgaaacacttcctccctcagcttatccttcgattcacaaccttcatatcacttcctctgggaagccctacttctgccctcaccctagtcaagccaggcctcctgtgacactctcacagcacatttcacagttctcacaggcacaggacaacaccagactggaggcaggtgattgaatgttcaaatcctagcactcccctcactgactgtaggaccatgggcaaattt

SEQ ID NO: 513906 - DNA, 599 bp, Homo sapiens
ctttggtctccacaatcctttatcttaacccaaatattctttctatagatcccaggtctttagataaactgaaccagttgtcaactagaaaacttttaaatatacctataagctggaagctcccacttcaagttatcccacctttctggaccaaaccaatgtgtttcttaaatgtacttgattgaagtctcatgcctccttaaaatgtacaaaaccaagctgcatcccagtcaccttgagcacatgttctcaggacctcctgagggctgtgtcacaggccatggtcattcatatttggctcagaataaatctcttcagataatttacagtttgactttttttgtcaacccaaagaatcctgttctctttgcctgaaacacttcctccctcagcttatccttcgattcrcaaccttcatatcacttcctctgggaagccctacttctgccctcaccctagtcaagccaggcctcctgtgacactctcacagcacatttcacagttctcacaggcacaggacaacaccagactggaggcaggtgattgaatgttcaaatcctagcactcccctcactgactgtaggaccatgggcaaattt

SEQ ID NO: 513907 - DNA, 599 bp, Homo sapiens
ctttggtctccacaatcctttatcttaacccaaatattctttctatagatcccaggtctttagataaactgaaccagttgtcaactagaaaacttttaaatatacctataagctggaagctcccacttcaagttatcccacctttctggaccaaaccaatgtgtttcttaaatgtacttgattgaagtctcatgcctccttaaaatgtacaaaaccaagctgcatcccagtcaccttgagcacatgttctcaggacctcctgagggctgtgtcacaggccatggtcattcatatttggctcagaataaatctcttcagataatttacagtttgactttttttgtcaacccaaagaatcctgttctctttgcctgaaacacttcctccctcagcttatccttcgattcacaaccttcatrtcacttcctctgggaagccctacttctgccctcaccctagtcaagccaggcctcctgtgacactctcacagcacatttcacagttctcacaggcacaggacaacaccagactggaggcaggtgattgaatgttcaaatcctagcactcccctcactgactgtaggaccatgggcaaattt

SEQ ID NO: 513908 - DNA, 638 bp, Homo sapiens
cactacaaaaaagtagtgttgtttctacttcgttttattctcttccaaatgctatccacctggattttactttcaagtttggaattttaaaacacacagacattctggccaggcgcagtggctcacgcctgtaatcctgtaaaagggtcaggcagccctgacgtatgagaaccagcctggcactcgcagcttcgccctggtggaggtgttactattgaatagaataatctcgcagaacactaacatcagagaaggtcacctgtgtgactgtgctgaaataggaccaaaagtaagtaaactttaaaaaaaacaactsataatcgtttctaagtagtgacaaatccaagatcatcatacaaaccacaaaaatcaccaaatatctcctgctcccggccagtaagagtgagggccgaattcccacagcccccaggtgcgtgtttccctcgcggcgaagagtaacaactctagttctgcggaaccacatgtgtgtgcctggtgctctctggctgcacttgtaacagccaacctcacaaaagctgaggccttttgaaactcaaaactgccaagctgaacaccacagtttttctttttatctaccatcacaggagtctagcccaccactttaaaacctttagcac

SEQ ID NO: 513909 - DNA, 576 bp, Homo sapiens
tctctgtcttgcagttggatcatcatcgctgccacagtggtttccattatcattgtctttgaccctcttggggggaaaatggctccatattcctctgccggccccagccacctggatagtcatgattcaagccagttacttaatggcctcaagacagcagctacaagcgtgtgggaaaccagaatcaagctcttgtgctgttgcattgggaaagacgaccatactcgggttgctttttcgagtacggcagagcttttctcaacctacttttcagtaagccgaggggatctggtttggtctgtttcttctgtttcagtaaatgcttctgatggagccggtccctctgttcccataaaaccgcgtttgagaacctggtgtctttgggtgtgtggggggtggccggagaccctctgtctgtgatgagccctccagggagcagttaactgcaagagccacaccttctcagaccctgtgtcccaataggacatgtcttcgtattgacacccaytcactaccctgtcaaaatgctggattagcctgtaaggaaccacataacggacgctgtaccctttgaga

SEQ ID NO: 513910 - DNA, 622 bp, Homo sapiens
tgaggccagggtctattcctgatgcctctgaagacctgagccaggcctgtcctcctttgaggggaaatgtctgatctccaaacactggccttaaagctcttctcttttcctgtctctttgctacctacgtcagcttcttgatgcgttttcttttcctttttatgaaactccttaccaacaggatgccttctcctgtgtacattgtatccaaggtcttcataaatttatggacccagaattgaaaaaccaaggctcatacctataattccagcacttcaggaggccgaggtgggaggatcgcttgagcccaggagtttgggaacagtctgggcaacatatggagaccttgtctctacaaaaaatttaaaaattagccgggtgtgctggcatgcacatgtggtcccagctacttaggaagctgwggtgggaggattgtttgagcccaggaggtcaaggctgcagtgcgttaggatcacaccactgcattccagcctggaccacaaaacaagaccctggttcagaaaaaaaaaaaaaaaaagattaatctctcagcacttggtcagttcctgaaacctaggcatgtttgattttttgcctctttaaaacatccaagcgcaaacct

SEQ ID NO: 513911 - DNA, 537 bp, Homo sapiens
agatgctcaattagtaattcctctatcccaacctcctgcctgggaaaggaggctcaacattatattattttttttcctagataataaaaggcattttaaggttagggaccaaaatatctttcctaaaatctgatatggtctacttgaacagtattcatggaaatcaagcttttccatttaaaaagacagagggaaaaaaatatctgcaaaatacctttcaatgtttgctgtgcttgccatgaggaatctgagatttgaagacacatttgtaccattttatcttttactgtcctgctagtgcggtagtatarcagcatcaaagtaacatgataccagagaatgaccatttgaaatgagccagtttctccaacttacatttctcaggaaacaccattgcctcacttttataccttgtgtgtgaggatgggcggggaagcattggccaaggaacaggttcactttgttctctcgtgttatgagccaactgggacagaagggtcaatttgaatctcctctccttcgaagtcaaaatggcgc

SEQ ID NO: 513912 - DNA, 459 bp, Homo sapiens
aactctgtttttaaaaacagaaatcttttataggaacaggctttttgtagtcagttaatttttaaagctgttttaaaagttgagtgacacagcatattttaaatagactttttatagagcagttttaggttcacagcaaaagcatatttttatagaaataaagttatataatttagtcrttggccttattagcatgttgtgatatgacttggctacagttagtatatttttttaaatgtacagtaattttttgatgatttagggtggcacgattcatcctgttagttactgccgttattttccctgggggcctctgtcgcccaagccgctctctgatggtgcccttggcctttcagccacggatatgggtgtcccctcccctggagaacagcagagtgatgggggaggtgggacagggttggggtgtcccaggtgagtcctggagtaaagtcagtaaca

SEQ ID NO: 513913 - DNA, 278 bp, Homo sapiens
tgtatatatttatggagcagtcatgggtgtattttggagacacttctggatgtaataagattctgttactgataattcattttctgtcttcctgcactcctcactaatatgtcccagggtgttaygggttaaatcacgtccttccaaaaattcataggtttaagtcctaacccccaggacctgagaaaaggaccatatttggaaacagggtccttgcaaatctaattagtaaggtgaggtcacactggaggagggtgagccctacatcagtatgactg

SEQ ID NO: 513914 - DNA, 278 bp, Homo sapiens
tgtatatatttatggagcagtcatgggtgtattttggagacacttctggatgtaataagattctgttactgataattcattttctgtcttcctgcactcctcactaatatgtcccagggtgttatgggttaaatcacgtccttccaaaaattcataggtttaagtcctaacccccaggacctgagaaaaggaccatatttggaaacagggtccttgcaratctaattagtaaggtgaggtcacactggaggagggtgagccctacatcagtatgactg

SEQ ID NO: 513915 - DNA, 580 bp, Homo sapiens
caggaggtcgagaccagcctggacagcatagcaagaccccatctctacaaaaagagattaaaaataaatttaaataggaaaaagagaagaaccccaaataggaaaatgagcagaaracatgaacagatgatagatggaagaagaaacccacaggttaacaagcatatagagaggcccaaattcatccataagcagataaatgaacattaatcagtaaaattgtatcactctggacctaataggctggcaaaaattggcacattgaatgatgccaagggtggtcagaagggggtcctcaggcaccccaggtgggagtatgaactcatgctattgttctgaagaataacacagcactgcttagctacactaaagaaaggtgctgatatggtttggatttatgtcccagcccaaatctcaggtcaatttttttttttttttttgagatagagtcttgctctgttgcccaggctggactgcagtggcatgatctcagctcactgcaacctccatctcctgggtttaagcaactctctgcctcagcctcctgagtacctgagattacaggcatgtgccaccatgc

SEQ ID NO: 513916 - DNA, 646 bp, Homo sapiens
aacaaattgttttatattcatacaatggcatgtatagaaataagaacgaaaaaaattaactgccagtatttgcagcagtaggaataaggatcacaaacataatgttgaatgaaaggaataaaacacaaaaaagaatgttatgsatatggttcaatttacatgaagtacaaaaagagacaacactaatttatgttgttataactcaggagagtggttgccactcagagttaacagtgactgggaagtttctggggctggtaatcatctatttgcgaatctaggtgaatttattttgtgaaagcatattaactggtgtgtatacttttctgtatatgtattatacttcacaaatagctaaatgatatcacaatagtgaaagcagtccacataatcatgaataatcatatatttaataaacagttaaaataaatgaggtaaagttctatttactgatgcaaatataactctaaaggagtgctagctttaaaaaatagaataataaatacaatagcatagcatacataattcaattttaaatgtatatatatgcatacatttatttaaaatatttttctgatatacaatgaactgataaaagtggttatacctctagagaaataatattggtaataaattaagatgatat

SEQ ID NO: 513917 - DNA, 646 bp, Homo sapiens
aacaaattgttttatattcatacaatggcatgtatagaaataagaacgaaaaaaattaactgccagtatttgcagcagtaggaataaggatcacaaacataatgttgaatgaaaggaataaaacacaaaaaagaatgttatggatatgkttcaatttacatgaagtacaaaaagagacaacactaatttatgttgttataactcaggagagtggttgccactcagagttaacagtgactgggaagtttctggggctggtaatcatctatttgcgaatctaggtgaatttattttgtgaaagcatattaactggtgtgtatacttttctgtatatgtattatacttcacaaatagctaaatgatatcacaatagtgaaagcagtccacataatcatgaataatcatatatttaataaacagttaaaataaatgaggtaaagttctatttactgatgcaaatataactctaaaggagtgctagctttaaaaaatagaataataaatacaatagcatagcatacataattcaattttaaatgtatatatatgcatacatttatttaaaatatttttctgatatacaatgaactgataaaagtggttatacctctagagaaataatattggtaataaattaagatgatat

SEQ ID NO: 513918 - DNA, 498 bp, Homo sapiens
aagacttaatatcagccaagtgttagaagttcaactagcacattatattgccaatatatatgctcaaaaaaatacattttgaaacattattcctcctatgctaacagaagaatttgaaagccatacatcgtcgatgaaagatgaaaaacagaaaatctttatatttataatgttatttttcataaatgtataagagaaaagtttgattacagcatttgtaactatagtcttgcatttataattcttcaaatattaacatcttcaaaaatacttgttaataattttgataatgtctcccataatgtcagtgatgtaaaaaagcatcaagtcctgaaaaaaccctcagttaaaataattactctttattaaagctcagggacttatatttcattctgtcctagtctgatttcttataatcatgatttggcttragtttaaggtaccaccattaagatgaaattagcacatttttacttacaattgtcttgaaatttatag

SEQ ID NO: 513919 - DNA, 397 bp, Homo sapiens
taatcccatcattttagcttagaaataagaacaataagaagctagggacaaggttctaagaaaataaacagaatccttaggccacaaaaggagctaaagataattgagtccatcatcttctataaacagatgccgattttacaacccctaaacaaacactaaataaatatatgtaataaataagcaaataatatataatacaaaaatgtaagcttaatatataaataagtatatattattaagttgacaaacaaataaatagcaaattttcattttatataatcattttatatatayaataagcatatggtaaaaaattataattacttctaaatacatttcagagtgcattagttgatgagtttcaaaacttgttaatatttcagacatttccaaa

SEQ ID NO: 513920 - DNA, 606 bp, Homo sapiens
ataaaaaacaaagctgtgggtcaagtgtgagggaatcgtaaatggggcatgatgctgagcaagggatgtggggtaagtgaatgttttcttttgcatggcatagaggtaatgccattggacctacaaagaaggaatgtactcctaacacgttacttggctcttctgtgaaggaaatatttataaacaagtaccagtcaggtttcagtgtggaaaaaacactgaatagtcttttaaggagaatgaattttatggcaggggatgaggtacttacataatcatcgaaggggctgaagggtgaagattacggcaccgccagtaggatctttggtcccacttttacaatttggacttagaggtttggcagcttcaactgtctcctagggaagaaagctgcaggaaatcctcacagaagtcacaaggcactctgctggccctggggcagggactggcaggggacatagaatctagctagctggctgycgcaaacactcatgtttctgcactccaggtgtgcctgctgctatctctgcctgggaaagaataacttcactcccgctctggcttctaacatttatcgaagtgcatctcattggatgactcttaaat

SEQ ID NO: 513921 - DNA, 591 bp, Homo sapiens
gaggtgctgcagtgaacaggtgacaggcaggtgcggaaggaaagccctgggagaggygacacagaggacgggacgcggctcggaatggcgggcggcatgcggcctgagcgggatggtgtggggctcaccccatatcatccgtaatgggacggaaagtcttccctcgggtgtgacggccgccccagcggatgcagcagggattctattttggaacagagacgcccacctctggttcagatgcgacctcctggaatattcaagcacctgggccaggcccagtgctgcatgtgtgacacacagacctaccccacggccacctcaggcctgaggaccctcgagaccagcgccggccacacaccacacggccagggcaaagctgagaggcatcctctcccttcctccacctcacccagcacacaccctgccgtcagatccctgagcccatccttcatcccttcaccacaaactcaccaacctgcccacagtttccaaggcccgcttcccccggaaacgtgtgggcatgtagctctcccaggagtgtgcccagccctccactccctacaggagtgcccacgggcttggcacccaacc

SEQ ID NO: 513922 - DNA, 518 bp, Homo sapiens
agcattaacatcaacacagaccttaagactgatggactctttaagtctgataagaaacatttaccgtctattctctctgaagcctgctacctggaggcttcatctgcatgataaaaccttggtctccacaaccccttgtcataacccacacattcctttctattgattctaggcctttagataataactctttcaaccagttgtcagaaaatctttgattctgcctgtgacctggaagcccagcttctggttgtcccaccttttgagaccaaaccgatgtgcatctttcgtgtattgattgttgtgtcttgtcaccctaaaacatagaaaaccaagctgtgccccaaccatcttgggcacatgttctcacaatctcctgcgggctgtttcgtgggccattggtcacccatatttggctcagaataaatctcttcaagtgtttgacagactttgactcttcatygacacatctatgcctttccatgtaaagggttgcaagatttaccatctgctgtatc

SEQ ID NO: 513923 - DNA, 545 bp, Homo sapiens
ttcctgacacattcataaccacaggttgacaacagaagtgcctgttgcaggccacaaccaaatacttttaataagcatagaaatataatgagatggaaatttatacccaacagaattccagggagtttctcctcacaagagaaaaaactgtgtgggcatgagactgcccttccgaggggttgtgggctgcagcagggaggcccgcgtgcctgcagcggaaggcaggtaggtgtgcgatgatgtgcagatgtgggagaggacagcgagggcagtgggtgggaatgaggggaagtacaggaggcagaaagaggaaagacttgggagtcrtactgtggaagttgttgcatgtagcaagctcaactcccggcccaggcacatgcctgtggttctcgtacaatctgtataggaaggccaaggtcacttcccagatgatttgcagctaccattccacatgtgaccagggcctccaggcagaagtcagtgtgaaagggggcagcccacacagggaaattagatctcgtggcagccacaggtggacacctgga

SEQ ID NO: 513924 - DNA, 633 bp, Homo sapiens
agctgtggaaggggttttccatcccagctctggcattgcaagtggggagccagcggggatcaggtggggtttctgcatttctgggtggacatatctcctgcctggtgtgcccctggctcggtggcatataygccatgtccctgccctcccaggtatgctgaagcccctaacactctctcccttaaaaagctaacttgggcagcactatttacaatagcaaagacatggaaccaacccaaatgcccatcagtgataggctggataaagaaaacgtggtacgtatacaccatggaatactatgcagccacaagaaataaagagttcatgtcctgattgtatatttagaaaaccccatcatctcagcccaaaatctccttacgctgataagcaacttcagcaaagtctcaggatacaaactcaatgtgcaaaaatcacaagcattcctatacatcaataacaaacaaagagccaaataatcagtgaactcccatgcacaattgctacaaagaaagtaaaatacctaggaatccaacttacaagggatgtgaaggacctcttcaaggagaactacaaaccactgctcagtgaaataaaagaggacacaaacaaatggaagaacattccatgctcatg

SEQ ID NO: 513925 - DNA, 633 bp, Homo sapiens
agctgtggaaggggttttccatcccagctctggcattgcaagtggggagccagcggggatcaggtggggtttctgcatttctgggtggacatatctcctgcctggtgtgcccctggctcggtggcatatatgccatgtccctgccctcccaggtatgctgaagcccctaacactctctcccttaaaaagctaacttgggcagcactatttacaatagcaaagacatggaaccaacccaaatgcccatcagtgataggctggataaagaaaaygtggtacgtatacaccatggaatactatgcagccacaagaaataaagagttcatgtcctgattgtatatttagaaaaccccatcatctcagcccaaaatctccttacgctgataagcaacttcagcaaagtctcaggatacaaactcaatgtgcaaaaatcacaagcattcctatacatcaataacaaacaaagagccaaataatcagtgaactcccatgcacaattgctacaaagaaagtaaaatacctaggaatccaacttacaagggatgtgaaggacctcttcaaggagaactacaaaccactgctcagtgaaataaaagaggacacaaacaaatggaagaacattccatgctcatg

SEQ ID NO: 513926 - DNA, 608 bp, Homo sapiens
aagagaagcaagccttaatgcaggtatttcttaaaatccctttcctacctatttcttcagttaacatactgtgttttcaatacattctatctgtagacaagcaacatgctttgcaaatggaaagtgagaaaaatacattgtgaaggataatctcagtctttgccaaagcaccgtgacagaactctaatagaagactcttggagaaaatgacacaacctataaaagtaaaaagtagacgaatgttgtgtaaacttatcaagagtttataacaatccttgcctaagatctgtggacacagtggctcttgaaatcctgtcttcacctgactgactctccggtttccaataggaccaacgtccagagaatggtttcttctttcccttatcgaggccagatcctgaagctgggcagctcagacgctactcctgatccccatcccaagcagacctttgcaggacagaaggrtaccatctttccaggaagctgtcttgctaagctgtgctctcagagcatcccagtagacatctcttacgtaccacagcagacccaaatggcctcacctgtcccttcctgaggccaccgctgcagtaaccagcttcctacaggtg

SEQ ID NO: 513927 - DNA, 350 bp, Homo sapiens
cctgacacagagccagctccagaatctctcctgttgctgccgccacttccgttcagagcatggccgagaggggagagcgcctggcagccttccccagggtcccagggctctgcttttctggggattgactgatcctcaggatagacaccctcgtggcrgcaaaatggctgctctaggcctcatagtcacacaccacacccccagggagagaggccgtccttccactgtgtcagcgtgcagccaggcttcttacccagatgccccagaaatcacctgtgtgtcattcatgacccgtcacggaaccagtccccagagccagggcccaagcccagcaggtcccagtcttgcag

SEQ ID NO: 513928 - DNA, 350 bp, Homo sapiens
cctgacacagagccagctccagaatctctcctgttgctgccgccacttccgttcagagcatggccgagaggggagagcgcctggcagccttccccagggtcccagggctctgcttttctggggattgactgatcctcaggatagacaccctcgtggcggcaaaatggctgctctaggcctcatagtcacacaccacacccccagggagagaggccgtccttccactgtgtcagcgtgcagccaggcttcttacccagatgccccagaaatcacctgtgtgtcattcatgacccgtcacggaaccagtccccaragccagggcccaagcccagcaggtcccagtcttgcag

SEQ ID NO: 513929 - DNA, 272 bp, Homo sapiens
tttctcataatacgaatattgtcaaatgatatgtcaaagtcatgtttctcactgcgtgtcacatagatcgtgcacatactctccactgctcttagtagactgaatcactgtgtattcatggggtgggggtggtctgtctgtgatgttgttggtattttttcttcactaaatccatacattttacctcatgaggagaaatgtgtcatcaccgctccacgcacwtgtagtcacatgggattcatttgacatatccttcattccaatgtgaattc

SEQ ID NO: 513930 - DNA, 598 bp, Homo sapiens
tgctgtagtgttttttttccccatggtgatatgagaccgggagttggccaactttttctgtaaagggccagatggtgaatcattttggctctgcaggccgtatggtctgtgctgcatttattcagttctgccagagcagccgaagaccgtgttgaacgactaggagtggctgggttcctataaagttttatttacaaaagcaggagagagcctgttgtagacatgtgaggagttacttatggaagcctcgttctaatactgtccgggttggcctgtgataattatctgcggaccctcytcaggcggggcatgttgaggcgtggcctttgctagttcctcagcaagtcagtgctgcctttaggaaagactgtggaagagtcactgccgagctctgctcacagcccagggtagagtcacacactactctagggctcctgctgacttggtttctggaagccgtcagccctcccagatggactctcgctgtgtgggatggagtagggtccctccagaagcagcgtctgagcagtgaagctgcactgacgaggttcgctcctgctcggtgcactccctgctacgctcccttctgtaactcctg

SEQ ID NO: 513931 - DNA, 355 bp, Homo sapiens
catgccctcacaaaaaccattcctgcacttggccaaagccagccagcaacttcgaggaggtgcagtcgaggcccctgtttgggtatgtccttgggaagcgtgtgatgctgttcagctgcggccgtgyaaccgtctttgatgtgagctttgcagtgataaatcgcctctaaaaggagcccaacttggcagggatatagaagaagaggaagggaggagggagggaaggcggggagggagagaaagagaaggagggcattggtaggaggaggaaagagaaaaggagaattggactccttgggagcctgcagtggacaggtgcaaagaaaggtaagcaagggagaaggaaaaagggcgt

SEQ ID NO: 513932 - DNA, 574 bp, Homo sapiens
cagtagggaccagctctcatttgatattgccaggtaatgaagtcttgctttaggttaaggtcaatttttaggcttgatcaaaatatatgatttcaaattcacaagcatataatacatctaatcaattcttgtatttattatacttaaatwtcatattttgtccacatgaaggtattcattcttaagccaaagtaattattgagtgtttaggtcagtatgcaatatatttttcttttaaaataaattagtttgcctcaaacactagagactgatctaaaagcgagtctgaaaataggagagttcataaattccttggcaactgaagcatatcaaaactcttgcacttcaaaaatgattgcagatatttttcaggatgatctcaaatcttatgttcgggaacctgcaaacctcggaccaccacatcaagggaaatgaagtgaacctttcacttgatgacaagactttgtagaaaaccactaaattagctactctaacatcatcatgcaggtgcatgggtctccttgaacaaattattccagagtaagatggcctattcctccatcattccagtgtt

SEQ ID NO: 513933 - DNA, 623 bp, Homo sapiens
gtttgtcttctcattctctaatgcaaacaccttttagttgccatgttaattggttgctgcctaagtccaattgaacatgatgcaaagaaagactacgactaaagagacatgttctaacagcacatctcactttaggtgatactgcaggaaaatatccactggaaaatagccattccctgggaattggraatggtggattttgcttaaacttgcctcagaaagtctcaagctatctcttttaattttttctcaggaacagtcatttctccccacccaactacccctctacacaaacaaatttccagtagtatcattgtccattgatgaatatcttccacttagttcacaaaacaaaagtaatttctgaaaacaaaccaggcacttaacacataggccatttttctttattcacaaaacttggcacaagtttaaggtctaaattgagttgtttgaacttatttcaaccagcttctaactaaccagctctgcctttggccattataagggtatttctcctttcagcatattttgcccttatttccatcaactccactttttatactttgggatccttttataccctagaaatacatccttttttatctaaatcctagattcacttt

SEQ ID NO: 513934 - DNA, 623 bp, Homo sapiens
gtttgtcttctcattctctaatgcaaacaccttttagttgccatgttaattggttgctgcctaagtccaattgaacatgatgcaaagaaagactacgactaaagagacatgttctaacagcacatctcactttaggtgatactgcaggaaaatatccactggaaaatagccattccctgggaattggaaatggtggattttgcttaamcttgcctcagaaagtctcaagctatctcttttaattttttctcaggaacagtcatttctccccacccaactacccctctacacaaacaaatttccagtagtatcattgtccattgatgaatatcttccacttagttcacaaaacaaaagtaatttctgaaaacaaaccaggcacttaacacataggccatttttctttattcacaaaacttggcacaagtttaaggtctaaattgagttgtttgaacttatttcaaccagcttctaactaaccagctctgcctttggccattataagggtatttctcctttcagcatattttgcccttatttccatcaactccactttttatactttgggatccttttataccctagaaatacatccttttttatctaaatcctagattcacttt

SEQ ID NO: 513935 - DNA, 623 bp, Homo sapiens
gtttgtcttctcattctctaatgcaaacaccttttagttgccatgttaattggttgctgcctaagtccaattgaacatgatgcaaagaaagactacgactaaagagacatgttctaacagcacatctcactttaggtgatactgcaggaaaatatccactggaaaatagccattccctgggaattggaaatggtggattttgcttaaacttgcctcagaaagtctcaagctatctcttttaattttttctcaggaacagtcatttctccccacccaactacccctctacacaaacaaatttccagtagtatcattgtccattgatgaatatcttccacttagttcacaaaacaaaagtaatttctgaaaacaaaccaggcacttaacacataggccatttttctttattcacaaaacttggcacaagtttaaggtctaaattgagttgtttgaacttatttcaaccagcttctaactaaccagmtctgcctttggccattataagggtatttctcctttcagcatattttgcccttatttccatcaactccactttttatactttgggatccttttataccctagaaatacatccttttttatctaaatcctagattcacttt

SEQ ID NO: 513936 - DNA, 592 bp, Homo sapiens
tcagttcactgaaatcaggtaaaatgtctgatttgtgttattatatcaaatacttctgttttttgtcaactttcatacttcagattatacatccttccttcctcatcttccttatcccataacttgaggggcaaatgctaaagagcctcatttgcttagttatgagaatttgtaactgaagggaacttcttctaaacgtcctcctcaatagttcatacgtctgtctcctggttgtctgctgcttctcattagcattgtttgtcattaataaattaacctcaacatttagtagatcctattttaaaggagactagttactactgtgtaagctattatatttcttactgttttttgtttaagtctrttttcctgtttatttttccctaacaagctacccaaaggtgagtggcttaacagcaacatgtatttagttcaccaatctgtggtttggaaaatccttgtccaggacaaccttctctgctcccctcagcttcacttgcagtcaatcaaatgttgggggactggaatcatctgaaggtctggtcactgatatgtctggttgttgacagtggctgttgattggaactttagt

SEQ ID NO: 513937 - DNA, 608 bp, Homo sapiens
tggtactaactttcaaccataggctgtctctcctgcctactaaactgaatcacattgtttatattttgcaataatacttttataattgtgctacagggttcaaaggracataggcccagagcaatcaatattctttgttcaagcaattgccttctttctcttcaccatttagcagcctgatggtcttaagcctgggtgcacaggaaggaggaccagtggcctgtgaagagtcattaagggggctgatgcataaatattcaagcctgtgacccaccattccacctcacacaagccccctgctaactgccagtcctgttgtagttttctggaatccatataacctgttatttatcttaaagagtttgctcaagggatctccttttcaattactgtaataataacatatgtaacagaatgtgttttaatgctttttagctttaaaagtactttcacgaataatatccttttgagcttcattcacataaccatggaagataaacatcatttcccttcttatggattagggaataaaagctcaatgatatttgtaagtaaacaaagttggaacttgaaataagagttgtaatttcaagccccacactctttcc

SEQ ID NO: 513938 - DNA, 608 bp, Homo sapiens
tggtactaactttcaaccataggctgtctctcctgcctactaaactgaatcacattgtttatattttgcaataatacttttataattgtgctacagggttcaaaggaacataggcccagagcaatcaatattctttgttcaagcaattgccttctttctcttcaccatttagcagcctgatggtsttaagcctgggtgcacaggaaggaggaccagtggcctgtgaagagtcattaagggggctgatgcataaatattcaagcctgtgacccaccattccacctcacacaagccccctgctaactgccagtcctgttgtagttttctggaatccatataacctgttatttatcttaaagagtttgctcaagggatctccttttcaattactgtaataataacatatgtaacagaatgtgttttaatgctttttagctttaaaagtactttcacgaataatatccttttgagcttcattcacataaccatggaagataaacatcatttcccttcttatggattagggaataaaagctcaatgatatttgtaagtaaacaaagttggaacttgaaataagagttgtaatttcaagccccacactctttcc

SEQ ID NO: 513939 - DNA, 608 bp, Homo sapiens
tggtactaactttcaaccataggctgtctctcctgcctactaaactgaatcacattgtttatattttgcaataatacttttataattgtgctacagggttcaaaggaacataggcccagagcaatcaatattctttgttcaagcaattgccttctttctcttcaccatttagcagcctgatggtcttaagcctgggtgcacaggaaggaggaccagtggcctgtgaagagtcattaaggrggctgatgcataaatattcaagcctgtgacccaccattccacctcacacaagccccctgctaactgccagtcctgttgtagttttctggaatccatataacctgttatttatcttaaagagtttgctcaagggatctccttttcaattactgtaataataacatatgtaacagaatgtgttttaatgctttttagctttaaaagtactttcacgaataatatccttttgagcttcattcacataaccatggaagataaacatcatttcccttcttatggattagggaataaaagctcaatgatatttgtaagtaaacaaagttggaacttgaaataagagttgtaatttcaagccccacactctttcc

SEQ ID NO: 513940 - DNA, 608 bp, Homo sapiens
tggtactaactttcaaccataggctgtctctcctgcctactaaactgaatcacattgtttatattttgcaataatacttttataattgtgctacagggttcaaaggaacataggcccagagcaatcaatattctttgttcaagcaattgccttctttctcttcaccatttagcagcctgatggtcttaagcctgggtgcacaggaaggaggaccagtggcctgtgaagagtcattaagggggctgatgcataaatattcaagcctgtgacccaccattccacctcacacaagccccctgctaactgccagtcctgttgtagttttctggaatccatataacctgttatttatcttaaagagtttgctcaagggatctccttttcaattactgtaataataacatatgtaacagaatgtgttttaatgctttttagctttaaaagtactttcacgaataatatccttttgagcttcattcacataaccatggaagataaacatcatttcccttcttatggattagggaataaaagctcaatgatatttgyaagtaaacaaagttggaacttgaaataagagttgtaatttcaagccccacactctttcc

SEQ ID NO: 513941 - DNA, 513 bp, Homo sapiens
gatcagagctgcaatgttggtgttgttgaagaagacactgataagatagctcatggcaataaccgagaagctgtagtccgaaaaatacaggaacaaaatgaacccatttgttttaggaagaatattgccaaacttgagtataatgatgaggatcacgatggtaaccagtaaaaatccaacactctctataagccaggcaaagaaatggctgcaggagttcacacccatcatcttcatgtactgtaagaagaaaaaatgtgaggcgcttgttatgctgatattcttccaaataaaaattattccctgtattatgtcaaaatgtcatgatagtctctctgtatatggaactaggcattttaataatttacataaatcaagaatktatccatgcttgctatgtgaaatatgcctatatacaccagaacaacttagattatttgttcacagaatggcacaatataataaacaatttggatggtgagggtttaattacagttccactttataattgtt

SEQ ID NO: 513942 - DNA, 586 bp, Homo sapiens
aaacttctttttgagaaaagggaaaatgttcaggtcatttcttatttttacctgaacaattttcccatcacgtagtcagcataaggaatgtaaaaagattaggggcatacagtcagggtcatgaataattcaaatatatattaagaatgcagaacttttggagcaaaaagtacattttatggagaatattggaaaaacactagggaatgaaaacaaatatcacttctttttctttttccaattataaacacaaagtaccctggaactaggattcagatcttgtttctaaaacagaagtcaagttgaaccatggtagtaagcagaatttcttgcttttccattatctttttatagccattgttacgtaccttaaggtttttataaataactacataaaatacaccaactttttggaattctaaaaattatttgcatcctggcatttagactgattttatttttgaaacatacatacttattttaggcacgagyttttagatacatccagttttcaagaaaatgtgatcatctccattttaataacaaactaaacaaaaagcgaatttttagaaaagagggggttact

SEQ ID NO: 513943 - DNA, 580 bp, Homo sapiens
tgccttcattgctgacaactaagaaaaagatttcgggagcctaaactagtgggagagggccctacatgattcctcytcactcactcaagtccagccacataagcctacttggtatttccatattatattatgcttgctgttaccacagggcctttgcactggcttcttcctgtgcatggcaaatttgcctgatacccacatggctaatcccttccccatctacaactctttgctcaaaaaacccttctgaaaatatctataagtgaccaccttttaaaaaatctcaccctagcccacacccaattcttaatcttcataccatcagacaccttaattttcttttctataacacttgccactttctgacatgcagataagataattattttatgtttatttggcattgtctgcctcacctgctcaaattcaaacttcattccatcaggatctttgtgttttggccattagaaaccttacactttcctaagcacatggtagacacaatgtctatttgttcaatagcaattgaatggattctttaggtgttgataaacttttctcttttcttgttctttctata

SEQ ID NO: 513944 - DNA, 603 bp, Homo sapiens
cccctcccaacaggggctcaggttccagggagctcagagttctatcactaaaaccctggctggagttgctaaaattcctgcagggaagccccacctggtgaggagggatgggtcagggtctggcctaaagaggcagtctggccacgatcttccacaactgctgtgctgtgctgtgggggactcctccttggtccaaaccatccagtctccccagcaccggcagagaaaaaaacgactgacttgagctgcagtgatggctgctacccgtctccctgcctaagagctcagtcatcttaggcaggaagcagccgcagccatgatgcccatccctccccctaggwacttggtagtcttaggcagtcttcagccaagtggctgcccagaatccgcacagctctgtgcttgggactcaaggtcctggtggcatgagctcatgagggggctcacctggtccacagattgcagagatctgtggaaaaagcatgatttcctgggcagggtagcacgatcactcaccacctcccttggctggggatgggagctcctctggcctcatgtggctcccaggtgggccgttgcaccaccctgcttctcctcactctc

SEQ ID NO: 513945 - DNA, 625 bp, Homo sapiens
atattgccaagtgtcaagtattagactatgacttcattctccttatttactgcctaattatagtcatgttgtgcaccactgtgtttgtactattttgagattcagctataaggcagtgcagtttatcatagcaaatcaaagcaggtgagaggaaggacagggtttgggtgtagcctagtgtgtttgatggtggtgaggcatagtcagcaagacagaaaaggaacaggacccaagggcactgcaatctctcatcctggttgaggcatgagatgggagaatsccccaacaggtacagcaatgatggtaaatacaggcagatagttccagctagggctggaaagatctaaagacttgttcactcacacatcttgttggaccttagttggggctgttggtctgaatacctacatagagactggtgatagtgggacatcagcctcaggtgttcagattttccatgtggcagcttggacttcctcatagcatggtggcttggatccaagagctaggatcccaggagaaggaggtagaagctgcacgtccttttcagacctagcctcagaagtcacacagcattacttttgccatagcctgttggtgtagaagtcctaagccgctggccaga

SEQ ID NO: 513946 - DNA, 625 bp, Homo sapiens
atattgccaagtgtcaagtattagactatgacttcattctccttatttactgcctaattatagtcatgttgtgcaccactgtgtttgtactattttgagattcagctataaggcagtgcagtttatcatagcaaatcaaagcaggtgagaggaaggacagggtttgggtgtagcctagtgtgtttgatggtggtgaggcatagtcagcaagacagaaaaggaacaggacccaagggcactgcaatctctcatcctggttgaggcatgagatgggagaatcccccaacaggtacagcaakgatggtaaatacaggcagatagttccagctagggctggaaagatctaaagacttgttcactcacacatcttgttggaccttagttggggctgttggtctgaatacctacatagagactggtgatagtgggacatcagcctcaggtgttcagattttccatgtggcagcttggacttcctcatagcatggtggcttggatccaagagctaggatcccaggagaaggaggtagaagctgcacgtccttttcagacctagcctcagaagtcacacagcattacttttgccatagcctgttggtgtagaagtcctaagccgctggccaga

SEQ ID NO: 513947 - DNA, 685 bp, Homo sapiens
agttatatggtagatgtcagagatctccattttacttgttaagtagctgcgaagactgagggacattttagaggtgataaaaatgtactgtgttaaagtgacttcccataataggtaatgatacattaagatttttttcctttctgttttaccatatatttttctgatttaaaatttaaagaaaatgttgattaagtgcctttcatgtaccaggcattttacatatgtgtctcatttaatcctcacaataatgaggaaagaaggctcagagaggttaagtaacttgtccaagatcacacagatagtaagcagcagaaccaacattgaaacccaagtcattgaaacttcaaagcctgcttacacaacagagcctttctccggcagggagttttagctaaattagctggtcggacatttycctctgaacttaaagttaaaaagtgtctctcaaaggaggttcctcaaatctttgtattgtattgtgggttgaagcagagggaattaggaatgtttgataggcagctattttctaagttgatcttgaggtaagttcataactttgaagggaagtgccaattgaataataattctcacactacagagatgtcctcttttgaaagataaaggctgaccctgtttgacaatatctctcacatgtgttttttgcatctcctcatcccaactc

SEQ ID NO: 513948 - DNA, 685 bp, Homo sapiens
agttatatggtagatgtcagagatctccattttacttgttaagtagctgcgaagactgagggacattttagaggtgataaaaatgtactgtgttaaagtgacttcccataataggtaatgatacattaagatttttttcctttctgttttaccatatatttttctgatttaaaatttaaagaaaatgttgattaagtgcctttcatgtaccaggcattttacatatgtgtctcatttaatcctcacaataatgaggaaagaaggctcagagaggttaagtaacttgtccaagatcacacagatagtaagcagcagaaccaacattgaaacccaagtcattgaaacttcaaagcctgcttacacaacagagcctttctccggcagggagttttagctaaattagctggtcggacatttccctctgaacttaaagttaaaaagtgtctctcaaaggaggttcctcaaatctttgtattgtattgtgggttgaagcagagggaattaggaatgtttgataggcagctattttctaagttgatcttgaggtaagttcataactttgaagggaagtgccaattgaatartaattctcacactacagagatgtcctcttttgaaagataaaggctgaccctgtttgacaatatctctcacatgtgttttttgcatctcctcatcccaactc

SEQ ID NO: 513949 - DNA, 685 bp, Homo sapiens
agttatatggtagatgtcagagatctccattttacttgttaagtagctgcgaagactgagggacattttagaggtgataaaaatgtactgtgttaaagtgacttcccataataggtaatgatacattaagatttttttcctttctgttttaccatatatttttctgatttaaaatttaaagaaaatgttgattaagtgcctttcatgtaccaggcattttacatatgtgtctcatttaatcctcacaataatgaggaaagaaggctcagagaggttaagtaacttgtccaagatcacacagatagtaagcagcagaaccaacattgaaacccaagtcattgaaacttcaaagcctgcttacacaacagagcctttctccggcagggagttttagctaaattagctggtcggacatttccctctgaacttaaagttaaaaagtgtctctcaaaggaggttcctcaaatctttgtattgtattgtgggttgaagcagagggaattaggaatgtttgataggcagctattttctaagttgatcttgaggtaagttcataactttgaagggaagtgccaattgaataataattctcacactacagagatgtcctcttttgaaagataaaggctgacmctgtttgacaatatctctcacatgtgttttttgcatctcctcatcccaactc

SEQ ID NO: 513950 - DNA, 634 bp, Homo sapiens
cttaatgccaaaaagcaaaacatctttcagccatattgaggagctgtggaacaaactcctggacagctcaaaccataaaaagggtagttttagctttaagtttttaatgtgtagaatataatgaaaatgaacagaaaagttctttcttcttttcaaaatagcatgcggagaatttatattgcaaacattttaacattgtcactagtcaaaagagaaaatcccctgacaatacaaagttctaaaaccaaacatggcatagctaataaattctgaaactttctgaaaaactacaactactattatcaatttgaaaattaattgatattccttctctaaaggtcttttatatcttgcatatccttcttttttctaccacttttccatctaagtttatgaatccaaatgtcagtggctagaaatgatttccacttttcagcaatcacacacttagcaatcaaccaagcaagatgaacaatccgctgtatatttattcaaatgtacaactctaaatctrcataaaatataaggagtggaatgtaaagaggttgtcccagggagaaattatagaagcataagccagaacagatatgctttcagcttcaagtataagaaaatctgactttccatgggctta

SEQ ID NO: 513951 - DNA, 506 bp, Homo sapiens
tcataaaacaaaagcagaatagaaaggtaaagaaaactatgaatctaccaaactccaggttgagagttagccacttaagcatgtctgtggaacagtaaagattaaacaatttccaaatgagtttgatctagattcagatttatttcttaatctaaggacaaatttgggtctcttctactttgaaaaagagactgaactgtacgcttcggctggttacttgaagtgcatcttatagtgaattgcagccttagtgacagagacatgaacgttgtttcattaagaaaaaatggaactaactcatccagtcaatagctttatttttaatatcctttctatgacaggagcaagaatttccwattttcataataaaatatatttacttttgaaatgggagcccaagtcctaagataaaactgtttaaaatcaagaaataaaaaaagagtgaacaaagagaagcgagaggagaaatgagagagagtgagaaagagagggttaatctcaatcta

SEQ ID NO: 513952 - DNA, 518 bp, Homo sapiens
catttcatcttgaaaaaaaaaaaaaaaaacagcaggtggatgttttcaaaatcagcaaattaaacacaactgtgtctctgcattaaatggatgaaaatgggcatggcctcttgggtcagttgaccctgttctaataaaacgatccaaagaaaggctgcacatttcatttatgtgcatagaaaaattagcaaagmaaaaaaaataagtcgtagataacagtgttgtcttttttttcctgttaatctcttagcatgagaaaacccaaatgcttttcctaatggtaaaaaataaatgtttttaaacagtattttactctacattatattgcattaaggagatttttttaaacccagtttttgaggtttcagtcttagagaggtgataaattcataccacaaagaataaacactctaatccatctacagtatacagattaggggagaggctatttaaggtttgctgatttaagaaaaaaaaaactattgaaaacaaacaatgctctctattagttttgtaag

SEQ ID NO: 513953 - DNA, 545 bp, Homo sapiens
tgaaataaaactctttctctattgcaattcccttgtcttgataaattggtattttctgggcagtgggccaggagagcccattgggcagttacaacatctggtggttgttgctggttgttgactggaccttagctggggctggaggccagacatttacaggtggactctccttgttgaactaagcttgtttttttcatgaaatggtggctgggttccaagaataattgtccaaacagacaatcaggaaagctctatcaccttgaataacctcactgtggaagtcattccrtgtcacttcctgctccatcaactcataagaagcaagtcactaaatttgcactgaatttaatgtgagggaaatcatactccacttttttataagagaaggcatagtcttctatgtaaagccttttaaacttttaagtattaacattatgtgttaaatttttttctcttttctatgttaaatgcattattcagtttctttgaatttttctatcaggatacattttggattcccctcaccattcttgtgactttacttc

SEQ ID NO: 513954 - DNA, 528 bp, Homo sapiens
tttaaatgcaaattatatctgggaaggtgtcacattaatagctactaccagctattaactcctaaacacaaatcaatgtgcttgttcggtagactagacaggactctaaaagaatctatagtttgaaggaaatctttgaacagagaatgaggaagatgggaaaggttgtgagcataaggatgctgtcacgatgggggccttggacaagtgacagaccataagtgctgggaggtgagcagaccatgacacatgccggtaggacaggggaagcaatctgcaagggctgttaggagtgataaaagcaaagactgcctgctttacatttttgcatacaaccatttcaaattctggcatccattttggtcatgtttcagtctttatgataaaaytcaggaaattaccctcccccttgagtgtgtagtatgttttaaatatgaaggattaatccaagactgccaaacctaattcacataaggttctagcatgagctcacatttgatgatcattaacatctttcacctattcttc

SEQ ID NO: 513955 - DNA, 640 bp, Homo sapiens
tattattatatatttagctgttacagttgttgtcagagttaatgtcatgcataccgcatttcaagaggacttaagctccttgaaaattccctatttgtagatccactccccttcccaacacacacacatacgtacacacgatcaccacttaaataaaaagaacattcaggagaaagacattatttgtgtattatgtccatgcctgtctatagcagaacatttcataatatggatggaattttatataccatctctgcaaaggtgactttctatatgcaagttggcargagtggatttaggaagaggtaaaggacataagaataatttatgatttccaatgatcttatcgattttgttgactctcctttgttctatgatattttctagtctttatttctaatttagatcttatccaaaggtaatacaaacgagaccaatgacattgtcttcagaatcagaggagtgcaatactaggcacttggcaattcatctgtagattatttttgcacctgcacaattcctttctgaattacgcactcacaggcctaatgccatgcctcaagggtagatcaaggtgtgctctggcagcagtcatctaagtcaatttcccagcacctgcaaatattaattgttagttgaa

SEQ ID NO: 513956 - DNA, 617 bp, Homo sapiens
aatgtggtaaaattaccatttagttacagagtttaaaacactaataattgtggaatttatgaaattcttcttcctggtattttctcagtgatgtgaaagagactaatattagacacaacagaagtaggagggagtgtttttcatgattaagacaactgtttctgaaaacacccttcccttttattttgcaaggagagaaagaaagccctttgtaataggatgaccagtgtatgtagaaaacatagttctgttttctaaacttcatgagctggcaggttttgtgctggggaatgacagagaacctttaatttgtggagaaataggaaaaaatagtgactaaagaacgtagcacactaagaaccatttttgccttgttaattttgtgtacccagtgctagcatgcgctggacayatagtaggttttcaataaatatttatcctataaaagcattaggtctaataagtgttgactcaaaccatgaaaattcttcaaaccccaaccagaaattgtatatatcattaaaggataggaaaaatatttaaatctggtagtgaaaaatttggtaaaaaagtagtaatgtggtatctggttttctgtttaggataatggcctccag

SEQ ID NO: 513957 - DNA, 604 bp, Homo sapiens
tcacccttgaaatgccttgcttcagctccagggataccccagaccccttgtaggatccctgtccattctcttttgcccttagataaccatgctgcaattcaccaaccttgtggaaaagtagtcaataactgggccraggaaggttctggaccccacgtgagaaagggaagagagccgcttgagaaaatggtctgtgagtaacaagactgtcatcaaaaatctttgaagggctgtcctgtagaagaaaaagcagactaaaatgcagaataggagcaaaagttcagagcaacaggcccacaggtttttaagctagacaagagagaacttcaaaactatgcagagcttccagggaaaacatgcatgagccaaaaccagaatcaattacctccatagaagacccaagggcaacgtgcgtggctctacagagggccaacgggtgacagatggtgatgtgcatggcagcctgaacaatattgtctaaagaagtccaattggctgtcactgaggagccacagcattctacatttattttattactttctatgaaatccacctacttcagaattgggcctatgccttttcatttcaaaaacctgatttggca

SEQ ID NO: 513958 - DNA, 604 bp, Homo sapiens
tcacccttgaaatgccttgcttcagctccagggataccccagaccccttgtaggatccctgtccattctcttttgcccttagataaccatgctgcaattcaccaaccttgtggaaaagtagtcaataactgggccaaggaaggttctggaccccacgtgagaaagggaagagagccrcttgagaaaatggtctgtgagtaacaagactgtcatcaaaaatctttgaagggctgtcctgtagaagaaaaagcagactaaaatgcagaataggagcaaaagttcagagcaacaggcccacaggtttttaagctagacaagagagaacttcaaaactatgcagagcttccagggaaaacatgcatgagccaaaaccagaatcaattacctccatagaagacccaagggcaacgtgcgtggctctacagagggccaacgggtgacagatggtgatgtgcatggcagcctgaacaatattgtctaaagaagtccaattggctgtcactgaggagccacagcattctacatttattttattactttctatgaaatccacctacttcagaattgggcctatgccttttcatttcaaaaacctgatttggca

SEQ ID NO: 513959 - DNA, 627 bp, Homo sapiens
ctgcccctttagatgaagcacatgctctggggttttctgctctckccacctcttcctattaagcccaccctgctttcctcatgtgcataatctgccggtatctgtagcctttggggcttatgaatagggcagtcactggaatcagtcaaatgtgagtgcaaattctgactctgccacttgccagctatgggtcagtgacctgacctgagccccaattttctcaagtgtaaaatgggaatcataactctcacctcttggagttgtgagaattaaatgcaatgatgtatttacagtacctagtggaatatctggacggcataggtaatttatcaatggcagctctgatttttgttattattcctttactccctcaatttatctggatttcagaggtccctcctgtgtagagtcttcctgacttccaaagaggtgaggggagttagtgcctggcatttgtgtggcctggatgtccaaagcccttttgcacagattcacagatcacatttgtgccgtgccctctgcgcctccctgctcccagctcctcgatgccacttgctgttgtcctcattctgcattttctccctgcgttgccttcctggtcagaactcagtccccctccccatgcct

SEQ ID NO: 513960 - DNA, 444 bp, Homo sapiens
tatatattttacaagatgctatgagaggacaagagaaggcaggaggacctaaacctgactaaagatgtcagggaagcaagtcttagagctgagacttggaagatattcaaggactaggcaaggagacaaagtgaggaagggctttttaaggaaaaggatcaaaagggcaaagacctgggtcagcacggccatttctggaactcccaggatgccggtacaactggagcatgaattgtaagaaataacagttaagagaaaacatcgagacaaaggcaggcaagggccagatcatggacaactgggagatgcctttatcaggagtttggatttcaaacttgaaagtgaatgaggagaagaaattaatggtgtagctcttagattaaaaaaaaaamaaacaaacattatctggagatgttggtaaatcagtctacatgatcccataaa

SEQ ID NO: 513961 - DNA, 528 bp, Homo sapiens
atttcattgattcttcatagaagctctttgaggtaggtcatatttcacaattttcataggcatgaaaactgagtccatatactcctatacttgtatacttcctatacaagttattaagaaaatatgccccaaatcccacagctatgatgcaatagccttaggattctaagaactctctatcatagtactccctggagaacagcgggggtaaaatctacatctggcatgattcaccaccctagtgataacacatagtacatccrtaagggtcaccaagttccggacgcatcctgagaaatgtgaagactgtgattctagcaacgaggaggagacctgggtcactgggttgaaagatgtgatgaggcaacatgtgatgcccattcttgatggaaacaaaccagcaaagggtttttctcattgttttaagtgcttttaatgaattgattcattaaccacagagatattttccacagcaccacttactgccgaactttctgccaagaacaaggccaaaggcaaagatctccg

SEQ ID NO: 513962 - DNA, 528 bp, Homo sapiens
atttcattgattcttcatagaagctctttgaggtaggtcatatttcacaattttcataggcatgaaaactgagtccatatactcctatacttgtatacttcctatacaagttattaagaaaatatgccccaaatcccacagctatgatgcaatagccttaggattctaagaactctctatcatagtactccctggagaacagcgggggtaaaatctacatctggcatgattcaccaccctagtgataacacatagtacatccgtaagggtcaccaagttccrgacgcatcctgagaaatgtgaagactgtgattctagcaacgaggaggagacctgggtcactgggttgaaagatgtgatgaggcaacatgtgatgcccattcttgatggaaacaaaccagcaaagggtttttctcattgttttaagtgcttttaatgaattgattcattaaccacagagatattttccacagcaccacttactgccgaactttctgccaagaacaaggccaaaggcaaagatctccg

SEQ ID NO: 513963 - DNA, 528 bp, Homo sapiens
atttcattgattcttcatagaagctctttgaggtaggtcatatttcacaattttcataggcatgaaaactgagtccatatactcctatacttgtatacttcctatacaagttattaagaaaatatgccccaaatcccacagctatgatgcaatagccttaggattctaagaactctctatcatagtactccctggagaacagcgggggtaaaatctacatctggcatgattcaccaccctagtgataacacatagtacatccgtaagggtcaccaagttccggacgcatcctgagaaatgtgaagactgtgattctagcaacgaggaggagacctgggtcactgggttgaaagatgtgatgaggcaacatgtgatgcccattcttgatggaaacaarccagcaaagggtttttctcattgttttaagtgcttttaatgaattgattcattaaccacagagatattttccacagcaccacttactgccgaactttctgccaagaacaaggccaaaggcaaagatctccg

SEQ ID NO: 513964 - DNA, 532 bp, Homo sapiens
taaaattaagttatataataagtaaaatatgcattagcacagcacagatttaaaacattcctgactcctgacatactattatggtagcattctctctgtttttaaacacatgcagaaaaaaatttggaagtgtatttgaagctcatctttctcaactaagaaaagaacatctattctgttgccctctgtcacagtaatttttggcccaaaagagcgagtcaactcatgactaaaaaagccagagtctatattaaactctgatgtttttaaaacaaaataattgtaggaattccatgttattattggacctatccccagattgaagaaaatatgctttcctagaagtaaagccattgcccattggaaatgaactgtctccctagtagagtgtttgatttgtcaataattctcttcagatgcrtgcgtgctgtgtttcctgtactagggccttaggcttttttttatctcaccttaaatttgacctagtgtctagccttattttgtatttgtcttagtcccgaaaacaagcagg

SEQ ID NO: 513965 - DNA, 576 bp, Homo sapiens
tgccacactccagaactttacagcttccagatgaccagttttgtggaagtcacccacccctgcatgtatatatactcctcccattccctaaaggcagcatttcagtgctgaaaaraaaagagcatgtagaaatacatatgatggttgtatagtcggccttacaggaaagggtgccttactgaagcagatgaagataagaatgtcagtccctaagaattagggacaatctgttgccaacttgaaatatttaattacgaatatttgggacacacggtaaggaatatgaaaagcataaattcataatccagtaaacattagccttttaacctcatgggtcttatgtcataaattcaaaataaaactttaaaaacttgttgaataaaagagcctttcctctggaagtaaatgaaaggaaggctgatccttttgcacccaccttttgcatttatcagcatatccatcatgaagagtggagaaggaaggcagttggtgaacaggtagatatatatataactcatttattaccattttcttagcacacattgatgtttgggtaaggagtgaaacttagtgtgg

SEQ ID NO: 513966 - DNA, 524 bp, Homo sapiens
gggtcctggaagtcagaagtccaaaatcagtctcacagagtgacaatcaagttgatgaaaaggctgcttttctttctgcagacactcggagagaatccatttacttgccttttccagcttctagaggtcactcacatttcttgtctcttgaccctcttacatcttcaaagccagcaatggccagttaaatccttctcatgatgctatccctctggttctggcacttctgcttccctcttccttgtttaagggcccttgcagttacattgggcccacaggtaaatcaggcataatattcttaccttaaagtcagttaattaggaaccttaatttcatatgtaacttttcttccattggccatttaacataacatwttcacaagtccaggagtcaaaatgtgaatattctggggggatcattgttctgcctaccaacacttggaaagcagaattgcttatttaagtccaaggtattgtctttcctttatctcaaaaaggctccaacccaagactgttggtcccaca

SEQ ID NO: 513967 - DNA, 524 bp, Homo sapiens
gggtcctggaagtcagaagtccaaaatcagtctcacagagtgacaatcaagttgatgaaaaggctgcttttctttctgcagacactcggagagaatccatttacttgccttttccagcttctagaggtcactcacatttcttgtctcttgaccctcttacatcttcaaagccagcaatggccagttaaatccttctcatgatgctatccctctggttctggcacttctgcttccctcttccttgtttaagggcccttgcagttacattgggcccacaggtaaatcaggcataatattcttaccttaaagtcagttaattaggaaccttaatttcatatgtaacttttcttccattggccatttaacataacattttcrcaagtccaggagtcaaaatgtgaatattctggggggatcattgttctgcctaccaacacttggaaagcagaattgcttatttaagtccaaggtattgtctttcctttatctcaaaaaggctccaacccaagactgttggtcccaca

SEQ ID NO: 513968 - DNA, 508 bp, Homo sapiens
cctgcccctcactcactgactcccctggaacctaacctatcatatagcaattctcttctcagttgttcttcaaagggagtggagaaagaattgacagggtaagcaaatcctatgagtgttagaaatgtttcattttccgttggtgatatatctgtatttgtttctgatttcaccactgaaagtgtcatggatttacactggaaccccacagtatagtaagttatgcttattagaaagtacttagaaaaagattttctagattattgrtaacatctcttttccatcttttgattgtaacttgattattattaaaatctctaggagttatttgtgtaacccacttggcagacttccaaatagtttaaatggttttatttaggcattttttttgccctaacattttctaatacctcagttactcacgtattttttgaaatacctaaaacagataaatatatttttaagtatatatttttcaggtattttaagaatttgaaaagacatccta

SEQ ID NO: 513969 - DNA, 469 bp, Homo sapiens
actcactgactcccctggaacctaacctatcatatagcaattctcttctcagttgttcttcaaagggagtggagaaagaattgacagggtaagcaaatcctatgagtgttagaaatgtttcattttccgttggtgatatatctgtatttgtttctgatttcaccactgaaagtgtcatggatttacactggaaccccacagtatagtaagttatgcttattagaaagtacttagaaaaagattttctagattattgataacatctcttttccatcttttgattgtaacttgattattattaaaatctctaggagttatttgtgtaacccacttggcrgacttccaaatagtttaaatggttttatttaggcattttttttgccctaacattttctaatacctcagttactcacgtattttttgaaatacctaaaacagataaatatatttttaagtatatatttttcag

SEQ ID NO: 513970 - DNA, 516 bp, Homo sapiens
gatcatatgtctacatattgtctatgtctgcttttgagctacaatggcggagttgagaaagttgtgaaaaattcctcctatgggtcataggcctaaaatgtttgatatcttctttatagacaaagtttatagactatagtgtggttgctaaactgatagcattattattatcacttgggcatttgttagaaatgcaaactccagagccccaccccagagctactgactcrgtaattttgggggtaggcccagcaaatctgtatatagataagaccgccatgtaagtctgatttaggccaaagtttgagaatactgctgtagagtactgtattcttatcacacagactagcatatagaccagaatacagttcatcgtgtgatcattattccttttcttttcttttgagacagggtctcaccctgtcacccagactgaagagcagtggtgtgaacatgcctcactgcagattcaatctcccagactcaagcaatcctccttcctcagccttctatgca

SEQ ID NO: 513971 - DNA, 521 bp, Homo sapiens
cagctggagtctgggagtcactctaaattgaggagacagagctggaagacaagggaggccaagatggcaaatgttcacagggcatagaagcagaaaggagagagatgcagaatgagggagaaagctccataaacctacaaagkttccctcccctacctttagctgaataattatcagcatatcacatatgtgtgaggaaacttccagaggtattgaatcaaccaaaagaaaatgagtgaacaagtcccaatatttacacagggctggaaacagtttggactgaaaatacatcatgctcctctgagccaacaagatcctgtaagtcccaggatgatggtggcttactcagcagaatattgtctcggtaaaggggcaaaattgtctctacattaaaggctgtgcttgtcctgcataatgaaaccttaaaagtacatcttaaaagaattgaaccatttttaagtaaattcattgtatccatgtaatgacaagactgatgctacagagcttggctttctgaaggc

SEQ ID NO: 513972 - DNA, 542 bp, Homo sapiens
ctggattggttacagctcagcatttgccttatttgaacacagtttgaacactcagcagtgtrtgagtggttgatgtatggctgctggaattggccaagactcagctattgttacaggtgcatactcctaagttaggttttcagtctcgtctatgtattaagttaggttacggcttgtccacaaggactcaaatatagaagtatggagtccttctcaggccatatttagtttgctttaacactatgaatgtactaaaaaccattaagttgtacactttgagtgaattatatggtatgtgaactatatttcaactaaggtattaaaatggaattagaatttctttctatctgtagcctaatttatttcttagtaaaaccacaagcattgatccagtatgtaaaaatacatgctgataattatttatttagctgctatcagttattaatgtttccatatgtattcctgttccatactaccactccattttcagaaggtagccagactttgtcccttctcatctaaagggaatttactagcccagc

SEQ ID NO: 513973 - DNA, 542 bp, Homo sapiens
ctggattggttacagctcagcatttgccttatttgaacacagtttgaacactcagcagtgtgtgagtggttgatgtatggctgctggarttggccaagactcagctattgttacaggtgcatactcctaagttaggttttcagtctcgtctatgtattaagttaggttacggcttgtccacaaggactcaaatatagaagtatggagtccttctcaggccatatttagtttgctttaacactatgaatgtactaaaaaccattaagttgtacactttgagtgaattatatggtatgtgaactatatttcaactaaggtattaaaatggaattagaatttctttctatctgtagcctaatttatttcttagtaaaaccacaagcattgatccagtatgtaaaaatacatgctgataattatttatttagctgctatcagttattaatgtttccatatgtattcctgttccatactaccactccattttcagaaggtagccagactttgtcccttctcatctaaagggaatttactagcccagc

SEQ ID NO: 513974 - DNA, 559 bp, Homo sapiens
tgacatatttgcaaaagcaggtaaatgtggtcttaggtacatggtaaatggcaatggttaatttgttcttttctaacctaattagcaaggaaaaaccgaaactgttcacattcacatgaaatggacaatcaaataagtttacactttgtcacagggttttggtaactctcttkctttctataataatattgtccaaaagcatatggaaactcctgacatcttatagaatatcacattgatgtttttcattagtgacatattttttagcctgagtgattaaggttggcttgcatgctgaaggcatctatagagctcaggtgcttcaggatgtgagacataaccgtgtgtgttttagggcctgccacaattactacatttttatggttttagtggcaaggggcttttatatgacatgcttagcaaaaacaaaacacaaattatttcaacttgcacctccttccaaagagaacaaggaaaacattcagtggtttttgagttttgatgtcatcattttactagggctactattttagctactagatgaaccgaaacctgccat

SEQ ID NO: 513975 - DNA, 559 bp, Homo sapiens
tgacatatttgcaaaagcaggtaaatgtggtcttaggtacatggtaaatggcaatggttaatttgttcttttctaacctaattagcaaggaaaaaccgaaactgttcacattcacatgaaatggacaatcaaataagtttacactttgtcacagggttttggtaactctcttgctttctataataatattgtccaaaagcatatggaaactcctgacatcttatagaatatcacattgatgtttttcattagtgacatattttttagcctgagtgattaaggttggcttgcatgctgaaggcatctatagagctcaggtgcttcaggatgtgagacataaccgtgtgtgttttagggcctgccacaattactacatttttatggttttagtggcaaggggcttttatatgacatgcttagcaaaaacaaaacacaaattatttcaacttgcacctccttccaaagagaacaagsaaaacattcagtggtttttgagttttgatgtcatcattttactagggctactattttagctactagatgaaccgaaacctgccat

SEQ ID NO: 513976 - DNA, 521 bp, Homo sapiens
gtagatgtttgcatctcaacattcttcagaaggaccagctattcaatatgatctgtccctgcaggtcctctcaacacagaaaattttgtagagaaactcagctatgagcccatgatgatactttggatccctttctatcaattaaaacattgaccctctcccatcagggccagaaaataaatataaaaaatccctggatttcccacttccctagtgtacagttacctgagtaaaaagtcatagactccctttgcaaaaaaactaggtaatcattactgcagacaattcccacagttgcagtgccctttcttcttggaatctggtctctcttttagtcaatgagttccaagtatgataactggtttgaggctggaaactgataggagattatcacttttcattagaacactgtcttccattttctgwtcattcattcctaatttcatttgtttgtataaatgaaacagtatctttattggctgtacatccgtgttgtgctttggaacactgtgcgttctttt

SEQ ID NO: 513977 - DNA, 521 bp, Homo sapiens
gtagatgtttgcatctcaacattcttcagaaggaccagctattcaatatgatctgtccctgcaggtcctctcaacacagaaaattttgtagagaaactcagctatgagcccatgatgatactttggatccctttctatcaattaaaacattgaccctctcccatcagggccagaaaataaatataaaaaatccctggatttcccacttccctagtgtacagttacctgagtaaaaagtcatagactccctttgcaaaaaaactaggtaatcattactgcagacaattcccacagttgcagtgccctttcttcttggaatctggtctctcttttagtcaatgagttccaagtatgataactggtttgaggctggaaactgataggagattatcacttttcattagaacactgtcttccattttctgatcattcattcytaatttcatttgtttgtataaatgaaacagtatctttattggctgtacatccgtgttgtgctttggaacactgtgcgttctttt

SEQ ID NO: 513978 - DNA, 591 bp, Homo sapiens
tcagactttctcaggtaaataatatgttttaaatttgtcagttaagggttgaacacacaccttgcactgtctgcattccagaagaaatatgaagcattttcactgaaatggacgtgaggttccaccacctctcctcactatggtgagggaactctaggcacaccacaaactctctttatggaggtctcttgaatagtcactgccatcttggcgactcctggaagaactcctagcagaacttaggtggtcagctaagaattgaattgttcttggcaacttccttagcaagttttcctttggttgtctaatacatctttgtggaataataaagtactatttggagcttcagatacaccgagaaaaagagagcaagggagagaaagagagatttaaaaaatcatgttacatgtcctatgataattttgagtaattaaagtttataatgaataacactttatttggtataaacatggtstctgtggtacatttgaataatatattaatgacagtttcaggcacatatttttatgatgtaatattataagtcctgtaagcattacagtgagtagctttgcatctctaacttcctct

SEQ ID NO: 513979 - DNA, 640 bp, Homo sapiens
taaacagagtgtcttatacattaataaattgacctaggtaataattatcatctttttctttatcgtcatcattgatatcatcaggaccacttacaatataccaggtagatgatagtctatttaatcctataattaatttttaagatagatggcataattttccttcttttacaaataaagaagaaattgaggcacagagaatttgaatgacttcctaaggtcacaaagctagtaaatgacagaaacctgatcccagttcaagtagtttggctccagaccccatggtcataagctctgttggctattgtctctccataagatgtacagtgtttcaaataatctcattttctgtgagctgtatttttactttgggaaatataatttatttatgacatctctyatatttgtattacctattaaatgattaatcatctctatgttgaatattctactttagatggccaaggattgcttaagtgaaaactggccaaaattatattccaagaatgcctcctataatttctattagatgtgaaaactagcaaatttcctttagatgtcatgcctatggcatggcaggtgtactttatataatcatgttccatgaaataaacatctgactgactcatttttgttttgc

SEQ ID NO: 513980 - DNA, 482 bp, Homo sapiens
atcaacatgaagcctggctgaggagagtgaagagatgtgtgatgacagagaataggccaggcttagtgtgacaattctaggtcggcagaactaatatggcctgacttcgtgtccccaactaaatctcatgttgaattgtaattcccaagtgttgggggagggaccttgtgggaggatgattagatcatgagggcgtccccgccatgctattttcctgatagtgagtaagttctyatgagatctgatggttttataaggggcttccccttcaatctctctcattcttctctctcctgccaccttgtggagaaggacatgtttgctaccccttccaccatgtttgagtttcctgaggcttccacagccctggggaactgtgagtcagttaaacctattttctttataaattacctagtctcaggtatgtctttattaacagcatgagaacggactaatatagtaaattggtactagaagttggg

SEQ ID NO: 513981 - DNA, 482 bp, Homo sapiens
atcaacatgaagcctggctgaggagagtgaagagatgtgtgatgacagagaataggccaggcttagtgtgacaattctaggtcggcagaactaatatggcctgacttcgtgtccccaactaaatctcatgttgaattgtaattcccaagtgttgggggagggaccttgtgggaggatgattagatcatgagggcgtccccgccatgctattttcctgatagtgagtaagttctcwtgagatctgatggttttataaggggcttccccttcaatctctctcattcttctctctcctgccaccttgtggagaaggacatgtttgctaccccttccaccatgtttgagtttcctgaggcttccacagccctggggaactgtgagtcagttaaacctattttctttataaattacctagtctcaggtatgtctttattaacagcatgagaacggactaatatagtaaattggtactagaagttggg

SEQ ID NO: 513982 - DNA, 583 bp, Homo sapiens
cttttatgatctagagatgtttccaatttctagggcttcatctcttttgaaacaaatatctaggtaaatagcttaatagtcttcacggcacataggggcccagttcggtaatcatttagcccttttggaacagagtaattaaccaaatgaatgtctacaaattgaattttcaggtcacatggagaataaagtgcttccaggagaagtaaaaacaaacattctttatttttatattttatacatctctctgtcttagacggatggggctttttacaacagcatgaagaaattcaggtaagtttattttcctacactaatgtacattcaaaaattcttagtaaaagaacaagaaaagtttattatgcaggaagttaaatcagcaactctaggttgcttaaaccctgcccattccaggaaaaaaaaaaaaaaaaaaaagcctgtctccttcaatggttcctggaagatgagctatgagcccttgtaatattctgcctaaatgtatgtttgtatgccttgamgctttggaccacatagtaacagtttgagcagacagtctgtggtaacagtataatttatggtgcat

SEQ ID NO: 513983 - DNA, 564 bp, Homo sapiens
caagtgaatcaatgaacaatgagacacagtattaacattttagatcgtgtttaaaatggttacccagttggcctagatctgtaagtccaggtggtggttttgcaataatcgtgtggtgatgtatcccacctgataggttgttctccctttstctggttcagttagtaaatgttatttcatgattggctcttctgccctggaagttgtcgagctggctcatgttactaaactctgattcagttaaacattgctaggttgtattagttctaaaatgacttgttccagtttgtaacactggatgaggctatgagttttgtaccatattaatttgatcttacatcctggcaattagccccaaatagcaatcttaatcttgtcccaaaacagcagtagtagtttaagtatttcagtgaaagttaccttagggcaaagcgaattgcactgctaagctataaagtctactttgtacttttatttaaagatctgacttctatgtgaacattcatgaactattttatcctatttcttccctgtcttctagatttctaatctatttgtggaagc

SEQ ID NO: 513984 - DNA, 627 bp, Homo sapiens
tagaaaactatgaccagtgagccaagcctggcccactgcctgttattctaaatacactttttttctgaaacacagacacaccaatttgtttacacagtgtctatgaaagctcttccattacaacaacagagtttagttgttgctgtagacggtgtagtccacaaagcctcaaatatttactatctgcccctttacagaaaatgtttgccaatctttgctataaacattcttttgcccctgacatatttttgcttcacaggaagtctgtggataacacatgtctgtagttgctatcaaaactctttatcttctcttattgtggtagcaaatagagtaagacaaaagtgaagaygagaaagaatgtcattggtaaaaattacaaaccataatcatgaactaaatggaatttttgatgagcaaagttacaagagaagaaatggatgagccacattgaaaattcagcattctttgaaacttgtgactataagcattataaaaaagaagcaattaattataacttctttataagtatcacaaatatctcttgggcaacggtctcaaaaaataaacaaagatgtaaacatccctagactctagtagactgtttataacagaatgccaaataat

SEQ ID NO: 513985 - DNA, 650 bp, Homo sapiens
actatgttccactggagtttgtgcaaaatgagtttgttgatgtcacagcctgaattccactgcatgtttcatattaactcccccgtaaatttgcacatgtgacccatgagtttgcatgactgtgcatgccccaaggacttccaaaccttccaccaatcacctgccaatcccagtatcacctgctaaaccttttctaataaaaatactgtcttaatgacagtgcaggaagacaggtttgagcttgacactcctgcctccttgtgactcaccttgcagtataaagcttttwttttttttccccctaaaaaaaaaagaagctggtgtcatagtactggcttctagcacatcgggcagtgagccctcattgtctctgtgacgctaacattggagaatctctcatctttattgattttttctaatattaagcaatatatgatatgccagcaccggcagaagtttgcttttgcactaaatcttgaagggctaatagttccctcatggcccacatcatcccattctaacttaccagacaagttcagggataagacatgggaaactgccacacaattatattacttctctgttgctacataacacaataccaaaacttatcaacctgaaacaacgcaaatgtattatctcatagtttc

SEQ ID NO: 513986 - DNA, 615 bp, Homo sapiens
tgtgcagcttagaggaggctacagtttacaaccaacccacctttcactgaaaacctacctttaaaccaagttgatatagcaggacacagatagccaacttctactccctatggtccttgcaaatatccttggaaatgtgtaagacctacattttgtaggaaaagcaaaacattttgattcaaggagaatccttattaaagattgggaatgtaactgttggacatcttctttggcaatgagcctgctgattaggtcttgtgccaagatgtgtacgagaaaggcattggagagccacggtacagtgtagataggggaaaagagcggaatggttatccccaggtttagcatatcaaggaggtttgacctctttatgaaaaattcggactcttggagacgttggctgggttagtgctgccttgtggrtagaggacctcaacaccaacatgctctagggttatactctatttgttagagctgaaaaaaatgtgaaaatattgacttgtagctggaactccctcatgacaatctgtaaaatggaaatacttatagagcacttcaaagtattcaaacaagagctacaggagagaacaagctcacagagaaggcgtcaagggt

SEQ ID NO: 513987 - DNA, 581 bp, Homo sapiens
agacttctaggcatgactatccaacttgagaaagagtctagacgtccaattaccaaaggttaatttgtatttattattccaatgcaggtacacaccctatgccctcaactaagcagaaaatttaatttcatagattcttctctttttctagaattctgtttatttgacatttgaggacatgataaatgtagaaaaaataatgattatttattccagagattcatttataataaagttgaagccatttgattatatygcctagttttcataaaatctattttaaaaacgtttaaaaattattaaggtaatattagtacctagaccaattgcttcatttatttaaaaggagtattttggaggtaagtctaacaattgcattacatcaaaagtacatattaagaatcataaatatgtaattattaattcaacaattatattatctctttaataatttgatctgtattatcttaccatatgtttatttttacatcttagttatttttgcactttaattcagaagctccactttggtgcaaaatgatataatcataaactgtaaatcttgatatggacccttggag

SEQ ID NO: 513988 - DNA, 581 bp, Homo sapiens
agacttctaggcatgactatccaacttgagaaagagtctagacgtccaattaccaaaggttaatttgtatttattattccaatgcaggtacacaccctatgccctcaactaagcagaaaatttaatttcatagattcttctctttttctagaattctgtttatttgacatttgaggacatgataaatgtagaaaaaataatgattatttattccagagattcatttataataaagttgaagccatttgattatatcgcctagttttcataaaatctattttaaaaacrtttaaaaattattaaggtaatattagtacctagaccaattgcttcatttatttaaaaggagtattttggaggtaagtctaacaattgcattacatcaaaagtacatattaagaatcataaatatgtaattattaattcaacaattatattatctctttaataatttgatctgtattatcttaccatatgtttatttttacatcttagttatttttgcactttaattcagaagctccactttggtgcaaaatgatataatcataaactgtaaatcttgatatggacccttggag

SEQ ID NO: 513989 - DNA, 587 bp, Homo sapiens
ataattccaggtaacctttctgttgatatatttagtatacctatgagtatttggagaactctggaaaaataaaatatttattgacaaatgaaaatgtctttactaggaaatatattatttcaaattcaaaagtatccaaggcaatctgggaaattctattcatactatgaaggctcctatctgaaatttccttttgttagataataacaaaaataatggctaacattcattgtttattaagtgctttatatgtattaacctgttgattcactaaacaacccagtaagatgggtagtattatgcccaaattatagactggaggcagagagtgattagttaagtcactcaaagtcacaaagatggtaagtgacagacatgagatttggtccaaggtaattgtttccagagttcttgctcttaacaacatyacagctctcagacaaggtggagaacacagaaagtaaagttgctgttttggaaatttattccatgatacttcaggcactgtggctcagcagtctggcagccaatgctttctgccaatctctcctgtttccctgtgtccactgtggtccacattcattcca

SEQ ID NO: 513990 - DNA, 373 bp, Homo sapiens
ctttcagcacctgacattgatggtttctaattccatgtcatgtggtttgaactaccatctctcttcctgctttcctagatacagtagctccactgatgagacatctttctgaatacttcacatttagatttccagtgatgctcttttgggccttatgccttggcaatatttgattctgccagctcccttacctaatacccataacttaacttctcaggcatctcttttctstctattcctatttctactcttctgggcaggtcttcttgcttgcaccattactagcctctgtccagtctatggtactcttcacactgtggttgaattgacattcttcagctacatgcctaaatatataattccttttctcaca

SEQ ID NO: 513991 - DNA, 557 bp, Homo sapiens
taagggcattctttcagcacctgacattgatggtttctaattccatgtcatgtggtttgaactaccatctctcttcctgctttcctagatacagtagctccactgatgagacatctttctgaatacttcacatttagatttccagtgatgctcttttgggccttatgccttggcaatatttgattctgccagctcccttacctaatacccataacttaacttctcaggcatctcttttctgtctattcctatttctactcttctrggcaggtcttcttgcttgcaccattactagcctctgtccagtctatggtactcttcacactgtggttgaattgacattcttcagctacatgcctaaatatataattccttttctcacaaatcttctatggcgtagcaaatgagcagtgcctgccttacgctttcctgctgattggcctcttctcatgctatcctcccagcttaaactatctcccagcctcagtatcctggcatttgcatcctttccatcattctgtgcttatggcaaacaccaccttctccatgaagcctct

SEQ ID NO: 513992 - DNA, 600 bp, Homo sapiens
gtcctaagggcattctttcagcacctgacattgatggtttctaattccatgtcatgtggtttgaactaccatctctcttcctgctttcctagatacagtagctccactgatgagacatctttctgaatacttcacatttagatttccagtgatgctcttttgggccttatgccttggcaatatttgattctgccagctcccttacctaatacccataacttaacttctcaggcatctcttttctgtctattcctatttctactcttctgggcaggtcttcttgcttgcaccattacyagcctctgtccagtctatggtactcttcacactgtggttgaattgacattcttcagctacatgcctaaatatataattccttttctcacaaatcttctatggcgtagcaaatgagcagtgcctgccttacgctttcctgctgattggcctcttctcatgctatcctcccagcttaaactatctcccagcctcagtatcctggcatttgcatcctttccatcattctgtgcttatggcaaacaccaccttctccatgaagcctctttgggggatatgttctgttcttccctctaatagtctgta

SEQ ID NO: 513993 - DNA, 621 bp, Homo sapiens
ctgtttgccttgggcaggttaatttgcctctctatgcttcagtttctttgtctgtgaaatggagataatgacattgcctacatcacagaattgtgaggattaaattaattcttgcaaaatgctcagagcattaagtgttaaatatgtgttaaaaatgaagcacatagggaatttgcaagcaatagcagaaattatgggcctcctgtcccaatccactgttacttaaatgaagaaagaagttttgacattcatttattcgtcaatcatttgtcagactgctgtgttgcaaatagtgagttaaatagtgggcaatataacaggcagaggcacagaatctgaccacggtggggaaggggatgaagggatggtgggaggtggcaatggacattcttttctttttacagtagagagtctccccccatyctccactcccagtgctgtttgagagcaagagcaggcattgtgctttgtggaagctgaatagcaagattctaatttcaggggtgatgtgaggatagcagacagatctgagtgtgttcagtgggagcattccctcgggcctgccgtgtctccattcactgacactgatgtacagtgactgccctctcttctcctccttaa

SEQ ID NO: 513994 - DNA, 610 bp, Homo sapiens
gatagcgtcatttcttttggactgaagtagtttaaatattattggaaatcttttatgattcatttatccaatttttccctgtgattatttgtcattccaaatcttatatggttttattctttttaatttatgtaatcaaaatgtcaagaatattgttggcattattagtmaaagaaaccatgttcgaatccacttatgcttttacaattttccattttctattttattaatcacatacaatctttattaaattcttctcttcttgtttttgcatttttgaaagtactatgaattttttttaatgaaggctatacatttcccatggagcaaaaatacataaataaataaatggattactctttgtagtgtcggtggacgtcattcaatcagttgaaggcattaagagcaaaaactgaggtttctaaaaaaggaaaacaatagtttcaagtggtggtgcacacccataatcccagcactttgggaggctgaggctggagtatggcttgagcccagcagcttcagaccagcctgggcaacaaactgagatcccatctctacaaaaaataaaaaaaagtcagccaggaatagtggtgtgtgcctgtggtcccag

SEQ ID NO: 513995 - DNA, 457 bp, Homo sapiens
tactagcaattgatattgtcaggtttctgtggatgtatgtcactctaataagtgtgmagtggtatcacattgccattttgatttgtatttccctagttacaaatgatgttgagcacattttcatatgctttttttttattgtatatcttctctggtgaggtgtccattcagatcttttgcgtatttttcagttaggttgttgtcttcttatggttgagtttcaagatctcttgtgtattttggatacacgcgtctataaaaagatatgtggtgtgcgcatattttcctcgtagtcggtgattggactttttattcttaaataactcattgtaattttaaaattcattttaaggtattaataagatagatgtgataactactttttatgctattgactaccgtgttctccattttagcaaagtgatgttattattggcaatgcatgctaatacagtga

SEQ ID NO: 513996 - DNA, 636 bp, Homo sapiens
atatatctaaagaaattggaacagagcctaatgagatattattatcatctttatacctagaatatttctactaaaatatacctatgaatgtcatttccaaaaagataaggatttatgtccattttattaacaaccgaatccaaagttcctggaataatgcaaatagcaggtgctcaataagtattcattgaatgaataagagagtaccactaataggcatatacagttgtwgttattcctttaataagcagatagtgcttagtatgtgacatacattattccaatactttatataactcaatacatttaatccctgtcataacttcatgagatagcctaattgcttccttttcacaaatgagaactctgaggtgataagaggtatcactgcttgtcaaaggtcacataggaaataaatggcaaaagtagtatatgaacccagacactatggctctagagtttcatgctattatcgatgacactacagagttggctctagggtccacagacatggctgtaatgacagttcccaagtaaagggtctcttttttatttaggcagagtgtcttaattgatatgttcactgaaggatcaagtaaattcaaaatgacagcaagcctttaatgatctctccag

SEQ ID NO: 513997 - DNA, 594 bp, Homo sapiens
gctgatcattttcagcagagcgagacaatatgagagagaaagtacaaggaaaggatctgtaccttcaaaagatatgaatacaggtgcaataacttaaaatgtcagtgagtggaattttcatgttaaatacatgtaagtgaggaggaaaaaacggagaaaacatacaagttgtatttttctctaatttgaatcatagatattgccacttcatataatttttaaattcctaaagtattatatttttggtgtataactatggaaatatggaaaaataacaaaataacctcccatcaatcaccatcaaatataagaaatagaacattwcccatattgttgtaattgtctgtatattcctgtccccccaaatttcatccattgtcttctctcaaacctgtaatttatataattttagtttgctgcttttttacttaaaatagtatcatgaatttgttagctttctactttctataattctgccctcctttttccacttattcttgattgtaaattgtttctttgttatgttattacatattttcaaaccacatgttttaaagttacaaattctatttttctatcctgttgtttacactt

SEQ ID NO: 513998 - DNA, 594 bp, Homo sapiens
gctgatcattttcagcagagcgagacaatatgagagagaaagtacaaggaaaggatctgtaccttcaaaagatatgaatacaggtgcaataacttaaaatgtcagtgagtggaattttcatgttaaatacatgtaagtgaggaggaaaaaacggagaaaacatacaagttgtatttttctctaatttgaatcatagatattgccacttcatataatttttaaattcctaaagtattatatttttggtgtataactatggaaatatggaaaaataacaaaataacctcccatcaatcaccatcaaatataagaaatagaacattacccatattgttgtaattgtctgtatattcctgtccccccaaatttcatccattgtcttctctcaaacctgtaatttatataattttagtttgctgcttttttacttaaaatagtatcrtgaatttgttagctttctactttctataattctgccctcctttttccacttattcttgattgtaaattgtttctttgttatgttattacatattttcaaaccacatgttttaaagttacaaattctatttttctatcctgttgtttacactt

SEQ ID NO: 513999 - DNA, 621 bp, Homo sapiens
aaccctttccaagtggaagcaatctgtttcatgacatcaaataatacaggccctgccagtttatggctttgccagcttcctcatgcaggtcttatctcaggtctgagatggctgttctaacccccaccattacatccatactccaacaaaattacaatagggaaagaayaggaagaacctgccccttttctcgtaaaccacataactctgaaatagcgtatattgcttccttccagtccaagaaagtaatcttcaacttgatgtccatgtgcctagctaaaattcctattcctgtagaagatagaaagatttgattttgttaacccatctagcaatccttcctatatatagctcccttttatactcttttaaacatgtaatttagttttcctgcttccctctatagctattcagatagacatgtaaaattttgattgcaaacattcagaacatcaaacaagatatttatattatcatctgatttctatagtagaattcttattgtcaattttgagctccctacaactgtaagtagtgagttaccccaaacaggaaatagaaattcactgccattcagaaaaacgttttgcagaagcaaaatgtcaatacaaaaagatctca

SEQ ID NO: 514000 - DNA, 184 bp, Homo sapiens
acaaaaactacagagctactaayatcaactgtgtaccacaaattgtcttggaataaagaaatcttcataaaattgcccaaacttgaattgatcagagcccttggactgcttcatctatactatgtgcctatgcagttgaaatcgctttctctctctttctttctctctcaaaccatataacacg

SEQ ID NO: 514001 - DNA, 184 bp, Homo sapiens
acaaaaactacagagctactaacatcaactgtgtaccacaaattgtcttggaataaagaaatcttcataaaattgcccaaacttgaattgatcagagcccttggactgcttcatctatrctatgtgcctatgcagttgaaatcgctttctctctctttctttctctctcaaaccatataacacg

SEQ ID NO: 514002 - DNA, 659 bp, Homo sapiens
cttacaaaaataagtaagtagtaactttgacataaaataattagagtgggctttttataaacaggcatttatatttgaaatcctatccaaaatactcaaattgtgaagatatattcaaataaaatgaaacagaaattctctgtaaattcacattcaaaatgctcttagtttgatatcctatgatttctgcaaatgctaaaaattaatcctgaattcaaatgtttatagttttacctatcatttatattgcagtttaaaaagatgaatgtgcaatgttttattaaaaagctatgaactgtgtccaaacagatataaagaaatgttgaaataggttccatgtagaagaatgtatggcttttattttccaaatagcaacttcaataaattaaagtgctcaatattgtaccagccagtgtcagaaatgaatagtgaacctgccagcagaaatgttttcaatttcttaagcaccatattggtccctgacagaatagattggctttttgacacaaagttgtagtggcagggattttcaaaaagaggaagaaaattcctctttaacaaactacccaagtgaygaactatatccaaatgtaacttagtataccaaaaattctattttggagtaagctaagacaaatgtcagtacaattatatgtcgg

SEQ ID NO: 514003 - DNA, 533 bp, Homo sapiens
gggaattttaggtgatggtagggtgaactagaattgcatgacagttataggaaatttgtttatttgccagaggaccctagtcagaggcccatggtatgagatgcaaagcctagccacctacagaaaaagaggatggccaggtgaattatcaagagaacatactggccgggcagggtgtctcatgcctatagtcccagtgctttgggaggccaaggctgggggattgcttgagccagaagatggaggctgcatggagctgtgattgtgccactgcactctagcctgggtgacagagggataccctgtccaaaaaaaaaaaaaamcaaaaaaaaaaaagaaagaaaagaaaaccatcgcatgagaagaggttctggaaatggcctcattgtgactgagagggacatgagctgtattaaggacgcatcaaggcagaagcccaacttatatacactgggccatcatggaggaaagaggagaaaatctcagctacacaggatctcaggacgaacccttcactgcactctattgatagc

SEQ ID NO: 514004 - DNA, 562 bp, Homo sapiens
tctgttagactttttcaatagggagtactatgggttcctataccatgcctagaccctgaagatacattaacttgcagaaatttgttgcagactcattcactgaagatctccctctcaattctgttttattcactgttgtagacttaaacttttccttgtgcatcttcactgccaattcagcgggatttggaaagggctggagggaaaacctgtgtgacaatttggccatcttgaactgaacaggaggcacatttttaatagcttaattgggtgaatagcttactagaaaatctggctttgtgtaggaaatgtatcccaaaagactgcattcacagacaggaaacagaaactgcaacctaaacttccacagacaagaatkaaataggaaattattatactcagtccaatagcgggaacttcaaacagacagcttcggctgtctactttttagtcccctttttctctgctcagatatgtaatcagcttaattgagtaggcaggtcttaattgagtaggcagatgatatagttagaaatcatcattatttttatcttctactttc

SEQ ID NO: 514005 - DNA, 634 bp, Homo sapiens
cgtacaccagattttttataaccacttttaaaataaaagtatttagattttaacacatagattaggacagagaaagcatatggtggaataaactgtatctttttggccagatggtgctatttctaggtcatcttgataaagagaggaggcaaacatgaaaacttaatgaaaaactatttatgatgctggagagaacatcttggctttgagtcacttttaaatcatagaagaggattattccataaaattatttataatgcctaaaattattctttgcccaaatcataaattttcagsattaccaagaagccatttagtatgtatagggtgtttcagcaagtgcagagatgcccaggtggttgggattcaatacaacgagctgtcacgctgcacattcttggagtacaaccttaatgggcattttcccacctgtgcaattcctctgttttcaccccactccattcatatttcacaaactactctaattatagtatttattattgacctcaggaaaaagaagtttgaaagggtggaaaaaacatgcattttgtctccatggatagtaaatcactgagctattgttccttgggaatcccaattcatgagaaattacatagacttttgccctaacact

SEQ ID NO: 514006 - DNA, 634 bp, Homo sapiens
cgtacaccagattttttataaccacttttaaaataaaagtatttagattttaacacatagattaggacagagaaagcatatggtggaataaactgtatctttttggccagatggtgctatttctaggtcatcttgataaagagaggaggcaaacatgaaaacttaatgaaaaactatttatgatgctggagagaacatcttggctttgagtcacttttaaatcatagaagaggattattccataaaattatttataatgcctaaaattattctttgcccaaatcataaattttcagcattaccaagaarccatttagtatgtatagggtgtttcagcaagtgcagagatgcccaggtggttgggattcaatacaacgagctgtcacgctgcacattcttggagtacaaccttaatgggcattttcccacctgtgcaattcctctgttttcaccccactccattcatatttcacaaactactctaattatagtatttattattgacctcaggaaaaagaagtttgaaagggtggaaaaaacatgcattttgtctccatggatagtaaatcactgagctattgttccttgggaatcccaattcatgagaaattacatagacttttgccctaacact

SEQ ID NO: 514007 - DNA, 634 bp, Homo sapiens
cgtacaccagattttttataaccacttttaaaataaaagtatttagattttaacacatagattaggacagagaaagcatatggtggaataaactgtatctttttggccagatggtgctatttctaggtcatcttgataaagagaggaggcaaacatgaaaacttaatgaaaaactatttatgatgctggagagaacatcttggctttgagtcacttttaaatcatagaagaggattattccataaaattatttataatgcctaaaattattctttgcccaaatcataaattttcagcattaccaagaagccatttagtatgtatagrgtgtttcagcaagtgcagagatgcccaggtggttgggattcaatacaacgagctgtcacgctgcacattcttggagtacaaccttaatgggcattttcccacctgtgcaattcctctgttttcaccccactccattcatatttcacaaactactctaattatagtatttattattgacctcaggaaaaagaagtttgaaagggtggaaaaaacatgcattttgtctccatggatagtaaatcactgagctattgttccttgggaatcccaattcatgagaaattacatagacttttgccctaacact

SEQ ID NO: 514008 - DNA, 634 bp, Homo sapiens
cgtacaccagattttttataaccacttttaaaataaaagtatttagattttaacacatagattaggacagagaaagcatatggtggaataaactgtatctttttggccagatggtgctatttctaggtcatcttgataaagagaggaggcaaacatgaaaacttaatgaaaaactatttatgatgctggagagaacatcttggctttgagtcacttttaaatcatagaagaggattattccataaaattatttataatgcctaaaattattctttgcccaaatcataaattttcagcattaccaagaagccatttagtatgtatagggtgtttcagcaagtgcagagatgcccaggtggttgggattcaatacawcgagctgtcacgctgcacattcttggagtacaaccttaatgggcattttcccacctgtgcaattcctctgttttcaccccactccattcatatttcacaaactactctaattatagtatttattattgacctcaggaaaaagaagtttgaaagggtggaaaaaacatgcattttgtctccatggatagtaaatcactgagctattgttccttgggaatcccaattcatgagaaattacatagacttttgccctaacact

SEQ ID NO: 514009 - DNA, 625 bp, Homo sapiens
tgtaaatatttcagatccttgcctgtatctatttctccttgcagaaaactgtaatttatctagatttttctaataattcactgacattttactgctakccaatgagtaaatcattgttgcttttggtatcttatgattttgttcttttgtgtcaaagtttagctagtttcatctatcaggttggaataaaaaatgcaaattatgactataccacttatatagttacatgatctactgaccaaagttaatcatcactttaatcttggtaactcattcagagccctaattgtaatagcctttgcctgagttacctagagagtggtctcaataatccccttttatttttcatgtagagaaaagggcacacaaaatgatattatctcgatcacccagcacatgtattaaactataacagactttttaaatcatgtgtgatcttttattttttgactgaaagggactaagtttgctgcccagagaagtctttagggagcaaggaaaggtaagcaaataaacttatctggagtcaaaggtctcaaggaaaatcttgctttctataaaaggcagacaacgtcaagactcatagattttcccagggctaaaaatcagagccaattgcctccca

SEQ ID NO: 514010 - DNA, 625 bp, Homo sapiens
tgtaaatatttcagatccttgcctgtatctatttctccttgcagaaaactgtaatttatctagatttttctaataattcactgacattttactgctatccaatgagtaaatcattgttgcttttggtatcttatgattttgttcttttgtgtcaaagtttagctagtttcatctatcaggttggaataaaaaatgcaaattatgactataccacttatatagttacatgatctactgaccaaagttaatcatcactttaatcttggtaactcattcagagccctaattgtaatagmctttgcctgagttacctagagagtggtctcaataatccccttttatttttcatgtagagaaaagggcacacaaaatgatattatctcgatcacccagcacatgtattaaactataacagactttttaaatcatgtgtgatcttttattttttgactgaaagggactaagtttgctgcccagagaagtctttagggagcaaggaaaggtaagcaaataaacttatctggagtcaaaggtctcaaggaaaatcttgctttctataaaaggcagacaacgtcaagactcatagattttcccagggctaaaaatcagagccaattgcctccca

SEQ ID NO: 514011 - DNA, 437 bp, Homo sapiens
ttatttcttactattaaagtgctcaacaggagttagaagaagaaaaggcaagtcctttgttactctacaacaagcttaaaaactgtcaagtttgaatcccaaataggaaccttatgaaaggagaatgaaagaagatggctccacccttaacatgcccaaaagtagcaaaactaattattactatttctaaatttaaaaccgtgctttagtatctgacttacatatayacatatatgcgtgcacacacacacacacgcacacacacacacgcaaaatggctgtgaaaaactgtaactctgctaaatacctgtcaaatattattatcttataatgtaagattagagctaagtcttaagtaccactaactggcaacttttcagtctccactgcaatcctcaatgtatctgaacacgaagtgtttaaattcctcagggtgc

SEQ ID NO: 514012 - DNA, 544 bp, Homo sapiens
tttcagggagaactttctttgttgcaacatragtcacacccccatacctgagcttatcattttaggaagtgcactctggtctgtgatttttcagatcaaattgcttagatcccagttccaaccaaggagggcagagttactataagcctcatgccttgacagacattttagctgatgcctcatccaagtcatttggcagcatcagttgatctttatgttcaaaaagattctgaacaaatgaatcaaagcagatatgaggctttcactctttccactagcactttaacccagaccaattgcatcaaaatgtgtctatatggcagccaaataaattgtgagacataaaccaattttaataaaatagaattttgtgtgtcatgacaccttgataataatagcgagacatggtcagattgcttgcgaattgtttaaagtggagagattactgaatcaggagacaatcctgacttctgacttcggataaggcagccactgcctgggataaggggagtgtactgcagagaactggctgatggcttttggt

SEQ ID NO: 514013 - DNA, 544 bp, Homo sapiens
tttcagggagaactttctttgttgcaacataagtcacacccccatacctgagcttatcattttaggaagtgcactctggtctgtgatttttcagatcaaattgcttagatcccagttccaaccaaggagggcagagttactataagcctcatgccttgacagacattttagctgatgcctcatccaagtcatttggcagcatcagttgatctttatgttcaaaaagattctgaacaaatgaatcaaagcagatatgaggctttcactctttccactagcactttaacccagaccaattgcatcaaaatgtgtctatatggcagccaaataaattgtgagacataaaccaattttaataaaatagaattttgtgtgtcatgacaccttgataataatagcragacatggtcagattgcttgcgaattgtttaaagtggagagattactgaatcaggagacaatcctgacttctgacttcggataaggcagccactgcctgggataaggggagtgtactgcagagaactggctgatggcttttggt

SEQ ID NO: 514014 - DNA, 542 bp, Homo sapiens
caaaagaattagccgggtgtggtggtgggcacctgtaatcccagctactcaggaggctgaggcaggagaagggcatgaacccaggaggcggagcttgcagtgagctgagatagcgccactgcactccagcctgggtgacggcgagattccgtttcaacaacaacaacaacaaaattaaccaatatatagatacaggggggttgtagagacaataaaataatattctaagctaaacgctatatttcatttggatataatttttaatcctagaattttaaggaatccagtttgaaaagtacttatctatacaaggggcttccatgcactttcagaatataggttttatttccattgcaaactcagagtcattcgtaatgttgggtgatattttcaggttagcattgtcaattttattatttatttatttatttagacaggatcttactctgttgcccaggctagagygcagtggcactatcatggctcactgcagactccatcttctgggctcaagtcaccctcccgcctcagcctcccaagca

SEQ ID NO: 514015 - DNA, 666 bp, Homo sapiens
ctatagagggaagaaagttaaattcatatcatgcatgtatagayggttaattcaaaatacaacttagaattcttgagtttatgtctattgctctaatgactagaccccagattggccatatcaacatgtgataccatcaatttctagtccgtggttggttgatccgttgaagtaagtcatctgagtggcctcgacctctgcttctgcattgatgatctgctgcactacagcctccgcaatgggcatcaccatggcagccgtcgaggtgttgctgagccacatagacaaaaaggcagtgctgctcatgaaccccagcgtcagcctgaaaccagagagccattattgtggagctgtgctcttagcttaactagcaccgtattatttaactggaagatgtttaagatgtgttttgtgagttgggaaattaagtctttcaaaacatggaaggttaagattctgcccagatgatgaaattggagtaccgtgacagccaggtagaaatcaaagccatatatgtaaaagtggagttcttaagagatttgtctcccagggaaccatgcaaattttctcttcagaaacagaaaaatgattaaaactaaacgaactgcaagttggttatatgacataacagcttataatattacaccaatatctgaatgctcttca

SEQ ID NO: 514016 - DNA, 595 bp, Homo sapiens
aaggtcttttagttattattattatttacaaattctgtacgaatttgagggcttagaaatttggaccaaaaggggtggggagtttttcccttccctccatgtagctctgtgagacctcagcacaaggagagataagccaagaatgctgcagctagaagattgcacctggtgggagacaacccacagatgccacagcaggkgccagtcccttctccagctttgcaggtaggataggccttgacagtgtccaaaaggactttattagctcacatgaattcccttcagaggtcccaggatcactggcaaaggcttctggcagaggctggagggaccaccatattatagttaatatgattctattataacccagactggtgtaacctcgattagtacttgttagaggagagcatcagcagggttcttgcccattaagaggagggactgtgcataatggagtgctgggaattgccccacctgtggagtcaacacacccaaggagactggcactgcacacttactgtgtgccaggcactgctccaaataagtgtttgaagagtgtttcttcatttcattctcacaacaagcctgctactat

SEQ ID NO: 514017 - DNA, 595 bp, Homo sapiens
aaggtcttttagttattattattatttacaaattctgtacgaatttgagggcttagaaatttggaccaaaaggggtggggagtttttcccttccctccatgtagctctgtgagacctcagcacaaggagagataagccaagaatgctgcagctagaagattgcacctggtgggagacaacccacagatgccacagcaggggccagtcccttctccagctttgcaggtaggataggccttgacagtgtccaaaaggactttattagctcacatgaattcccttcagaggtcccaggatcactggcaaaggcttctggcagaggctggagggaccaccatattatagttaatatgattctattataacccagactggtgtaacctcgattagtacttgttagaggagagcatcagcagggttcttgcccaytaagaggagggactgtgcataatggagtgctgggaattgccccacctgtggagtcaacacacccaaggagactggcactgcacacttactgtgtgccaggcactgctccaaataagtgtttgaagagtgtttcttcatttcattctcacaacaagcctgctactat

SEQ ID NO: 514018 - DNA, 643 bp, Homo sapiens
ttaaccacagtttcaataattattcttccagtgtaatgaagtaaatgactaactgaatagatgaagattgaactgtgtcctacaaggtgaagacctgaatgctcatgaactgagaaggaaagcaaattcctaaacaggaagacctccctcyagcaataacagcacctgccagaatatgtcagctctgaagccaagacaccactggccacaacctccatcaggttggggaggaataattttatcttggctgagccttatctcattttaatcttgggttctctgggaggtgaaagaggaaaattcagggagctgggaatgtagagaagggaagcgaaaggacattccaggacacttaacaaactattagaaaagggaagctgagtaaaactactctcagatatctagaacactgtttgttccactcctcttcctgcttgtgtcaccctcccctgcacagccacctcgtgtcacagtcatgtcttgacacaggcaactgtactgtaatccttgtgaaaatgtttagcatattcagaggtgaacccaggacccctggatatggcatttattaagtcagcacttgggtagtgactgctgtgattctaggactcttagaaacggaaatccatagaaatggatcatggag

SEQ ID NO: 514019 - DNA, 643 bp, Homo sapiens
ttaaccacagtttcaataattattcttccagtgtaatgaagtaaatgactaactgaatagatgaagattgaactgtgtcctacaaggtgaagacctgaatgctcatgaactgagaaggaaagcaaattcctaaacaggaagacctccctctagcaataacagcacctgccagaatatgtcagctctgaagccaagacaccactggccacaacctccatcaggttggggaggaataattttatcttggctgagccttatcwcattttaatcttgggttctctgggaggtgaaagaggaaaattcagggagctgggaatgtagagaagggaagcgaaaggacattccaggacacttaacaaactattagaaaagggaagctgagtaaaactactctcagatatctagaacactgtttgttccactcctcttcctgcttgtgtcaccctcccctgcacagccacctcgtgtcacagtcatgtcttgacacaggcaactgtactgtaatccttgtgaaaatgtttagcatattcagaggtgaacccaggacccctggatatggcatttattaagtcagcacttgggtagtgactgctgtgattctaggactcttagaaacggaaatccatagaaatggatcatggag

SEQ ID NO: 514020 - DNA, 407 bp, Homo sapiens
gcagataaaaccttatcaaatagtgttaatttacaattatttcttggcagctaacaactgttggttatgtgtcatctttgtattcatgtgacattgtgctaggttgacaaagaactataaaaatagaggatatctttttaagtttggtgagaccattttgtcatggcttagagatcttaaaaccaggtttttagtatttaaattatatagatactgcccttgagtttcagtaaagggcataattaatataaatatatgcatttataaataaattatctattgyacaactcaagccattctatgcgtagtgaagagtattgccatattgaatgaggaagtacacttgaacagggaaagcaccctccaaatgagaataagggacacttctattttcatttggttttaac

SEQ ID NO: 514021 - DNA, 605 bp, Homo sapiens
gggccttaattctggtgattgtcctgtgctaatttgataatgaaacagagagctcaaggtagcttctcccaaagggcttcagagaaaagagattttcccaatatattaatgtcttaaacacacgtacacacacacgcacagtttctagttaaataactttgagaaacattaggttaaaaacaccttaagaaattttgcctaacccaggataatgaggttaatttctacataatcttctagattatctattatttcaatttccacagttagatatatcgacatgaaattgacatgaaattttgtgtaggtttgacatatggtacaagttctatttttcccccaaaccttcatctacagttactctgggctatgtttatgtataawtcaagtgtttatatatattaggctctgtctggaggctctttattatgtacttgtactattcccacattgtcttagtgtagcttcattatgaatagagcaaggcttcccacctaaaagactgcttggctattgttagccacttgcatttccacttaaaatatagaatacacttacaaatttttaaaataccaaaatacatagaaatacattgttgggacaat

SEQ ID NO: 514022 - DNA, 449 bp, Homo sapiens
aaatccatcaatagagatagcaagataaagcagttttgagaagctcaagaaatcagaaaatgtacctctcacataccatttggagaaggttacatgacgatctgtttacacaaaacaaaattaacaatcacaagatgtaggcgtggaatttttaaaaatgatggatttgatacagacaggaggcagggaaatactgggtagaaaagggcagggtccctggcaagggctccaccctcaagcctggacccggggcccaaagtaagaacatgcattcctgcttttttgctcgcattttgccttttccaagaccaccctggcctgccctgccctgcatcctgtaaccataaaaaccccagactccactagcagsagagtggcagagaaggagagaagagaagaagcagcttgatttcgaagggatggcttgactatgaaaccttggagaagag

SEQ ID NO: 514023 - DNA, 606 bp, Homo sapiens
actcccttcaacctttctttatcatagcactaatctcattcatgagggcagagcactcatgaccatcacttcccaaaggccccacctctcagtactgtcacatttggtattggatcatctccctctgtgttttctttctggccttagcctctgtgccagccggtgggagcctcctgctaggactcaggggaaaattcaactttgctaataggcaccccaggctcyatgctgatgtcagcatgtggtgtgggcatggttgtggggaggaagcttggattgcaagagcaggagatgcccttgcccctcctctctggtgactcggggacacagtgcccttccctagggaacagacttcaaacccagctaagacagggcccctgtttactcagcagagtaggcaagaaagtaacagctaggtagtgccacacaacactgcctcataaatcattagccgtgtatgagctagaaccaccagagagacatgggccaaaatggctgccgcctccactcctcttgcccccaagactgaggatgggagacctgtaatgtagctgtcccagagcttcctcaggtgtctccacccagaggcccttgcctggcaaacca

SEQ ID NO: 514024 - DNA, 651 bp, Homo sapiens
tgccctacatagtttttttagctaaacatagaaactgacccttctggtcttatgaaccttacatttgttttatctgagttccatccgcaggaactgatcttcaggcctctcaagtaaagtatagaagaactgaaactcaccatatccccacatccagacaatgagatgctggatctctcattcatcatgattgtttccttgctcctccctagttcctgctttcttacacgttgttacatttcttccttgctatataaacccctagttttagtttagtttttttatagatttttttattgttaagctgcaacatacatgatttagtacaacaaaaataattaatcaagtgataagtaataaactgaacaaaacgctgaaacattttccactggaaacatgttaagataaatctgaggtttgattaccatcttgctgtaattttgttatgtgttactagcctacataccccatgttttctgtaatcatgcagatgtgagtggaagtttgaatgattaaataaacgaaagtccatttactgcagggaaccattccacaaggcrgccaaactgggtttagagaacaaaactattcaagaaattctccatgtatttaggttcattttagaatccatgaatctagatggatttgaga

SEQ ID NO: 514025 - DNA, 622 bp, Homo sapiens
tgtaggtggcatttgttcatctgattcacatggcattttatcaatgatgaattaataggtgcattacaattatatacatattttgttagtgtaatatgccttcttagaataaataaatgagggtatgtattgtcctttagagagtttcagaccactaattagattagctctgaaagttagcaaaatataacatgtgtgttatccatggmaaatatgttaccagctataaaacctttattagaaaatgtgacagaaaggaaagaaggcacatgagagaaaaatctgttgattttgcaaaagtagctgctggtgaaaatagatgttacaaaccaatggtccttaatacttcaggatgcctaaatgtatgagtatactagaagcatttggaggatgggagagagctcttctataaattgtacccactcatgttgactctatgtgctttgtccccaacctccactcaatgtctcacccacttccatgagccactcttacttatgagaggtgtgtcggggcaggcaaaagatcgagacccattaatagtgacataagaatctggagaatatcatggcgcttagatggaggatctgttctggagaggggtggaagcgagtggaggatt

SEQ ID NO: 514026 - DNA, 419 bp, Homo sapiens
cttcaaaacttataattagagagtcttagaacttgataaaaaaagtttcttaattttttggagaaatattatcaaatatttccattgattgaaaacattgattttccgaggtcacttttcttcttaagcttttccttcaattggattatagtgattgaatgatggaaaactttccccagtattctgccgtgacaacttgcagtatatgtgtattacacattttaacctagtaattctccaaatcatcacaagagacatgggattcatggaaacccttggattagcccagggtcaaacaataaattaggatcagtgtcagaattagagttcactagggacgctgaattttgagtttgttgttgaagcatactggttgtggtttgatmtgcatagaatcagaggtcaggatgctcacagat

SEQ ID NO: 514027 - DNA, 610 bp, Homo sapiens
aaacctgggagaatatgaactcaaaactgggcaggcagtcctgaatgtcctattcttttcgtgtgtgttcaaactaacctttggttattctcccatgggaaggtcatccccatttgkgggtaggaaggaggagaagaagagaaatacttcgtgagtgataactgtgtaccagacctttgctaggcactccatggcacgatgtcaccgactctcacagcacgtgtgtaaaccaggcctcatcacccccaatttgtaaatagtgcaatttaggctcagctaacttgagtaaaattcccagaatcccagatccagtgggggtcagggccaggggtccagtgcaggggcatctgatgcctaggagtgtgttctgcaggccaaaagcactcatctaacctaggagctcaatagagatgcaaactctcagatccctgccttgctgagcccgtgaaagggtgagaagcatgccttagactccaagccatgaagctggcaggggatggaaagtttcctaacacttggggccattaggtcatgctcctctctttactgtccagagggactgctatgttatgtagcagtgaccaccagaactttcaattcattcattagt

SEQ ID NO: 514028 - DNA, 610 bp, Homo sapiens
aaacctgggagaatatgaactcaaaactgggcaggcagtcctgaatgtcctattcttttcgtgtgtgttcaaactaacctttggttattctcccatgggaaggtcatccccatttgtggrtaggaaggaggagaagaagagaaatacttcgtgagtgataactgtgtaccagacctttgctaggcactccatggcacgatgtcaccgactctcacagcacgtgtgtaaaccaggcctcatcacccccaatttgtaaatagtgcaatttaggctcagctaacttgagtaaaattcccagaatcccagatccagtgggggtcagggccaggggtccagtgcaggggcatctgatgcctaggagtgtgttctgcaggccaaaagcactcatctaacctaggagctcaatagagatgcaaactctcagatccctgccttgctgagcccgtgaaagggtgagaagcatgccttagactccaagccatgaagctggcaggggatggaaagtttcctaacacttggggccattaggtcatgctcctctctttactgtccagagggactgctatgttatgtagcagtgaccaccagaactttcaattcattcattagt

SEQ ID NO: 514029 - DNA, 586 bp, Homo sapiens
gggcaggcagtcctgaatgtcctattcttttcgtgtgtgttcaaactaacctttggttattctcccatgggaaggtcatccccatttgtgggtaggaaggaggagaagaagagaaatacttcgtgagtgataactgtgtaccagacctttgctaggcactccatggcaygatgtcaccgactctcacagcacgtgtgtaaaccaggcctcatcacccccaatttgtaaatagtgcaatttaggctcagctaacttgagtaaaattcccagaatcccagatccagtgggggtcagggccaggggtccagtgcaggggcatctgatgcctaggagtgtgttctgcaggccaaaagcactcatctaacctaggagctcaatagagatgcaaactctcagatccctgccttgctgagcccgtgaaagggtgagaagcatgccttagactccaagccatgaagctggcaggggatggaaagtttcctaacacttggggccattaggtcatgctcctctctttactgtccagagggactgctatgttatgtagcagtgaccaccagaactttcaattcattcattagtcatc

SEQ ID NO: 514030 - DNA, 533 bp, Homo sapiens
aggattctgcaagaaactggctgggttggcaaaggctctgggctgacttggagggcactatgctgtgtatgytggggtggatgaggggggcccggtgggcaggggagggcagaggctcgcatgcccgggcatctcaaggcacaaagtcattgcagtgtttccttggtaaagtgccctcctggcctgcacctctttacaattcaacccagtgccctgagggtacattgcagcctccttcagctgaaagaagcagccttttgtgatctgtcctctgcctttctagccttctttcccaccactggaccccctccaaaaagaacatgctttgccctgcttccaggcctttgccctgctgtgccctcctcctggccactttccctccatggttctctcgccatgggcttcttctcctggtacttcaggactctccaccaggagccctcccagaatccccccagcccctacttgggttgccactgtgacacagggacattgcttccatgaactacgttgtactctagactacaatgccc

SEQ ID NO: 514031 - DNA, 533 bp, Homo sapiens
aggattctgcaagaaactggctgggttggcaaaggctctgggctgacttggagggcactatgctgtgtatgctggggtggatgaggggggcccggtgggcaggggagggcagaggctcgcatgcccggrcatctcaaggcacaaagtcattgcagtgtttccttggtaaagtgccctcctggcctgcacctctttacaattcaacccagtgccctgagggtacattgcagcctccttcagctgaaagaagcagccttttgtgatctgtcctctgcctttctagccttctttcccaccactggaccccctccaaaaagaacatgctttgccctgcttccaggcctttgccctgctgtgccctcctcctggccactttccctccatggttctctcgccatgggcttcttctcctggtacttcaggactctccaccaggagccctcccagaatccccccagcccctacttgggttgccactgtgacacagggacattgcttccatgaactacgttgtactctagactacaatgccc

SEQ ID NO: 514032 - DNA, 533 bp, Homo sapiens
aggattctgcaagaaactggctgggttggcaaaggctctgggctgacttggagggcactatgctgtgtatgctggggtggatgaggggggcccggtgggcaggggagggcagaggctcgcatgcccgggcatctcaaggcacaaagtcattgcagtgtttccttggtaaagtgccctcctggcctgcacctctttacaattcaacccagtgccctgagggtacattgcagcctccttcrgctgaaagaagcagccttttgtgatctgtcctctgcctttctagccttctttcccaccactggaccccctccaaaaagaacatgctttgccctgcttccaggcctttgccctgctgtgccctcctcctggccactttccctccatggttctctcgccatgggcttcttctcctggtacttcaggactctccaccaggagccctcccagaatccccccagcccctacttgggttgccactgtgacacagggacattgcttccatgaactacgttgtactctagactacaatgccc

SEQ ID NO: 514033 - DNA, 354 bp, Homo sapiens
tctgcccaccttggcctcccaaggtgctgggrttacaggtgagacccaccacgcccagccttactctaactagcaaaaaataagaacaagaattcatatgtattaaacaacaactgcagcagcagcagcaataaactgacaaaacaaaaggaaagcatttctgtccccgtttatgtgcttccagaaggtcagctacagaaaggccacatcaccctgatgcactgagtcaattgcacaagaaagggagtgctgactcctccacgtccaggggatcatccagcctacatgtggtttaagggatggccccaaagccagatggactggggttcaaatctgagccttgtcccttaccag

SEQ ID NO: 514034 - DNA, 354 bp, Homo sapiens
tctgcccaccttggcctcccaaggtgctggggttacaggtgagacccaccacgcccagccttactctaactagcaaaaaataagaacaagaattcatatgtattaaacaacaactgcagcagcagcagcaataaactgacaaaacaaaaggaaagcatttctgtccccgtttatgtgcttccagaaggtcagctacagaaaggccacatcaccctgatgcactgagtcaattgcacaagaaagggagygctgactcctccacgtccaggggatcatccagcctacatgtggtttaagggatggccccaaagccagatggactggggttcaaatctgagccttgtcccttaccag

SEQ ID NO: 514035 - DNA, 457 bp, Homo sapiens
gaattccgcacagaagctgggctggctgcagagggctgagttgtagactccaggagaaggtggggcatccagccagaggggactggattcccagaggagcagaggagcagagggtcccrgggcagctgaggggctcacagagctgtggggaagggagctataggctggagcagagagtgggaaagacgggcagaggccagacagccaagaagcttgcagcctggactgtgccctgagatgcttggatgctctttcattttcttactgaaaatcctggaaaaaaacagccttgtcccatcttaggacaaatgtgtttctctcttccttcttggcctctgcagggttgactctcttccagctatcctctcattccctcttaaggttcatagcaacacctaacacggacagcttctaagagccctgaatggtgctaaaggctttttgcccaaggcttccc

SEQ ID NO: 514036 - DNA, 457 bp, Homo sapiens
gaattccgcacagaagctgggctggctgcagagggctgagttgtagactccaggagaaggtggggcatccagccagaggggactggattcccagaggagcagaggagcagagggtcccggggcagctgaggggctcacagagctgyggggaagggagctataggctggagcagagagtgggaaagacgggcagaggccagacagccaagaagcttgcagcctggactgtgccctgagatgcttggatgctctttcattttcttactgaaaatcctggaaaaaaacagccttgtcccatcttaggacaaatgtgtttctctcttccttcttggcctctgcagggttgactctcttccagctatcctctcattccctcttaaggttcatagcaacacctaacacggacagcttctaagagccctgaatggtgctaaaggctttttgcccaaggcttccc

SEQ ID NO: 514037 - DNA, 457 bp, Homo sapiens
gaattccgcacagaagctgggctggctgcagagggctgagttgtagactccaggagaaggtggggcatccagccagaggggactggattcccagaggagcagaggagcagagggtcccggggcagctgaggggctcacagagctgtggggaagggagctataggctggagcagagagtgggaaagacgggcagaggccagacagccaagaagcttgcagcctggactgtgccctgagatgcttggatgctctttcattttcttactgaaaatcctggaaaaaaacagccttgtcccatcttaggacaaatgtgtttctctcttccttcttggccyctgcagggttgactctcttccagctatcctctcattccctcttaaggttcatagcaacacctaacacggacagcttctaagagccctgaatggtgctaaaggctttttgcccaaggcttccc

SEQ ID NO: 514038 - DNA, 457 bp, Homo sapiens
gaattccgcacagaagctgggctggctgcagagggctgagttgtagactccaggagaaggtggggcatccagccagaggggactggattcccagaggagcagaggagcagagggtcccggggcagctgaggggctcacagagctgtggggaagggagctataggctggagcagagagtgggaaagacgggcagaggccagacagccaagaagcttgcagcctggactgtgccctgagatgcttggatgctctttcattttcttactgaaaatcctggaaaaaaacagccttgtcccatcttaggacaaatgtgtttctctcttccttcttggcctctgcagggttgactctcttccagctatcctctcaktccctcttaaggttcatagcaacacctaacacggacagcttctaagagccctgaatggtgctaaaggctttttgcccaaggcttccc

SEQ ID NO: 514039 - DNA, 480 bp, Homo sapiens
tgctgtatctacttcaaggcctcctttggacttgcctagtactcaatacatgtttgtcaatgaaagagtgatgctacaagtagacgcaggaagggcatggtctcgggaacaatttcccaggagtagttaggcaggcagcttctgatttttcacatcctgcccagcctaatctcataggctggcctccattcaaactgccaagcctcagtggcagagcgtggctgcttcacgggctgtgtacctcgataggcagccgcccacagcaggcctgggcagaggaagggygaatcaagagtggctcactctgccctgtggaaagtgcacaggaggctcctgctggggagatgatgagcaggggctgacacaggcgggtgtcaccctcctctttcctcctcactggccactcctgcaggcgacactttcaccctgttctctttctcaccaggaacttctcccttcatgcctgagtcatcacacagg

SEQ ID NO: 514040 - DNA, 480 bp, Homo sapiens
tgctgtatctacttcaaggcctcctttggacttgcctagtactcaatacatgtttgtcaatgaaagagtgatgctacaagtagacgcaggaagggcatggtctcgggaacaatttcccaggagtagttaggcaggcagcttctgatttttcacatcctgcccagcctaatctcataggctggcctccattcaaactgccaagcctcagtggcagagcgtggctgcttcacgggctgtgtacctcgataggcagccgcccacagcaggcctgggcagaggaagggcgaatcaagagtggctcactctgccctgtggaaagtgcacagkaggctcctgctggggagatgatgagcaggggctgacacaggcgggtgtcaccctcctctttcctcctcactggccactcctgcaggcgacactttcaccctgttctctttctcaccaggaacttctcccttcatgcctgagtcatcacacagg

SEQ ID NO: 514041 - DNA, 530 bp, Homo sapiens
tctttttctttttctttttctttttctttttttttttttttttgagacggggttttggtctgtcacacaggctggagtgcagtggcacagtcttagatcactgcagcctctaactcccaggttcaagcaatcctcccacttcaacctcctgagtagctgcgactacagtcattctttttaaaaaccgtagaacactgatggacacctcgggcagctccagtctttcrcttctgcaggcagtgatttggtgatggtccttgcatgcacctttgggcacaggaaaatcactgagtccttttgaatctggtgaagtggcccgagagtttacccctccccaacctcatcttcaccccttcagcccaccccacccttgctggtgtttgtgtcttggccttttaaggactttttcaaaattgactttggcttcttggcctgaactctgaagtgtctgagatgaaaagatagcaggcttggctgagggggctgggggcaaacagtgaacctgaggccctcagccccagcgcaggagg

SEQ ID NO: 514042 - DNA, 530 bp, Homo sapiens
tctttttctttttctttttctttttctttttttttttttttttgagacggggttttggtctgtcacacaggctggagtgcagtggcacagtcttagatcactgcagcctctaactcccaggttcaagcaatcctcccacttcaacctcctgagtagctgcgactacagtcattctttttaaaaaccgtagaacactgatggacacctcgggcagctccagtctttcgcttctgcaggcagtgatttggtgatggtccttgcatgcacctttgggcacaggaaaatcactgagtccttttgaatctggtgaagtggcccgagagtttacccctccccaacctcatcttcaccccttcagcccaccccacccttgctggtgtttgtgtcttggccttttaaggactttttcaaaattgactttggcttcttggcctgaactctgaagwgtctgagatgaaaagatagcaggcttggctgagggggctgggggcaaacagtgaacctgaggccctcagccccagcgcaggagg

SEQ ID NO: 514043 - DNA, 650 bp, Homo sapiens
tgtgttttgttgagctgaaggatccacatggtcactcaagtgcagtcctcagaacaaagagaagtatagtgaggagttgttggagggtttgtcacggattcctggagtttggaagcctatgtgagccacagacactccccttccagagatttcttaatgcaggaggctcactgcaccacaagggcaaaaggaaactgtarggtattgtgcctggaaaaaaaggataggtggacggaatgagtcatccacagtccacctcttccattctttggagaattaatagatcttcctggctcttgcaactgctcacaaggaagtcctatggtcagagaaggggacggaaggagtagggctgccaggccagcaggcaacacgttatttgtcagaggtcgcatgacctgatggttggaaggcaaaggaagaaagccatttgagagtccagatgaaggatgggctgaggtgcagttgaacttgaccgtaagaaaactcatattgcatctatgaagatatcaatggctatatctgcagaagacataggcagttagaaccagaaattccagaaaaaaacctgagaaaccgctgaaaaatgacaattatttcctgaatccccacttctttccttcaaccaactagagaacctagagcattag

SEQ ID NO: 514044 - DNA, 382 bp, Homo sapiens
tgtgttttgttgagctgaaggatccacatggtcactcaagtgcagtcctcagaacaaagagaagtatagtgaggagttgttggagggtttgtcacggattcctggagtttggaagcctatgtgagccacagacactccccttccagagatttcttaatgcaggaggctcactgcaccacaagggcaaaaggaaactgtaaggtattgtgcctggaaaaaaaggatakgtggacggaatgagtcatccacagtccacctcttccattctttggagaattaatagatcttcctggctcttgcaactgctcacaaggaagtcctatggtcagagaaggggacggaaggagtagggctgccaggccagcaggcaacacgttatttg

SEQ ID NO: 514045 - DNA, 505 bp, Homo sapiens
ttttgttgagctgaaggatccacatggtcactcaagtgcagtcctcagaacaaagagaagtatagtgaggagttgttggagggtttgtcacggattcctggagtttggaagcctatgtgagccacagacactccccttccagagatttcttaatgcaggaggctcactgcaccacaagggcaaaaggaaactgtaaggtattgtgcctggaaaaaaaggataggtggacggaatgagtcatccacagtccacctcttccattctttggagaattaatagatcttcctggctcttgcaactgctcacaaggaagtcctatggtcagagaaggggacrgaaggagtagggctgccaggccagcaggcaacacgttatttgtcagaggtcgcatgacctgatggttggaaggcaaaggaagaaagccatttgagagtccagatgaaggatgggctgaggtgcagttgaacttgaccgtaagaaaactcatattgcatctatgaagata

SEQ ID NO: 514046 - DNA, 505 bp, Homo sapiens
ttttgttgagctgaaggatccacatggtcactcaagtgcagtcctcagaacaaagagaagtatagtgaggagttgttggagggtttgtcacggattcctggagtttggaagcctatgtgagccacagacactccccttccagagatttcttaatgcaggaggctcactgcaccacaagggcaaaaggaaactgtaaggtattgtgcctggaaaaaaaggataggtggacggaatgagtcatccacagtccacctcttccattctttggagaattaatagatcttcctggctcttgcaactgctcacaaggaagtcctatggtcagagaaggggacggaaggagtagggctgccaggccagcaggcaacacrttatttgtcagaggtcgcatgacctgatggttggaaggcaaaggaagaaagccatttgagagtccagatgaaggatgggctgaggtgcagttgaacttgaccgtaagaaaactcatattgcatctatgaagata

SEQ ID NO: 514047 - DNA, 594 bp, Homo sapiens
aatctcgaacagaagaaacaagccccaagtggaaggaagatggaaagagaaaggggaggaaagaggtttacaaattccttgccaaatggatggagagaaattctgtgaggtgattagcgggtcaggaagcgttttccctggatgtggtggtaaccacaaggaccagtgataatgcttgggggattgattgctttccggttgtgctttctgcagcgcaaaaactctgggctcttgcattgctctttactgtgatgcagggtccacttaaaactctgcctccctaccgggaaagttcacacatcttgggatttcgggatcatttaagtctagagggattctttttttwcacttgagagtaagctgtgcattttcttcattgtatgggaaaagctaacccttcattggaaagcaatgcacaaccatccggtgggtctgcatttatccagagttctcccttcctccctccatcaacggtttagtgaagcttgcagagaaaatgagggaaagcatccatcagaacgcaaagacgcagagcggaacttttcctctgccgtcagtggggagaaaaagtcacttgtgcgtctcgtggctgac

SEQ ID NO: 514048 - DNA, 684 bp, Homo sapiens
ttttattggcatatggtaatttaacaacatagctattgcataaagcaagatatttaccttgattttaatcacctagtggtttatgcactgttttgatgatgagaggcatttttcatgcatcttatctataactttttctgtctccagagcaagcatgagaattattcatcttttatcaactaaaaatgctttttaacgttttctttttatgccattagacaaacgaaagtgatttaagaaaatttttttcccagtatgggtctgtgaaagaagtgaagattgtaaatgacagagctggagtatccaaagggttagtatcactatagattgtctatggaattagcaactctattttcattggatgactaggttttgtaygccagtttactttggttccattttccagcagagaccatcatgccctcttctttcctcctaccttttgatttccttgtgtgtgtgtgtgtgtgtgtgtgtgtattttggagggaggagacactgtaatatttcttaatttgttgagaagttattcttgcatgggtggagggaccattcagtggtaggcagcaagcacttaatgtaagtagtagatgtacattagctgaggaatgagaagcaaaaggaatcagattcttttggaattgtatccctgctttaggccatagagagctttatttgaaaaca

SEQ ID NO: 514049 - DNA, 684 bp, Homo sapiens
ttttattggcatatggtaatttaacaacatagctattgcataaagcaagatatttaccttgattttaatcacctagtggtttatgcactgttttgatgatgagaggcatttttcatgcatcttatctataactttttctgtctccagagcaagcatgagaattattcatcttttatcaactaaaaatgctttttaacgttttctttttatgccattagacaaacgaaagtgatttaagaaaatttttttcccagtatgggtctgtgaaagaagtgaagattgtaaatgacagagctggagtatccaaagggttagtatcactatagattgtctatggaattagcaactctattttcattggatgactaggttttgtatgccagtttactttggttccattttccagcagagaccatcatgccctcttctttcctcctaccttttgatttccttgtgtgtgtgtgtgtgtgtgtgtgtgtattttggagggaggagacactgtaatatttcttaatttgttgagaagttattcttgcatgggtggagggaccattcagtggtaggcagcaagcacttaatgtaagtagyagatgtacattagctgaggaatgagaagcaaaaggaatcagattcttttggaattgtatccctgctttaggccatagagagctttatttgaaaaca

SEQ ID NO: 514050 - DNA, 652 bp, Homo sapiens
tgttttcctatcctttcctctaaagagagctaaaaaaataaaactataatcagatttctaaagtgttaaacgggataaaactatttagaacccatactatagaatgaagtagatgaattctgataaagcacatatatactaaagtataccagtgaatttatttcagatgaaactaggtaggctcattgtaaacagatgagcttctgaaatttctgaactgtttcattgaaaggtaaaacaatgggtttgggagcacccacacttcttggcacaggtgagtggttggcactcattaaccaccgaattctgacacgaacatgctgtttatgaagaaaaatcagggaaggagactaagatttctgataagaaagagtagaagaaaaggtagaaattcaacttacttggtaaaaygggagtacgtcaggattagaaatgggctcttacacaacgagaaataaagatagctttttcataggcttcctattctgagagtttttcttgttgatttgtagagtgtaaatgtacttcttcctgaagacaaggactaggccgaggtagtttgatgtaaatgtggggactcatttgttatgaacccatagtagactgctgtgggaaaacattgtgaacaaaagaaggagtcaaaaaataaaca

SEQ ID NO: 514051 - DNA, 656 bp, Homo sapiens
gtgagttttggctctctagggaagaatcagttggaattttattaaatttcaacctggactattttacttggaagttgaagaattacagctagcctagtggtttatacaatatataagatatgaaaaacccttcacaggacatttcattgatttgtttccaagtttagttcagacaaccaaagaccaatgtataggtaaagatgaaatgagccattattttgccattatttgcaatatttgtgacttaacatttattacctacawtattcttcattacctttattctgttgtttaaaactacttttaaaaatacattatgatgaggctttttgaagttttttcaaagtggtctaactttaagacgattgtatatttagaattcctgtactttaaaaatatttattgagaatgaggggtgggaagagggagaggatcaggaaaagtagctagtggatgctgggcttaatacctgggtgatgggatgatatgtgcatcaaaccactgtggcacatgtttacctatgtaacaaacctgcacatcctgcacatgtacccctgaacttaagataaaagttggaaatttaaaaaaaagagaatgaacttttttttttttaagatcactttgataaggagaaagtcaatatattgacagaattt

SEQ ID NO: 514052 - DNA, 468 bp, Homo sapiens
gggcaatcacaaagcatctggcaaataaaacaattcataaaacctctgaagggtcagcttcagagtattgcttatatacttgcaaggaaagatttatttggaaataaatastataaagaatattatacaaaaggggttttgtagtaattacagctaccaaagactttctttatgcagtgtcagttttgctggtgtggtcaatgaaagtctttaatcaatttcagaattaacatgaagctgaaacccttttgcagtcaaaacctttaaaaataattgtttataattattatttgacaaacagactgtgtgctatgaatggatattggtaggttgggtctatccaaggtgattaggtcattgagagggatcaatgctgctcttacggaactgggttaattctcaagggaataagtaagttctcactcgctgggtactggatgagttactactagagcagattgttataaa

SEQ ID NO: 514053 - DNA, 575 bp, Homo sapiens
ttttgtccagatgcacaaatacctctgagacaaaggcggaatatgtcataggatccagaaaatcattatgaaaacaaagctcttttctctagtggcatgaggtatatagtatgatgaggggggtctattttgctctttgtacactggtcatttttgcaaaggccatttattaaagcaacagatagggagacatcagttatgtttttggccttctgtttactataaaatgttggaagacttgaaaagccccactaaaatcattgaaaagatcaaagcctaagtccagtgtcacaggagagaatggacactgtcaattscagtggatgtagaatgttttactacaaaaagcttggaaatagtctttaatttgtatttttttcctatgtaagctgttaggtcagtggctgttttttaaaaaaaattacttttatgtgagctcgatagttgacagtcttctagtgatagacttcttatgcttggatatattgataagctgtaaaagtaccctgaaatttgatatcctttctcatcagcatctgcctatttgtatataaagtttatataatatacatatt

SEQ ID NO: 514054 - DNA, 575 bp, Homo sapiens
ttttgtccagatgcacaaatacctctgagacaaaggcggaatatgtcataggatccagaaaatcattatgaaaacaaagctcttttctctagtggcatgaggtatatagtatgatgaggggggtctattttgctctttgtacactggtcatttttgcaaaggccatttattaaagcaacagatagggagacatcagttatgtttttggccttctgtttactataaaatgttggaagacttgaaaagccccactaaaatcattgaaaagatcaaagcctaagtccagtgtcacaggagagaatggacactgtcaattgcagtggatgtagaatgttttactacaaaaagcttggaaatagtctttaatttgtatttttttcctatgtaagctgttaggtcagtggctgttttttaaaaaaaattacttttatgtgagctcgatagttgacagtcttctagtgatagacttcttatgcttggatatattgataagctgtaaaagtaccctgaaatttgatatcytttctcatcagcatctgcctatttgtatataaagtttatataatatacatatt

SEQ ID NO: 514055 - DNA, 513 bp, Homo sapiens
taccttctctgagtttcttatgacacagaatttgtatattttatgccatgtatcagttttctaccttgtatcatagtaatttacatatcttcatcctttctctactttgaatttattgaggacagattctgtgttttacaaatctgcattgggtactcaataaatatttgtcaaataactaaataaatgagctgtgttaaaattaaattggttcccggagtcttagtaaaatatagctgcaaacaaatatttttatttctgtttgtgctttcaaaactgcactaaaattatactaaataaataagaaccctaatattagcactatacccacmagaaaaaaagaataaataaaaaaatacagccagaggagtgagataaacatagaccaagggaagagtttagataagttataacagattgtcagagggagaaatcttcaaattaagttcctgaattgctggtaaatatttgacaactcactctctaaaaaatgtatgcatgtatttaagtttg

SEQ ID NO: 514056 - DNA, 581 bp, Homo sapiens
tgggtaatttataaagaaaaagtggattaatggattcaaagttccacatggctggggaagctcacaatcatgacggaaggtgawcgaggaacaaaggcacgtcttacatggtgtcaggtaagaggacgtgtgcaggagaactgccctttgtaaaactgtcagatctcatgagacttattcactattgtaagaatagcatgagcaaaacctgccaccatgattcaattacctccttctgggtcccttctacaacatgtggggattatgggagctacaattcaagatgagatttgggtggggacatagccaaaccatatcaactattaaatccttttctgcttctttagtataactggtcatgtgaaatatattgacagacattcttttagtatttaactaaagattatacacacacaaatatatcttcacacatatagatagatatagatataaaattctaattcagagagcttctaaataaaaaacagaagtatacactgaatatgaataaactgtgttttaactgaaaaagctgtggttataaagtgacatcatgctgctaacaatgtctttaaaagttc

SEQ ID NO: 514057 - DNA, 412 bp, Homo sapiens
ccagcgatgatccactaacctgtgccaaaatggcagcacgtttaaataactgggtccagtggctcaagagtatgctaggcactacctagttagtgctttgtctyctatagtagattatttttcagcaaatcctcattcccactgactgacttccacggaggaatccgcttcccaacccaatggggttggcttggccatttgacttgctttggctgcatggtgagaggaacatgctttcttatttcttgctgaggccaaagggatgttaacagatgtgatgcaagctgaggcttgggttcatatgttcctgactatcactgtgaaaagagcatgctttgggaaattgctggtccaaaaagcatgagacaaacatcctcattgaaccagatctgcaacttgtagctagcgcagc

SEQ ID NO: 514058 - DNA, 412 bp, Homo sapiens
ccagcgatgatccactaacctgtgccaaaatggcagcacgtttaaataactgggtccagtggctcaagagtatgctaggcactacctagttagtgctttgtcttctatagtagattatttttcagcaaatcctcattcccactgactgacttccacggaggaatmcgcttcccaacccaatggggttggcttggccatttgacttgctttggctgcatggtgagaggaacatgctttcttatttcttgctgaggccaaagggatgttaacagatgtgatgcaagctgaggcttgggttcatatgttcctgactatcactgtgaaaagagcatgctttgggaaattgctggtccaaaaagcatgagacaaacatcctcattgaaccagatctgcaacttgtagctagcgcagc

SEQ ID NO: 514059 - DNA, 614 bp, Homo sapiens
gtcagctctcagaagaattgggcagagaggcccaaggagaagcactaaagaaaagtccttggagaatcctcacaagtaagaaggcaggagagaaacaaagcattaaggaagacagataaagtgtaatctcagaggataggaggagaaccccccaaatcaggtatacacagatgaaagtaggaatgaatatcaagagtgagggaatgatcaatagtgccatactgcagagatcaaggataatggagtggagagctaaaatggttgtaggtatacctcagagatattgtgsattttgttccagaccatcccaataaaacaaaaaaatcacaataaagcaacttacacttttttttggtttccagtatatacaaaagttatgtttataccatactgtagtctattaaatgtgcacagcattatatctaagaaatgtatgtatcttagttgaaaaatacttcattgctgagaaatatcaacacagaaacttggagtgagcacgtgctgttggaaaaatggcacctgtagacttgctacacacagtattgacacaaatttttattttgtaaagacacaatatctggcaaagtgcatgaagtgaagtgccataaaaaagt

SEQ ID NO: 514060 - DNA, 614 bp, Homo sapiens
gtcagctctcagaagaattgggcagagaggcccaaggagaagcactaaagaaaagtccttggagaatcctcacaagtaagaaggcaggagagaaacaaagcattaaggaagacagataaagtgtaatctcagaggataggaggagaaccccccaaatcaggtatacacagatgaaagtaggaatgaatatcaagagtgagggaatgatcaatagtgccatactgcagagatcaaggataatggagtggagagctaaaatggttgtaggtatacctcagagatattgtggattttgttccagaccatcccaataaaacaaaaaaatcacaataaagcaacwtacacttttttttggtttccagtatatacaaaagttatgtttataccatactgtagtctattaaatgtgcacagcattatatctaagaaatgtatgtatcttagttgaaaaatacttcattgctgagaaatatcaacacagaaacttggagtgagcacgtgctgttggaaaaatggcacctgtagacttgctacacacagtattgacacaaatttttattttgtaaagacacaatatctggcaaagtgcatgaagtgaagtgccataaaaaagt

SEQ ID NO: 514061 - DNA, 622 bp, Homo sapiens
tttcttccccaatcctctaaactctcttttttgccaacccatagccattccctgagcatgccatgctctatctcactgccacatgtttgcatatgatcatctctctaccttcytagccatcagttaacacccaactgaaatgtcacctctgtgaagcacgatgcataggctactgccttctgatctcccaagatgttctctcttctgtcataacatctgtcccattttagcatcatgtgtatttcatgtttatttttgtggattagactgagccccttgaaggagcagaaagctccttatcatctttgtatcactaatgtctctcataggccctagcacggagtaggtgatcagtaaatgttacaagaaggagtgaaagttgaaacttcacttaactcatattggtctgtgtttctgatctagaaatcctaacactctgaatgagcaaggggttggttccattctgtgcaaacagtggtggttaagtgtgctcagaagaagctgggtttctgttgacatacagttaccgaagtaatctgggaaattagccagtgaaaaccagcagatcccagagtagtagagctctgttcacaaaccttgtttatttctaacaatccgtttc

SEQ ID NO: 514062 - DNA, 622 bp, Homo sapiens
tttcttccccaatcctctaaactctcttttttgccaacccatagccattccctgagcatgccatgctctatctcactgccacatgtttgcatatgatcatctctctaccttcttagccatcagttaacacccaactgaaatgtcacctctgtgaagcacgatgcataggctactgccttctgatctcccaagatgttctctcttctgtcataacatctgtcccattttagcatcatgtgtatttcatgtttatttttgtggattagactgagccccttgaaggagcagaamgctccttatcatctttgtatcactaatgtctctcataggccctagcacggagtaggtgatcagtaaatgttacaagaaggagtgaaagttgaaacttcacttaactcatattggtctgtgtttctgatctagaaatcctaacactctgaatgagcaaggggttggttccattctgtgcaaacagtggtggttaagtgtgctcagaagaagctgggtttctgttgacatacagttaccgaagtaatctgggaaattagccagtgaaaaccagcagatcccagagtagtagagctctgttcacaaaccttgtttatttctaacaatccgtttc

SEQ ID NO: 514063 - DNA, 622 bp, Homo sapiens
tttcttccccaatcctctaaactctcttttttgccaacccatagccattccctgagcatgccatgctctatctcactgccacatgtttgcatatgatcatctctctaccttcttagccatcagttaacacccaactgaaatgtcacctctgtgaagcacgatgcataggctactgccttctgatctcccaagatgttctctcttctgtcataacatctgtcccattttagcatcatgtgtatttcatgtttatttttgtggattagactgagccccttgaaggagcagaaagctccttatcatctttgtatcactaatgkctctcataggccctagcacggagtaggtgatcagtaaatgttacaagaaggagtgaaagttgaaacttcacttaactcatattggtctgtgtttctgatctagaaatcctaacactctgaatgagcaaggggttggttccattctgtgcaaacagtggtggttaagtgtgctcagaagaagctgggtttctgttgacatacagttaccgaagtaatctgggaaattagccagtgaaaaccagcagatcccagagtagtagagctctgttcacaaaccttgtttatttctaacaatccgtttc

SEQ ID NO: 514064 - DNA, 659 bp, Homo sapiens
gtgtgtgtgtgtgtgtgtgaaatcatttcaaattcttattctgcatactgggagaaaataaattctagacttatttggtactgaagtcattaataccaaagaatttccatattaatattactactcattgatttactgtgtcagtatgactctgttacacctcgtatctgccaatagtgattaagcgctgaatggcatttacctgtaacatttgtctactatgaactgttttcaggaagatttaatttacacatttaaggacagtagagccaatataatgttgtttaaaaatagcatttcttaactgctataagacatctatgagtcttcaaccctattattctgtctcttcctttcgtttttattaatgacattgcagcacagctgaaggcatgtcayaatttatcatttatcttgaatatagaacatggattaaaacaataaaattagtcacctatatattggctttcttttttttaacttttcaattagattgacatcattaggaaagacattgactatgaagtacatcaaaatgaagaacaagtggatatattttcacatgaatccagttttgtaagtggcttattaggaaagtgaggtgggaaaagcagtgggaacgcggagggctatatcctttctctagcttggctgctaac

SEQ ID NO: 514065 - DNA, 641 bp, Homo sapiens
gtccttggatttgtcactgtttataaatgcaaaaaatatattctgagcacttattctgtatcttgctctaaaaatgcagcaattaatggataagaaccctggcccaatatggctccattcctttaggcaaaatttgaaatataaataaataaatacaattggcaggagattgtaaatttaagagcaggggtggggacaaactctgagcagagactgcagtgagtgcagaggcttgaagactagagcatacctgacatrtttgaaaaatagcagggaggctagggctgtagtgagtgagaggtcagagaggaagcacctgccaattcatgtagagacccgcagtccgttatgatggctttgtggtctggtcaaaaatgggagaccattagaaggtttgagttgacagtgacaagatatgacttatatcttgaaaggaatacagtggaagttgtgttgagaaaaggctaaagtgaagaaaaagcagatagataagaacagtacgttttattccagaaatcctattgagaaaggacagtgacctggaccgaagtgatagatcacagtgtgtgtccaccataagagtgtacctctgagatctcttgacagccaggagtattctcaaatccatcagtgagtctcag

SEQ ID NO: 514066 - DNA, 564 bp, Homo sapiens
agaaaaatattcttaggaaagctcctgktagtgttttgccgtagcagatagggtcactgtgatgattattgttgttagtgttgtaaccactaatttagatagctgtgatattctatatggtatccccttccctttccctttagcaccagatggggtgaaaacaagattgtgaaaattcttaagactgtcactttcctaggcaaactctgtgtccataatccctttataaccagtcccgttgtaggtatggataaattaatgcaggcatcttacagaaaatcaccacaagcattcaagcctctctaccgtcgtatacccagtactttacatattatgtttgggggtgtggggctcctcacagtcttgtttcagactctccatcttaccctcaaggctaaacagtacttgctatcctcaagcttgactttgagcattaggttaaacaatagaaactagtgtgatgacatcaaagaagaaaagtcatacttggacagaaatcaacagaattgtttccttgcatacatactgcagtgctgtgctgggtctggcatatgacagaatgcc

SEQ ID NO: 514067 - DNA, 648 bp, Homo sapiens
gagtgacactctggataatggtgagaaagggcctgcaaccgtagcagtggaactcaggtttgataggcaggaaagaaagtccgtataatttgggaggttctggtgcctgcctgcagaggggagctacgtgaagcttctcaggatggtctcaggatgggggtgggcatttcctgttactgaccacttataggacagcgaacgtttgccctttccctgcacacatcccctctgaacccatgcagtgtcttgtgagagcaaggagtrtgtagacagccgctgggcccctttgcccagagggctgcagtggtgtgggagggagagtgtggcagcttcagtgctcagcccactggagggggcagtcacttgcagatgtaatgtcccctgtgctcactgtgctgtgtccactgttgcccactctggatatgctccccaggcgtctgcgccttggtctgtaccttttatattctccagcaacgggctcccctggtctctggcatctgcttggcttgtggcaatgggatgaagagggttggaggacaggggacagggcgccggaggcctggggaaaactgaggttgggtttctcttcccacggctccctccccactgggctgtgggatgggtgtggctgcatcctgttcagccgca

SEQ ID NO: 514068 - DNA, 567 bp, Homo sapiens
acccctctactgcttctctgctatgtcttactatatagatcactttctcatctgagaagtcacagatatggacattcccaaagagacaaccccttggagaatgatctcaaaggctgagatttttctctgcaatgtacatgttgaaagcaaagtaacctcctacatcttatatttcaaagctgcacttctgcattaaaagagtaaacagattcaatgaagagatgtgggaacagggtgcttatgaatgcaatgccacaagtwctttttcagtgtctactggtggtcaggcactgtggtggaagctgaatgatcagactatcagttgggagagcgtgggggtgggggcatgggggtgatgaggagaacttctcaaatagactgtttcaggaatgtttagccaataattcataaaactgttactttattacctaactatatggaaatcatctttcagaagagaccagagttacctgccttattatctgtgaatacataattgaaagggccaatatgtcttccaaaatgaaagtcacaacttgatagatttctgagagttcatattagagg

SEQ ID NO: 514069 - DNA, 538 bp, Homo sapiens
ttgccattacatcgggaaaaacaaagagcagtttttctctcagacaaacactaagataggtccccattttccttagcaccatttcctttctctgtctctcacttttttatttggcctgattcattacatgcaggcaattacatcaagtcttagatctctcattatttctaatatttgaatcccatggagagtagcaaggtgtcctacaaagtgtcctggtgtgaaaatctgatgtccttggaagcttgactctcagagaatgtcacattggattatagttcatcacacagacaccatggccacataaaatattatcaaattgtgaataacaaagtgaaattgaaaaaaaawatatagttaaaacagcaggaatgtgagcaatatatgtacagactgattttgtgcatagagattaaaacacctgttcaggcttcctagcctaatcttctgtcaatttggggtcatttcctgtaatacaattctttgttgcttttatgagcacagacttagctcagcagtcccagctattctcaagctg

SEQ ID NO: 514070 - DNA, 701 bp, Homo sapiens
gctggtaagtgacaaaaccacaacataaaaatctgatctatatccagtaactatatcccatccattctataaagcaagaattggcacaccacagcccacagggccagacttggacagcagcctcttgataccaccacaaattaagaatgatttttacattttaaaagcactgaaaaaattcaaaagaattatgtttcatgacacatgaaagttttataaaactcagatttccataccaataaataaaatgccattggtacacagccacatttacctactgtctagagctgctttcaaattgcaagatggtgttgagcagttgtgaaagaatcagtagggtcccaaggcctaaaatacttactgtctggccctttacaaaagaagtttgctaacccctgaggtagagaaaaggatccatagaaataaaagtaacaaacactctcagaaatgtgacttcaaaaatgagtgacaaaagtatgcaaaaaatggctataaaatgcacctgaaagaatttaacctaatggcagttgcctgaggacaactttctcaatttcacctgaaggtttcatttttctggccctgtgtcccagtgaggaagacccaagtcaaccttgtgacagggatttatcacgtcttaacttgagcaatgctgygttcccaccagcactctcagaatggaggccacacaatgtctccactcc

SEQ ID NO: 514071 - DNA, 530 bp, Homo sapiens
tggccaggcactgaactaagatctttatgtagattttcgtatttcatcctcttagcaactctatggagtcgatacttgtattatccttgttttacacacgagaaaactgaagctcagagaggttaaacaagggctcaaggacacccagttggcaagtggtgggcctaagatatggacccaggccatccggctagggagcttgagctctaatagctaatgtccttaggtggcaaaaaggtcagacctgcctgatagctaccttttctgtaaaatgaagtstaatggataaggacaaggatataaaaggaattgcttttatcaatgacatagcaaattaacattcatttttattgttttcaagatcattccatttcaagtgaggggatgaatttcaatacaaattagacttatttaaggaaacatcaatatttttctcaaattagcagtatcaaaaccttatggaattaaagaaaatgtactgcatttatacaatgcaaatttatttggaaataaaatttctttatcatttt

SEQ ID NO: 514072 - DNA, 574 bp, Homo sapiens
ctgttgcagatggaacagctgggtccaactcctgtgggttgaggactgctggaactatatgcaagggccctggtgaggccagaagtgtttgcatttccaacaagctgccaggtgatatatatgttgctggtccatgggctacacttgaaataaaaagatttcagatttttgtggcttctactaagttgccattctgttttaatgtaatgagtagtattgtttagaattygtgtatatatatatatatatatatatggccagttgtttttctttgcagttttatttctctttgtaaaatggacataatagtacccacttcgtagattgttatgaattaaatgggatgatctatataaaatatcagcactgccctcatggagtctagtgaaggggacagataacacataggcaaacacctgtaataataatatgtcaagtacaagaaggaagattataagatactgtgatagaaagagggatgagtaacctattgagataaaatggccagacagaaagagctgagaattaagcagagacctaagtaaaggatgagagggagctggccatatgaaga

SEQ ID NO: 514073 - DNA, 574 bp, Homo sapiens
ctgttgcagatggaacagctgggtccaactcctgtgggttgaggactgctggaactatatgcaagggccctggtgaggccagaagtgtttgcatttccaacaagctgccaggtgatatatatgttgctggtccatgggctacacttgaaataaaaagatttcagatttttgtggcttctactaagttgccattctgttttaatgtaatgagtagtattgtttagaatttgtgtatatatatatatatatatatatrgccagttgtttttctttgcagttttatttctctttgtaaaatggacataatagtacccacttcgtagattgttatgaattaaatgggatgatctatataaaatatcagcactgccctcatggagtctagtgaaggggacagataacacataggcaaacacctgtaataataatatgtcaagtacaagaaggaagattataagatactgtgatagaaagagggatgagtaacctattgagataaaatggccagacagaaagagctgagaattaagcagagacctaagtaaaggatgagagggagctggccatatgaaga

SEQ ID NO: 514074 - DNA, 574 bp, Homo sapiens
ctgttgcagatggaacagctgggtccaactcctgtgggttgaggactgctggaactatatgcaagggccctggtgaggccagaagtgtttgcatttccaacaagctgccaggtgatatatatgttgctggtccatgggctacacttgaaataaaaagatttcagatttttgtggcttctactaagttgccattctgttttaatgtaatgagtagtattgtttagaatttgtgtatatatatatatatatatatatggccagttgtttttctttgcagttttattkctctttgtaaaatggacataatagtacccacttcgtagattgttatgaattaaatgggatgatctatataaaatatcagcactgccctcatggagtctagtgaaggggacagataacacataggcaaacacctgtaataataatatgtcaagtacaagaaggaagattataagatactgtgatagaaagagggatgagtaacctattgagataaaatggccagacagaaagagctgagaattaagcagagacctaagtaaaggatgagagggagctggccatatgaaga

SEQ ID NO: 514075 - DNA, 553 bp, Homo sapiens
cttagtttgtgttgcagagagaactggcatcagtgggggctctcaggggttgtgtgggggcagtgaggagcattctaggcacrtggatttaagctccagtgtcagtgaattttagacacaacttctcagatctgtaactcacagaaagtgtttggacatagtcacataaccatctatgagggaaaatgaagaagggattcctttattatcttagtaactgtattttatctactttttaggaattcttcaatgcttagattaaaatattgttttaattggataatactatcacataattcaaaagatgttaaaagatgcacagtgggatgtcagtctccttccatttctgtccctcgtgcctcagctcccctctgggcagtaaccattgtgtgtctttcttgtgtgtcattccagagatgttctatgcatatgcacacttatgtccttttccttacatgaataataagtcattatatatgctgtgctgcccttgcatttttccccttgcatattttaagctaagtttacattagagatcactgcatcttggtac

SEQ ID NO: 514076 - DNA, 620 bp, Homo sapiens
tatatatatgtgtgtgtgtattatatactattggttatatactatatatacctataaacagaattatatacatagtatatatagtgtaatacatataaatatataatatataaaaatgtacaaatatataatataaaaaatacataaaattatatatagtataaaacagaaccaataggagacagacagacagacagatagatagatagatagatagatagatagatagatagataatatcaccacctttctaaaggtggtgatgtgatatagtggaccctgcagacatgttggccagggcaatgaggtataaatactatagcatcatacatggatttctaagaaatactaagatatggaatagtatcatatatggttataaataattggataaagatacagtatagtatcatacrttattataaagaggataaaaacagtgtaaattaaacatagtcagatacatgacatagatacaatatagcatcatatgtggtcatcagatagataacagacttggtgtagcttcacacgtggtcatcaggtagatggtatcgatgtagtttagcatcatctgtatcttcaggaagatgacacatagttcatacttcaaattctat

SEQ ID NO: 514077 - DNA, 589 bp, Homo sapiens
cttgctcaaattcctcatccaccaaatcatgagaaaaaataaatggtgttatttaaagccattaagtttgggggtaaaacagtatgttactcagcaattgataaccaaatcacagttatccataaaaaatgaaaaatattgaataaaatgtaaatatttcaaatatctttaaartaatggaagttattgtttaaatttgagttatattgtcagaggtactcctgttaaatgatacaagagaataagcacatatttaactaaataaattcagttaaattgtatagttaggtaaatttagttaatatgttataaactgtgtaacaaaacactatatttataatgtatatcatattgtacaaaaacaaatcatgctatttaatgctctacaactgataaataaaaaaatctccacagtaactggacagaagataataatgacaattaataaatagtgaaagaaaaagaccaaaaagcatgcagaaaaattatctgcttcttcagccatcaggaatatgcaaataaaaataaaactaagatatgattagcaacaatttaaatcattgataacattcagtgctagcaaaggtag

SEQ ID NO: 514078 - DNA, 612 bp, Homo sapiens
gaaaaagacatgttgcttcgactggaaaaatgaacaaagatcatgcctttgtggaattgtgagcatttactaatgaagcattttagtttcctgcagtgtttacttattaattgcttagaagctataatgctggcttycatactgcctgtttaacttactgtaacagagatgtcgacgtccctctattccctgcttccctcaaaggatagcctttaaaatacatcttggttgcaatttaaaaattactcttaatgtctcctccttgcaaagttttcttccatggtctttagggttatagccagtaatgaccagaggaaccaacgccctttgtctctgagggatccccaaaataaatgcagtggaatgctcctttctctttctccctttctctgaccatcttttaccttgatttgactaatactctagatgaagattctatatgcgaagttagggcattctcagaaggaaatgacaatagaggtgagagttctaccttccttggactctccttttacactggctcttcaagtaactgcataaatctgtctcttgggagctctccagtcttcccacagcagtgggaagcagcaggatcttcagttttaaggaaga

SEQ ID NO: 514079 - DNA, 592 bp, Homo sapiens
ttcaactcttcagctaccttttgtatatccctatagtagcttatagctaaggttctcctggtaggttttgtaccatttcttctgcaaattttagttttctaccatttttccctgcmaattctgcgcaagtggattagatataatgtgcaattatatgggacatactcttgtgttcctgtcttttgtggcttctgcaaaacagaagtgtcccattttaacatgcacctgtaaaatgatccagtgtttaaaaaaatttgtgaatgtagtgaattgaataaataaattttctagcgttaacaattcttgcatttcatccatgtttataggagattattcagaaaatattattatctatacttaactgaatggaatcaggctaattgtcattcctttgcatgccatctgtcccttctctctggctgctttattatcttctttttgcctttggtactctatattttcactatgattttttcaaatgtggttttctgtttgggagctatttgaggatttatgctcgttgtcaattcaggaaaaatttattcatcatttctttcaaacttgcttctttctcatctgtccactatcttct

SEQ ID NO: 514080 - DNA, 592 bp, Homo sapiens
ttcaactcttcagctaccttttgtatatccctatagtagcttatagctaaggttctcctggtaggttttgtaccatttcttctgcaaattttagttttctaccatttttccctgcaaattctgcrcaagtggattagatataatgtgcaattatatgggacatactcttgtgttcctgtcttttgtggcttctgcaaaacagaagtgtcccattttaacatgcacctgtaaaatgatccagtgtttaaaaaaatttgtgaatgtagtgaattgaataaataaattttctagcgttaacaattcttgcatttcatccatgtttataggagattattcagaaaatattattatctatacttaactgaatggaatcaggctaattgtcattcctttgcatgccatctgtcccttctctctggctgctttattatcttctttttgcctttggtactctatattttcactatgattttttcaaatgtggttttctgtttgggagctatttgaggatttatgctcgttgtcaattcaggaaaaatttattcatcatttctttcaaacttgcttctttctcatctgtccactatcttct

SEQ ID NO: 514081 - DNA, 593 bp, Homo sapiens
tcatccaggaggatatatttattgcagagaaggaatatggagtgttcattaaatgtttcttttcttggctatggtgggccatcagatagtcctctgtgtcatggtcaaaacaaatccatctgcttctatacttccaaagttctgggcaatggtgggctgatatggcttttatcccatgttgaaagacatcctcaagatccataaaattagtgactagctggtaaaacatttgtaaatcttgtcacactggaagcaggctaggatttcagagccagaaaatattataaaatttacctagtcttatattatcacttactgatgagtaaattgaagactagtgaggttagaaagttcccagtgtaactcagctagtgagtgaggcaggtaagaaccagagacaggtcaagaatcaagctgcttaattcctactccagtgcaatttcctctgaaggagaaaaactgtctcacacctggtacgaaagccaacctttcttcctttggggaagaaattaacatttctggcaaaatgcttaagcaaatttcttgtgaagtttaatwaaaatcttgttatgggacaccatttccttcccaca

SEQ ID NO: 514082 - DNA, 540 bp, Homo sapiens
tgccccaggttaggctattaaatggtctaacagggagtctgctagaaccaggaaaacatagtatgcagagcttcatctctgcatgagaaaggagagtaaaaaaaggtgactttgaagctggagacaatagtttatgaactggccaatgattgaggccgtgaatctttcttccctagcttgtgggagccttttgaaagcagtactgcaccttgctctagcattttgaaaagtgacctcagtgtaaagaaattgtgatgtgctctctctgtaacagatgtatgtttttaaaactgaatctgtttgaccgggcatggtgctcacgcttgtaatcccagcactttgggaagccgaggctggtggagcacgaggtctcctggctagcacggwgaaaacctgtctctactaaaaatacaaaaaattaacctggcatggtggcgggcgcctgtagtcccagctactcaggaggctgaggcaggagaatggtgtgaacccgggaggcggagcagtgagccaagatcacgccactgcactccagcctgg

SEQ ID NO: 514083 - DNA, 549 bp, Homo sapiens
tcagcactgcactaacagcttgcaagggtatggacacatgaaagttaagccaaaaaagggaacaagcagagataattatttctagggtaatttttttaaaaaaatagtcatatttttaaaaaaatgtaatcagcctgcattcatagttatcctatgggatttcttaaagatacaatttgctaggtttgacacagtgtgtgtgtgtgtgtgtgtgtgtgtarctcagtaataaaaaatatacattttatatatctataaatatatatttacataaataaatacattttactattgaattttatgaagaaagttatagagtccaaaaaaatcattaaaaatgtacagtactagtctttcaagggagaagaaattctcagttttttctccctaaatgcagttaaccattatgaacagacagtccatagagagaagcccatagaagcaccatgaggttgagtcaagcagcagggtaaagtggtggggggtctggaggcaggatgacagacctcatgtggcatcaggattgagtgccgtccctctcttgaccca

SEQ ID NO: 514084 - DNA, 641 bp, Homo sapiens
tcaagccaaagaatattgaagaaaaccaagaaattttaatatatgctgcktaatttatcatcgaagtgacatatgtaggataaaaacattgaaatggttaaggaaaattctacattgtaaaaggtccttttttctggttttatttttaattgcaactatgatttgagaaagcaaattaatagaaatcataaaaatagaattaacaaataaaatacacactaagatttattttttccccccttctccgggttatttaaaacgttagtttttttaaatggtaatatactggtattttggtttgtactgaaaactggctaactcacctattccagggtttgtcaaccttgacaaatctatttacatttggggctggataattctttgttgtgcagggaccactctgtatgttttaggatttttagcagcatctctggcatctacccaatggatgagaatagcactcaacccttcaaccgttttgacgagcaaaaacacttaaatattgtcaaatgtcacagggtggtggtagggggagtactaaagagctgcccagttggaaaccactgtctattcctacccaaaatacctttctatttgatgaaaattacttcagcacttcctaaactagtattatgtagttt

SEQ ID NO: 514085 - DNA, 492 bp, Homo sapiens
gaaagaaagaagatatttgattaaacctaccatttaattccctaaacatgctggctaattaaagttttactcaatattatcatctatgttaagrtaacaggatattctaatttaaaattgtggtaattttaactcttagttagctattttgtgcacatactaggcatgcattacaaatttttaaaacaattaagtattaggttggtgcaaaagtattgccgtttttccccaaaaactgtattaaacctgtattactgtgttaaaattggtgattctgatgttttctggcttttacaaagaagaatccaacaaacgatatgccaaaaactgcaattatttttgcaccaacctttacatacactagcattaaacatatgctgaatatgatttaagtgttctctgataaatcagaagctacttcactactctgtaatgtaacagagttcttatatgaacagcaatttatgtggtcagtaatttcagttaaaagtt

SEQ ID NO: 514086 - DNA, 573 bp, Homo sapiens
cataacaaaactaaaatagaataatgcatttcaataaaacacaccccttctgagcttttcaattcctaagaattcctctgttagaaagaaaagaaatcacgtaataytgacatttggatacatttctcttgtgttagggactgaaaaatagaatctgtagagcaaacatcactagaaacaggaacagagttgtagaagctttacccaccagaatttcacagtttgaattctgaagatttttctgcttcaaagatcaacagaacccagattttaatatcaattatatatgtatatattacttgtgttatagattaatataacttaaatatttccaaactatcatcatagccatttttactacaaatattatctttacccaaatatgtttgatatggttatagaagaggaatgcttatgacgatataacacataatagcaaataaagccttttagaaattattaatctaaaaatcaaataatttttattaaaatgtcaagaaaaggtcagactttctagggaaagttttgagattaaaatgctttaagcccatcttacactggatcacaggacag

SEQ ID NO: 514087 - DNA, 667 bp, Homo sapiens
aggaggcaaatgtattcttatgtgaaaactaagaactaaagaatgaattaaaactgcacccattctttatatataaatttagtgactacctggtaggaaatttttgaaatgcacacatatgtatatgtacacgtaacataattgcctgtacctgatttctaagaccctgaaatttaatcagcttgatgtagtttcaacatattgaatacattaattgaattcataacatcaaaaaaattcacttgaaggggtaaggtatcaggggtagggttttttactttaaaaaaaaattcacagraaaaaaactattaccagatcatcaataactggttaaacatgaaggactaaatttacacatttatctctgcaacctttaaaaaaaaatctattaaaataacaatgaagaaacagaaaaggtatacacccagaaaaacattaagaagagcagaggagacaaaagcagaccagagatgtcaacccatttttctaagatggaaagcagacttagcagggcagagggcagaggaagctgaaacctaagagtttgcacagtagaaaatcaatacatttgcatcacagaaactaggaagattccaaaattggaagcaccaagtaacacagaaggcagaggtgagacacaggacagcaaataaaggactggatgaaa

SEQ ID NO: 514088 - DNA, 610 bp, Homo sapiens
agagagggaagggattcaggattttctacatgcctggcatagtcataggcattttatatatgtttggtcctttaattctattattctcatttttcaaacaaggaaactgagtttcagagaagttgccagggccacacagccagtaggtattggcgcaggatkagacaattatacgcctgagtccaaagcctgcagtctttccacttcacctcactgatcaagccattggggggttattttgcaaatattatagaatctcacctcaaagtctataaggctatttctccctcttccagatagaggggtgtaggaaagcaaggaggagacagggagggccaatctcactagcatgagacccaggcccgaaatgtgttctttctttcatagggtgctgggctttgctggcttagagaccttaatgccaagggggaggtgttctaccaggggatatgacaactgggccaagagaaatatggcacctgcacaccacatgcctcccttctgagggccccacagacacacacaggggcaaagggagctcctctcactgcttcctgtgtttgtcaatatccaagccagagctgcacacagcaggccagctgtagtcaga

SEQ ID NO: 514089 - DNA, 624 bp, Homo sapiens
ctactcaggcctggcaactttggtttgtcactcacctcagctccgaggtcagttttgtccacaagcacgaatcatgtctgtttgtgaatattgcaccatgttagcggtgcaagactggagaattccctttatctacatccactttctgttaaccccaagaaatccttctttcctctctcttttccacaaaatgcccaccctaagacttcgcttcatggatgccagtgtctggtattgcaggaaagctccatcagcttaggtgatctagctgctcagtctatggagggttctgacaagggtgtggatgccagcaccttctgccagacagcccctgagcaaagggtttttcccacggtgaacctggaggaacacaccacggtatttaacctttgctctctcttggagcatttctgatactagggtgggaataacaagttctcctgccacagcccatggtgcacaaaaagccaccttctgtgtattcccacagtcttctggctgcccaggcctgcccagtgaggctctgaaacttkctcgttccacaccccagttccctcctttaaaaggcttctgcctacactatcatcctactcagtctggagattcactttagggtcacaaacc

SEQ ID NO: 514090 - DNA, 524 bp, Homo sapiens
ttgtgaaccactggctgatctggggaagccaaacttgagcttgttctgattgttagtgtgtcctctagaaagtgagacactcttatgttggacccctactaacttaagtagggatggtacaaggtttttattagtctgttttcatgctactaggacatacctaagactgggtaatttataaagaaaaaggcttaatagacttggttccatgtggccaggggaggcctcaaaatcatggcrgaaggcaagggaagaacaaaggcatatcttatgtgatggcaggcaaagagaatgagaaccaagtaaaagaggaaacaccttaaaaccaccagatctcatgagacttatgaccacgagaacagtaatggaggaagccacctcccacgattcaattatctcccaggtccctcccacaacaggggaatcatgggagctacaactaaagatgagacttgggtgggcacacagccaaaccaaggttcaagaggccaaagagaccaagagccagcaaacaaaacataggg

SEQ ID NO: 514091 - DNA, 649 bp, Homo sapiens
tgtgaaccactggctgatctggggaagccaaacttgagcttgttctgattgttagtgtgtcctctagaaagtgagacactcttatgttggacccctactaacttaagtagggatggtacaaggtttttattagtctgttttcatgctactaggacatacctaagactgggtaatttataaagaaaaaggcttaatagacttggttccatgtggccaggggaggcctcaaaatcatggcggaaggcaagggaagaacaaaggcatatcttatgtgatggcaggcaaagagaatgagaaccaagtaaaagaggaaacaccttaaaaccaccagatctcatgagacttaygaccacgagaacagtaatggaggaagccacctcccacgattcaattatctcccaggtccctcccacaacaggggaatcatgggagctacaactaaagatgagacttgggtgggcacacagccaaaccaaggttcaagaggccaaagagaccaagagccagcaaacaaaacatagggtttgagggaacttacagggcagtccagtggcagttggctggaaggaaaacttattgcaaccacatgttgtaaagcaggcagtttatagcacttagcaccctcccttcagcagcttccacgtggcac

SEQ ID NO: 514092 - DNA, 598 bp, Homo sapiens
tgagttgtgaaccactggctgatctggggaagccaaacttgagcttgttctgattgttagtgtgtcctctagaaagtgagacactcttatgttggacccctactaacttaagtagggatggtacaaggtttttattagtctgttttcatgctactaggacatacctaagactgggtaatttataaagaaaaaggcttaatagacttggttccatgtggccaggggaggcctcaaaatcatggcggaaggcaagggaagaacaaaggcatatcttatgtgatggcaggcaaagagaatgagaaccaagtaaaagaggaaacaccttaaaaccaccagatctcatgagacttatgaccacgagaacagtaatggaggaagccacctcccaygattcaattatctcccaggtccctcccacaacaggggaatcatgggagctacaactaaagatgagacttgggtgggcacacagccaaaccaaggttcaagaggccaaagagaccaagagccagcaaacaaaacatagggtttgagggaacttacagggcagtccagtggcagttggctggaaggaaaacttattgcaaccacatgttgt

SEQ ID NO: 514093 - DNA, 489 bp, Homo sapiens
gcagcctgcaagtattgagcatctgcccccatggtactgaggagaacagaagggtaaagacaaactggaaacgagcatcagacacttggattagctccaggtttttgctgtacaaacaataytgctctgagaattcttgaatctgtctcctaggacagaggttttatattcttcatggtatatacctaggtatttaggcatgtagaccttacagttcactagaaaccaccacattgcttccctcaaacagttgtatgttttacgttcccactagctatgtatgaaacttctcatagctcatcactatgctagtgttccaggagtcttctgtctgtgtctccagacataccctcctccttcatcttgttctgtgttcccagaggttgacctgagtggacctcatcacccaggctgcccggccctcttgtctctggtttgattcctccaatggggaacactaccaagatgtctaagattgttaccagatgg

SEQ ID NO: 514094 - DNA, 620 bp, Homo sapiens
gccttcttgagttataccatatcagaggctcactatcagtctctattgctggcagattaaacattcataactggtatctagattggccttggtatgtgggaacccatgcttttaggcccttgcatagccaccattgttgctattctgcccaatccacatattggaccacagcctttcttggatggtaacatcaactggttaagttattttgcctggctacttgcatgcctattccatggtgaagcactctggtaggcataaacatgtgayatgttaacacttcattactactcccaaatgtttttccacaagcatctaccccagacatccttatgttccagtccgtttccttccaagttcctgataggctggccaaggcacttactgccctgcacttactgccctgcacttacttcttggcactcactgccaagaagcttagtatggattctcactttgggttacttttcccatgatgtactctcattttctcactgggaaagctttgtcttgccactgcatttcaaagccatcctgaacgcatctattaaagagttgccattcaccttagctttcacacattggaccaacacatctataagtcaaactgccttctattc

SEQ ID NO: 514095 - DNA, 642 bp, Homo sapiens
ccactctgttagacatcaaaaggaattactattaataaaagagcaaattaaattctattgtaaaacacagaggccaattagaaagcaaatgggattttcacccattcttagtgagcactcctactttaaagacctagactattcattatttaagggaaggaaaacaaatgtcagaaatgcatgaagarctctgccagaggtgatcagggcaatttattttcattttaattccatcattaagatttttgtatttcatagttatttggaactttataattttcaaaattatactgtgactgtggtttgaatttgatagttattggtacattgaataactggaaataaactagatacttgaaaatacggggaagtcttggaagcagttaattttaacaattttatacttatttcattttcctgctatgctaaaatctacagactttggaaatgtttcaacctataaacaaatcaagtactaaaacattttcataaatattattgttgagaattataaagttctgaattatttttataagtatacttattaaacttataaaacacaatacttgctactgccatttgttgatggtgaaagagttgatcattttactcttgccttgactattatagaatttataggca

SEQ ID NO: 514096 - DNA, 597 bp, Homo sapiens
tgatttttattttatgatttttaattttctatatttttactttttccataaaggtatatattctaagattrgaaaaagagaggtgaagattttattttaaaaacaaagatctccagatcatttactattttgtttttgtaaaatatttctcttcttgcttatctaattaactagtcaggtcagcactttgttattttagcaaagatgaataagtctgggaattaatgactatgaacaagggaatattcttagatattatgaccttgactttaatttgtctctagaaacatgggatattaaatgagttggaacttgtttatttttcatcatttgaaggaatattccttcttacctgatctacttgtcccacaagctcttgagatttataattctaatttcttatcagttgacagctttgaaatgtttatttcatttgaaaagggtgcatacatagcaaatgttaaaatatgacagagaaaatatcatcataattgcagctttaatttaaatagtaaaattgttattttaatcctattttataagactattttaaccagttatcggcttccccctcatcctctgattcctgtgtccaca

SEQ ID NO: 514097 - DNA, 604 bp, Homo sapiens
tttttctttcagtcttctctttgttcttcagcttgggtaatttctattaatctatcttcaagttcactgacctttacttctggcatgtccaatttactatttatataatgtagtcatttttctaaattatgataaggtagttttcagttctataatttccatgtggtatcttgttttttctatttctctgctaagaatcctcagcttttcgcacattatgtctatattttccaccatatctcttacatgtttgtaatggctgttttaaagtccttgtgctaattttatcatctgaataattttgttgttggtttttactgactgttctttctatagattacttgtcacattcttttttcatgtctaatactttttacttgtatgctggaaattgtacattttatagaggcttggttatgttgtcttcctttaaaggttattttgtttagttatggcaggcagcttaattatttggggattctcttgattttgtcaaagacttggctatatgctttgttaggaggagtgtattttggttcakccttagccctagatcatgaccctaattctggtgcatagtcattactcttaaggtgtaatttgt

SEQ ID NO: 514098 - DNA, 573 bp, Homo sapiens
ctcagcaattctctccacatcttttaaccttaaacaaacctcttgtatatctgagctacttgcagcttgttagagcttgctgaggtttgttctctgagtgtacaggccagccctggaccaaacacctgagagactcctcacaggtctcaaatgccttctttcgctcagcagcccttcctcatgtaccccactctgcagtcacctcagatgcttcagacttttgggcactacctccgtgctatactgtcagagttccccagggagaaagccaataggaacacaaggcataattcgtgttttactctggagaatcaccgatctctcttgtctattgtcaaatgcctggagtatgaagataagtttgataccagttaatctatcaaggctgaaagacaagtcctgagtcttctctcgaattgtattttttcaaactgtcatcttccatgcctttgttttaaattttgactatatttagcattccataatcttccaattttctgattctaaacttttgggactttttcrtaggcctgattctctagaaggagaggctgagttgaggattctgttaaa

SEQ ID NO: 514099 - DNA, 694 bp, Homo sapiens
tctgtttgttgttttccatttgaatggtagatctttctccctccctttaccttgagtctgtaggtgttgttacatgtgrgatgggtctcttgaagatagcagaaagttggatcttgtctctttttattcagcttgccattctgtgtctttttaatggggcgtttagccaatttacattcaagagtagtattggtatgtgagattttgatagtgtcattgtgtggttagttgattattatgtagacagggagataggctacactcttttcaatctggttcctgaagggaggcacacacatctcctgtgctagcccacagacacaagcatctcacccctctcagtgctctgagatatgggctccaccccagattgggtgctggccattgatcttggcttggcactccaaagctgtgtgctgaagccctggggcacggggaccaactctagactctatcctctagactcttggattcctggtgtgctgagagatctgaagttctcccagggtgctagaaatatactaaggtggatcaaatcacccaggctgggcagtagagactgtgctgtgcacacgtttctgtggggagccaggcaggggacctgaaggaggggctgatgggcaggaggacctgtagaacaaacatgccccagtcttgtggggaaaccagttcagctttctcctggcccagcagt

SEQ ID NO: 514100 - DNA, 608 bp, Homo sapiens
gtctcttgaagatagcagaaagttggatcttgtctctttttattcagcttgccattctgtgtctttttaatggggcgtttagccaatttacattcaagagtagtattggtatgtgagattttgatagtgtcattgtgtggttagttgattattatgtagacagggagataggctacactcttttcaatctggttcctgaagggaggcacacacatctcctgtgctagcccacagacacaagcatctcacccctctcagtgctctgagatatgggctccaccccagattgggtgctggccattgatcttggcttggcactccaaagctgtgtgctgaagccctggggcacggggaccaactctagactctatcctctagactcttggattcctggtgtgytgagagatctgaagttctcccagggtgctagaaatatactaaggtggatcaaatcacccaggctgggcagtagagactgtgctgtgcacacgtttctgtggggagccaggcaggggacctgaaggaggggctgatgggcaggaggacctgtagaacaaacatgccccagtcttgtggggaaaccagttcagctttctcctggcccagca

SEQ ID NO: 514101 - DNA, 632 bp, Homo sapiens
gctgctctctccttctgtctcttattctattgactatctaggcttaactataatggcaaacacatctctcctcactgacttgtcttcttaacctctccatgtttgcttttatttcccrtcctttctttctcattgacttttcttatgtattagaaatatatgaattgttctatttttccctcatttccgtatagaaatataattaagtttcccccttggctttcctaggaacatataaaaaggccactttgtttccatttgctgtagtttaagaagaaatcccagccaactaattcttattcaacgctcaagtaagtgaatgtcctcactgcaaccaaatgccattttcaacaattaccatcatcaggattaactcaaaagtcttagccttatatattaatagaactgaatttaaaatactgttttcatcttatttatttggctgtttccaaaatcttcacctcaatctaaagtcccttcttatcacttctatttgagtaacagtattgatttggttcaagggtccaatgtatcacactgaaatactccatcaccaccatctacctacctacctgcttaggctttaaaaacaagtcacttcaagaaattatccacacatagaaaatacattt

SEQ ID NO: 514102 - DNA, 632 bp, Homo sapiens
gctgctctctccttctgtctcttattctattgactatctaggcttaactataatggcaaacacatctctcctcactgacttgtcttcttaacctctccatgtttgcttttatttcccgtcctttctttctcattgacttttcttatgtattagaaatatatgaattgttctatttttccctcatttccgtatagaaatataattaagtttcccccttggctttcctaggaacatataaaaaggccactttgtttccatttgctgtagtttaagaaraaatcccagccaactaattcttattcaacgctcaagtaagtgaatgtcctcactgcaaccaaatgccattttcaacaattaccatcatcaggattaactcaaaagtcttagccttatatattaatagaactgaatttaaaatactgttttcatcttatttatttggctgtttccaaaatcttcacctcaatctaaagtcccttcttatcacttctatttgagtaacagtattgatttggttcaagggtccaatgtatcacactgaaatactccatcaccaccatctacctacctacctgcttaggctttaaaaacaagtcacttcaagaaattatccacacatagaaaatacattt

SEQ ID NO: 514103 - DNA, 647 bp, Homo sapiens
aaacaaacacttctaattaggctggtgtggttagacttctttgcttaggaaatgactccaatagggtaatacttaggtgattccaatttgaacacacttgtaagcttactgctagatatcttggccatgttctccttgtcagattgcccctttaacctcatgaattattttaagccaaaaagaaaatggaagagggccagtgatctaactcataacactctgggtgccctggtgcaaccagttgctttgtctggaaagggcacaaaggatcttgatctgctgagaccagccagtgtcacagacttctttcccactctctcataagagatatctccagaaattctagagaatacaaaaaaattacattgaaattaaaaccagtggttggctttgggccaggtacagtggctcacgcctgtgatcccagcactttgggaggccgaggtgggcagatcacttgaggtcacgacttcgagaccagcatggccaacatggtgaaaccccrtctctactaaaaatacaaaaattagccgagcatgatggtacatgcctgtagtcccagctactccggaggctgaggcaggagaatcacttgaacccaggaagcagaggttgcaataagccaagatggagccactgcactccag

SEQ ID NO: 514104 - DNA, 647 bp, Homo sapiens
aaacaaacacttctaattaggctggtgtggttagacttctttgcttaggaaatgactccaatagggtaatacttaggtgattccaatttgaacacacttgtaagcttactgctagatatcttggccatgttctccttgtcagattgcccctttaacctcatgaattattttaagccaaaaagaaaatggaagagggccagtgatctaactcataacactctgggtgccctggtgcaaccagttgctttgtctggaaagggcacaaaggatcttgatctgctgagaccagccagtgtcacagacttctttcccactctctcataagagatatctccagaaattctagagaatacaaaaaaattacattgaaattaaaaccagtggttggctttgggccaggtacagtggctcacgcctgtgatcccagcactttgggaggccgaggtgggcagatcacttgaggtcacgacttcgagaccagcatggccaacatggtgaaaccccgtctctactaaaaatacaaaaattagccgagcatgatggtacatgcctgtagtcccagctactccggaggstgaggcaggagaatcacttgaacccaggaagcagaggttgcaataagccaagatggagccactgcactccag

SEQ ID NO: 514105 - DNA, 549 bp, Homo sapiens
tgcctgtagtcccagctactccggaggctgaggcaggagaatcacttgaacccaggaagcagaggttgcaataagccaagatggagccactgcactccagctggggaaacagagtgagactccatctcaaaataaatacataaataaataaaaatagaaataaaaaaaccctgaaatgagacactttatctcattttagcaatcctataatatttctttatgacgacaacatgtattattaatgctgatatatctgaatgctcacagtaatcaggcactgttataaacatcttacatgtcctgattcatttactcctcacatcartcttccctatgagttccataaattcatgttaatattaattgaataggtgcacaggcttagtttgagtttgattctgcagttgggtctacagagtccgagatacttccatacttgataactcatctgaaaatttgtgtgcgtgtttgcagaagaagggagtttatagctgtcaaagcttttcaaacttttttccttgaatatttttaatcactttttccaagtca

SEQ ID NO: 514106 - DNA, 456 bp, Homo sapiens
acatggtaattgtgaaatttaaagaaaatattatactttacatgttttgaaacttaaaggattacataaatgtagattgttatgctatttacgttgcatatgtttctatgcagtaatttaattaatgtttatagagaatctcctagtgtgaggtcttctgttaggtgacaaaggtacatcaataaaaattgagacacagtctctctttttttgaaatttataatctgtaagagagcaacatgttaggatattacaaaatttatgatttaatgacaaattccagtatcttctaataagtaaaagtatatgacagcacctaacagtggtctccaacytatactaagaatgggatttgacctgaatgtaggcaggtgagtaataattaaccaagagaagaataactgttattcaggcagaaggaactcaagatgcaaacattctataatagacatcact

SEQ ID NO: 514107 - DNA, 598 bp, Homo sapiens
gtctcctccacttgatatttcatgctgttgccagtgagtttacctgtagcaactcttgttyccatttccaattttgttgaatcctggagaaaccaaaccaagccttagatggttgtatgtaacacaggagtaaataggtccagaataagagtgtaggggcttatcgctctctccggtccatgcctccaagatgacaaagaaaagaaggaacaacgttcgtgccaaaaagggccgcggccacgtgcagcctattcgctgcactaactgtgcccgatgcgtgcccaaggacaacgccattaagaaattcgtcattcgaaacatagtggaggctgcagcagtcagggacatttctgaagcgagcgtcttcgatgcctatgtgcttcccaagctgtgtgtgaagctacattactgtgtgagttgtgtaattcacagcaaagtagtcaggaatcgatctcgtgaagcccgcaaggaccgaacacccccaccccgatttagacctgcgggtgctgccgcacgtcccccaccaaagcccatgtaaggagctgagttcttaaagactgaagacagactattctctggagaaaaataaaatggacat

SEQ ID NO: 514108 - DNA, 598 bp, Homo sapiens
gtctcctccacttgatatttcatgctgttgccagtgagtttacctgtagcaactcttgtttccatttccaattttgttgaatcctggagaaaccaaaccaagccttagatggttgtatgtaacacaggagtaaataggtccagaataagagtgtaggggcttatcgctctctccggtccatgcctccaagatgacaaagaaaagaaggaacaacgktcgtgccaaaaagggccgcggccacgtgcagcctattcgctgcactaactgtgcccgatgcgtgcccaaggacaacgccattaagaaattcgtcattcgaaacatagtggaggctgcagcagtcagggacatttctgaagcgagcgtcttcgatgcctatgtgcttcccaagctgtgtgtgaagctacattactgtgtgagttgtgtaattcacagcaaagtagtcaggaatcgatctcgtgaagcccgcaaggaccgaacacccccaccccgatttagacctgcgggtgctgccgcacgtcccccaccaaagcccatgtaaggagctgagttcttaaagactgaagacagactattctctggagaaaaataaaatggacat

SEQ ID NO: 514109 - DNA, 598 bp, Homo sapiens
gtctcctccacttgatatttcatgctgttgccagtgagtttacctgtagcaactcttgtttccatttccaattttgttgaatcctggagaaaccaaaccaagccttagatggttgtatgtaacacaggagtaaataggtccagaataagagtgtaggggcttatcgctctctccggtccatgcctccaagatgacaaagaaaagaaggaacaacgttcgtgccaaaaagggccgcggccacgtgcagcctattcgctgcactaactgtgcccgatgcgtgcccaaggacaacgccattaagaaattcgtcattcgaaacatagtggaggctgcagcagtcagggacatttctgaagcgagcgtcttcgatgcctatgtgcttcccaagctgtgtgtgaagctacattactgtgtgagttgtgtaattcacagcaaagtagtcaggaatcgatctcgtgaagcccgcaaggaccgaacacccccaccccgatttagacctgcgggtgctgccscacgtcccccaccaaagcccatgtaaggagctgagttcttaaagactgaagacagactattctctggagaaaaataaaatggacat

SEQ ID NO: 514110 - DNA, 625 bp, Homo sapiens
gctgtctacaagccaggaagagagtcctcaccagaaaccagctctgctggcaccttgaacttggacttcacgcctccagaacagtgagaaaataaatttctgctgtttcagccgcccagcctgtggtattctgttatggcagcccaagctgactaatacactacctaatagtgaatgagaagaattaaatcagaaaatataaatgcattaataaacataccatgtattgggcacctccctgtgccaggcacttcaccatcatctctagtmctccaaaacacatgctgtttgcaccacatcatgctgccaggcacatagttggcttgttgatttgtgtgtgtgtgtgtgacaagatctcattctgtcgcccaggctgaagtgcattggcatgatcatactcattgaaacctccaactcctgggctcaacagatcctccttcctcagcctcttgagcagctatgacaatgggcatgcaccaccacatctggctaattttttttaaatgtttttgtagagacagggtctcactgtgttacccaggctagtctcaaactcctgaccttaagcaatcccccgacctcagcctcccaaagtgctgggattataggagtgagccaccacacc

SEQ ID NO: 514111 - DNA, 512 bp, Homo sapiens
ctgcctttccccttcttgctttgtctatgttgatgcttttctctctttttcccttctcctctctgtttcccttgccccacctctgtctaatacatcaacaactaaacaacaacaattatcatctaccaacaatttagcatataccaataactgtcyttaatggataggatttcatttaattcccacaaccacccccagatggttaagtattatttgccacagtttacaaatgaggaaacgcaggcacagggaattgaagtgccttgcccaaacccacacaagctgtaaatgatggagctgggatttaaaccaagtcggcctctgcaatccatgttttctctagtaaaccatactgcctgtgatatggaataagtacatgtattttttttcttaacttttgcgtaaagtatgaccatctttgtttctaatttgtaaatcaaataagcttaatattttatatggcttttagaaagcacatatacaaagaaaattttataaattaaactgttctt

SEQ ID NO: 514112 - DNA, 624 bp, Homo sapiens
catgtcaattactcaaagtaccttagaaggaaaacaatggtgtcgttatagaattcaaaggccacgaatcctcaaaggacttcactcagtacctcaaaactattccacattggtgcttactattatatttttgatgagttctagagagagaagaaatgctaaaaaacccaacagtagctcattttagcatctcagaatcctcaagcaagaccatggccaaacactcaaactccttccctgaccgttatcaagagaarctctctgctttgtggtgggtcttgcttctgcacccacaggaaatgcagtttctcttgcacaagtaacacaatcacaataagtgagaggtcacctgagggagatacaaccagacctggagatggaaaggagagaaatggtacaagactacaaagtccttatcaaggtttacattttttttgccttgcaaaacagacctttataagaaatgtcaatgtattagaggtaacgggccacacaagatgagaaaagatgatgatgccatcattcatgacaattctccgtaggtcctgccaccaaggaagagcaatgagctactgatgcccattgtggggtccaacaaaagcatggttatgtcccagaaccagc

SEQ ID NO: 514113 - DNA, 624 bp, Homo sapiens
catgtcaattactcaaagtaccttagaaggaaaacaatggtgtcgttatagaattcaaaggccacgaatcctcaaaggacttcactcagtacctcaaaactattccacattggtgcttactattatatttttgatgagttctagagagagaagaaatgctaaaaaacccaacagtagctcattttagcatctcagaatcctcaagcaagaccatggccaaacactcaaactccttccctgaccgttatcaagagaaactctctgctttgtggtgggtcttgcttctgcacccacaggaaatgcagtttctcttgcacaagtaacacaatcacaataagtgagaggtcacctgagggagatacaaccagacctggagatggaaaggagagaaatgktacaagactacaaagtccttatcaaggtttacattttttttgccttgcaaaacagacctttataagaaatgtcaatgtattagaggtaacgggccacacaagatgagaaaagatgatgatgccatcattcatgacaattctccgtaggtcctgccaccaaggaagagcaatgagctactgatgcccattgtggggtccaacaaaagcatggttatgtcccagaaccagc

SEQ ID NO: 514114 - DNA, 624 bp, Homo sapiens
catgtcaattactcaaagtaccttagaaggaaaacaatggtgtcgttatagaattcaaaggccacgaatcctcaaaggacttcactcagtacctcaaaactattccacattggtgcttactattatatttttgatgagttctagagagagaagaaatgctaaaaaacccaacagtagctcattttagcatctcagaatcctcaagcaagaccatggccaaacactcaaactccttccctgaccgttatcaagagaaactctctgctttgtggtgggtcttgcttctgcacccacaggaaatgcagtttctcttgcacaagtaacacaatcacaataagtgagaggtcacctgagggagatacaaccagacctggagatggaaaggagagaaatggtacaagactacaaagtccttatcaaggtttacattttttttgccttgmaaaacagacctttataagaaatgtcaatgtattagaggtaacgggccacacaagatgagaaaagatgatgatgccatcattcatgacaattctccgtaggtcctgccaccaaggaagagcaatgagctactgatgcccattgtggggtccaacaaaagcatggttatgtcccagaaccagc

SEQ ID NO: 514115 - DNA, 622 bp, Homo sapiens
catgtcaattactcaaagtaccttagaaggaaaacaatggtgtcgttatagaattcaaaggccacgaatcctcaaaggacttcactcagtacctcaaaactattccacattggtgcttactattatatttttgatgagttctagagagagaagaaatgctaaaaaacccaacagtagctcattttagcatctcagaatcctcaagcaagaccatggccaaacactcaaactccttccctgaccgttatcaagagaaactctctgctttgtggtgggtcttgcttctgcacccacaggaaatgcagtttctcttgcacaagtaacacaatcacaataagtgagaggtcacctgagggagatacaaccagacctggagatggaaaggagagaaatggtacaagactacaaagtccttatcaaggtttacattttttttgccttgcaaaacagacctttataagaaatgtcaatgtattagaggtaacgggccacacaagatgagaaaagatgatgatgcyatcattcatgacaattctccgtaggtcctgccaccaaggaagagcaatgagctactgatgcccattgtggggtccaacaaaagcatggttatgtcccagaacca

SEQ ID NO: 514116 - DNA, 622 bp, Homo sapiens
catgtcaattactcaaagtaccttagaaggaaaacaatggtgtcgttatagaattcaaaggccacgaatcctcaaaggacttcactcagtacctcaaaactattccacattggtgcttactattatatttttgatgagttctagagagagaagaaatgctaaaaaacccaacagtagctcattttagcatctcagaatcctcaagcaagaccatggccaaacactcaaactccttccctgaccgttatcaagagaaactctctgctttgtggtgggtcttgcttctgcacccacaggaaatgcagtttctcttgcacaagtaacacaatcacaataagtgagaggtcacctgagggagatacaaccagacctggagatggaaaggagagaaatggtacaagactacaaagtccttatcaaggtttacattttttttgccttgcaaaacagacctttataagaaatgtcaatgtattagaggtaacgggccacacaagatgagaaaagatgatgatgccwtcattcatgacaattctccgtaggtcctgccaccaaggaagagcaatgagctactgatgcccattgtggggtccaacaaaagcatggttatgtcccagaacca

SEQ ID NO: 514117 - DNA, 641 bp, Homo sapiens
  misc_feature (1)...(641): n = A,T,C or G
caggcataggaaatcacaagagtattgactggggaagtgataaatgtccatgaaatcttcacaatttatattctgccatggcttcagccggtccctccgtttggggtgcctgacttcctgcaacagacaggagttccagaccagcctggccaagatggtgaaaccccatctctactaaaaaatacaaaaaaaattagggtgtagtggtgcctgcctgtaatcccagctacttgggaggctgaggcaggagaatctcttgaacctgggaggtggaggttgcagtgagccaaggtcacgccattgtactccagcctgggcgacaagagcgaaaatccgtctctaaataaataaataaatatgtcaggtggtctccatctcataaaaccagctccagcaaacaggggttgaagctcaggatccaggctgctctgtggnccacaacccagtccagccaacaggccaagaccttcctgactggtggtcagcgccatgcctgtaggccgttcacaccagagatgccacttagaactctccactggggagttcgatcggtagcgggagcggagagcggaccccggagagcggaccccagagarccctgagcagncccgccgttgccggcctagttaccgtcataccac

SEQ ID NO: 514118 - DNA, 636 bp, Homo sapiens
ctgggggtacggggtttgggtggtggtggtgggggtaattacccaatgaatgcaaatgtaatgagaggasagctgtactgtggcaaaagagggtatggatgaattagtgatgatcacacaaatttaagccaaaaatgtaaatatattattaaccagggaaaacaacaagggaaatataatcagcatactataaggattatagatacttgcctaacaatattaaaaattctgaatactgaggatatcaaaattgtgatctaaatttatctggaagatgggtgtgagtgggaacaggtgtatgaggtgtgtgtttaagaaaggcgcattttcatcttccacagcataaagctagtatctaacctagagggaaaaacattaagcagcagcaatataggcctgttatttagaaatctcaagataaatagcaaagaatattgctaaaagagttgaaattattctgtgcagaagctggggatagcaacaggaatgctgttattataagctttggagtacttttcaatttttaaaccccatacatccacttcaataaaaatgaaatttaaaaataaatgttgacaaatattttatataacgaatgtaacataatatatcccttgttatgatgaagaaaattaa

SEQ ID NO: 514119 - DNA, 632 bp, Homo sapiens
gccatgctcctatgcctacgtgcccagacacttctctttggagatctgcttatcagtgaaagcttaagatacttttcacaattttaaactatatatatgtatatatatacatattttttgagatggagtctcgctccatcacacagcctggagtgcggtggcgcaatctcggctcactgcaagctccacctactgggttcacaccattctcctgcctcagcctcccgagtaactgggactacaggtgcccaccaccacgcctggctaattttttgtatttttagggagacagggtttcacagtgtcagccaggatggtctctatcttcctgcctcrtgatccatccccctcggcctcccaaagtgctgggattataggagtgagccaccacgcctggccaacaatatatatttttaataatacagtatatatatccttctctgacatttttttcactcagtgttatatttgtcagaataatacttgcttattaataaaattacttgtcattgatttttacttctgtcagttattgcatgaatgagtgtacaaaaattgtccattatcctgttgatggttatttgagttgcttacattattaaacttacatacattgtttttatggatataat

SEQ ID NO: 514120 - DNA, 632 bp, Homo sapiens
gccatgctcctatgcctacgtgcccagacacttctctttggagatctgcttatcagtgaaagcttaagatacttttcacaattttaaactatatatatgtatatatatacatattttttgagatggagtctcgctccatcacacagcctggagtgcggtggcgcaatctcggctcactgcaagctccacctactgggttcacaccattctcctgcctcagcctcccgagtaactgggactacaggtgcccaccaccacgcctggctaattttttgtatttttagggagacagggtttcacagtgtcagccaggatggtctctatcttcctgcctcatgatccatccccctcggcctcccaaagtgctgggattataggagtgagccaccacgcctggccaacaatatatatttttaataatayagtatatatatccttctctgacatttttttcactcagtgttatatttgtcagaataatacttgcttattaataaaattacttgtcattgatttttacttctgtcagttattgcatgaatgagtgtacaaaaattgtccattatcctgttgatggttatttgagttgcttacattattaaacttacatacattgtttttatggatataat

SEQ ID NO: 514121 - DNA, 360 bp, Homo sapiens
tcctgcctcagcctcccgagtagctgggattacaggcatgcactatcacatctgacaaattttttgtatttttaggattacaggctggagccaccrcacccagccccttttgcatttcctagagtttcatgtatgtagaatcaaactacattcactctttgtgtttgtcttcgttcattaatatgttgttttttttatttacctatgccacagtaagtatgaatagtttttgactttttattgctgatgcttcagaatttatttagtcacttgctagtaaacaatgacatataaaaaaaaaagtatcaagacatacccatgagaatgaccaacattaaaaaggctaatattagcaaatga

SEQ ID NO: 514122 - DNA, 360 bp, Homo sapiens
tcctgcctcagcctcccgagtagctgggattacaggcatgcactatcacatctgacaaattttttgtatttttaggattacaggctggagccaccacacccagccccttttgcatttcctagagtttcatgtatgtagaatcaaactacattcactctttgtgtttgtcttckttcattaatatgttgttttttttatttacctatgccacagtaagtatgaatagtttttgactttttattgctgatgcttcagaatttatttagtcacttgctagtaaacaatgacatataaaaaaaaaagtatcaagacatacccatgagaatgaccaacattaaaaaggctaatattagcaaatga

SEQ ID NO: 514123 - DNA, 397 bp, Homo sapiens
cattaacaatagaaacttaatctgtacctttcaatagtgtctcataataaaaytttgatactaaaagatggccatgaatatctttgcatttcacatcgacaaaaaaaattggagaaaatggaaaaattgttaaaaggcctaattgtcatatgattgttatgatatttatgtgatgaactaaaactcaaatgttatttgttatcacttgcaaggaaaacttctcattaaaaagttacattacctggctccagaatcaagctattccttgggtttggatgagacaggactttataaagaactactaaatggttatttggttaatcatttgaaaaacactaaagacaataacaatttgtataattaatatatggcaaagaagcatttttgtggcttgcta

SEQ ID NO: 514124 - DNA, 639 bp, Homo sapiens
ttgaggcacggtgacagccccaaaagggagtgtcctgggaaaagaagcaatgtgtacttctccaatgagtaaggccttggccagggaccatggtgcgaccttcctcaaccctgccacccggcaccgacattgactctccctcaccccacatactccctcctgggcaccagcccccgaaaggacccaatgtagtggctccatccagatctcccatgcccctgtatcaaagctgccatctttcccccaagttcactgctcctcagttactgacgccatcacccacccgattcttcaagccgcaggctcatggtccactggttttctcaagacagaagcactgacattgattttgctatatgcgtactgtaaaaccacagacratataaaacatgtgcattggagaatgaaagttccctcattatatgccctcctgaaatcgccacatttcacagtttggtgaattcctgtatcagtttaaactctgtgttacaacagacagaaaatccaaccaagataggaaataatgggctcatgtaaggaaatgatgcagaggtgatagtgggtttcaggcatggtttgatccagaggctcatgatgctgttggggctctgtcttggcttctctgcagttcccgtccct

SEQ ID NO: 514125 - DNA, 615 bp, Homo sapiens
ttggcccattgagggtaaggataccacagacaaaggtgctcaataaatgtctgggttacattttagtcacgcaccaggagcagaaaggaggaagaggcctttttgagaagggttccttttctttgtctctttctctatctcctgcccctgccggtgccgccacccctagtgtggaagctcgctgtggacaaggtcagactgcctggggctattccctccactggggcagggtctgtgacagccgcagttgccccaggatggctgggcagggtcggctcctgcctggatggctgacgtctccttccagttctttgttcagtttccagggggaccggggatggggaaaggcaggcagcacagcccacggacctgcagggccacagcagagaggcgctgcttcacgtccccctgggcctccgtggccctggccctgcacacagcacggctgcctcctccctccgacttatttcyggtcacctggctggtgggtccctcggggcagagcgcagggtccccagctttgctcctcgctctcctcccagctcctgcctctcctctttctggctgcctcagtggctgctcaaggtcaaggaacaaacagataaaccctttctc

SEQ ID NO: 514126 - DNA, 600 bp, Homo sapiens
gaacatagtaggtactcaataaacattgactgaatgggtagatgaaatttgtacatgcccttacttggcatggatgacagggcaggccaggagatgataataattattattatttttgtaattttcatttttattattttgacayagggtctcgctgtcactccaggctggagtgcagtggcatgatcccagctcactgcagcctccaactcctggcctcaagcgatccttccaccccaccctcccaagtagctgggaccacaggcacatgctaccatagatggctaatttttttttttttttgtattttttgtagagacggggtttcgccatgttgcccaaactggcctggaactcctggactcaagcaatctacctgcctcggtctcccaaagtgctgagattacaggcctgagccactgaacccggcctgagatcattattattttttaacctttaaggagaaaccacatcaaaattaaaaattactctgccaaagaccctgttaagaggatgaaaagacaaagactgggagaaaatatttgcaaatcacatatctgacaaaggactagcatctggagtatataaagaacttgcaaa

SEQ ID NO: 514127 - DNA, 600 bp, Homo sapiens
gaacatagtaggtactcaataaacattgactgaatgggtagatgaaatttgtacatgcccttacttggcatggatgacagggcaggccaggagatgataataattattattatttttgtaattttcatttttattattttgacatagggtctcgctgtcactccaggctggagtgcagtggcatgatcccagctcactgcagcctccaactcctggcctcaagcratccttccaccccaccctcccaagtagctgggaccacaggcacatgctaccatagatggctaatttttttttttttttgtattttttgtagagacggggtttcgccatgttgcccaaactggcctggaactcctggactcaagcaatctacctgcctcggtctcccaaagtgctgagattacaggcctgagccactgaacccggcctgagatcattattattttttaacctttaaggagaaaccacatcaaaattaaaaattactctgccaaagaccctgttaagaggatgaaaagacaaagactgggagaaaatatttgcaaatcacatatctgacaaaggactagcatctggagtatataaagaacttgcaaa

SEQ ID NO: 514128 - DNA, 558 bp, Homo sapiens
tgcaccagtgcctcccctgcagctcaggtcctactcccggaaccagcttcatggctgcccatcagaccccaaagcaggttcccctgagtgtagccgatcttttctcatgatcattgttaagtagaggcaccgtgttgaacagcagttctctcgattcccggcaccagcttcatgactgcccatcagaccctgaagcaggtgctcctgagtgcagccgatcttttctcatgattattgttaagtagaggcaccgtgttgaacagcagatctctggaacctactcatcgtgcataacgtgtattctacccccgcttcccctcctccagtcctggagaccccaaccctcctctctgcttctatgagcgtgactgtttcagattccttgtagatgggagaccatgcagtgtctgcctttctccttacttcacataacataatgtcctctgggttcatccctgctgtcactaatgayagggtttcctctttttcatggctgaatagtactccatggtgtggtgatggcctggactctattcattcatttgttgatggacatgg

SEQ ID NO: 514129 - DNA, 583 bp, Homo sapiens
ctggaggccctcatcctaagtgaattaacgcagaaacagaaagccaaataccacatgttctgttytcacttataagcaggagctaaacattgggtacacatggacacagagatgggaacaatagacactgggatttcaaagtggggaaggaagggaagggggcaagggttaaataactacctatcaggtactatgttcactacttggatgatgggatcattagaaacctaaacctcagtatcaggcaatatacttatgtagcaaacctgcacatgtaccccctgattctaaaataaaagttaaataaataaataaaattactaattctctcaaaagaagttttaggattagtttcttcttaggcatgttgtgttacaggtaggagtcagcaaactaagacccatgggccaaatctggccttcagcctccttttgtaaataaatataaaaacagccacttctacttttttacataaggctactttcagactgtattggcagagttgaatccttgccacaggaactgtatgagctgcaaaactgaaaatatttactatctgagcctttccaagatgtttgccaac

SEQ ID NO: 514130 - DNA, 601 bp, Homo sapiens
agtgtttatttaccacatgaacttttgactcctaagtaaatacatattgtatgttcaaaagtgataagaaattgaagttaataaaaaaaaacaaaacaaaacaaaatatgactttcccccttctttatcttaacacaatagataagactgctttccaaacttcgctggaaaatatttcagaaatagtcctttgtttatgtttccttaaataatcatattactaggttaatcagtattttaaaaatgtacacaacattctttcctactaggtagggttaccagataaaggaggcccagtcacatatgaatttcagatgaataatgattatttttgagtataagtatatcccatgcaatattttgaacactcaatattaaaaactatttggttcttcycaactcaaatacagctgagaatggtgcattctggtctgataaaaatagcaacactacaaatatgccaaaatactataattttataatatgtatacctagagagaagccccattatttctttctattttatctgaagtgccagtaaattatatcctctgttttcttaactcttcagcttgccccaaatgactaattttcttatttg

SEQ ID NO: 514131 - DNA, 660 bp, Homo sapiens
ccccagggggcacaatggctttactccacttctccacacccaccctcatcctggcaagtgcaccawggccctagcacagtgctgatggaatctggaaatatcgccaggggatcatttgcaagactaacctaataaattacattatttttttcctgggatgaggaaacaaggacagagttgaaacaccttcccccagaaatgtgcttgcctctctcagaccacaggtaagggcttaatatgatgtgagaaagaggatttctggcttggaatgcaattcatttctattaacatttagaaagcatcttgggtgggcaggaatgaaaaccagacactgtacatgctatgacatagttttcaatcactaaggagatgaagaggcaagctatcagtgtaacagaaagcagaatgaaagaaagaggggctcagtaaagccttattcttttgtagaaggcatgagatcctatgaggtaggcataggcaagtattaccctcattttccagatgacaaaacttgcttacctgcctcagagtttaagtggcttgtttattgtcacagagctaataattagcagattagggtctcctagctgggtgatcttttgaatgcatgactttgccagcagccagcagagctatgaaacaccgagagaaacaattaag

SEQ ID NO: 514132 - DNA, 535 bp, Homo sapiens
cctgtctcacacacatacacacacagagtcagcattgataaatgtttacatgactaaaagcgttgacatcatgtcaacacaccagctgcaactcaacttacatgtcatgtataaatgtagtaaagtttaatcataaaaatgaaatgaataattcattcctaatgaamttcaaatttatcaaaattattttaaaacagtttatagcaaataattatgttgaagtacgggtcatgttatcatttgatgtgatgtggggtaaagctcaaagtaaaagcacttaggtcctagcatggccttgaatgatgctacctgaccctgctgtttactagctgagttacctccgtcaagttgtccaaacttctgagagtttttcagaagtttccattctctgaaaaatgggaagggggcagaaaataatacctattttacagggttgcaaaaagaaaaaaatatatactagttttgaaaatactttacacacattgtaggaacgtaggggacgagtagtattacattatatatttccataaaatct

SEQ ID NO: 514133 - DNA, 535 bp, Homo sapiens
cctgtctcacacacatacacacacagagtcagcattgataaatgtttacatgactaaaagcgttgacatcatgtcaacacaccagctgcaactcaacttacatgtcatgtataaatgtagtaaagtttaatcataaaaatgaaatgaataattcattcctaatgaacttcaaatttatcaaaattattttaaaacagtttatagcaaataattatgttgaagtacgggtcatgttatcatttgatgtgatgtggggtaaagctcaaagtaaaagcacttaggtcctagcatggccttgaatgatgctacctgaccctgctgtttactagctgagttacctccgtcaagttgtccaaacttctgagagtttttcagaagtttccattctctgaaaaatgggaagggggcagaaaataatacctattttacarggttgcaaaaagaaaaaaatatatactagttttgaaaatactttacacacattgtaggaacgtaggggacgagtagtattacattatatatttccataaaatct

SEQ ID NO: 514134 - DNA, 603 bp, Homo sapiens
tgtaatctcagctcctaggtcagtgcctggcacatagtaagcacttaataagtatttgttgcatgaatgggtgagtcatttactaactagatgaactttgagaaagttacttaaattctccaaacctctgtttcttcatccgggaaatgggcataatagtcatatcacagggttattaagaggcataaacaagatagtgtataaaaatcagttggcacagtgcctaacacaaagccaattatcaaaaataactacactattgcctgaataaagtgataggaacatgtctgaatctattccattcccatggtgtaagattsaggaaatgggaaaagagttcagtgttcatttgttggtaaaaaaatttttttaagccaaacactttcaatttcagagtcataaaagagatgtgaatgtcagaatggtcatatcaaaatgtcatgcatattacaattataacaagactggacccaaattagaaggagttattctataatgtgtttattgaggagaagtattggtttgcagaaaattaccatggaccttaggaaatgaaggcgccatggtccctgccattgtatcagtcttcacagttatggctgc

SEQ ID NO: 514135 - DNA, 588 bp, Homo sapiens
taggtcagtgcctggcacatagtaagcacttaataagtatttgttgcatgaatgggtgagtcatttactaactagatgaactttgagaaagttacttaaattctccaaacctctgtttcttcatccgggaaatgggcataatagtcatatcacagggttattaagaggcataaacaagatagtgtataaaaatcagttggcacagtgcctaacacaaagccaattatcaaaaataactacactattgcctgaataaagtgataggaacatgtctgaatctattccattcccatggtgtaagattcaggaaatgggaaaagagttcagtgttcatttgttggtaaaaaaatttttttaagccaaacaytttcaatttcagagtcataaaagagatgtgaatgtcagaatggtcatatcaaaatgtcatgcatattacaattataacaagactggacccaaattagaaggagttattctataatgtgtttattgaggagaagtattggtttgcagaaaattaccatggaccttaggaaatgaaggcgccatggtccctgccattgtatcagtcttcacagttatggctgc

SEQ ID NO: 514136 - DNA, 594 bp, Homo sapiens
tggagacgcccaggccggcttagcggggcacccaagaaccccgcccgggagtttggggcggcctctgggcaagtgcccggctagcccccaacccccactcccactcgcgctcctgctcccctttctaggtcttctgggagcaccttcggagctcagtcacctgtgacaggtgttgggacctccgcccgactccgagcggtggccccccctgctcacctcacctggaaacgggggacgagcgcagtggcagtccggccgcacgccttacctgggcygggatcctctcctccgcgggttcctctccctggagctgggcgcgagaggtcgctgcttcgagtgggaagtggaccttctcctccagtcataaatcaaacccagccatcctcgggcctcctccctcattagagatgtttattggagatcgtgtttattcggctgtcacggcgagaaaacgcggtgacataattacctctgaccagagtcctcgctccggcccaggggagtccgaggacctcctctgtcgccttctcatgcccgtgcccttcgtgatcggagggcgcccgtgataggcttgtctttttttcctcagaccct

SEQ ID NO: 514137 - DNA, 512 bp, Homo sapiens
aagtgcagtattagggtgggagtgttccaattttccaggtaccatctgtcacsgcttcccttggctagggaagggaattcccagaccccctgtgcttcctgggtgaggtgaggcccaaccctgctttagctcacacactgtgggctgcacccactgtccggcaagccccagtgagatggacctggtaccacagttggaaatgaagaaatcacccgtcttctgtgtcactcacgctgggagctgtagactgaagctcttcctatttggccatcttggaacctccccaagctattaattacttttcaaagcttggccactatcatctcatcatctgttgcttcttcctcatcttctttctcctctactctgggaatctaactaatgaatacgttttagacagtcttactttatccattgtaagtacctcctcaactatatttctgtctttttacttctccatgtttcattctgaatttcttacctattttctcattcattaatactcttttcag

SEQ ID NO: 514138 - DNA, 539 bp, Homo sapiens
tgcttgcacagcttgtttctatcccccagtcataatcagaattgatcccacagttattgctcccattatgcaatgacttgttgttggttctcacaacttattatttggcaggtgatatggtttgactctgtgtccccactcaaatctcaccttgaattgtaataatccccatgtgtcaagggtgggaccaggtggagataattgaatcatgggagyggtttcccccattctgttctcatgatagcaagtgagtctcagagatctgatggttgtataagcgtctggcatttcccctcattcttacactcattctctctcctgccaccctgtgaagaggttccttttgtcatgattgtaagtttcctgaggcctccccagccatgtagaattgtgagtcaattaaacctctttcctttataaactgcccagtctcgagcagttctttatagcagcttgagaatggactaacagtgtaggtctaagagaagcacattcataaaaagaagttacggctgcatggttgcttggtgtcccacagt

SEQ ID NO: 514139 - DNA, 539 bp, Homo sapiens
tgcttgcacagcttgtttctatcccccagtcataatcagaattgatcccacagttattgctcccattatgcaatgacttgttgttggttctcacaacttattatttggcaggtgatatggtttgactctgtgtccccactcaaatctcaccttgaattgtaataatccccatgtgtcaagggtgggaccaggtggagataattgaatcatgggagcggtttcccccattctgttctcatgatagcaagtgagtctcagagatctgatggttgtataagcgtctggcatttcccctcattcttacactcattctctctcctgccaccctgtgaagaggttcctttygtcatgattgtaagtttcctgaggcctccccagccatgtagaattgtgagtcaattaaacctctttcctttataaactgcccagtctcgagcagttctttatagcagcttgagaatggactaacagtgtaggtctaagagaagcacattcataaaaagaagttacggctgcatggttgcttggtgtcccacagt

SEQ ID NO: 514140 - DNA, 539 bp, Homo sapiens
tgcttgcacagcttgtttctatcccccagtcataatcagaattgatcccacagttattgctcccattatgcaatgacttgttgttggttctcacaacttattatttggcaggtgatatggtttgactctgtgtccccactcaaatctcaccttgaattgtaataatccccatgtgtcaagggtgggaccaggtggagataattgaatcatgggagcggtttcccccattctgttctcatgatagcaagtgagtctcagagatctgatggttgtataagcgtctggcatttcccctcattcttacactcattctctctcctgccaccctgtgaagaggttccttttgtcatgaytgtaagtttcctgaggcctccccagccatgtagaattgtgagtcaattaaacctctttcctttataaactgcccagtctcgagcagttctttatagcagcttgagaatggactaacagtgtaggtctaagagaagcacattcataaaaagaagttacggctgcatggttgcttggtgtcccacagt

SEQ ID NO: 514141 - DNA, 562 bp, Homo sapiens
tatagggttctattgttttatcgattctgccaattgtaattttcgtgtgttatttaggttataatcatgtgttgccaaaatcagcaagaagcaagcaggtatttacagtacagtgggtctcacttaaatttgctgctgacctacttgcccctgggttacaatattctgctttcctaatatgtgtaattacctcaatccctaattttaaaattgcttctttgttttgagctctgagtgtgtccttatgcaacaagggactagagtttccagagtttaggtgagcagaagccagtacattggaaataagagtgacatttttctstattgtaaacaaaaagaagcctctggtcttttagcacaaaagcaaaattattggaatctgctcctttaatatatgctaagtagctggtaccaaaaggcagggctcctctggaggatgagtgagtcaaggacattttgtttgatttataggacaatatgctgcttttccattgttggacaggatcctcatttccaaaagtggaatagagtgctgcttacaaaggaaaaaaaaacattttca

SEQ ID NO: 514142 - DNA, 562 bp, Homo sapiens
tatagggttctattgttttatcgattctgccaattgtaattttcgtgtgttatttaggttataatcatgtgttgccaaaatcagcaagaagcaagcaggtatttacagtacagtgggtctcacttaaatttgctgctgacctacttgcccctgggttacaatattctgctttcctaatatgtgtaattacctcaatccctaattttaaaattgcttctttgttttgagctctgagtgtgtccttatgcaacaagggactagagtttccagagtttaggtgagcagaagccagtacattggaaataagagtgacatttttctctattgtaaacaaaaagaagcctstggtcttttagcacaaaagcaaaattattggaatctgctcctttaatatatgctaagtagctggtaccaaaaggcagggctcctctggaggatgagtgagtcaaggacattttgtttgatttataggacaatatgctgcttttccattgttggacaggatcctcatttccaaaagtggaatagagtgctgcttacaaaggaaaaaaaaacattttca

SEQ ID NO: 514143 - DNA, 416 bp, Homo sapiens
gttagatttgagatgttgagtgaagttcattataatgcctgtagcacttttatttgatcttggaggggttttcatattcttgaagcttttgtttcttaaggctttgttgagatattcaaacaaatatttaaaactatattggaggcagtgtatttaaatattcttgcccctaaatattttcatttgtgttgccagttgaacataaccttgtatttattaacatttagccaaagattaattatgtgagaaacaggagtataagcatctttctatcatttgagatagttggatgggaaggtggggataggaaggaagaactatttgcaaaaaagtcctcaaagcckctctgaagggtgtaagacgaagtaagaggagtttaaatatagaaaaaatatatatatattaaacaagcttga

SEQ ID NO: 514144 - DNA, 551 bp, Homo sapiens
taatcaatcatacccacgtattagtagtaagtaaagggaactacatctgtggactcttaagttcagaagaggtctgctggtgtttcagagaacaaatagtattaggcaagaacagattgaagtaactgaaggcccagtcgaaaatcagttaatttattgtttcaacagcagccttacacaaatctattttagaaagagttcttttaaaaacaagggcacttaaatttagtggaatatggagactgggatctgaaaatggtctcgttataaaacaattagaaatcttgtaaaatatataacaaccatcttcttaaatgcatagatatgctcataatagcataaggaaarctgacaagccaatattaaaaagaaagtttaaaatcagaaaagcatgagccaagaagctatggttggcctgagggactttgccgatccttgcaaatcttggtgtgtgatgaatgtttaaggactggacacaataccttgtgtctctgcaagattggacctgacacccttgcataatgccagaacttctttggaagtttcttctt

SEQ ID NO: 514145 - DNA, 505 bp, Homo sapiens
tctcctcaacccctggtgtagcacatgaggcagtgggcttccctccyggcgccagagtttgcacaactctaaaacagggatgatgattcagatatggccactatgaggcactcattcaatatcagtgaatatgggtaaagtccctatctggcacacagaggcttgctgctactatcattatattccccattctgatgaatggtgccaacatcaaccacttattcagccagtctttctagaaagcctaacattatcacttatattcttcctcttttgtaatcctatattttgtcaaatagattaaaagctctgtgaggattgattttgccattttagaccctttgcttcctacagagcaggtactcatttaataaaaatatgttgaaagaatgagtttgtgaaatgaattttcctaagcctctctaatgtccttctaatcttttctttcctttataccttcattactactgctttaattcagaacctcctcagtacttaccaggac

SEQ ID NO: 514146 - DNA, 505 bp, Homo sapiens
tctcctcaacccctggtgtagcacatgaggcagtgggcttccctcctggcgccagagtttgcacaactctaaaacagggatgatgattcagatatggccactatgaggcactcattcaatatcagtgaatatgggtaaagtccctatctggcacacagaggcttgctgctactatcattatattccccattctgmtgaatggtgccaacatcaaccacttattcagccagtctttctagaaagcctaacattatcacttatattcttcctcttttgtaatcctatattttgtcaaatagattaaaagctctgtgaggattgattttgccattttagaccctttgcttcctacagagcaggtactcatttaataaaaatatgttgaaagaatgagtttgtgaaatgaattttcctaagcctctctaatgtccttctaatcttttctttcctttataccttcattactactgctttaattcagaacctcctcagtacttaccaggac

SEQ ID NO: 514147 - DNA, 557 bp, Homo sapiens
cactgaactaggtatgcacttaaaatacaaaacatgggaagttagctttcgaaagcagagaaaaatatgcttttaataatatgtaggaaccataaggctcctcatgtattatacaaaaatgtattataaatacatatatgtaatggccttgacacaaaaattatgcccatttctccagttcctaagattgtattagcagaagatgggtaaaaacaaaaatgtttgttgagcctacatgcatcatgctgtgtgctcattgtccctgtatcctctcagttcctttcagagctagaatcatcctggtttagaattattcactctacaaacatgtattgaatgaacactctgagccaaaactgtgctaggcastgggatttcagaaataagtaaaacctagtcctctgttttcaagaagtgattagacaattaaagaagatagacatgcatcatcacttaattgcaataggttttgataattgcaattgtattaagtgcagctctggcaggaggataaataatacttgggtactataatcaagaaagccttcatagaagag

SEQ ID NO: 514148 - DNA, 539 bp, Homo sapiens
tcacttcttgcagactactctgctgaatttcagctaaacccaataaaacttgtttgtatgcgagtatacatttatatatacacatatgagtaacataaagattataagaatcagaagaaaaagaaaggaatcaagcatacaasgatagaaaactcttaagttttatcttttattagctagtcccttccagtttaaattgatacgcataatgtggacaaacatttcccttaaaagcagaagtctagatttgctaagtccaagaataaagataaatgcacatgatcaatttctagccattattttatatatccaaaacagtgaggtagcctgaataatctccatattctgaactctccattttgctcccaatatatcagatttataatatacacaaaaaataagagaaagagaacacacaaacttgcaagcactcacctttccctctgccacttctaatccttgactagacccagtcaaattatctgaaattaccaatgggtgctcccaacagctgacaaactatgtgactttcctctaaa

SEQ ID NO: 514149 - DNA, 278 bp, Homo sapiens
ggcaacgtctcatttaaactgcatgacaatccagagcagaccacagcttctgggcactttccccaaagtctcaaatccagttagtgcagagctgggaaccaaasactcctggcaccaagtccccagctgccttcctctgaagcaaagattcctctattttgattccctggcttttccctcagctgtgattccatcccagcctgcatgccccatacttttcaaaggtctactttcaatctggaataccctgcaaactcctagaggacaattccacacaa

SEQ ID NO: 514150 - DNA, 630 bp, Homo sapiens
gtatgggagcaacacacaagagagccaatatttaagtccaacacggcaaatgttatgacagatctgagaacagarcagagtgttctgggagcactgaacaagagtttgttaatggcagcagggattatggaaggcttcctgagggaagtgatttatgctgagtcttgaagaacaggcaggagttgtctagacagagtgagaaaaagcaaagaagatagaatagctcatgtgaagacaaaaaggcaagagacagtagatgaaactcactcagaaaaattgaaacatggacacatggaagaagatgagtcagaagaggaagccaaggagatgtgggccatgatggtctgagtgccaggcccggttgtttagaggatggggagccatgaagacttttaagcaagatgactcaaatttgcttttataaaataccactttgcagcaaggtagaggatggtttgggggtgagcaaagctggtgagagaacaattaggaaaatgacagagatactggtttatgatagagctgattctggatacccacattttttggcaaagaaatcacaccccttctgaaatcactggcatgtgaaaattttagttcagggatttttattccagtaggtgaaagaga

SEQ ID NO: 514151 - DNA, 491 bp, Homo sapiens
gcaccccacaggcagcgccagagtgctgaagcatgcagccccaagcaagggccaatgggtragcaggagtggcagaggccaggttctggccactgaagtgtgttgtagctttgggactttcggagtggaattccagaatgttccatcaggttccattcttcagtgatgcatggttgcaaagctgcagctcagggaagagcccctccaaggtcactgagttgagaatcgagaacctgagtctgctccactggggctaacgagccatgtaagcgggaccatctccctttgctgcacgggggccacctgctgcctcctctgtgaaacgggagagcataccacctgccctggagagctgtcctcgagatgagataaaagcatggatataaaagggtctggaaatttggaggtctttgcttgtatgaatatgtgtccttattatcgccatgtgacgggctggtgagtcttgactgagtttctctggagattgaagc

SEQ ID NO: 514152 - DNA, 485 bp, Homo sapiens
ccagcccagcttgctaaagcgcccagaggtgaaagccatgcacagcataggaaggagggttgaggaaagtagattaaactgctggcagggcccaaaattccagtgaaagagatgactaatgatgagacaccagggtctgaagctgaggttaaattcaactggaaattcttggcctgggagggataggatctaattatcaagatttttcactccrcgctttgcatttgttttcaaggttgttttaagtgactattttattttctcttgataccatctcttggagcgaggaaggacagaggactggatcctcccaaagcttgcctgaaggaagcagttgatagttctgattccaacacctggtaatgtcccctgtgtcttgggcatgggtatgctttctcatttgatccttgctgcaattctaccaggtgggcttttgtatcccctttttagaggacactcgggacttaagaggcactgtaggccct

SEQ ID NO: 514153 - DNA, 485 bp, Homo sapiens
ccagcccagcttgctaaagcgcccagaggtgaaagccatgcacagcataggaaggagggttgaggaaagtagattaaactgctggcagggcccaaaattccagtgaaagagatgactaatgatgagacaccagggtctgaagctgaggttaaattcaactggaaattcttggcctgggagggataggatctaattatcaagatttttcactccgcgctttgcatttgttttcaaggttgttttaagtgactattttattttctcttgataccatctcttggagcgaggaaggrcagaggactggatcctcccaaagcttgcctgaaggaagcagttgatagttctgattccaacacctggtaatgtcccctgtgtcttgggcatgggtatgctttctcatttgatccttgctgcaattctaccaggtgggcttttgtatcccctttttagaggacactcgggacttaagaggcactgtaggccct

SEQ ID NO: 514154 - DNA, 485 bp, Homo sapiens
ccagcccagcttgctaaagcgcccagaggtgaaagccatgcacagcataggaaggagggttgaggaaagtagattaaactgctggcagggcccaaaattccagtgaaagagatgactaatgatgagacaccagggtctgaagctgaggttaaattcaactggaaattcttggcctgggagggataggatctaattatcaagatttttcactccgcgctttgcatttgttttcaaggttgttttaagtgactattttattttctcttgataccatctcttggagcgaggaaggacagaggactggatcctcccaaagcttgcctgaaggaagcagttgatagttctgattccaacacctggtaatgtcccctgtgtcttgggcatgggtatgctttctcatttgatccttgctgcaattctaccaggygggcttttgtatcccctttttagaggacactcgggacttaagaggcactgtaggccct

SEQ ID NO: 514155 - DNA, 486 bp, Homo sapiens
agctgaagcgaagcgcggcgctcgcgtcggccgagtcacaccatcaggtgtggatgccgcttccgggagtttgaatcccgcggctgcagggcggggcacgtcactgccggcaggcgcggcccgcaagaaggaggagcagcgcgccgcggcggggacgcggctcyccgattggctgcgcctttgaagggcggagagtaaacctgagggcgggccgagaagtggctggggcgcggggcgggacagagggcgggaacacttcctcccgggcccgccagctaattctgggatcgggggttctctgcgggcttagacctaaacaagcttggtgtctcgcagtcaggggctggttttgtgtttatacgcttttaggagaaagcaaattactatttttaatgggataaaaccagtgacgatggaccgagacgaactagttctgcgctcttgagcatagattctccctgtgtgaagtgcggcccctcctgccct

SEQ ID NO: 514156 - DNA, 486 bp, Homo sapiens
agctgaagcgaagcgcggcgctcgcgtcggccgagtcacaccatcaggtgtggatgccgcttccgggagtttgaatcccgcggctgcagggcggggcacgtcactgccggcaggcgcggcccgcaagaaggaggagcagcgcgccgcggcggggacgcggctccccgattggctgcgcctttgaagggcggagagtaaacctgagggcgggccgagaagtggctggggcgcggggcgggacagagggcgggaacacttcctcccgggcccgccagctaattctgggatcgggkgttctctgcgggcttagacctaaacaagcttggtgtctcgcagtcaggggctggttttgtgtttatacgcttttaggagaaagcaaattactatttttaatgggataaaaccagtgacgatggaccgagacgaactagttctgcgctcttgagcatagattctccctgtgtgaagtgcggcccctcctgccct

SEQ ID NO: 514157 - DNA, 648 bp, Homo sapiens
ttagtatcagctgggcacggtagctcacacctgtagttccagccctttgggaggctgaagcgggtagatcacctgaggtaaggagttcaagaccagcctagccaacatggtgaaaccctgtctttactaaaaatataaaagttagctgggcgtggtggtgcacgcctgtaattccagctacttgggaggctgaggcaggagaattgcttgaacctgggaggtgaaggttgcagtgagccaagattgtgccactgcactccagcctgggtgacagagtcaaaaaaaagaaaaaaacctttagtctcttgtgaacttggttagtttgaattggtaacatacgactgggtctacaaggccaaagtccagatccaggactagggtgaatttattaatactaagrtcattctgtcccacgggaacctgtttgggaagtctcccaattttactcagaggacaaccctcagtgtcaccacgggcaccaccgtgacccttccccatgtgaaaggaaagaggcagtaaggcaaggattaaggtctgtttaggtctgttgggattaaaaggcgaaggagacattaacatggaaatggggctgaaagtaaaacttgaatgagacatgtataggccacaaataatcagaagaagtgattt

SEQ ID NO: 514158 - DNA, 547 bp, Homo sapiens
cagctggatcctattctagccgcaggttgggatcgaagtttagtattccagcttccaccatccccttcctgcctgtcttgacccttccagtttgctcctttaaatctccacttcccttttgcacagtctcaagctcttccaggttctgaggattttttctcacttctcagggtgagctcgcgacctttcattgccttccctgtgtgagcacaattcaggggtcagactctggactctttatggagcctcaacgcaggggctgtgactgtatattctgcacagcgaggctctaattacaggctgcatgctggagactagtcattttgtgagtcattaggatgtgtggctggggctttataatatcttttgatgagttctgtaatttttatatmttcacctatgctagcattttcagtgaagcagaacaggacagtagggctggcagatgtcacagcccctgggctctttctggatcggaattgaaagggtcttctcctctgcactctgaggagagaaatattgattctgattgggttcgaggggttga

SEQ ID NO: 514159 - DNA, 547 bp, Homo sapiens
cagctggatcctattctagccgcaggttgggatcgaagtttagtattccagcttccaccatccccttcctgcctgtcttgacccttccagtttgctcctttaaatctccacttcccttttgcacagtctcaagctcttccaggttctgaggattttttctcacttctcagggtgagctcgcgacctttcattgccttccctgtgtgagcacaattcaggggtcagactctggactctttatggagcctcaacgcaggggctgtgactgtatattctgcacagcgaggctctaattacaggctgcatgctggagactagtcattttgtgagtcattaggatgtgtggctggggctttataatatcttttgatgagttctgtaatttttatatcttcacctatgctagcattttcagtgaagcagaacaggacagtagggctggcagatgtcacagcccctgggctctttctggatcggaattgaaagggtcttctcctctgcactctgaggagagaaatattgaytctgattgggttcgaggggttga

SEQ ID NO: 514160 - DNA, 624 bp, Homo sapiens
atatctaactgttttttcttgctgttgtttgtttgttgttattttgagacagggtctctctctcccagggtggagtgcagtggtgccatcacagctcactgcaacctcgaccttcttgggctcaagtgatcctcccacctcagccccctgaatagctgggactacagccatgtgccaccatgcctggctaatttttgtatattttttagagacagggtctcactgtgttactcagactggtctcaaactccagggctcaaagcaatcctcccaccttggcctcccaatgtgttgggattataggtgtaagccascgcaccaggctcaactataaagttattgatagaacttcccaaatgatggaaaagacataagattttgaagaaaagaatcgagagaaacaaaaataactggcaatgtaagagttaagctacatgttgccacatcatccatgttaggaaaccaaaaacccccaaatagattaataaaaatgaaaaataggtttaaattttaaaataggggatacgtatcttctaaatgctgtaattaatagaaaatgctttagtacatggtctttaatttttttcttttttagccgagtatatgcaggtaactgcagttcag

SEQ ID NO: 514161 - DNA, 493 bp, Homo sapiens
taacataaatgctcattaacagaaaagtggttaaataaattatagtatatcattttatgaaaawtttttttttttttgagacagagtcttgctctgtcacccaggctggagtgcagtggcgcgatctcagctcattgcaacctctgcctcccaaattcaagggatttttgtgtctcatccttctgagtagctgggattataggcatgcaccgccatgtctggctaatttttcttttctgacggcgtctcgctctgtcgcccaggctggagtgcagtggcgcgatctcagctcactgcaagctccgcctcccgggttcacgccattctcctgcctcagcaacctgactagctgggactacaggcgcccgccaccacccccggctaatttttcgtatttttagtagagacgggttttctccctgttagccaggatggtctagatcttctgacctcgtgatctgcccacctcggcctcccaaagtgctgggattac

SEQ ID NO: 514162 - DNA, 655 bp, Homo sapiens
gcaatttgactgcttggaaaacacactgggtttttatgacccacacgtaagtaatcataaccagccatatgtaaaaccacaaagcataaattgatggaactaatgcaattttaaccaacaacattagwggttatattttaaaactacaaagtcccttttaacagttcaaaattgtcctgtagaggtgcactaggttttactttcctattggaaatatagacagttttatgaaaattgtttattattttctgtttaacttttatcttctttttgaaaatgctgtatttttagctcgcttcaccttgtatattgggattctgtgttaataacacaatacttaatttacatataaacattttaggagctatttcagagagtaatattagtacataattagtacagaaattcacttcctgttttctgtctagtgattatgatttttcaccaattattgttaggataaataggtcaaatattttacagatgctcatcttggtctaaaataagtgtttttgagtacaaggagttattcattatagggcattgtgccatgaaaatggcaatacatattagagagaaagtttgttttcaaagaatgaagcattgttaaatatgttaaatatttagtagctgaatgtcaattcatttgtgcaat

SEQ ID NO: 514163 - DNA, 645 bp, Homo sapiens
gtaatgtatactattctcctatggttattagtagatgtattaatcctttacataatttgtcccaaacagggtgagtgtattgtttaaagagaaagacatatttcactttctaattggtaaaaagtctcctgagaaatagttcagtctcctgcgaaatgttcagttttgaaaygtacctgagtgaataaattgcctccttcacttaaacatgaacttatcaccagaaagccttatttcttgattcaaagttcatcattaaacaattgttttttaaataactctggaatagaggacttgtgtgaaagggatggaagagaaaggcaaagggcaatacaattacagttataaaaccccaagcaacgcagtttgtttttatggattatcttttcacttacctactctcacatccattgaacctattgaaaacaaagtcctatgattcccttagtatgttcttcttttgaatttaataaaattaaattcatcgcatatccctgccccaaatcccagcaaatcaaatcaaaaagaatccattcactaaagaggatgggagcaaatatctggctttcttaaggatcatattaaaagatgtagtcagcacgctcatttataatgaatttggaggaactgacctagaggaagaag

SEQ ID NO: 514164 - DNA, 524 bp, Homo sapiens
tcttagaagatgattttaaaataaaatataaaataatcttatattttaatatagatatatgcatatataaattttaaaataaaattttaaatcatcagccattaaaatagaaaccgtgctgctacaaacagcaacatattgcatttcaccttattctgagcaccatgttatatgagatatttgagggaaaaatgagcatttaagatactttaagaattttctctattcaaattattatatcagaataaaaatgaaacacatggggtttgaacttatgggctgctattttagtatatcaaatacaaagttaaaaatcaaaaactctttccctatttattagcttctgtttctatctcagatgctaaaagaagtagtgtggtgtttttatgaaaagaaaatatcaatgtttcccttcttcactgttaatgtaaatgmctcacaattttttttaacctataacagtataggtaagttaagtctcttatttcttatatgattattacaatatagccagataatatggt

SEQ ID NO: 514165 - DNA, 529 bp, Homo sapiens
tggcttgctctagcttctcccatcctaaacaaaagcctctctaccctgagccctttttcactttctccttctgtcatcatccaactctctcagaagcttggtctgtacttgtggcagcttcagcacctcccaataatttctcaaacttctgctgactgttctcaccaaggtcatcratgatgtcctcatgaggaacattctcagtccttgtctcacagaacagttcttcttcattaggcaccactgataactttcatcttatctctccttgggtctctgacctttccagttgccttcaccatgggctgctcctcttctttctgctgcttaaatgtcagtgttagggattgaggaggtgcatttccaaccagcatctgaaagacttatgatgttcaccaaactagggttaacaagcctgtgagttgaatttgactacaattgagtcaaactgaatggtgcaatcagagtgtgaatgaaggaaaataaagaaaccaagggaggaaacattataaatggcagggaagggagg

SEQ ID NO: 514166 - DNA, 529 bp, Homo sapiens
tggcttgctctagcttctcccatcctaaacaaaagcctctctaccctgagccctttttcactttctccttctgtcatcatccaactctctcagaagcttggtctgtacttgtggcagcttcagcacctcccaataatttctcaaacttctgctgactgttctcaccaaggtcatcaatgatgtcctcatgaggaacattctcagtccttgtctcacagaacagttcttcttcattaggcaccactgataactttcatcttatctcyccttgggtctctgacctttccagttgccttcaccatgggctgctcctcttctttctgctgcttaaatgtcagtgttagggattgaggaggtgcatttccaaccagcatctgaaagacttatgatgttcaccaaactagggttaacaagcctgtgagttgaatttgactacaattgagtcaaactgaatggtgcaatcagagtgtgaatgaaggaaaataaagaaaccaagggaggaaacattataaatggcagggaagggagg

SEQ ID NO: 514167 - DNA, 601 bp, Homo sapiens
ccagttgggccttctagaaaactaaaacatactgtgcacatattagtttaagtacattgactcaacttcgattctaaaagtcaccctttccaaagcagccatcctgtgctctgtcacccaattccacctcctattgttcttgttaccactggctcattaagagcctcttcatctcctcatggtttctgcttaactaagggcttttattcctcatgccttttgctgtcttcccatttctttgtctctgtctcaaactcccaagaggatcartctcttcccaatacatgctgctggttagcctatcgatgcgtaccttgggagtcaggcataagcatacctagttcaagcagctatggccaccaaactgtgaagttgcatgcaccaagcttggggatactaacaaaaggaaatcctgtaaagaaagctgtggacatggcaggctcttgcagggaagccaatatgaccagcacacacttagcatgatctgtctggtaaaagtcattttcctaagcagatttcaaagttctgtatatagcaggttatacttatttctcaataaggtttattctatgggtctctaactggagctaacttaattatc

SEQ ID NO: 514168 - DNA, 529 bp, Homo sapiens
ttctgataaggagcaagacatccaagatgcttgaagggaaacatctgtacacccaagccaaatatgtgactacgtcactctgtgcagcctagttttgattatcaacagcacaagcagtgactgtgattcagtgaacaaagttgtacaaaatgtttccccaaacttcaacatttgtgctgtcccaaggatgctggcaaagaatataaattggaccaagagatttaaaagaaaaggagctgaggctgggcatggtggcctgtgcctgtagtctcagacactcaggaggccaagataggaggagtgcttgagtccaacagttggagaccagcctgagcaacaaagcgagatgccacgttttaaaatgctttagttagttagttagttagttagttaaagatagatagttagatagatagatagatagatagatagatagatagataaakatagatattcttataagaaaaggagctggaatactctaagtgccaaactgaactgcccaagacttagcaaaaaacaaagcaca

SEQ ID NO: 514169 - DNA, 497 bp, Homo sapiens
aaaacaaaaagcctaatctataatatgattcattgtgcatgaggaaaagtattaatttctcaggggaataaaagattttcctgggatttggtctgaaagaaattttacacatgcatctttatatagaggatattgaattggttcagaaacactgacttaacaacgtcttaacagtaaatgcaataatgacctcacatggctgtttattgggagtccttcaatgtaaacagaggagagtacaccagagcaaactccgtgcaaataatcccagagtytgccaaaataatattgtacaagatgatatttttggcttgaaaaagagaaaatctacgtaacttagaacacttggtatgctgcatggccatcaaataatcctctacagattagtatctttcagccagacatttccttgggattataaaagggttacaaagcagggaagaaaagggtaaaactgtacctcagatagaaccacactaggagttcattggcaatgg

SEQ ID NO: 514170 - DNA, 563 bp, Homo sapiens
ttatatttaattgaccagaacatatcatattgctacctctagtccagagtttctcagccttggcactatcaacatttggaaccagacaatattcttatctgtggattatctatttttatctgtgcattatcagaatccctggcctctaccccayagatgccagtagcaccccattcctagttgtgaaaatccaaaatatctgtctctagacactgccaaatgtcccctgcagggcaaaacttcttctaacggagaagcactcttagactaatccctccagaagctaaaatgaaaagggtagtgaatggtacagggtcagccaatagacactgtcagtagcaaattctctatgtctgtttcttaaatgtctagttcataaatttttcttaatgagcttactcactaccatgctaagtatgttgaagaatctaagagaaacgtacaaagtgccctcatcttagaagtactaacaataaaatttggaaaatcaagattgatgcacaagaaacaatcagaaaaaaatacattataaaaggctagctaagccatagagacaagcaaga

SEQ ID NO: 514171 - DNA, 343 bp, Homo sapiens
tttgtgggagcaaaattcagcagaaagctataatagatgaggcactggagaaagacagtaagaccatttgtttttgcctatcctttctctgcttcttaacaagaaccagattcccctycaccaccttaccccaattcctgccaaagatctctgttgctcttcttcagatcctacccctcccactcaaagctgcaaactgtccagggccaatcagtagcttcacaggcgcattctatccctgtacttccccacccagccaaccaggagcctcatctcggctaacttgccatgtaccccaaccctgccaactccctgcccaacagggaggggctgaatttccatc

SEQ ID NO: 514172 - DNA, 634 bp, Homo sapiens
aaaggacagatgagagcgatgttacttaatgccacagaacaggacatcatttaaaggagttactcaaagtgtttcagttactgccattakgaactcctaagcccctcggcagtgtgggtggtacggggtaggtgttgaggttagcagcacccacaggcttctcttcacgcaggatatgctatatagtgaatcggtatcaagactggaggaaggtaagggtttccagaaaaccaccttcaggccatggtttggagtagtcttattgaagtttacagaatcaaaagttacagataattaggaggcattgaaatacagacctgttttcttttttctttctttcttttttttttttttttttgagacggagtctcactctgttacccaagctggagtgcagtggtgagatctcggctcactgcaacctctgcctcctgggttcaagtgattcttctgcctcagcctcccaagtagctgggactacaggcgcaccccaccacacctgcctaatttttgtattttcagtagagatgggtttccacacattggccaggctggtctcaaactcctgacctcgtgatctgcccgccttggactcccaagtactaggattacaggcatgagccactgtgcccag

SEQ ID NO: 514173 - DNA, 634 bp, Homo sapiens
aaaggacagatgagagcgatgttacttaatgccacagaacaggacatcatttaaaggagttactcaaagtgtttcagttactgccattaggaactcctaagcccctcggcagtgtgggtggtacggggtaggtgttgaggttagcagcacccacaggcttctcttcacgcaggatatgctatatagtgaatcggtatcaagactggaggaaggtaagggtttccagaaaaccaccttcaggccatggtttggagtagtcttattgaagtttacagaatcaaaagttacagataattaggaggcattgaaatacagacctgttttcttttttctttctttcttttttttttttttttttgakacggagtctcactctgttacccaagctggagtgcagtggtgagatctcggctcactgcaacctctgcctcctgggttcaagtgattcttctgcctcagcctcccaagtagctgggactacaggcgcaccccaccacacctgcctaatttttgtattttcagtagagatgggtttccacacattggccaggctggtctcaaactcctgacctcgtgatctgcccgccttggactcccaagtactaggattacaggcatgagccactgtgcccag

SEQ ID NO: 514174 - DNA, 634 bp, Homo sapiens
aaaggacagatgagagcgatgttacttaatgccacagaacaggacatcatttaaaggagttactcaaagtgtttcagttactgccattaggaactcctaagcccctcggcagtgtgggtggtacggggtaggtgttgaggttagcagcacccacaggcttctcttcacgcaggatatgctatatagtgaatcggtatcaagactggaggaaggtaagggtttccagaaaaccaccttcaggccatggtttggagtagtcttattgaagtttacagaatcaaaagttacagataattaggaggcattgaaatacagacctgttttcttttttctttctttcttttttttttttttttttgagacggagtctcactctgttacccaagctggagtgcagtggtgagatctcggctcactgcaacctctgcctcctgggttcaagtgattcttctgcctcagcctcccaagtagctgggactacaggcgcaccccaccacacctgcctaatttttgtattttcagtagagatgsgtttccacacattggccaggctggtctcaaactcctgacctcgtgatctgcccgccttggactcccaagtactaggattacaggcatgagccactgtgcccag

SEQ ID NO: 514175 - DNA, 498 bp, Homo sapiens
taaggataagtacatctactccatttttccagaacctgtactctaatagtttattatttaaatgttttgaatttcattatgaggtagtaaaatcaatgactcargtcttcttggtggctatggccctgagcacattgtctgatggtgatattgaaccactgctcctttgtttctacttgtcaataaatctttatcactttcttacaaacctcctcttattttttcactttgttttgttttgaagttaaatacaagttcctatatctttttaaaggcaattcagtaaacttcattttataatggatatgattagatatgttttctccacctcattccatagttgccaattgaaatccattctatttattttccccttgttcctttttttacttttgctaaattgacctttaaataaaacctatgctttctatcttgtaatttgctacattcctgtcttgccttattattttagggattatcttactgttttgttttaaa

SEQ ID NO: 514176 - DNA, 498 bp, Homo sapiens
aattagtggtagccttttagagaaatgcagtatctccagctcatttttgtttcttatttttcatttgtttttccagaaaaagatgattaaaatttaaatcgtgaggatcaccagaaaacaatgtgcaatttagaaatgctgatgcaaatgtgattgagggtaagggggctttcacttgctccagaatactaaacagagggctcattcctgtgtctcgtgtcctacgcttacacttgactttcgagcctgggaccgagaggccctttggaggaactgtggaagcctctggtatagtagagcagtaagcacctttgatctggtgtgaaaaacttcattctgagatgcctgaaaacagtagcactataacggttgctatttaccggggactaactgtgtaccaggctctyggcattagtagattatgtctcttctggactaattctactaacaaacctatgagataagtatcattaacatccagatgttacagacaaagaa

SEQ ID NO: 514177 - DNA, 423 bp, Homo sapiens
cagctgctgtgctctgggcatgtctagaagtccatgcctagcacaaggatcttctcctyctacaggagatgcctataatgatatttgacttaaattaactggtccttaggaggaaaataaaagggatgtagtttggattctgcatatctattcactgattagcaagatgcactctgagcagtgggactgtgtgcgtgtgccatgtagcttttcatttatttattttcaaagtggtggtattctttctaggaaatacaaccagaaaaacaatgacaggaaatatttgcaaattacttgacaaatataatattaggagaattgctattggcaatatgagtgaagggatgaggtgcattgctatggaaactaaaggaaatgcaaagttaatattggccaatcatacaaagtcagagtcctccaata

SEQ ID NO: 514178 - DNA, 519 bp, Homo sapiens
aaggcaggcttgagaacagagacaataagctcagttgtgttcctttagattccaaggtgccagcaaaaaactggggaatatggcagggcatggctggctcacgcctgcaatcccagcactttgggaggcccaggcaggcggatcaccagaggtcaggagttcaagaccaaactggctaacatggtgaaacctgtctctgctaaaaatacaaaaatgagccaggcgtggtggcccacacctgtagtcccagctactcgggaggctgaggcaggagaatcacttgaacccgggaggctgagggtacagtgagccgagatcatgccactgcactctagcctgggtgacagagggagactctgtctcaaagaaaagaaaagaaaaaaacaaaaaactgtgaatatgtgtaagcrgcacgttgagttcaaaatacggaaacagaacctaggtgtgcaaacagggtggcggggtgagggaggatacaatgatatgctcaagcaagattgtcaaaagatgagggga

SEQ ID NO: 514179 - DNA, 519 bp, Homo sapiens
aaggcaggcttgagaacagagacaataagctcagttgtgttcctttagattccaaggtgccagcaaaaaactggggaatatggcagggcatggctggctcacgcctgcaatcccagcactttgggaggcccaggcaggcggatcaccagaggtcaggagttcaagaccaaactggctaacatggtgaaacctgtctctgctaaaaatacaaaaatgagccaggcgtggtggcccacacctgtagtcccagctactcgggaggctgaggcaggagaatcacttgaacccgggaggctgagggtacagtgagccgagatcatgccactgcactctagcctgggtgacagagggagactctgtctcaaagaaaagaaaagaaaaaaacaaaaaactgtgaatatgtgtaagcagcacgttgagttcaaaatacggaaacagaacctaggtgtgcaaacagggtggcggggtgagggaggatacaatratatgctcaagcaagattgtcaaaagatgagggga

SEQ ID NO: 514180 - DNA, 609 bp, Homo sapiens
gcatgtcaactgagtagattctagaaatttttgtttggaagaagagaattttctggacttattctcaaaggcctttgaaaaggaaaagacttatgctgtgaatgaattttgaacttacaaaccttcaagcattaaactaaactaaaataaaacaatgagtcaacttgcctttctatgtgacagaaaagtaagtctgaaagttagtactttagaatcttctttaccaagaagaattgcacttgctgagggaattatttcccttaattatttcttcaaagagaaatttatgtgccagttagtagctaccacctaattaatatacatgcatgcatacatatatagttatatacagtatatgcatataggttgtgtatgtgtttgtgtgtatatgtattttgctttcatacctgtctatctgtctatctatatctatctatctatctatctrtctatctatctatctatctatctttgtgtatacatttaaaactaaagaattgagaactaaatgattgtcccaagcttgtcctatctcccttcttgggataaactgagaagtggaaaatagtgccaatagtggcttgtgcaatgaaacatacttttcaccag

SEQ ID NO: 514181 - DNA, 634 bp, Homo sapiens
tacaactagattccatgctacagggattctgaaagaggtcactgatcctctttccacctggactcccaatcttgttgacttaaatctatattacctgatacccccatatttttcttagtagtcttgttatttatctgctcccttttatttgactgatattttaatgcatgtaggtctttcttgactgctttgcctttagaatatttcagactttttctaaatagaactgcctcattgtcatcaatgtaaaatctagcacttgaggagatataagcatgrtatcatctgtctgaatatacgctcaacataccacaatagtaaatcatagagactaagattttttatttttttggttgaaagtaatactatcactatacttgtctatgtgaaacttctgtgtggattttcagttttccacatcagagctttatatagaattttcttattatagaagataaaagccacgaggattcttatatttttatcttttgaatgatttttatatagtaaatccttcgtgacactgaagaggataaaagtagtaccattttgactgaagtgagatagacaggggtccctgaagcctacattgcattctcatattggccctccttgtttgtccattggtcactat

SEQ ID NO: 514182 - DNA, 608 bp, Homo sapiens
ccatgctacagggattctgaaagaggtcactgatcctctttccacctggactcccaatcttgttgacttaaatctatattacctgatacccccatatttttcttagtagtcttgttatttatctgctcccttttatttgactgatattttaatgcatgtaggtctttcttgactgctttgcctttagaatatttcagactttttctaaatagaactgcctcattgtcatcaatgtaaaatctagcacttgaggagatataagcatgatatcatctgtctgaatatacgctcaacataccacaatagtaaatcatagagactaagattttttatttttttggttgaaagtaatactatcactatacttgtctatgtgaaacttctgtgtggattttcagttttccacatcagagctttatatagaattttcttattatagaagataaaagccacgaggattcttatatttttatcttttgaatgatttttatatagtaaatccttcgtgacactgaagaggataaaagtagwaccattttgactgaagtgagatagacaggggtccctgaagcctacattgcattctcatattggccctccttgtttgt

SEQ ID NO: 514183 - DNA, 597 bp, Homo sapiens
gaatttttattggagttaggttgtatttataaattaatttagagacacctaatatctttattctaaaatcttatccaagaacagtgtttattccatttgttcaaatccgttattattttttaacattttaacagtattttaaatattttttcacctargttttatacattgttatcaaatgtggaaaggggcaggatttgatgtgtgaaattgtctccttgcttacatcaacttttttttattttaaaatatttttatattagtgtgttttacaagagttctagtttattggcacctttttctgttagtttagtactttattggcaatatttttgtttgtttgcttctttaatttagtggtgggtatgggttgcccacaacaccagagaggttagctctgattttgtggttttcaacttttgtttttctttttctttgctgaagattggctatttctttcactttgcctttttaaaaaatctcccaaaactatgtgtttagaagacagtctctttaagacatgcctgtcttttaaaagcatcttttactggcatacaccttcaattttcccagaagttttctgggaatatgtgctta

SEQ ID NO: 514184 - DNA, 595 bp, Homo sapiens
caccattttcactttaagtgtttctgtagaatgccaatagaaatggctagaaaaaatatttttaactttttttaatttaataggatcagattggcattttcaaaaaataaatcagagttgttttggtattactgaaacatacctcaaaagcaaaaatttgattattttggctgaacatactattgagtttctttgacagccattattatgaaattagttttaaactatagccacatataaasgcaggtcctgagacataaactttattcatagccctagccttattaaaaaataaaaaatcttttacaaagtcaaaccctttaatgtttagcctacataaagattgtaaggatggttttattggtactttttcctccttgcctgaaaaacagtattttatgccatgtaacttaaatgccaaatgctcaattagcatttgtataaatattttcactcctatagcattgagctttttcatgttcatttaattctgctcaaaggttaattccttctttgctatttgctcagtggtgacaggtaataaatggtgaattatatctataattattatcaggataattgattacatttatca

SEQ ID NO: 514185 - DNA, 610 bp, Homo sapiens
tggcagcccaggcttggaatctggcactgcttgtgatctttaatgtgaggttaataaatgaaatctatgaaacctcctgtaccacttgtagaatgtatttgaaaaagaaacactgattatatattgttttcttcatgggagcccaagtgtgtatttgtatgtatttgtgtgttggggagaaggatgttgatctctcattttagtaatatttgtgcagctcttgaataagtcctttgtttatgagccttataaatgtagtaatttatgatagttttgtcttcatgatgcctaccagaatataaaaactcaaattrtttacccatttctaggacatgtgaattcagcctatgttttgatactgatcttattcctagtttcatcttttttcctactattattttcatttggctcacttaacttgcttattgtaaacttatttattattattcatgtgcatactatatgtattgtatatatcttttttacattcacaatccaaaattatttttaaatgtaagtatgattaatgagattgcaaaagatcaagaatatagattttgtatgttgaagataagccagcaataaaataaagtaaaattaaagtctcaag

SEQ ID NO: 514186 - DNA, 610 bp, Homo sapiens
tggcagcccaggcttggaatctggcactgcttgtgatctttaatgtgaggttaataaatgaaatctatgaaacctcctgtaccacttgtagaatgtatttgaaaaagaaacactgattatatattgttttcttcatgggagcccaagtgtgtatttgtatgtatttgtgtgttggggagaaggatgttgatctctcattttagtaatatttgtgcagctcttgaataagtcctttgtttatgagccttataaatgtagtaatttatgatagttttgtcttcatgatgcctaccagaatataaaaactcaaattgtttacccatttctaggacatgtgaattcagcctatgttttgatactgatcttattcctagtttcatcttttttcctactattattttcatttggctcacttmacttgcttattgtaaacttatttattattattcatgtgcatactatatgtattgtatatatcttttttacattcacaatccaaaattatttttaaatgtaagtatgattaatgagattgcaaaagatcaagaatatagattttgtatgttgaagataagccagcaataaaataaagtaaaattaaagtctcaag

SEQ ID NO: 514187 - DNA, 610 bp, Homo sapiens
tggcagcccaggcttggaatctggcactgcttgtgatctttaatgtgaggttaataaatgaaatctatgaaacctcctgtaccacttgtagaatgtatttgaaaaagaaacactgattatatattgttttcttcatgggagcccaagtgtgtatttgtatgtatttgtgtgttggggagaaggatgttgatctctcattttagtaatatttgtgcagctcttgaataagtcctttgtttatgagccttataaatgtagtaatttatgatagttttgtcttcatgatgcctaccagaatataaaaactcaaattgtttacccatttctaggacatgtgaattcagcctatgttttgatactgatcttattcctagtttcatcttttttcctactattattttcatttggctcacttaacttgcttattgtaaacttatttattattattcatgtgcatactatatgtattrtatatatcttttttacattcacaatccaaaattatttttaaatgtaagtatgattaatgagattgcaaaagatcaagaatatagattttgtatgttgaagataagccagcaataaaataaagtaaaattaaagtctcaag

SEQ ID NO: 514188 - DNA, 634 bp, Homo sapiens
gggctctaatcaacctaattaagcaataacagcatggaaacaagcacacccttagttaaattaatatttcttttataagaagtcatgaaaagaatatgaacaacagcatctgaaccatgaaaaatacatttatttaattgctgagtaggagagagtcaccgggaccttccacaaagtaaaatcttttctatttaaaaactagctgtggaacacacccactcacaagtaagcatcctgaatgctttccagaggcatgcatgtctgaacagggtcacacagatctataaaagccatggctataaaaattagtgatttttctaaggagacaatgtgtcagcagagctccagtgtttgaaagacaattacaagttcatagtcatgaaatctggatgcaaattctgactagccccatycatatggcttcgttttgaaaaggtcacttcactctctgagtcttatgtttcctgtatgcaaaatgagcgttttgaattagataacatgccaagcttcaccctacacagaagccactacagcagagaaacagggggcctagtttcaatccttgttccaccagcttagtgaccatcaacaagtcacttaatttctcaaagcttttaaagtggacctaaaaata

SEQ ID NO: 514189 - DNA, 634 bp, Homo sapiens
gggctctaatcaacctaattaagcaataacagcatggaaacaagcacacccttagttaaattaatatttcttttataagaagtcatgaaaagaatatgaacaacagcatctgaaccatgaaaaatacatttatttaattgctgagtaggagagagtcaccgggaccttccacaaagtaaaatcttttctatttaaaaactagctgtggaacacacccactcacaagtaagcatcctgaatgctttccagaggcatgcatgtctgaacagggtcacacagatctataaaagccatggctataaaaattagtgatttttctaaggagacaatgtgtcagcagagctccagtgtttgaaagacaattacaagttcatagtcatgaaatctggatgcaaattctgactagccccattcatatggcttcgttttgaaaaggtcacttcactctctgagtcttatgtttcctgtatgcaaaatgagcgttttgaattagataacatgccaagcttcaccctacacagaagccactacagcagagaaacagggggyctagtttcaatccttgttccaccagcttagtgaccatcaacaagtcacttaatttctcaaagcttttaaagtggacctaaaaata

SEQ ID NO: 514190 - DNA, 624 bp, Homo sapiens
gagatttattttaatgtttatcacctccttatagttatggctaggtattcattgcaaatagctttaaaatatattattttttcgtagagaagataagaaaataattgagcaaaactagaaataataataataaataccgtgattacattttctttatttagaaatgaattcccaaagggattttcttgccaccttcaattttctcattgttagtccatttaacaagcatatcttaaccacaaacaacaagatctatgctaaatgtcaagggctttaagagtacggcaatattaatttacagcacatgcccctcctggagtgctgtgaggggcacaatgttctttggaaattccgacagagagtaactgtctcagacagtgacatatgacataagtattcttatgaaacataacaataaaacaagcagggtgaagttaccactcaatttaaaaagataayattcccattacaatggcaactccctgtatattcctcccagatctcacccctctgtggtcatccccaaggtttgtttctatatgcccttgcttttttacattgttttttctacctaggtatagctaaacaaatattgtttaattctgctcatttttgagcttaata

SEQ ID NO: 514191 - DNA, 598 bp, Homo sapiens
ccgtaagtaggaaggactgaccagctttaaacattcagggtatacccacactttaaaactgaagtctatagctgaattaatttcttattaatggaataaataataaaaaatgtattatgtgctttctatgcaccatattatgatttacctataacatcttatttaatcctcaaacaattcaatgaaggaagttataatattagaggaattttacagataaggaaactgaggcacaaacagtttaagtaaattgtccaaagtcacacataactaccagagctcagattcaaatgtaagccatctagttccaatttaaattgagaattttcccacctcccttttatttactatgtcacccaaaacccagaaaaaagtggagcagcaattttccacctgagaatcaatcattgctgacaaaaaaaaaagattgcttcagagaggaagaacaaatgtttagagaraaagaacaatcaaaggagactgacaagcaagaaagcaaagaagagaggggtgatggatagataaatttccaatactagcctcaattttcattttggaagctcttcatcataatcaggaagataatgaaaactaaaaa

SEQ ID NO: 514192 - DNA, 643 bp, Homo sapiens
tacctatccaagtatgaaggcatacttgggatgcatatatactsaagctgcttttactttccatgtagtcctaagatatttattgactgttttagcaatgtaatttctatagaactcattgaaatatgaatgtttctctcctcaccataccctacattcgaagcagctaagaattgggaaaagccagaaagatctttttaaatgtctcttttgtgtgtcttgcaattaaggctcattctctggggacattaaaaatttgaatatagaaaaaaaacatgtaaaagtttttatacctgaagaagctgtggaagcaatggagctgagaacattctaaattaggagattacgttatatccaaaggaagtgttctatggaggccaagaacaaatctgaaaattaagtgaatgatgataaaagctaaggataggagagtaactccctgatactttgtttttacaaactggcttttcaggacttatataccatttattgttgaaatatggcaattttaaaaaacaatttttctatttaaaaatttactgagtggaaagttgttcaaatttgtctttcagagaatggttagtgagttggcttaggaatcagactatatggctttaaatgctatatttgctgtatgcctatg

SEQ ID NO: 514193 - DNA, 643 bp, Homo sapiens
tacctatccaagtatgaaggcatacttgggatgcatatatactgaagctgcttttactttccatstagtcctaagatatttattgactgttttagcaatgtaatttctatagaactcattgaaatatgaatgtttctctcctcaccataccctacattcgaagcagctaagaattgggaaaagccagaaagatctttttaaatgtctcttttgtgtgtcttgcaattaaggctcattctctggggacattaaaaatttgaatatagaaaaaaaacatgtaaaagtttttatacctgaagaagctgtggaagcaatggagctgagaacattctaaattaggagattacgttatatccaaaggaagtgttctatggaggccaagaacaaatctgaaaattaagtgaatgatgataaaagctaaggataggagagtaactccctgatactttgtttttacaaactggcttttcaggacttatataccatttattgttgaaatatggcaattttaaaaaacaatttttctatttaaaaatttactgagtggaaagttgttcaaatttgtctttcagagaatggttagtgagttggcttaggaatcagactatatggctttaaatgctatatttgctgtatgcctatg

SEQ ID NO: 514194 - DNA, 643 bp, Homo sapiens
tacctatccaagtatgaaggcatacttgggatgcatatatactgaagctgcttttactttccatgtagtcctaagatatttattgactgttttagcaatgtaatttctatagaactcattgaaatatgaatgtttctctcctcaccataccctacattcgaagcagctaagaattgggaaaagccagaaagatctttttaaatgtctcttttgtgtgtcttgcaattaaggctcattctctggggacattaaaaatttgaatatagaaaaaaaacatgtaaaagtttttatacctgaagaagctgtggaagcaatggagctgagaacattctaaattaggagattasgttatatccaaaggaagtgttctatggaggccaagaacaaatctgaaaattaagtgaatgatgataaaagctaaggataggagagtaactccctgatactttgtttttacaaactggcttttcaggacttatataccatttattgttgaaatatggcaattttaaaaaacaatttttctatttaaaaatttactgagtggaaagttgttcaaatttgtctttcagagaatggttagtgagttggcttaggaatcagactatatggctttaaatgctatatttgctgtatgcctatg

SEQ ID NO: 514195 - DNA, 643 bp, Homo sapiens
tacctatccaagtatgaaggcatacttgggatgcatatatactgaagctgcttttactttccatgtagtcctaagatatttattgactgttttagcaatgtaatttctatagaactcattgaaatatgaatgtttctctcctcaccataccctacattcgaagcagctaagaattgggaaaagccagaaagatctttttaaatgtctcttttgtgtgtcttgcaattaaggctcattctctggggacattaaaaatttgaatatagaaaaaaaacatgtaaaagtttttatacctgaagaagctgtggaagcaatggagctgagaacattctaaattaggagattacgttatatccaraggaagtgttctatggaggccaagaacaaatctgaaaattaagtgaatgatgataaaagctaaggataggagagtaactccctgatactttgtttttacaaactggcttttcaggacttatataccatttattgttgaaatatggcaattttaaaaaacaatttttctatttaaaaatttactgagtggaaagttgttcaaatttgtctttcagagaatggttagtgagttggcttaggaatcagactatatggctttaaatgctatatttgctgtatgcctatg

SEQ ID NO: 514196 - DNA, 514 bp, Homo sapiens
agtaacacagaaataatttcagaagaactccattgaaaaaggtacagataatayttagaaattagcaataagaataattaataggatgatgactagatcagatgaataagagtcatataattatgcatttttttgtgccagaaaaatgagtcccagggttggcttactaactgattattaatcattcattggcagagtttcatttggagttctcaaacaatgctcacaaagagtctcttcagtatcagtaaggattttaggcaaagcaggggccattcaaatagggttatacctatactctgtttcaagaatatggctattagtttaatgtgtctcctccacaattcaggtgttgccagtgtgatagcattaaaggtgggacctctaagaggtgattaggccatgaaagctaccccttagtgattggcattaaggccctcataataatggcttcctgcagcatttgggcctttgccattgccttccaccatgtgaggacacagtgttcctctgc

SEQ ID NO: 514197 - DNA, 525 bp, Homo sapiens
tgagccgtggtagtaacacagaaataatttcagaagaactccattgaaaaaggtacagataatatttagaaattagcaataagaataattaataggatgatgactagatcagatgaataagagtcatakaattatgcatttttttgtgccagaaaaatgagtcccagggttggcttactaactgattattaatcattcattggcagagtttcatttggagttctcaaacaatgctcacaaagagtctcttcagtatcagtaaggattttaggcaaagcaggggccattcaaatagggttatacctatactctgtttcaagaatatggctattagtttaatgtgtctcctccacaattcaggtgttgccagtgtgatagcattaaaggtgggacctctaagaggtgattaggccatgaaagctaccccttagtgattggcattaaggccctcataataatggcttcctgcagcatttgggcctttgccattgccttccaccatgtgaggacacagtgttcctctgc

SEQ ID NO: 514198 - DNA, 510 bp, Homo sapiens
ctgggctctcgggctgtgccccctgttttgtggggcctggctctctgtcctggctgggtgccactggctttctttgtgtgggtgaagctgtctagattcccagccgggactggagagccgcctcccatgggcagaaaggtgaagtcaagctcctctcctccacggtcctccggtgcccagagaggggagggaagggctcggggccacacagcacacgggggtgagagggggccctactgcctgccacgtgctaccgggagtgcgttggagcctcacgggcactggaggtagacacttctccccatttcacagatgagaaaaccaagacacagccctgactccccagcccaggccctttctcaggcccctttccaggcctctgcgtcgggaggtgcacctcgtctcccccacatcccggctcagccccccgggcagcagtccatggcccaccaggctggtgcagggagygctggctcctggaaacccggagaaagcagacaactcgtccgc

SEQ ID NO: 514199 - DNA, 508 bp, Homo sapiens
tcctggggtgaagcacagcccctactcttgctgccctggtagaagacgaggcccagagaggggcagggctcccaaggctgcacagtgagtatgatctggaacgccccagggccggcaaaggggtgcagggtgctggggctgaggtagtccggggagctggcccgctgggatgtgctgggcctgagacagtcacagctycccctgggctcctcttctctcatttctttcctcttcctgccccgcccctcagcagaatctctgcccccaacacctacagcccctgccctccttctgaggctgtggaaacggagtcacagggaggtggagtcaggcaggagatgtatccaggcttcctgactgcccgctccctcttcacgttgcttgctcctgccatgccggtgcccagcgaggctctgagaagccgggacactctgcccagggactgcctccctggcccggaccctgggggctgcggggacctccggcgggtcccgggctgggcttcccc

SEQ ID NO: 514200 - DNA, 363 bp, Homo sapiens
tgccccaggatgagcaaggctggcccagcatctctgagygagtggggaagggaggggaaagccaaaactttaaggtatatgaactgtgaaattaaatcgaaatactcaaataaggaatcacataacaacataagcaaagatgtttaccagagcttgaagttaaatacagattttttcataaacccaaacacaaaacacaataaagttctgtgggatgttaaatataatttacagtgggaaggatgctcctcgccgtcataaacccgcgtgcaccgcgtcactccccgggcgccgagttccgccggcctggcacgggctcacgggcacccttggcccccgaggggctgtgggaccccgggaccg

SEQ ID NO: 514201 - DNA, 526 bp, Homo sapiens
tgcctgcaggtcctgctcttccatgggaggtgtcaggagagtgaagccgggcccccatgccccggccmacacaaccagctcaccctgcctgcctgcagccttgcgcccctgccccctggaactctcccagcagccccaagagagatggggctgccatttgcagatggagaaactgaggctaggaagggttaggacgtaactcagtccatttgcacagtcgaggctgggctgggtacgagggtgacccatgtaagatctggagaaggaactcctctgggcagggaccatgggatccaccccacctgtccccagacctcagagctgatcgtgcagcagcccagccgggctgggtccaggagtgggcagagtagacacagcccccgagctcctgggtacacaaataaacatacttggtgcatacgagcagcttcaggcgcctggtaatgggcgctgcgttaacagtggagggggtcagtcacagggagctgcttcggccagggtgtgtcagatacggccccttggagga

SEQ ID NO: 514202 - DNA, 526 bp, Homo sapiens
tgcctgcaggtcctgctcttccatgggaggtgtcaggagagtgaagccgggcccccatgccccggccaacacaaccagctcaccctgcctgcctgcagccttgcgcccctgccccctggaactctcccagcagccccaagagagatggggctgccatttgcagatggagaaactgaggctaggaagggttaggamgtaactcagtccatttgcacagtcgaggctgggctgggtacgagggtgacccatgtaagatctggagaaggaactcctctgggcagggaccatgggatccaccccacctgtccccagacctcagagctgatcgtgcagcagcccagccgggctgggtccaggagtgggcagagtagacacagcccccgagctcctgggtacacaaataaacatacttggtgcatacgagcagcttcaggcgcctggtaatgggcgctgcgttaacagtggagggggtcagtcacagggagctgcttcggccagggtgtgtcagatacggccccttggagga

SEQ ID NO: 514203 - DNA, 526 bp, Homo sapiens
tgcctgcaggtcctgctcttccatgggaggtgtcaggagagtgaagccgggcccccatgccccggccaacacaaccagctcaccctgcctgcctgcagccttgcgcccctgccccctggaactctcccagcagccccaagagagatggggctgccatttgcagatggagaaactgaggctaggaagggttaggacgtaactcagtccatttgcacagtcgaggctgggctgggtacgagggtgacccatgtaagatctggagaaggaactcctctgggcagggaccaygggatccaccccacctgtccccagacctcagagctgatcgtgcagcagcccagccgggctgggtccaggagtgggcagagtagacacagcccccgagctcctgggtacacaaataaacatacttggtgcatacgagcagcttcaggcgcctggtaatgggcgctgcgttaacagtggagggggtcagtcacagggagctgcttcggccagggtgtgtcagatacggccccttggagga

SEQ ID NO: 514204 - DNA, 435 bp, Homo sapiens
aaccaccatctgcactaaaaatacaaaattagccgggcgcggtggygggcgcctgtaaacccagctactcgggaggctgacacaggagaatcgcttgaacccgggaggcggagatttcagtgggccgagatcatgccattacactccagcctgggcaacaagagcaaaactccatctcaaaaaaaagaagaggcccgcagcttctctctttagtctcttaggaccccgttgctgggcctccctagttgccctggaagaaacctgattatctgggaccgccgtgctgttgaggtcaccagtgggcgcgcagctcatcgtcctgtgtaaatcacccaggcccctcctcagctcagccccagccctatcctgggcagtgagggactgtggagaccgtgcaagagtcgctggctgaaccctgcccggatcaccgaccca

SEQ ID NO: 514205 - DNA, 496 bp, Homo sapiens
gggtgaccggtgtcttctccctggaggtctgtgagccgtctccctgtctttgatggcctgtgttttttccactgaggcctgtttcggtttggattttttctcatgcatcctgcttgggacttatgttttctgagtccaggaatatctatctttcatcagttccataaaattctcagcccttccctctgcctctgsgctctaccccatttccatgtcctccccgagcacctgtgagagggacgcaggtggcctcactggcctgcaggctcttagctttcctgggctgccctgttgctggccctgagttcacctcgccctcctctctcttctgcctgtccccacctgggtttagacacaggaatcctctgaccctccttttcatccttgttctctctcttcctttcctgctcccaaattacagcacccaaaacaataccttactcatcatacaaccacaataaccatttgttgatttaatttcattttaggaaatttc

SEQ ID NO: 514206 - DNA, 496 bp, Homo sapiens
gggtgaccggtgtcttctccctggaggtctgtgagccgtctccctgtctttgatggcctgtgttttttccactgaggcctgtttcggtttggattttttctcatgcatcctgcttgggacttatgttttctgagtccaggaatatctatctttcatcagttccataaaattctcagcccttccctctgcctctgcsctctaccccatttccatgtcctccccgagcacctgtgagagggacgcaggtggcctcactggcctgcaggctcttagctttcctgggctgccctgttgctggccctgagttcacctcgccctcctctctcttctgcctgtccccacctgggtttagacacaggaatcctctgaccctccttttcatccttgttctctctcttcctttcctgctcccaaattacagcacccaaaacaataccttactcatcatacaaccacaataaccatttgttgatttaatttcattttaggaaatttc

SEQ ID NO: 514207 - DNA, 502 bp, Homo sapiens
gcctgcccagatccttggcaccgccgacagcccctcaccctcacaaccctacccaggaggtgagcgctggggtcacacccctgcccacccccgcctggatccccccaggagccctctccctgcttgcccctgcctggcatccccccagaaacctttccatgcccttcccagtgccctgggtcttctgtttccaggacaccttccctggcccgcgctgggctgacctgtggctgtgggaggtcagagggcagctcccaccccagccgcctccctcgtgtccagcaggcygggcccaggagtggcttccacctgcccgtcagtgcagccgggcctcatggagctgagggacagaggctggagctgtggacacgccaggtggggttcagtggctatgtgtagcatacccaggtttggacggagccggaggggaaatggggtcggggccctgcctccccatctgtctggttacaatcagggaaggcccctgcctgcccccactgca

SEQ ID NO: 514208 - DNA, 528 bp, Homo sapiens
cctccacacccgcccaggcctcagtggggcctgcccagatccttggcaccgccgacagcccctcaccctcacaaccctacccaggaggtgagcgctggggtcacacccctgcccacccccgcctggatccccccaggagccctctccctgcttgcccctgcctggcatccccccagaaacctttccatgcccttcccagtgccctgggtcttctgtttccaggacaccttccctggcccgcgctgggctgacctgtggctgtgggaggtcagagggcagctcccaccccagccgcctccctcgtgtccagcaggccgggcccaggagtggcttccacctgcccgtcagtgcagccgggcctcatggagctgagggacagaggctggagctgtggacacgccaggtggggttcagtggctatgtgtagcatacccaggtttggacggagccggaggggaaatgggktcggggccctgcctccccatctgtctggttacaatcagggaaggcccctgcctgcccccactg

SEQ ID NO: 514209 - DNA, 602 bp, Homo sapiens
ggacagcaggtgcagaggccctgggtggggacctgctggcacccgcagggctggacaggagagaggatggacagagagaggcatggccaggttagatgttctgagaagccttagagggtcaggaatagggaacacctgatccactcactgtcctcacctggtaagtgtgggcattcaaagatgcaaaactcaccccttttccccctctctccaacctgtcccagcctggatttgccttgtactcactcccactctctcctgcagtagcatttcatacttccagggagccrccgggtgcaataggaagctgcgagtcctgagggacaagaagcccagcctgattggcttcaacagaagaggaactttgttgccccctggagctgatctgtctggggtagatctctggcttcaggcatggcttgatccagggctcaattgtcatcaccagggtccatgtctgagatctgattcttctgagatggtggcttgaccctgagtctccaaaaattttccaaggatctagacttccacccaagatacagcaacaggaactagatttaccctttcaaccaaaacatcaagaaaaccagacaaagtataat

SEQ ID NO: 514210 - DNA, 540 bp, Homo sapiens
ccactgctgtaatatatggtctttattgcattagtttatgccttatattaaattatgttcatctaagatttgcaagaaaaatagcttttcggcttactcaggaatttgggagacttaatttcggtcggctgattctcaagaaagaaattacagtgtgaaaggcaaaatgccaggggagggatggaggcttcggaggacgggaaggcgccctcagcctcgtgccctctctcaaggtgaaaggcacctgaagacgttttcactcaacactttcttttctgttttgttttgtttttttccagacaggtctcgctctgtcacccagactggagctcagggtttaatcatagctcactgcagctttgacctcctgagttcatgggatcctcccacctcagtctcccaagtagctgggactacaggcgcacaccaccatgcccrgctaatttttccgtttttagtagagatggggttttgccatgttgcccaggctcgtctcgaacccctgacctcaggtgatccgcccacctcggcctcccaagc

SEQ ID NO: 514211 - DNA, 605 bp, Homo sapiens
tgcagacggctatgaagatggttcataaaacgtggtattcctaggggacagacagacagccaacaagaatattacttaaagatcgaaccaagagaagtcaacaatggataccagagggcggcgggaagccactscaaggcaacgtctaggtgctttgcttggcttcctgacctgagccagcctttgacctgtgactcagtgcctgcaggaagacctccccgaaccacagcgcgtgcaagctgtcacgatgcgcctgggccttgcacgagaggaccctacagcctccctcgaaggagatgccggacacttcagggacggctggacgggggtctacgctgccgttaatacttagggaggaaacgctcatggtgcccagtgggtcttctggtccccaccagccgtcattcccgcaaccaccactggagggcgcgcgtggtacctggaaaacgcccacatgggtttctcggtgtcccggaagctgtcctggcggacacggccacgcagaagcctctgaaactgcagcccctgctgccccggctccccttgcaagataagaaatcaaagcaatgatgtgttcctgggagacgggcagggctttgagccag

SEQ ID NO: 514212 - DNA, 605 bp, Homo sapiens
tgcagacggctatgaagatggttcataaaacgtggtattcctaggggacagacagacagccaacaagaatattacttaaagatcgaaccaagagaagtcaacaatggataccagagggcggcgggaagccactccaaggcaacgtctmggtgctttgcttggcttcctgacctgagccagcctttgacctgtgactcagtgcctgcaggaagacctccccgaaccacagcgcgtgcaagctgtcacgatgcgcctgggccttgcacgagaggaccctacagcctccctcgaaggagatgccggacacttcagggacggctggacgggggtctacgctgccgttaatacttagggaggaaacgctcatggtgcccagtgggtcttctggtccccaccagccgtcattcccgcaaccaccactggagggcgcgcgtggtacctggaaaacgcccacatgggtttctcggtgtcccggaagctgtcctggcggacacggccacgcagaagcctctgaaactgcagcccctgctgccccggctccccttgcaagataagaaatcaaagcaatgatgtgttcctgggagacgggcagggctttgagccag

SEQ ID NO: 514213 - DNA, 605 bp, Homo sapiens
tgcagacggctatgaagatggttcataaaacgtggtattcctaggggacagacagacagccaacaagaatattacttaaagatcgaaccaagagaagtcaacaatggataccagagggcggcgggaagccactccaaggcaacgtctaggtgctttgcttggcttcctgacctgagccagcctttgacctgtgactcagtgcctgcaggaagacctccccgaaccacagcgcgtgcaagctgtcacgatgcgcctgggccttgcacgagaggaccctacagcctccctcgaaggagatgccggacacttcagggacggctggacgggggtctacgctgccgttaatrcttagggaggaaacgctcatggtgcccagtgggtcttctggtccccaccagccgtcattcccgcaaccaccactggagggcgcgcgtggtacctggaaaacgcccacatgggtttctcggtgtcccggaagctgtcctggcggacacggccacgcagaagcctctgaaactgcagcccctgctgccccggctccccttgcaagataagaaatcaaagcaatgatgtgttcctgggagacgggcagggctttgagccag

SEQ ID NO: 514214 - DNA, 605 bp, Homo sapiens
tgcagacggctatgaagatggttcataaaacgtggtattcctaggggacagacagacagccaacaagaatattacttaaagatcgaaccaagagaagtcaacaatggataccagagggcggcgggaagccactccaaggcaacgtctaggtgctttgcttggcttcctgacctgagccagcctttgacctgtgactcagtgcctgcaggaagacctccccgaaccacagcgcgtgcaagctgtcacgatgcgcctgggccttgcacgagaggaccctacagcctccctcgaaggagatgccggacacttcagggacggctggacgggggtctacgctgccgttaatacttagggaggaaacgctcatggtgcccagtgggtcttctggtcccsaccagccgtcattcccgcaaccaccactggagggcgcgcgtggtacctggaaaacgcccacatgggtttctcggtgtcccggaagctgtcctggcggacacggccacgcagaagcctctgaaactgcagcccctgctgccccggctccccttgcaagataagaaatcaaagcaatgatgtgttcctgggagacgggcagggctttgagccag

SEQ ID NO: 514215 - DNA, 490 bp, Homo sapiens
ctgcagctgcctccatggccgggtgggctgaaaccaggacccctccccacaggccagtcaggagcaggcccccccacacacaccacagagcggcgtctaagsgccaggctggactgccgcgcttccgggtgcatctgacggggacgtcacgacggcccagggtgcctggctgtggcggggccatgctgggacgctgcccgcagtggcagtacagaacctgtccccaacgtttccagaggtgggcacggagtggaccctgaagcgcagtggtgccccccaagcagggtagtgcctggcatggcctcgagcagatgcctgctggggcaacggatgcccggtccacacctcaggactgcagggatggcccagaagggatggccagcaccattcagtgagcgtctgctgtgtaccacccaaagcacctcctagctgtcctccagcggggctcacatacccccaccacttcaggctgcgggcaccccaggggctt

SEQ ID NO: 514216 - DNA, 490 bp, Homo sapiens
ctgcagctgcctccatggccgggtgggctgaaaccaggacccctccccacaggccagtcaggagcaggcccccccacacacaccacagagcggcgtctaagcsccaggctggactgccgcgcttccgggtgcatctgacggggacgtcacgacggcccagggtgcctggctgtggcggggccatgctgggacgctgcccgcagtggcagtacagaacctgtccccaacgtttccagaggtgggcacggagtggaccctgaagcgcagtggtgccccccaagcagggtagtgcctggcatggcctcgagcagatgcctgctggggcaacggatgcccggtccacacctcaggactgcagggatggcccagaagggatggccagcaccattcagtgagcgtctgctgtgtaccacccaaagcacctcctagctgtcctccagcggggctcacatacccccaccacttcaggctgcgggcaccccaggggctt

SEQ ID NO: 514217 - DNA, 627 bp, Homo sapiens
ctgcagcccctcactgtcactcccagacccagctgctacagggctccccgggacccccaacacccaccctctcttcactgtgtagaaaacagagcccaggagggcagcaagtaagccaggcgcgttggctcacacctgggaccccagctactcgggaagctgaggcgggaggatcgcttaagtcaggagtttgagaccagcctaggcaacatagtgagactctgtctctaccaacaattaaaaaaaaattagctgggcgtgatggtgtgtgcctgtggtcccagctactcaggaggccgaggcgagaggatcacttgagccaggagtttgagaccagcctgggcaaaatagcaagacaccatctcaaaaaaaattttttttttttaaaggaaagcagcaaaggtggcctgaggaagactctgtcctgagaygcaggacgagctggggagagaggcctgggctgccgagctgtcgtgaagagggtgcgtctgtggcaggtgggacgcccgtcctttcctagagccccctttcgtgcagcacactctggtgctcccgggggacgtctcaggcccactccaggatgtcaggggccacctcagacagaaaaggtccctgtcatcccccagc

SEQ ID NO: 514218 - DNA, 379 bp, Homo sapiens
cactggctcgttagcgctgaataatcgggcttcaaccacaccgctggggaacaaaaataaacaagggcactgggagaatcaggatgggggggcttccacgctggggggtgcgctcgcgacccaggtgcgcggggtgcaggggacgccgcttgaggactcccagcagcgtgggacgtgagcacccctgcagccgccgtgctgggcacccaccttgggaaaaggtcgctgggaggtggtgctggtgtgtgtgtgggagggggtggtggcaggggcaggccaatctgccctccccaggaggaaaccctttgtggtgaacctaaaacctgctcggtaacttaagctkgcttcctcctgccctgtcctcaggaaagatggggaa

SEQ ID NO: 514219 - DNA, 635 bp, Homo sapiens
ccccttggcagtgccaaggattcttccagctcaaagaattagagctgctgtttctttgggtactaccaccatgggtaaagccccacaaaccaaataagcctaatgtcataagaattctttctcctcctcattttcctctagatcatagccttctaccaacaagtaatgacattgatttttaattctactctgctttctcaggtgactccttcctcagtgtgttgtatattctcattttgctttccacagcctctctccacctgtctccattcattctaggygggtggccagataatgtggttattccttgggaggttccttacctaactggtcaccacaggatggtgctgtctcattacagaggccacagcatctgctgtgccattctctctgcaccttctccttgccctcttgcctttcagtttagatgtaacaacgagtccctgatataattcataccaaatgtacaatgccaccccttgtttgtttgcattaagacttcccacacctgtgaatcatcctttttgattaaattaacctccatgactccacttgagtgtggcatctgtttcctgttgagacctgggctgatgcactgaggctttttttttcctcctatctaggaacttttctct

SEQ ID NO: 514220 - DNA, 580 bp, Homo sapiens
gctgctataacaaaataccatgaacccagtgtcttaaaaaacaaggcatttgttttctcacagttctgaatgctggaagtctaagagcaggatgccagcatagtatggttctggtgagggctcttttctttgcttgtggactgttccttcccactatgtcctcacatagtggagagaactagagagcaagttcaccaacgtctctttttataagggccctaatcctatcataagggccccatcctcatatcctcacgtaaccctaattactttgggaaaaggaggtcccatctcaaaatactatcacaccrggggttagggctccagcatagggatttgagtggagggacacaaatatttaggtcataacaggcccaatatgtcatctactgtccttttgtgggtgttaaaaccaggcttccagtttaccaagagaaaggccctcagtctcgccccacaacctactacagcatcaggttgaacccttagtgaaccaactgtccagcatgtctagggtttttcaggtcttctaatgttaccttattgctggaaacagaagcctctcagattcagctttcac

SEQ ID NO: 514221 - DNA, 495 bp, Homo sapiens
ctgttttcattaaaccaacaatattaaatcagtcttacttatcaaaaaattgacacaaaaattgttttgttgtggctagatttatgattccgtaactttctgtgacaagcccttatatctcaaaatatctagcaaagacaaatagaaaacccagacaaaaatgtatgctgacaattctgagggtatttcatttttattttatcaataatcttaaagccaggttgcttattaaaggtttacttaagtcatgtgaacatgaaaaatgcttggacatttttacttaatttatgagtgctcttttatttgtaagccgatttggtagacataacatgtgtgttaacwaacattgattggttaaaaaccccaatcaatatccaaaatatatatagatgcaaaaatatgtaacataaatttagaaaattgaataccataataaagaaatgcaaaatgcattataacaaagtgaggttaacaccagatattaagatcagttta

SEQ ID NO: 514222 - DNA, 607 bp, Homo sapiens
tgattccccgtaactcctgtagctttttttagtctttttccttctttttttttcttttatctcctctaactagatattttacttgaccatttttgagtctacagattcttctgcttcataaattctattgatgctctcaattgcattttttactttattcactgtattcttcatctgtaggacttctgtttattattattattatttctatttatttcttgacctatttattttgtttaagttttgttcgtgtttctaatatcattgacttgtcggtctgttttcttgtatcttgctgagtttctttaaaacatttattttgcatcctttgtcaggtaatttgtatatctctgtttggggctagttactggaaaattattgtgttctgttgatgatgtcatgttttcttggcatttcatgtttcttattgctttgtgtagatgtctgaacatttgatagagcagtcacctcttcaagaatttatagatyggtttcattggagaaagacctttacctataggtgggtgtgaggatgctggctggataaggtgtagcaatcctggctctagtaggggtgcagagacatagtctgcatgaagtttcattc

SEQ ID NO: 514223 - DNA, 628 bp, Homo sapiens
gtgagtgaaccgggtgccccacgtcccctcacctcttctgcttcctgccaaatgaggcttgtcagcttcaagtccccagcacatccacactgcatcccactggaaaactgcagctgtggttctacatttcttgaggagcacaactctcagaggttgttgacaagctccttgcagctgccgctcgcactgctgcctctgtccctgctgggccccaggcagggcaggaaacaaagaggcccagcacctttgtgtgcccctaacagtaaaacccagcactgcgtctgcagaagtaaagtgcaagtgtcacgcacttcatagctgccagtctcgattgccacaggtaggcaaccctgcccttcccagtgaaagggtmgcagcacagccaacttgcccctgcctgaacatttcagctgcagcctagggcccttctgaaagcctaacaaccacaggcttgtcgtctgcccccatggccctactgcctgaatgttccaccagatctgcctgagagttcttttgtgaccgcaggaccagcccacccctctccatttaagctagcacctgaactctgggctgacccaacccagaggactcatacacgccatccagtggccatctagaaggcctggaa

SEQ ID NO: 514224 - DNA, 546 bp, Homo sapiens
ctgcagtcaggaactgtgtcagggactggtttctagtttgaccacggcggtatagggattttatttgtggttcctcaagtctagaatttacttcctctctgtggtttctgcaaacccatctcaccttccagcctatgtttgatttcctcattttatggaagtttttttttttcattgctaaatagagtttttttttatagcacagtgcttttggattcatcaaaagaaaaatactttaaagttttaaaaaggggtaactaaaaatgtctacttgaagctacctagtcaatttctgaggcagtagttttaatgggactgttagatactgaggttgagtaagtgtggttcacactgaggaaatctaagggagagtaggtgccctgcagaccctagcagaagtaagtgtagcagagagctagggcaaagcgtggcatagttcattggtcttaacctggttatactcttcatrcctatctagtgactcacagaggacactttcatgaatcagataattaggctggcattcatacagtccttatccagttc

SEQ ID NO: 514225 - DNA, 575 bp, Homo sapiens
gctttggagctgaatcctgaaaggcaaaaaggacagagttaaggaatgagttatggaaagatgtgaaactggatttctccacctgggcactgtggatgtttggagctagatagttctttgcagttggaggaactgggctatcttgtgctccctgtgcccaatagggtgttgagcggcatccatggcctctgcccgctggatgccagtagccctcttcttatcccccagcccccaagtccccacaamcaaaatgttgccagatcacgtgtcccacaggaggaaaagtcaaccactgactgagccacaagaaggacgtcccgcaacagagaacaatgaccatgtaggacccaatgtgggaacgagctcggcaggttttcttggaacagaagtttccagaaacaaaagacttcaagcagatgatagctgatgggtggagtccagtgtgggaggagaggagaggaatggggagaggtgtatggccggggtgctggcagggagcctggtgctgtgggaggaaggtggatttcattctgcatggcaggggaggacgctggagggacgtggcctaaaagatc

SEQ ID NO: 514226 - DNA, 569 bp, Homo sapiens
gctctgctgtgtggcaaaccaacaactgggcagtacctggggcctgtgtatcagggtggggagggttttatttttaatagtggttgatgtttcaggatgtttgtatgttaactgcagtaatctaggaaggagaaaaaattgttggaagaaagccattgagggaaatgggatttagtaaatacctgtagaaggtgtctttagacaggagcgcggagcattcatctgtagtacaggatggagggaaggcaaagataggaatgtggtgctcacagatgtgcaatgctgatgatgggaacatggggagttgatttcttgttgttactatttcttaaggaaaaaagggataggaatgaaagagcgtatttcatgtttcctctgagcatccttgttatgtggagtcttctctatagaccagcacagtccttaatccatgaatactctcctttgggcaaggcagacagaccccctcccctgccccygctccccccagacacaaaatctctctctctctaacacacacacactctctttcacacacacatactctttttctctgtatgtcacatact

SEQ ID NO: 514227 - DNA, 602 bp, Homo sapiens
tctccaagtctggcagcttgctagatatgagacataaaataagctttcttttctatttaccaccatgggtatgctttagggtaaggggcaagcttataagaatatctatttgtaatttccatgacaaaacacaaaatgccttaaacatctagctgaatttttaggggatgaagattatacattcactattagtgattacctggagtctctcatgrcagtcaaaatgcatgcctaggaagtgggaaagttagcctcactgagttggataagcatactctgcacccaaattctgatctgtttccctaaaatatgtacagagaatagttgactttattttgctagtaaaactcagcacacatacctaaatatatgacatagttaactgaggattcgttctactttctgatttcataaaaccaatttatagaaactaatttcttgagatgtttaaggataattcatatacctttactatattatgaatgtatgatttttgtttttaaaaagtatatgaaacaaaagtctatttaccttgatttggaaatatagtaatacttggataacatcttaagtatttcaagttaaacttgagttaaaataga

SEQ ID NO: 514228 - DNA, 552 bp, Homo sapiens
tacatgcctgtagtcccagctactccggagctgacgcaggagaatcacttgaacccaggaagcagaggttgcaataagccaagatggagccactgcactccagctggggaaacagagtgagactccatctcaaaataaatacataaataaataaaaatagaaataaaaaaaccctgaaatgagatactttatctcattttagcaatcctataatatttctttatgacgacaacatgtattattaatgctgatatatctgaatgctcacagtaatcaggcactgttataaacatcttacatgtcctgattcatttactcctcacatcaatcttccctatgagttccataaattcatgttaatattaattgaatagatgcacaggcttagtttgagtttgattctgcagttgggtctacagagtccgagatacttccatacttgataactcatctgaaaatytgtgtgcgtgtttgcagaagaagggagtttatagctgtcaaagcttttcaaacttttttccttgaatatttttaatcactttttccaagtca

SEQ ID NO: 514229 - DNA, 458 bp, Homo sapiens
ttacatggtaattgtgaaatttaaagaaaatattatactttacatgttttgaaacttaaaggattacataaatgtagattgttatgctatttacgttgcatatgtttctatgcagtaatttaattaatgtttatagagaatctcctagtgtgaggtcttctgttaggtgacaaaggtacatcaataaaaattgagacacagtctctctttttttgaaatttataatctgtaagagagcaacatgttaggatattacaaaatttatgatttaatgacaaattccagtatcttctaataagtaaaagtatatgacagcacctaacartggtctccaacctatactaagaatgggatttgacctgaatgcaggcaggtgagtaataattaaccaagagaagaataactgttattcaggcagaaggaactcaagatgcaaacattctataatagacatcact

SEQ ID NO: 514230 - DNA, 458 bp, Homo sapiens
ttacatggtaattgtgaaatttaaagaaaatattatactttacatgttttgaaacttaaaggattacataaatgtagattgttatgctatttacgttgcatatgtttctatgcagtaatttaattaatgtttatagagaatctcctagtgtgaggtcttctgttaggtgacaaaggtacatcaataaaaattgagacacagtctctctttttttgaaatttataatctgtaagagagcaacatgttaggatattacaaaatttatgatttaatgacaaattccagtatcttctaataagtaaaagtatatgacagcacctaacaatggtctccaacctatactaagaatgggatttgacctgaatgyaggcaggtgagtaataattaaccaagagaagaataactgttattcaggcagaaggaactcaagatgcaaacattctataatagacatcact

SEQ ID NO: 514231 - DNA, 639 bp, Homo sapiens
agctgcctataaattctataatagtcaaggcaagagtaaaatgatcaactctttcaccatcaacaaatggcagtagcaagtattgtgttttataagtttaataagtatacttataaaaataattcagaactttataattmtcaacaataatatttatgaaaatgttttagtacttgatttgtttataggttgaaacatttccaaagtctgtagattttagcatagcaggaaaatgaaataagtataaaattgttaaaattaactgcttccaagacttccccgtattttcaagtatctagtttatttccagttattcaatgtaccaataactatcaaattcaaaccacagtcacagtataattttgaaaattataaagttccaaataactatgaaatacaaaaatcttaatgatggaattaaaatgaaaataaattgccctgatcacctctggcagagctcttcatgcatttctgacatttgttttccttcccttaaataatgaatagtctaggtctttaaagtaggagtgctcactaagaatgggtgaaaatcccatttgctttctaattggcctctgtgttttacaatagaatttaatttgctcttttattaatagtaattccttttgatgtctaaca

SEQ ID NO: 514232 - DNA, 613 bp, Homo sapiens
taggatcccaagtgaacgttactaaagccaaagaggttactctacaaagaccctaaaagagtagaaggaaaatattagaatatgattaggggaatggtttggcaattcattacagtagaagaggtttaatgcactcagaaaattcagtagtttatggctgaaattttaccaagaaaagaagcaaagaagatagattttaggaagaaatgctcacctacttgagcctccctattttcctggatcctggctcagtaattctcactacagtgttagttttcttctgctttgaagaagtgctagcagattcagtgtcagctagcacttaagaaggatcatctttctggcttgtagatgatcaccttattgctatatcctcacatggcagagaaagaagtctccggtcwctctgtttttataagggcactaatcacatcaggagggctccactctcatgagctcatctaaacctaattaccgtcaaagtcctcatcttcaaacactatcacatcaggtattaaagcaattcagcaaaggaattggggggaccgcaaatattcagtccatagcattgcagacatttatatatattgactgacatttatatttattgaaa

SEQ ID NO: 514233 - DNA, 651 bp, Homo sapiens
cttggcctgacctgggaaaacccaagaagccattatagcaccttacctccttaggggtcagctaaagcaggatttgggtctgcatcacagctcaacttctccctcaactgggtattcttgcattgttttccttcattccacagacattgaccacaagagtatgccttaataagtgtcctgtgtgctaaactccatctcaatgtctgatacctgaggaaccaaacttctgacaagrgaaattaaaggaaagagatattgaggaacttacagcttcaaactactgagaaacatcatgcctcatatacaagaagctcaccatagccatgagaataagtaaaatgaagttatatccaggcatatcacaggaaaattaatgagaattaagaacaaagagaagccttaaaactagccagagaaaaaggaaggctaattttaaggaataatagttagacagttaactccacattagaaatagtgtacacccaggaaaatggagtgataacaatcaagaataaagaagatataaggatttttgttagcaaaacaaacaggaagaaaaaataaagaaacaaaaatcaaatagaaaaaaactgagagatcattgggtcagaaaccaatgataaacctctgcatattgtataaattaactag

SEQ ID NO: 514234 - DNA, 552 bp, Homo sapiens
tacatgcctgtagtcccagctactccggagctgacgcaggagaatcacttgaacccaggaagcagaggttgcaataagccaagatggagccactgcactccagctggggaaacagagtgagactccatctcaaaataaatacataaataaataaaaatagaaataaaaaaaccctgaaatgagayactttatctcattttagcaatcctataatatttctttatgacgacaacatgtattattaatgctgatatatctgaatgctcacagtaatcaggcactgttataaacatcttacatgtcctgattcatttactcctcacatcaatcttccctatgagttccataaattcatgttaatattaattgaatagatgcacaggcttagtttgagtttgattctgcagttgggtctacagagtccgagatacttccatacttgataactcatctgaaaatctgtgtgcgtgtttgcagaagaagggagtttatagctgtcaaagcttttcaaacttttttccttgaatatttttaatcactttttccaagtca

SEQ ID NO: 514235 - DNA, 535 bp, Homo sapiens
cttggaagctcaaccatgcctgcatgagtatgctcagacaattgcaaagcagttccactcttcccaccttggggttcactctcattcccactatgtcccctttcagcaggaagaagccamagtgatcaacagccttttcccatcttcatagcctacaccttaagattgaggtattataaaacccaaagggagggattgaaactacctttgcaaaagtatggctgagacagtgaaagggatctaacttaactgactccatcttgcttctaacctccaagttgtccttgttcattcctgggcataggctgaactaactttgggagaaacttagtttatagtttaaacaaagatggtaacagccctttcccaaagcagacctccttcttccctggggactagattgccttcgtaggactaacattagccacaagattagaaattatggtttaggagtcatgaagctggaggctacaaaattctgaccctccctaaactgctcctaagatcagggcttgagatattttgcagaccctgt

SEQ ID NO: 514236 - DNA, 568 bp, Homo sapiens
cccctcacggtgtgcctggccccggcgtgggggggcaggcccggggggtgtcgcatctctcttatccgccccccactcaccacrtagaacccactggatcccattggtatttagtggccccgggccgactgaactggcgccgaggcttacctgagtccttcctgtaaatgtgaggagcggagggaatattccaggaggccggtgtctgcgatgtcctgctcttgggtagctaggaagtagtgaacgtggtctagggaactgcctgggctcttatccacctgggaatgggtttgttggggatcctgatgtgggagaagccagggagcttctagcctagtggggctaggggagaaaacagggagaggggtggattaggctgaaggaaagagatctctgatcttaaaggcagcgttctgacgggtaaggttgactggcattttccccaacaaagagttctagtaccgtattccatgacctgacaagcctgtttaagtgaggttttgttgagtgcagagagagaaggcttggctttgaatttttatctccaggcgggacctgcctcctgaac

SEQ ID NO: 514237 - DNA, 651 bp, Homo sapiens
catttttaagcaaagattcaagaagttaaaaccacacacaagtgttttactgggcatccttatccaactaccctatatcttcactttgaaaatagtttaaacattgcctgagaggacacagaactaatagacttttggaattcttctttgcaggcctgtaaattactctctgatgactatgaacaagtgcgcagtgctgcagtctagcttatctgggttgtcagtcagctctatcctgaaaggtcagtgcgggtgtaagctggcttttgttgattgtgaagccgttttcctctcctctcaccatgcaaaaagcccacttctagaaaagaaatgttggttagatttttggaaggcaatggggagtaagggaaaagcacaggccctgaaaatcagattgcctggtcctcatttttcatctctgataggaactttctgtacaccttcggaaagacacttcttttgtcctaatcttctcatccataagtgaagaaattggaatatctttcttaaatggttttcagtactttacaawaaaatctttaaaattgtttgggacccattttagtttggcttgcgccaaatgccagacaaagataccagatgagtttgagaataatgatctcttatgtagttttcctggttaaaaatatt

SEQ ID NO: 514238 - DNA, 685 bp, Homo sapiens
ggttttgttcagctgaagccttggggagcactgaagccaaggttctactgtaccaaaaatttgaaggccatgcgaatgatctgtatgcggaaggactaccagaaaacattcctttcagaagtccctcgtggtatggaatcccaaggctggaaaacatcattcaagtgggcaatcgaattaaatttcttattaaaaggtaagatgataatctgcagaaacaaattcagtgtcttccctaaggagagattaattcgatgaggaagggccttttgttcccctctcattatgacttccttatatttacaattaacatttagattcacttattgaacaaacatgtatttagtataagtatcagatgtgcaaaattgggtctagcaagaaccctgtccttgggaggcttaatattatgaaaaatgcaatgaagagttattgagcatttttaggggagaaggcaaggatggcatacccagatcagtcatttgtgcatccagaagggagggaacgtgttccaaatatgagtaaaggcagggagatgtcaaatatgcccacatattcacatacctcacccattctgtgtggagkgaggagtgccatgtgggcatggtgggattgcatagatagacttgggtggccaaatggaggaaggccttagatcctacaaaagcagtggcagtcattaaat

SEQ ID NO: 514239 - DNA, 406 bp, Homo sapiens
agcacgtctctacatctctacctgcattctggaaaccgggagaaagccaaaacggaygacaagacactagatcagccgtgtccaaccctgtgactacaaggacttttccgcctatctttggtggtgggtatcatcaaaattctgcacaaaccttttttttttttttttttttaagctcattagctgttgttagcattagtgtattttatgtgtggcccaggagcattcttcttccaatgtgggcctgagaagccaaaagactggacacctgtgcactaaatcaaaaggctattccttctggaagcaattgtaaagaatttctcacattatcttgacatgaaaaccaatgcatagtgggacagaatgcaaaatcttcaagaatttttgttgttgttgttgttgtttt

SEQ ID NO: 514240 - DNA, 406 bp, Homo sapiens
agcacgtctctacatctctacctgcattctggaaaccgggagaaagccaaaacggatgacaagacactagatcagccgtgtccaaccctgtgactacaaggacttttccgcctatctttggtggtgggtatcatcaaaattctgcacaaaccttttttttttttttttttttaagctcattagctgttgttagcattagtgtattttatgtgtggcccaggagcattcttcttccaatgtgggcctgagaagccaaaagactggacacctgtgcactaaatcaaaaggctattccttctggaagcaattgtaaagaatttctcacattatcttgacatgaaaaccaatgsatagtgggacagaatgcaaaatcttcaagaatttttgttgttgttgttgttgtttt

SEQ ID NO: 514241 - DNA, 559 bp, Homo sapiens
gattagaagattatgtgaaataattatttaatgcttaacattgattttttaatggtatcttccacatgaaataatattcctctaacatttaattacatgccaggacaggagaattcatgttgtcaaaattctaatactctctagaacagtaaactcattttatttgtattaacccattataaatacatgtaaatgttgcatttatgggtagacagaactaaaagaacaatatttttcctacttttgagatgcaraagttgtctggcataatgcattgaacaggttattattgaagcttgcaccagacaactgaacaaacattcctcaaatgtccatgatacccaggacataagaggcttccttttagagtatggagccatgcatatcatctcttaattgttagatgtgttttgaaagaaatagaaatataacggattttcttatttgttttggctctggagtagagtggggacaaaacagaatggaatcacactgtttagatttactgaaatggaaggattgctgcaagattatatccctagtctccccatagcaaatg

SEQ ID NO: 514242 - DNA, 559 bp, Homo sapiens
gattagaagattatgtgaaataattatttaatgcttaacattgattttttaatggtatcttccacatgaaataatattcctctaacatttaattacatgccaggacaggagaattcatgttgtcaaaattctaatactctctagaacagtaaactcattttatttgtattaacccattataaatacatgtaaatgttgcatttatgggtagacagaactaaaagaacaatatttttcctacttttgagatgcaaaakttgtctggcataatgcattgaacaggttattattgaagcttgcaccagacaactgaacaaacattcctcaaatgtccatgatacccaggacataagaggcttccttttagagtatggagccatgcatatcatctcttaattgttagatgtgttttgaaagaaatagaaatataacggattttcttatttgttttggctctggagtagagtggggacaaaacagaatggaatcacactgtttagatttactgaaatggaaggattgctgcaagattatatccctagtctccccatagcaaatg

SEQ ID NO: 514243 - DNA, 559 bp, Homo sapiens
gattagaagattatgtgaaataattatttaatgcttaacattgattttttaatggtatcttccacatgaaataatattcctctaacatttaattacatgccaggacaggagaattcatgttgtcaaaattctaatactctctagaacagtaaactcattttatttgtattaacccattataaatacatgtaaatgttgcatttatgggtagacagaactaaaagaacaatatttttcctacttttgagatgcaaaagttgtctggcataatgcattgaacaggttattattgaagcttgcaccagacaactgaacaaacattcctcaaatgtccatgatacccaggacataagaggcttccttttagagtatggagccatgcatatcatctcttaattgttagatgtgttttgaaagaaatagaaatataacggattttcttatttgttttggctctggagtagagtggggacaaaacagaatggaatcacactgtttagatttactraaatggaaggattgctgcaagattatatccctagtctccccatagcaaatg

SEQ ID NO: 514244 - DNA, 468 bp, Homo sapiens
ggttgactgtttaatagaatttttctgttgacttgaasatatggtcaggactgtggtatatgaaaattcttcataagataactatctaatccaattaatgctggaattgggaacagaaaatgttttggtgactatttatttcttcacttgctgttatataaactattgccagtgggtacttaacaaccaagaatgtcatctctgagctactcacaatgaaaggtgatgtctgggacccaggtgtgttgaggtccccatgtctgggctatgggtgctgagtgggacttacttatccatccattttctatattctggcactgggaaacttgggtttatccatcttgataaaaggtcatttaaattccacttggcaagaaccacaaatggaagaaaggtcacgaaatcacaggctagcccttgttctcaagggaatcttcagcttaggtggctctgtaaaagaggaatcgc

SEQ ID NO: 514245 - DNA, 468 bp, Homo sapiens
ggttgactgtttaatagaatttttctgttgacttgaacatatggtcaggactgtggtatatgaaaattcttcataagataactatctaatccaattaatgctggaattgggaacagmaaatgttttggtgactatttatttcttcacttgctgttatataaactattgccagtgggtacttaacaaccaagaatgtcatctctgagctactcacaatgaaaggtgatgtctgggacccaggtgtgttgaggtccccatgtctgggctatgggtgctgagtgggacttacttatccatccattttctatattctggcactgggaaacttgggtttatccatcttgataaaaggtcatttaaattccacttggcaagaaccacaaatggaagaaaggtcacgaaatcacaggctagcccttgttctcaagggaatcttcagcttaggtggctctgtaaaagaggaatcgc

SEQ ID NO: 514246 - DNA, 468 bp, Homo sapiens
ggttgactgtttaatagaatttttctgttgacttgaacatatggtcaggactgtggtatatgaaaattcttcataagataactatctaatccaattaatgctggaattgggaacagaaaatgttttggtgactatttattycttcacttgctgttatataaactattgccagtgggtacttaacaaccaagaatgtcatctctgagctactcacaatgaaaggtgatgtctgggacccaggtgtgttgaggtccccatgtctgggctatgggtgctgagtgggacttacttatccatccattttctatattctggcactgggaaacttgggtttatccatcttgataaaaggtcatttaaattccacttggcaagaaccacaaatggaagaaaggtcacgaaatcacaggctagcccttgttctcaagggaatcttcagcttaggtggctctgtaaaagaggaatcgc

SEQ ID NO: 514247 - DNA, 468 bp, Homo sapiens
ggttgactgtttaatagaatttttctgttgacttgaacatatggtcaggactgtggtatatgaaaattcttcataagataactatctaatccaattaatgctggaattgggaacagaaaatgttttggtgactatttatttcttcacttgctgttatataaactattgccagtgggtacttaacaaccaagaatgtcatctctgagctactcacaatgaaaggtgatgtctgggacccaggtgtgttraggtccccatgtctgggctatgggtgctgagtgggacttacttatccatccattttctatattctggcactgggaaacttgggtttatccatcttgataaaaggtcatttaaattccacttggcaagaaccacaaatggaagaaaggtcacgaaatcacaggctagcccttgttctcaagggaatcttcagcttaggtggctctgtaaaagaggaatcgc

SEQ ID NO: 514248 - DNA, 651 bp, Homo sapiens
tggtggagaccaggtcattcatcctaagcagtttgccttgtagcatgtagatgaaatatcccacgttggctgctggtgactgaactgggcttcctgtttctgtgtttggtttgaccatcacagtgttgaagaactgttgaagtgaataccttgcagtttgctacggtttccccccttctcccacattactccagcctccttccctcacgtaggttgcctgacccgctgatacctgtgtttgctatccctgcagatgggtgggtaggaggcaatttaaggaggaagatttaatatgtgagttatagaaagataaatagactgggcacagtggctaaagcctataatcccagcactttgggaggccaaggcgggaggattagtttgacccaggagttcaagaccagcctgggccacatagtgagaacaccctctctacaaaaaatgaaaaaaattagccaggcatggtggcatgcacctacaatcccagctacttaggaggctaaagtgagaggatagcttgagtccaggaattgaaagcctcagtgagccatgaccttgccactatactscagcctgggtgatagagtgagagaccctatctcagaaaaaaaaaaagcaagagagagataaatagatccagcattggtggga

SEQ ID NO: 514249 - DNA, 603 bp, Homo sapiens
acagtggcaagagaacaaactgtcatgctaaaatcatttcaaccttaaaaataattcagctttccctatcttttattgttactgattacagtgatggtattcaggtgaacactctgccatttagaatatcatttagccttagcctgtgcagctaatgcagcttcttcacaccacacagccatctttgacatatttcaacttgttaatgattcatgttcgcagcccttttggctgatgctatcactgcaaagcagtgatatgtgtgagtccattcattacggtaacaagctttccctcaagctttgtttcttgcaatatcwatcatttctagtgtgatctcctccactgatttttaaaaatccagtcaacagtaggattttcttgttgaactgtgaaggcctgtgctcggtagggactttgtgaatcatccctgcttgggtcccagagctactggagggcccatcactggagtggctggtgagaccctccagggcatgagagttgctatgggcctctgtgtggcttctagaggcttcccaggggcacaaagactatgtgacccaggtggaagctcgggaggctcacgctggacacatgctgcac

SEQ ID NO: 514250 - DNA, 603 bp, Homo sapiens
acagtggcaagagaacaaactgtcatgctaaaatcatttcaaccttaaaaataattcagctttccctatcttttattgttactgattacagtgatggtattcaggtgaacactctgccatttagaatatcatttagccttagcctgtgcagctaatgcagcttcttcacaccacacagccatctttgacatatttcaacttgttaatgattcatgttcgcagcccttttggctgatgctatcactgcaaagcagtgatatgtgtgagtccattcattacggtaacaagctttccctcaagctttgtttcttgcaatatctatcatttctagtgtgatctcctccmctgatttttaaaaatccagtcaacagtaggattttcttgttgaactgtgaaggcctgtgctcggtagggactttgtgaatcatccctgcttgggtcccagagctactggagggcccatcactggagtggctggtgagaccctccagggcatgagagttgctatgggcctctgtgtggcttctagaggcttcccaggggcacaaagactatgtgacccaggtggaagctcgggaggctcacgctggacacatgctgcac

SEQ ID NO: 514251 - DNA, 571 bp, Homo sapiens
gggcacagctgaaaccactttctttgtttattgattttgtttttcttgatttttatttttatttatttattaatttattttgagacagagtcttgctctgtgggccaggctggaatgcagtggcctgatcttggctcgctgcaacctctgcctccygggtttaagcgattctcctgtctcagcctcccgagtagctgggattacatgcatgagctactgtgcccagccttggtttttcttttgagacagggttttgctctgtcacccaggctggagtgcagtggtgtagtcatagctcactgcagcctcaaagtcctgagttcaagcaatccctcttgcctcagcctcccaacgtgctgggatctcaggtaggagccactgcgcctggcctgaaaccaagctttcttatcccaagttctgacctttatcaagttgacctaatcctttatcatctcctaagtgtccctcatgagtgatcacttcacattcctcccacatggagagctcacccactggggcatatttttcccattggaaaagtgtggttattggaagtttcctgtttttggaa

SEQ ID NO: 514252 - DNA, 571 bp, Homo sapiens
gggcacagctgaaaccactttctttgtttattgattttgtttttcttgatttttatttttatttatttattaatttattttgagacagagtcttgctctgtgggccaggctggaatgcagtggcctgatcttggctcgctgcaacctctgcctcctgggtttaagcgattctcctgtctcagcctcccgagtagctgggattacatgcatgagctactgtgcccagccttggtttttcttttgagacagggttttgctctgtcacccaggctggagtgcagtggtgtagtcatagctcactgcagcctcaaagtcctgagttcaagcaatccctcttgcctcagcctcccaacgtgctgggatctcaggtaggagccactgcrcctggcctgaaaccaagctttcttatcccaagttctgacctttatcaagttgacctaatcctttatcatctcctaagtgtccctcatgagtgatcacttcacattcctcccacatggagagctcacccactggggcatatttttcccattggaaaagtgtggttattggaagtttcctgtttttggaa

SEQ ID NO: 514253 - DNA, 367 bp, Homo sapiens
gacaataggcattcaccaccacacccagctcatttttttactttttgtagagatgatgtctgtgttgcccaggctggtctcaaactcctagcctcaagggatagactcgcytcagccttcccaagtgctgggatcacaggtgtgagccaccgcacctggtctcacgcttgcttttcttcccctaacaccttaagggcatcatgaatcaagaacctgatcctgtctctttgctgtggcagccaggaagaattcaaagtcaatcccgcagcctacgtaccgccgcacaggcccatgaagaaagagagcataaattccgggtgctagtcaccagcccagcttctttcttgctactgataattcccctctg

SEQ ID NO: 514254 - DNA, 367 bp, Homo sapiens
gacaataggcattcaccaccacacccagctcatttttttactttttgtagagatgatgtctgtgttgcccaggctggtctcaaactcctagcctcaagggatagactcgcttcagccttcccaagtgctgggatcacaggtgtgagccaccgcrcctggtctcacgcttgcttttcttcccctaacaccttaagggcatcatgaatcaagaacctgatcctgtctctttgctgtggcagccaggaagaattcaaagtcaatcccgcagcctacgtaccgccgcacaggcccatgaagaaagagagcataaattccgggtgctagtcaccagcccagcttctttcttgctactgataattcccctctg

SEQ ID NO: 514255 - DNA, 488 bp, Homo sapiens
gctggctgagacagtcgcgatgaaagcgcagctccagaaaagggaaccgagttctaaatctttttcggcaccccttacgcaccccaaaaagtgacccagggccccaggaactcctgggaagaccccccacaggaaagcagggaagcagagttaggaagcaaactcctccaaagtacaacccccggcccagtgagtcccttcacctgggggtagaccccagcaggaccaacccctcgtcagggagccggtggcaatctcgtcaccccctcctctgggtactttgggaaggggtgcgcgccttccgagcgacccggaaccgcgcccctccgcctgcgagcccctcagccttcatccgaacgtcccctttcgcacccggcaccctgtcccgtccaaagctgccggcgcctcccaagtcccccaactctcgccctcaggaccttgatcccggagaccgatccccccgacamccccgatctcccgggaccccc

SEQ ID NO: 514256 - DNA, 601 bp, Homo sapiens
atcagcaaaagggcagagtagacagctccaagctcccatcacccaacagaaacagaaaaaaaaaaaaaaaaaggccaggcgcagtggttcacacctataatcccagcactttgggaggccgaggcaggtggatcacctgaggtcaggagtttgagaccagactgaccaacatggtgaaaccccatctctactaaaaatacaaaattagccaagtgtggtggcacatgcctgtaatcccagctactcgggagggtgaggcaggagaatcgcttgaacggggaggcggaggttgcagtgagccgagatggcgccactgcactccagcctgggcaacaagagtgaaactctgtctcaaaaaaaaaaaaccaaataattattagaaacaactctgaaaaacagccaaagccttacaacaaccaaatgaatgctgaatcaagaaaaaggcaacttaaaaaggaaaggtagaaaacctytgtggcaatgttttttaagagacaggatcttgctctgttgcccaggctggaatgcagtggcgtgattgtggctcactctacccttgaactcctgtgctcaagtgattctctcacctcagccttccaag

SEQ ID NO: 514257 - DNA, 589 bp, Homo sapiens
gcagagtagacagctccaagctcccatcacccaacagaaacagaaaaaaaaaaaaaaaaaggccaggcgcagtggttcacacctataatcccagcactttgggaggccgaggcaggtggatcacctgaggtcaggagtttgagaccagactgaccaacatggtgaaaccccatctctactaaaaatacaaaattagccaagtgtggtggcacatgcctgtaatcccagctactcgggagggtgaggcaggagaatcgcttgaacggggaggcggaggttgcagtgagccgagatggcgccactgcactccagcctgggcaacaagagtgaaactctgtctcaaaaaaaaaaaaccaaataattattagaaacaactctgaaaaacagccaaagccttacaacaaccaaatgaatgctgaatcaagaaaaaggcaacttaaaaaggaaaggtagaaaacctctgtggcaatgttttttaagagacaggatcttgctctgttgcccaggctggaatgcagtggcgtgattgtggctcactctacccttgaactcctgkgctcaagtgattctctcacctcagccttccaag

SEQ ID NO: 514258 - DNA, 561 bp, Homo sapiens
atgcacagtagccttctcagcaaaggacactagcatctttcagtactgagacaacaaaccacaccattgaccctaggagagggagatgctactgccctctccaccagatggagttaatgttatgctgccccagggaccagatcactcaaccctctcgaccctgtgcaaacccttgaccctagagcatcagccacgttgtatgtacccacctcaccacaagcacacctggaagctgggccagcagcaaagagggatgcccttggccatggcttcactggttggagaaaaatagattaagaggackgagcagcatttgtcactgaacaaccccacagcccttgccaccactaaggatatccacagccttggcctcctcggaggatctctgcaatctttgccaacaccaaccttagctgacagagctaaacagagactacattgttgcaacctcacctcaagccagaactaccactttccacccagttggagccctctcatctgacgttaggggaatgtcttttcccactgaaaacaaatcttaaagtacagaagagattatta

SEQ ID NO: 514259 - DNA, 629 bp, Homo sapiens
ttgctggtgagtttccttttctccatttctagcatatggacacctggcctctgcttgagcacttaggtgacaggaacttccgcacctcctgaggccctggatgattctaattgttagaaattctaattgttagaaatccttccttataatgaatgaattctgctttcctataatttctacctattgggccttgttctgttctctggaactaaacagaacaaccatttacccctccttttcaaactagagaataaagatttggttttagaactggtggctggggagtgttactttttcygggggagctgcgacatgtcaggaggagcagcatgctctcctccctagaaggacggggggctgtgggtggggctctggcacaggccacatgcccagcttgctgagctctggccccctgcctcagttcttccctgagcatacccaggcagttgggctaattctctgggtggtgggccgaagctccagagaactgtggtgggtggaatgctctcagcttggtcccaagatttatgttcttggtcacttgccctcctagatgggcccagcaacacctaatctttctcaccacctgggcctttatgaaactacagcaagcactatgagctcttttg

SEQ ID NO: 514260 - DNA, 613 bp, Homo sapiens
gatgtgttggctcacacctgtaatcccaacacttttggaggccaagaagggaagatcccctgaggccaggatttcaagaccagcctgggaaacatagagagactccatctttgcaaaaaaagttttaaaattagctgagcttggtgatatgcacctgtggtcccagctacctgggaggctgagatgggaggatcacttgaacccaggaggtataggctgtagtgagctatgattgcaccactgcactccagactgggtaacagagcaagaccttgtctcaaaaaatgtatrtaaaaatacaaaataaaataaaatttttaaaaagtgggagtttctggaatgacttgagctccactccaaattgttcctctgtaatattcaagatgcatttccacaccattgcaccaaacaaaagctttctgaaggtggggactatgtctgtcttgcttatgactctattccagcaccaaaacggggcctggcacaccagggatggaagaatgagtgagtgaggaatgaaaaaaacaccactcctttattccagggagtggatggagcaggtgtggccattgccctcaccctctcccctccccacccactcaggtctggaggg

SEQ ID NO: 514261 - DNA, 493 bp, Homo sapiens
  misc_feature (1)...(493): n = A,T,C or G
ggcaggccaggtcaggatgagccccgctgatgtgtgcgccagtcctggarggtgggggtggcggtggctagtatctgggccctggggaaggcagcagcctcttgtctctaccagctcgcctaaaaggaaactccgtcattgtcctccctgcaagcagcaaggccaatggaatgtctgagtcaaaggccctccttgcagactcnggcaaagtggcgctgggtctgacagcagatgctgtccgcctgggatcttgagcacatgcagtttctgactggagtctggggtgggaattgccattgtgcgttaacaactcccaggtgacaccaacgctgctggcccggcttctccctgctccacctccacccagtccccatagcaagagtgtgggtctgctgcctggagtccatccacccatcttctcatctctggctttcctctgctgaacaaaaccttcccactcccagcacatggactctaggtgcagctgagcccc

SEQ ID NO: 514262 - DNA, 457 bp, Homo sapiens
gtgtttattgctgtatctgtgccatgtcgatttttgtggttgtttgctgtatgtcactattttggcaatagctatatattcccttttccttcttctctgtgctctggtctgaattaatgcctctttgtttcatctcatttcccattgcttttcactttattayaaaagcactgcaatttatacattgaagcagaaaagaagggtggaatccccataattccatacccttctgtgaatacactggtgtccagactgttggaatatattcatttattctctcttcatatgtacatttaaaagatgaatcaattcttttttttttaaaagcaaattgtttcatttaacaatacatggtaaatatacttggtgttagtgctgtcttcagggttccgtggagcgttttacagtcttctttttagcaccctcctaaagatgttgaaggaggtgggtgatgggg

SEQ ID NO: 514263 - DNA, 603 bp, Homo sapiens
aaaaatctttaaacagacgtcaacgttacaaacccaacaaaataaacccaaaggaagtagaagaacggcattaataaagataaaaacagattatagataagggacatgtagccgcaaaaaggattctgaaaatccccaaatatggactttatataaataaatttgaaaatctatatgaaatagaagattttgcaagaaaatgtaaactaaaactgacccaagagtaggtagaaaatctgactacataaacaactaaaagagactgagaagaacatctcagtgtacctcaaaaatgggtaacaggctctgtaactatataaacaggtgctgctaaagcctcaagtgaggactttttccaccttatatgaactattacagtgaataggagcaaagggaaagaaaagtctacaaggttagcataactccagtatcaagmcaagaatggaagtgggcaaaaggtttatcattctttgaacatagacacaaacattagcaaagcaacttcagtggtatcaaaataataacataccctaaccttgctgagattttccccaggaaagcaaagatggcccaatataatttataacattaccttattaaaag

SEQ ID NO: 514264 - DNA, 631 bp, Homo sapiens
ttcttgctccatggttggcatctgagacgtacctgccagggttccccagcaggatcaagctcagtggcccaaagtggaaatgaacttaccagtcatcctccagtggcctcctctctttctcactttcccactcccccaccagggtttctcgggatccactctcaaataaactacttgcccttgaatccttaattcagggggagtcaaaacaaagacgaccaatcagagacaaatattaaccataatgatgtctattactcagataggattgaaatcaactcagaagggcaggaatgtgtgaaatcttctccctttcccttctctgctgagtaattgactctcatgccctagagccttctctacccctctgtragcacgtggattcaaaactgaatgtccaagttcaaacccaactccccacaacccaacgttcccaagtcatctagggaaatttgcttcacctcttcaagtctccatttctccaatgttaagacaggagagtctcagacagttcacagcgaccaacccacccctactcggccaccacccacataacatcttactgggagatttctcccattgagttcaagttcatagctggagaatatggaaactgcacactcaccatgga

SEQ ID NO: 514265 - DNA, 648 bp, Homo sapiens
aaatatatctaatattttttactctacgggaaatgggagaaaaaaagacgagtatgtaaaaggttttacttcttaagtgtattactagagtaaagaccacaggaatgcatgcttgacaacataagggaaaaatgttttcaatcacattttaagacagcatagctgatgtagaagggtctagaaaagtcatgcagacaaggtcatgcagaaaattccagccttgactcttttggctgggtgatctggggcaagttgcttaatcttttaaagctcagtttcctctctgtgttttaggaataataaaagtactttccttaaagggtggttgttgagaattaaaagagaggatgtttagcatagtgtctggtacactgtcaaggtttaggaaatacagggataagcagaacatgctggtatgcatgaaggtarcatttacttaacacatgttcactgagtgtttactatgtatggggcattgtgatgaagtttgtaagaaacatcaagatgcacaaggcatcatctctgctattatacagcattcactactttagaaattgatcttcctgacagaagagattgggtttcgttctctgtattctcattgcttggcacagtcgctagcatataatatgtgcttagcaatatttt

SEQ ID NO: 514266 - DNA, 608 bp, Homo sapiens
gctgcagaagctacctggacctgcctcatgggacaaagggaagggckgcccacaggcaagccacgtctagagtgagcccagagagaccagggagagtctgggatccaatcagggatgacccttctttcagttgggtctggtgggttttcaaaatccagtctttccactggggccataccaaagctgcaggggaggtcaggcttcccagtcccaccagaaaccccccccgtgaagttgtcattgtctctcaagttgcatacactggccaggtaaaggcagcttctactcaccaggcaagtggccagctcaccttcagatttgccaaagcaatctgggtcctgccccatacttgctggcctggcaggcttttcaaaatgcaggtatctctggagctgttttgtggacaccaggagcattacttgacaagacctgtgctggccccagggtaccctgtgcacctgggtaaggctggaacacattgggaacagggacctaacatgcccactccagaacagcatgggacctggggaaatcgccatttgtttgctgtcctgccattgctgttctacacatccctggagattatgagcatcggttacagtgtggta

SEQ ID NO: 514267 - DNA, 605 bp, Homo sapiens
ttctaatctggtctttctgattctcaaactaacacacttaactattgtgataatgttttttaacactttkcagaagtttctggctagggtcccatgctttgcaaggggatcaaggaggaatgcatagggctgagggagaggctaagcaaaaacagcccttcaatgaatgtaataccacatttttcttaatatttaggagtttcaatatatcattgtgtgtgtgtgtctgtctgctgatgaagttactcatataaacttgtctctgaagttgtattaaagtaattataaaaattatggccatatcaaagggaaattaccagttcaacattgtttattacaacaatataaggcatgagttaagacttagggggaaacaattaacaagcataatctgaaacttaatattaggtccagccttgattatctgctcgatcttgggaagaaccttaatttctatgtgcttctatttcctaatgtgtaaaataagtgtaaaaagacaatagtaactaatacataggttttcagtgaggattcaataagcaaatgtctgtaaaagcacttgaaacatgctgtgttcagtaaatattagttaatgttaacactat

SEQ ID NO: 514268 - DNA, 175 bp, Homo sapiens
cagtgttgcatacacaatttcctcatgctgagccagcttgaaataagacttgataaaaggcacggccctcagtagcaggcggtgccactgtggacagtgtacactatggtgtgagggtatgcacaggtgagtgtamgtgtgtttactcatacacacagataaactgaaaggacac

SEQ ID NO: 514269 - DNA, 462 bp, Homo sapiens
tggagtcatcacagcccaggtctttattgaaaggcagtgttgacccagaaggctcatgtagaacccatttggccaggtgtggaccawctctctccatctgacttgacttggctacacagagggacccagtcccaaaaagcccagacccaagaggaaaccaaatgacatttaccattacaccagctttcattaattttttccataacatcataagaactgtattgctaagtatgcttataaatgctatttacagtctgttcccttttattagatgaaagattaataaagaacaaaaaattgcctgtagtaaaaccgtgcctgaggcaagagtggtggctcatgcctgtaatcccagcactttgggaggccacgatgtgcaaatcacctgaggtcaggagttcaagaccagcctggacaacatggcgaaaccccagctccacaaaatacaaaaaaaaaaaaaaa

SEQ ID NO: 514270 - DNA, 502 bp, Homo sapiens
tttagtgacagaatagaaagcattgaattgttgttttaaatacactaaaaaattgttattgaattaattatatggcttgaatttataaaataccactcaaggcaacaaaaaattaagtaatacttctagtttctaataaaatttatttttaattattccccatttgtttataaaaatattccctccattatgcactctcattataattttattgcctctcagtttagaaaatggtttgattctttttcttgacatccccaatacatacatttattacagtgaaactaccgaggcatcacagtggaattttctatttcttttattctccatctcgcttctcttgctacatacacacacacacacacacacacasagagagagagacacacatacactttcactctttcactcaactaaaaacagaaacaatcagaaacaataatttttttggaaaaataaaaaaaataagatgagaccaaggtttatttttttctccttaatt

SEQ ID NO: 514271 - DNA, 502 bp, Homo sapiens
tttagtgacagaatagaaagcattgaattgttgttttaaatacactaaaaaattgttattgaattaattatatggcttgaatttataaaataccactcaaggcaacaaaaaattaagtaatacttctagtttctaataaaatttatttttaattattccccatttgtttataaaaatattccctccattatgcactctcattataattttattgcctctcagtttagaaaatggtttgattctttttcttgacatccccaatacatacatttattacagtgaaactaccgaggcatcacagtggaattttctatttcttttattctccatctcgcttctcttgctacatacacacacacacacacacacacacagagagagagacacacatacactttcactctttcactcaactaaaaacagaaacaatsagaaacaataatttttttggaaaaataaaaaaaataagatgagaccaaggtttatttttttctccttaatt

SEQ ID NO: 514272 - DNA, 264 bp, Homo sapiens
cccacgtcaaagctggctatggaacagccagagagtgytcatgagcatccttggcaccagagtggacaatcagacctcagagaatgtgcgcttcccagctaaattccgcagtatcttttgcttcccccagctcagaagaaaataggtccatgcttataaactaggaaggactaaaatgggcttaactttctctctgggtttgaacttgtgtcatgggtaagaagaaactcaagtgtcctgtgtactctccaacatcaaaggtca

SEQ ID NO: 514273 - DNA, 355 bp, Homo sapiens
taggtgtgaacccgtttgtgaaccgcaagcctcacacctggagctgtccgtcgcagggacttcccacagcttaatttcaccttctccagcctcccctccccttgaggtcatctccccaagcacccctgccacaccatgctctgtcctgtggggcaccmaactgtttccgggccccaggtcatgtatcagaagcccggagttccatctttaatagatcattgcaatccaggctcttgcatgccccacttcccgttttttttttttttttttttttttttttttttttttttgcaacatgccccagttccctgctacccagacacaccatctctgagctggcttcaggatcctgcat

SEQ ID NO: 514274 - DNA, 355 bp, Homo sapiens
taggtgtgaacccgtttgtgaaccgcaagcctcacacctggagctgtccgtcgcagggacttcccacagcttaatttcaccttctccagcctcccctccccttgaggtcatctccccaagcacccctgccacaccatgctctgtcctgtggggcaccaaamtgtttccgggccccaggtcatgtatcagaagcccggagttccatctttaatagatcattgcaatccaggctcttgcatgccccacttcccgttttttttttttttttttttttttttttttttttttttgcaacatgccccagttccctgctacccagacacaccatctctgagctggcttcaggatcctgcat

SEQ ID NO: 514275 - DNA, 412 bp, Homo sapiens
gtttgtgaaccgcaagcctcacacctggagctgtccgtcgcagggacttcccacagcttaatttcaccttctccagcctcccctccccttgaggtcatctccccaagcacccctgccacaccatgctctgtcctgtggggcaccaaactgtttccgggccccaggtcatgtatcagaagcccggagttccatctttaatagatcattgcmatccaggctcttgcatgccccacttcccgttttttttttttttttttttttttttttttttttttttgcaacatgccccagttccctgctacccagacacaccatctctgagctggcttcaggatcctgcatgcccctcggctaggcacatggctctgtgctgcccttcggagacacacttcctctctctgtccactgccag

SEQ ID NO: 514276 - DNA, 355 bp, Homo sapiens
taggtgtgaacccgtttgtgaaccgcaagcctcacacctggagctgtccgtcgcagggacttcccacagcttaatttcaccttctccagcctcccctccccttgaggtcatctccccaagcacccctgccacaccatgctctgtcctgtggggcaccaaactgtttccgggccccaggtcatgtatcagaagcccggagttccatctttaatagatcattgcaatccaggctcttgcatgccccacttcccgttttttttttttttttttttttttttttttttttttttgcaacatgccccagttccctgctacccagacacaccatytctgagctggcttcaggatcctgcat

SEQ ID NO: 514277 - DNA, 355 bp, Homo sapiens
taggtgtgaacccgtttgtgaaccgcaagcctcacacctggagctgtccgtcgcagggacttcccacagcttaatttcaccttctccagcctcccctccccttgaggtcatctccccaagcacccctgccacaccatgctctgtcctgtggggcaccaaactgtttccgggccccaggtcatgtatcagaagcccggagttccatctttaatagatcattgcaatccaggctcttgcatgccccacttcccgttttttttttttttttttttttttttttttttttttttgcaacatgccccagttccctgctacccagacacaccatctytgagctggcttcaggatcctgcat

SEQ ID NO: 514278 - DNA, 521 bp, Homo sapiens
tttacagcaattaggcagagtaatttcatatctgttgaatctaacaaaaaatgggatttgtgttttgtcttcatttcatttttctaggaccatacttattttacaagaggaacagttttcaatggaatggatattaaaacacacacctggatccctttaccacaggtgctttgagaggcaccatcaaggacagtgagctaaygcaggtaactcaggtaacagggcggtgagctaatgcaggtaacacaggtgacagagtcatgggctaatacaggtaacacagggtagtgagttaactcaagtaatatagctaagccaggtaacccagcttacacagccaacacctggcagtgggctaacacagttaactcaggtgctcacctcgggcacatccccaaggcccctcgtgaggtggtctgatggctgtctacatgtgcccctggacatctgtatcctgatgcaggggagcctggcaggagaggggaccctcagactctccctcagccacacagggcagacat

SEQ ID NO: 514279 - DNA, 493 bp, Homo sapiens
cactcttcctccagaggagctggagagtaaaagtcagtgacttgggcagtcaaccctstctttttgctcaagcaccaatcagaacccgggacagcaagactcaggtgactgtccctggttgtcaataccccacaagcattgtaacataccattcccagcagaagctgacattgtccatactccaccataaggacaactagaagctccacgtctggaaagctctcaactccgctctgcatctcccccttggccgatggtaatctgtatactttcactcaaataaaccataaccatgagtataacagttttcagtgagttctgtaagaactcacctagcaaattatcaaacctgagggtgaccttaagaacctataaattctgcagatggtgcagaaagctgccttgtggactgcctccaactttgcaaacacaggaaaggaatcagcctgcacatgaagcccctgcagtactgggccagcctccctgctctgcg

SEQ ID NO: 514280 - DNA, 603 bp, Homo sapiens
catcagattaaaattagagtttaaaccatagaaaattttaaagaaatagtcatgtcaacaactcctctccaacccagaactatagacatacccacttcccactgtgagtgaaggtaaggggtgatatgagattgcaaaaaaaaaaaaaaaaaaaaaaaaaaaaaccagactgaagaacccagaagaaaaaaatggctgaaatacagggaacataacaagaaaagaagaaacactgcctagtctaggaatggacgtcaccgcatacttttcagccaagcccagcacagtcccagaatcgttctcaacacagcmccccagttgctacaaatagatagatcccgaaattccttcaccactccaaaattaaattaaccatgaacagcacatggactgtggacccatggcataaaaggccagagtgagctccattagttcatgcctgacactgtgctaggtacatttaagtacattgtttagcatcctcagactgacgctccttttgtaatgaggaaagcaagatatagagggggaatctgacaagtcaatgtcacaccactcaagctttactggtacgtagctacactcatcatttctatattgttc

SEQ ID NO: 514281 - DNA, 603 bp, Homo sapiens
catcagattaaaattagagtttaaaccatagaaaattttaaagaaatagtcatgtcaacaactcctctccaacccagaactatagacatacccacttcccactgtgagtgaaggtaaggggtgatatgagattgcaaaaaaaaaaaaaaaaaaaaaaaaaaaaaccagactgaagaacccagaagaaaaaaatggctgaaatacagggaacataacaagaaaagaagaaacactgcctagtctaggaatggacgtcaccgcatacttttcagccaagcccagcacagtcccagaatcgttctcaacacagccccccagttgctacaaatagatagatcmcgaaattccttcaccactccaaaattaaattaaccatgaacagcacatggactgtggacccatggcataaaaggccagagtgagctccattagttcatgcctgacactgtgctaggtacatttaagtacattgtttagcatcctcagactgacgctccttttgtaatgaggaaagcaagatatagagggggaatctgacaagtcaatgtcacaccactcaagctttactggtacgtagctacactcatcatttctatattgttc

SEQ ID NO: 514282 - DNA, 503 bp, Homo sapiens
tgccttctctccttgagtcattttagtgttttattcaacaaatacttttgagtacattatttgctgagacactgtggtagatgtaaagacaggaaatcataataaagttatagaatcatgttttatcctttgtgattcttgaaagcatacaatttcaccatgaaaatttcataattttatacattttataaaattggttttcaaaattatcttttcattctcaagctatgtcaaagcttagataatttgcaactatgctaaatttcacaaagcacacagtaattatggagtcattttgataggcacagtccacatactaacaaatgttagttgcttataacacgcctacccatgactttttactataccatcaacatactccagcatcaaattcacatactctaccttcaaagatgtgtatgcrtgcatgcatgttgatatggtttgtgtccccacccaactcttatcttgacttgtagctcccataattcccatgtgttgta

SEQ ID NO: 514283 - DNA, 468 bp, Homo sapiens
ttagttgcttgccagttgtttgatcctaggcaatatattaaaatgtctaattatcagttatgtcttcagtgacaattctgaaggaggatattctacatcatagttctaataagaggataaaatagtatgttggccataacaccccaactgtaagcaaaaatgrtcattatagttcactattttattaatattatacttagaaatttccgtgtatacacaatcaatgaataaaccatcagttaatcttatctacagtagccccccccatcccccggcttatctttaggggatacattccaagactcccagtggatggttgaaaccatgaatagtaactgaggcttaaatataataagtttttttctatacatacacacctatgataaagcaaaattagagaaactaagaaactaataacaataactaataatatagaaaattataacaatatgccaaaatcattagtct

SEQ ID NO: 514284 - DNA, 540 bp, Homo sapiens
tttgtcactcagtactaggcaactgctaaaagcatttggatttttttttttccctgaggagcaagtttctggctacaccaaacccagactgttagccagaactggcaaatatctccagagatgagagtcaaaaatagtacaccagataagttaattgtgttatagtcttacaatgaaatattatatagcagtaagaatgatagaatcattgcttctagcaacaacatggatgtatcttacaacgtcaagtgaaaaaagccagacacaaaatattcatgttctatgattccatttatatgcyttttgaaatcagacatggtaatttattgtctagaaatcaggacaatgattactttggaagggtgagtagtgactggtacaggaaggagggagtttcagagtcctgataatgttctatttcttgatctagcatgccagttacataaacatgttcaatttttgaaaattcattgagctgaacacttatgaattttatacatttctgtacacaattttacttaaacaactttacatttaaaa

SEQ ID NO: 514285 - DNA, 619 bp, Homo sapiens
ctgtggacaaaaactatttcccagtccagatgccaatacactggtatactgagttatttaccaagtttctcttgactctgggaaatggaaagcatcttatcratgtgttcttgagtgatcatggagaacatacattgtaacaagatgttgataattattgtcagcatgagtcatagccatcattagtagaattacctctcattatcctttgactggcctcaccttataatgtaacagcccattattgatttaggacaggtttatgtgcagaataaacccttctgacgtgaaagagttaaagtacccttgaaaagtgaatttatatgatatcagatgtgggctcgtaaaagttttttaaaaattaaattttaaaaaagaaaaatgaaaatgaatttattacattacctaatcaatgaaaattcaacattgatattactgctacaagaaaaaattaatgacagtaacttgacacagttaatactttaaagttttagtgtattaaaacaactttcgcgccactgcactccagcctgggtgacagagcgagactcagtctcaaaaaataaaataaaataataaaataaaatgaaataacttttatgggaaatcctctgagtgg

SEQ ID NO: 514286 - DNA, 595 bp, Homo sapiens
aaatgccaagatttctccaggtggaattgcttttacagttctaggatgaagtgtaaaaataagacacagcgctgccatctcttcacctggcctgttctctgttgttctcttccaatgtgtttcagtgtgcaagggtccagtcccatgagataattctaagactatctcttttcctcaagaacacatgaaagtaattttaaatgtaaatacttgcaatttaaatcacttaagaatactttgtttcttgaagtttaccttaaatagatttgtgtgtttaaagtttttagattatggtaaaaaaggtacagaagtctagattctagttcataataattttcattcctcatgtttcctgaatgtctaccctgtgctgggcatggtaccacaagctgcagagccagtagagaacaggatagaaaagttgcctgccctcgtgaaacctactttctagtggacttagggcaaatccctgtaaacagaagcaaaagtcacagaagataagtgaataggttgctgaggaaggtggaggttcatatgaagggaacatatttcttgtccatgaggctgtgkgttgtctatagattagctctatctt

SEQ ID NO: 514287 - DNA, 534 bp, Homo sapiens
gatgctgataagagcacactattctactccccgacccctgccaaaatatccacatgcccattagcagtggaatgaataagtaaattatggcatacacacataatgaaataggatacagcaatgaaaatgaacaaacttcaattacaggtaacaacatgggtgactctcataaacaatgttgaatgaaagaagcaagacacaaagagtacatgccgaataattccattgatacaaagtgcaaaaataagcaaaattacactatggtgttagaaaacaggaaagtggttattcttctgcagagtggtgactggtgggagcatgggggcacctgggtcatgtctgtattttcatctggatattggttatrtcatacacatataaaatcatttttaaagacatatcatttttataaatcatatacaaacaggctgggcacagttgctcacacctgtaatcccagcactttgggaggccgaggcgggtggatcacttgaggtcagaattttgagaccactctggccaacatggtgaaac

SEQ ID NO: 514288 - DNA, 596 bp, Homo sapiens
atgaagatataggctatgtctaaattcttggacatcctaaacagattctgaatgactatggcatttgcgtgcaaataaatattactgtgggactgtgttcattacctattctgcggtagttatggcaaaaaatcagatcaagtcttagaaagtcccaagaaaccaagtctgattacccaggggatatacttcacggatgtctgcgccctagcagttgcgccatttcsgctctcattggaactttctttcagttctaggaatcgtgagtggcatcattatcacgtcgctatttggccttctctgaaaataaagtgagacctctgaattccttggtttattgtgttatgctatagatttcaaagacattataatgtagaaatgttgtcttttataaattgccaaaatttggttagtagcatagagtaattcctgtgtatttacatcacagattagataatgttgcacctggttaaagcaggatgtgaacttaatcttttgggaagctatttcagcagttttaacttaatctgttatgcttaagggatacactaagtagagacctagtctagggcttcactgtggcactcaataaatgc

SEQ ID NO: 514289 - DNA, 386 bp, Homo sapiens
gtagcacagtaatttaagcatgcagataatttgtagcttctttactttgtagttgatctggtcttccaatgcccatcacccactgcttagaagaatgaaacaaaaacaatgcccaatccaatctaaagttctatccaatattttaaataattcttttagatagcaataaacttcgcttgcataaaatactatctcttatctasgctctggctccccgaagaaagccagatatatgaggagagaagtgtatggcttgtagaatctgaagacatatgggaagacagactctttggatccacaatgaatgtgctacactcactgtctcctttctaggctgggaaggtcccctttttgtttggttgctaacgtaggctgctggtactttt

SEQ ID NO: 514290 - DNA, 386 bp, Homo sapiens
gtagcacagtaatttaagcatgcagataatttgtagcttctttactttgtagttgatctggtcttccaatgcccatcacccactgcttagaagaatgaaacaaaaacaatgcccaatccaatctaaagttctatccaatattttaaataattcttttagatagcaataaacttcgcttgcataaaatactatctcttatctacsctctggctccccgaagaaagccagatatatgaggagagaagtgtatggcttgtagaatctgaagacatatgggaagacagactctttggatccacaatgaatgtgctacactcactgtctcctttctaggctgggaaggtcccctttttgtttggttgctaacgtaggctgctggtactttt

SEQ ID NO: 514291 - DNA, 664 bp, Homo sapiens
cggttctctgaccctgaggcagagggcaaagagtaggtacaaggaagtgtaggggaatttatctcaaacaggcttgtttacttatgttgtccagaaaccaacctttgatcatctgcgtgcatgactgctccctaaaatgggaaacaataatgttaattacctgcagattgtgtttgctccaggcttttggcattttgtctatgctgaatgaaagcaagcagctccagcttatcaagactgctcactcttgggctgctagtgccaggcagtcmcctagctgctcttacactgcatacctgtgtctgagtactcctttcatccattgctgggccagggtctgtgggacagacctggcagttaaagctaacatttttaagtttggaattaagaggattcaatcttagctccttagctgcctaacaaactttctgattctagccactctatcccttcctcaaaattcctggcacatagtagacacccatatatttatttgttcacatgtagtagacacccatatatttgctggttccttagaaggaagacaccaaataaatacatcggtgtctactacatgccaggaatttttgtttcacctggaatgcccctaatgcttttgtttctaatcagtctcaaatttagttatcccataaaactgttccaa

SEQ ID NO: 514292 - DNA, 611 bp, Homo sapiens
ctttcaagtaaattggcatcttcatgtgttctagaatgctagtcaatcaagaatcttaaatcatgaagagttcatgtttgtatagtgcttattttgtgccaagcactaatctacatactttacatctattacatttaaatatcacaacttcttgaaatagataccattataatccctatttttcaaatgaggaaactggagcacagggatgcyatatgatctgcccaaggtaacacagtaagccgtagagctgggactcaaactcaagacaacactggtttcagaacccatgctctaaaccaataatccttattatgagttccttccagttttaaaatttctacacattatttggccaaccccatcatttgactgaagagaaaccaaggaggagagagattcagtgaactgctgaaagttgcataaagcagagtttttcaaaatttagtgtgcatataaatcacgcagagatccttaaaaatgcagattcttattgaataggtataggatgaaggctgagattctacatttcaaacaagctcccatgatactgattttaaaaaccacgttccacaccttaagtagcaagaacaaagggaaatgctagctga

SEQ ID NO: 514293 - DNA, 462 bp, Homo sapiens
tttccacacagcaaaactaatttgagagtttatagctgcctgtttgctcaatgcaaaaattcaattacatgtgtagaataatgaatctttgcttaatagtacattttactgaactcattattttttctactatgaattttgatataaacataagtttaaaaattctattttatttaatttaaagcttaaaggtaaactgataatgacagcctgtagctggagctccagctgtggaggaaattcttggcagctaccaacagtggccttcaatcttcaggattagacccataagtaactccatctttgtcactgacacttgcttatggtggactaawctggtacccaaaggaagcagaaatgcctgtgtcacccgccccagcagacagatgcctccccttgctctttattttgtgatgataacatacgtagaaaatataatatgatttttctatttcaagagca

SEQ ID NO: 514294 - DNA, 497 bp, Homo sapiens
ctgcagtattctacctgcaaagtaactacaataaaagaagacagagaggccccatttccccatgagatatcttggtgtacaactactttattaactggctttaatgtgcacattggttccccgaaaataaacatctatttcaggtttggagatgtgatgtgctccccttcaggttctgactgacaaagccaactggaaaatggggcctcactgactcaggctctaattctggagagtttcactgttgttggaataaaaatcatcagagaataaaagtcaaatgcaaaaatattctttgacactctagagcaatcctagaggttaytggaggtagtaatgttgtatatgcttcttaggacccataatgaaaatatgtgcctaagagtttatgtattttacattaattgatcaaagtgtcataatccaaatatatctttctaagttttcataatatttttaagatttcaagtaattcaaatgttaagatttctctttga

SEQ ID NO: 514295 - DNA, 499 bp, Homo sapiens
atagttggagtttcataagtgtaggtactttaggaaatattacttctctgagcctgtgtttcctcatctgtttaatgaagagattgaattaaatgatccccaagatcttttccaattctggaattctgtcatctaatgaaatgtgtgtaattagaatacatgccttttattttatttgcctgattaaaagttaggacttaagtaaccaggagagagaaaataaataatgaacttaaataatgttcatttttgggatgaatgaacattggaatgtcctttttgggaaaattggatatccataataactccaatttctgaccttctgatggaccaaaagaaactcrgggcctggcattcactatgcacctttcccacaaagtccttgagttcctcatctgtgtgcttcagaggtaaaaaacactgaactgggagtcagtatacctgggttctaattatagagctgtcatctactggtgactttgaagatctgctcattagg

SEQ ID NO: 514296 - DNA, 408 bp, Homo sapiens
aggccactcggtgatcattgataatccattttgaaaagtctgtacaatctattagaacagaaattcctttggccaggcatggcatcgcacacctgtaatcccaacactttggaaggccaaggtggtgaattgcttgagccttaggagtttgaggccaacctgggcaacatagcaagaccccatctcaacaacaacaaaaaagaaattattttattttcttcttttttgacctgaagcatttatgtaatgttggtaytgttcttatctatgaagactgggtattgggaaagtcatgcaaaaacccaggagaaccctttggtgccaaatgttgagagtataggggtccatcagggactaaatgtgagctaaaagtcacaaggttccaggcaacaggaagatagagcacca

SEQ ID NO: 514297 - DNA, 506 bp, Homo sapiens
agtcccagctactagggaggctgaggtgggaggatcacttgagcctgggagactgaagctgcagtgagctgtgatttgccactgcactccagcctgggtgacagagcaagaccctgtctcaaaaacaaaacaaaacaagacaatacaaaacgctatctattcagacccttatagaataaagcacagtttgaaggaattaatttctaacagcctgggggaaaacagaaaggggaagagtgggtgatggtgaagtgaggttctgtcttagtttggagcaggagagtgcaaaacaagcagaaacctggagctgcagaacacagaggtgcacagactctttccatatcacrgtgtttggtcccctcctctctcctaaagcctctgctgactcctttgttgcccactcagggggcagtatcactcatcaaacactgtgctaggccctgaggatttgaagttgaataaggctgtatcttcaatctctaaatcttcaggtgcccagtctacca

SEQ ID NO: 514298 - DNA, 521 bp, Homo sapiens
agaaatatcacatctaaaaaacaagaacaagctgttatacacaagaaataaccatcagtctggaaaatatatatgactgattaaaaaaatcagtaaaatagctaaataacaccagctatatgtctgaagacttaatacagatcaagcatggtgtggggaaatcatataaatagtaattgaaggggcttattgatacatatgtgccaaattcctctgttaaaagacaatgagagaattctggtatagtgacagtgtcataaaactctgactttccacctttttcctagaaaacatttaaaagcagtgaagatgatgtaaaataaaaacacaaatttaattagtgctgaaactaggaaacatttaaaattccaaactctaaatgcacaaaactgccaaaagccagtggaaattgmaaaagaagttctgtaaaagcaatcaggagaagacattgtggctgatgattcttggagggcaggtgtatacccgagatgcaacatcaaaattatcatttacaataacaa

SEQ ID NO: 514299 - DNA, 528 bp, Homo sapiens
agagacctctgtaatattgtattttggccttgacccagtagcttgacccattagctaaggcctttgagccatgactgttgcctttgagccatggctagaactgcaaagcatgtccaaaataccactgatgtggtattaggtcaaccaaatgacacacatgttcsccttgctatacaggcccttcttgcttaatgaaaacacatagcacttttctgcatcttgacttacctcatgaaagctcactacactctccctctcaaatcaccgtatatcatcatcaaaaccctaaccttgccaaccttgctttctttgccctttgatgggatgccaccatgaacgtgtcattaacactagatcttgtcctgggctagatttatcggagagcccctccgccaagttgacctcaacctttgtgtctatggctccctctttagagggagaatggaaccttctggaatggatatgtcatcacttatcaacacaaacctcttgaatatcaagccctgacaaatgttaaatcagccaggg

SEQ ID NO: 514300 - DNA, 528 bp, Homo sapiens
agagacctctgtaatattgtattttggccttgacccagtagcttgacccattagctaaggcctttgagccatgactgttgcctttgagccatggctagaactgcaaagcatgtccaaaataccactgatgtggtattaggtcaaccaaatgacacacatgttcgccttgctatacaggcccttcttgcttaatgaaaacacatagcacttttctgcatcttgacttacctcatgaaagctcaytacactctccctctcaaatcaccgtatatcatcatcaaaaccctaaccttgccaaccttgctttctttgccctttgatgggatgccaccatgaacgtgtcattaacactagatcttgtcctgggctagatttatcggagagcccctccgccaagttgacctcaacctttgtgtctatggctccctctttagagggagaatggaaccttctggaatggatatgtcatcacttatcaacacaaacctcttgaatatcaagccctgacaaatgttaaatcagccaggg

SEQ ID NO: 514301 - DNA, 528 bp, Homo sapiens
agagacctctgtaatattgtattttggccttgacccagtagcttgacccattagctaaggcctttgagccatgactgttgcctttgagccatggctagaactgcaaagcatgtccaaaataccactgatgtggtattaggtcaaccaaatgacacacatgttcgccttgctatacaggcccttcttgcttaatgaaaacacatagcacttttctgcatcttgacttacctcatgaaagctcactacactctccytctcaaatcaccgtatatcatcatcaaaaccctaaccttgccaaccttgctttctttgccctttgatgggatgccaccatgaacgtgtcattaacactagatcttgtcctgggctagatttatcggagagcccctccgccaagttgacctcaacctttgtgtctatggctccctctttagagggagaatggaaccttctggaatggatatgtcatcacttatcaacacaaacctcttgaatatcaagccctgacaaatgttaaatcagccaggg

SEQ ID NO: 514302 - DNA, 528 bp, Homo sapiens
agagacctctgtaatattgtattttggccttgacccagtagcttgacccattagctaaggcctttgagccatgactgttgcctttgagccatggctagaactgcaaagcatgtccaaaataccactgatgtggtattaggtcaaccaaatgacacacatgttcgccttgctatacaggcccttcttgcttaatgaaaacacatagcacttttctgcatcttgacttacctcatgaaagctcactacactctccctctcaaatcaccrtatatcatcatcaaaaccctaaccttgccaaccttgctttctttgccctttgatgggatgccaccatgaacgtgtcattaacactagatcttgtcctgggctagatttatcggagagcccctccgccaagttgacctcaacctttgtgtctatggctccctctttagagggagaatggaaccttctggaatggatatgtcatcacttatcaacacaaacctcttgaatatcaagccctgacaaatgttaaatcagccaggg

SEQ ID NO: 514303 - DNA, 626 bp, Homo sapiens
ggggtttgcactgggggactcttgggacaatttaataatgtaatcttgtggcttctactgctgaagtatatttggcattggcaaaaccctgcccctgtctctcttggacctggctggataccactttcaccaatccacaaagccaccctcctgctgtgacagctagcaagaggccaagacccacagaaccatcaccactgcccctttgtcagcaggaaacagttatggaagactgacctttatccatttccccaaagaatctgggtcttggactcttgagggggaaaatgttacaacaggtcagtcagtcatgagcagggaaagagaggctcctgcccaacctgacagacacatatcaggaatgtcaggtgaccatcaagtgatggtcaggtggttgttaaccatctctctaaaataattggtcacagccagcsccagggaaaggcagtctcctaatatatagaaaacacctgaaactggtgatccgcaacttccctataagatctccgaaattggtcgagtggactcaagcatgcgcaggcagacagcccagcccaagggaagaatcggggagaagtaacacaagaccctggaagtatgtcaacatataaaggctcaagtcaaaa

SEQ ID NO: 514304 - DNA, 488 bp, Homo sapiens
acttaagggagtgtggtaggaattaggacatgtaaaagtcgtactacataaatgccaatgccagtgcctttctctttcctaataaaaattacattgaatgctggaaaaatggaatgtaaacatatgttgcatttatgccaaattaatatatttcaaacatattkatcctgagaattatgagatatctattctgtagctctttttgtgcactgcctggcttggtgacccttcctgtgccccccagtgcccaggagattaatgatttaatccctccaggtgccccaatgtcctaagtacatatgtgtcattttatgttatcatatttctctttcttttttttttctttttttgagacagtgtctcactctgtcacccaggctggagtgcagtggtgcgatcatggctcactgcagctttgacctcctgggctccagctgtcctctcacatcagcctcccaagtagttaggaccacaggcatgcaccacca

SEQ ID NO: 514305 - DNA, 495 bp, Homo sapiens
tcttgggttacattgtgttcgatttctgttgtaggaggaaaaagggtgagagtcaataaagatacarttacttggaaatagctataattttttataatacttaccagtagattttatacttcttcttaaattaagacatttgggtggagaataaagcatatgcaatccatatacatatttacatatttgctgtcacatgattctggtatttttggtgtatcagttcacatgggtaacatttttaaaaattctttaaaattaatgagagaacattgagaattagtttcctcttatgtaggaacttttagttcttcactgagtgaaggatgaagaaagaattcctcagatcctgggtagtgaatacgttaaatgcatgtttgatgcaagtgtttgatgattaggataaatggccaagcttttttctagctctgaaggtctgctggatgtggctagttttcaagcctggaggtagtgtctgtggcttacctagtctgg

SEQ ID NO: 514306 - DNA, 636 bp, Homo sapiens
tagaaatatgattttcttcaacttttgttttaggttcagaggtacatgtgcaagaaatgtgatttttcaatacacgtaataggaaggtatttcaatttttgctctggcatggtttattacattttttattagtttagaagttgtttctacctttatacatctctattggaactgccatataaatttttgggattcttattcttacaaattattgtaacatgcaaaaattactattaagtttttttcatatttgagttataaaatctcaggatgtttcaagttttctggttcagtaatattaaatactcttttaattaacattatttattgtctagaaagggccctgtgcaagagaagaggccctgaagattaatcttcattaatttgcagcaaatccaatccagagtgacctgctgatgttggaagaactggctttatattctcctcatatttatcatctargccatccagcccctcgaattgccatttaaggatgatgcttggcacctaagccattgctcttagccttaagaaaggtatttaggactcaactgaaattgagactttaagtgatattatgtaataatatatgggatatgaataagatgattatgttagtttaaaaaactaaatcag

SEQ ID NO: 514307 - DNA, 598 bp, Homo sapiens
  misc_feature (1)...(598): n = A,T,C or G
ctgggaggccaaggcgggcagatcgcctgaggtctggagttcaagaccagcctgtccaacatggtgaaaccccgtctctactaaaaatacaaaagttagccaggtgtggtggtgggtgcctgtaattccagctactcaggaggctgaggcaggagaatcgcttgaacccgggaggtggaggttgcaatgagccgagatcacaccattgcacttcggcttgggcgacgagcaaaactccgtctcaaaaatactaactaactaaataataataatagctaatggttagagactgctgctgcacaggcgctgtgctgcatactcrggaggattaagccatttaattccctcagcaatctcatgagttagatcctgttatcattcccactctacagatgagggaactgaagcacagagagggaaagcgacttgccccaggtcacacagctaagaaatggcagggacaatatctggactcaggcaagattggggaagtaggagtgaaaccctccagtggcgtcttctaccttagctctgataccggggagcaccacctgtcctgccgagctgggcacaagcctngggtcctgggggtgttccc

SEQ ID NO: 514308 - DNA, 599 bp, Homo sapiens
gtaatgaacccatagtgactgtctccactacaatcatagatagtgcatgcatctggacgggtcacaggccactctagtgaatccttataattttgtgttacctcagcatccatttggaatacagatttaagtttctcataccagtagcagggctcagtcacacatgacacagtttttgagttctataccacacccaaaagcttcaagctagtgaccagagataagaacttagaggcacctctcctgtccagcagactgggcattccatttttcccactgcttcttttgaactgaccattcaggcatctgctcatgaacttaaagtatgccacactctatccccttatatatcccgcaagttgccaagtgcatgcgcatgccctctcaatctctctctstctctcactcgctctctctctccctctccacctgactgtttattcctgctttccatgacccaaggatggtgggctgccctcccaattcattgcagcctctctgcccaggatctgtaagtagaaatcgttgaacttgtttcctattatgatggtgtattgaattgattgccttctatctgaagaaccaggggctgccccagg

SEQ ID NO: 514309 - DNA, 599 bp, Homo sapiens
gtaatgaacccatagtgactgtctccactacaatcatagatagtgcatgcatctggacgggtcacaggccactctagtgaatccttataattttgtgttacctcagcatccatttggaatacagatttaagtttctcataccagtagcagggctcagtcacacatgacacagtttttgagttctataccacacccaaaagcttcaagctagtgaccagagataagaacttagaggcacctctcctgtccagcagactgggcattccatttttcccactgcttcttttgaactgaccattcaggcatctgctcatgaacttaaagtatgccacactctatccccttatatatcccgcaagttgccaagtgcatgcgcatgccctctcaatctctctctgtctctcactcrctctctctctccctctccacctgactgtttattcctgctttccatgacccaaggatggtgggctgccctcccaattcattgcagcctctctgcccaggatctgtaagtagaaatcgttgaacttgtttcctattatgatggtgtattgaattgattgccttctatctgaagaaccaggggctgccccagg

SEQ ID NO: 514310 - DNA, 626 bp, Homo sapiens
tgctcaagtttcgcctcccccagtcacagagctggtttctctgcttttgtaagataatgagtatctcatgctttgaatgtggcacaatccagagaagaagtcaaactgaactgctgctacctttgtasccccccgtagttttaacagaagcacgtgcttcagagctggcagcaactgcatttttataaatccaaaaagtataagcaacatggatgcatcatttaaaaaatctattttgtaaatgtaggatgctggctttatagttaattgtaccacaggaagatttttccccctttcacatgctttctctctgtattctaaaattctctggccccttcggtttcagcaaattgagtcatttcaaggtttgagaagtatcctcatttgggtattactaatcttcaatgattattttcatgacttcatattgttcatacatttctcagaaaagattttagtctttaccgtcgcaatttaaaatataagcataaaatatttatattttaaattccctatatatggaataaaaatacataaatatatatatacatcccactgttaggctgtgtgacgtttgccatgtgtataatggaaattaaattgagaaggaatgtaatagcttccac

SEQ ID NO: 514311 - DNA, 626 bp, Homo sapiens
tgctcaagtttcgcctcccccagtcacagagctggtttctctgcttttgtaagataatgagtatctcatgctttgaatgtggcacaatccagagaagaagtcaaactgaactgctgctacctttgtagccccccgtagttttaacagaagcacgtgcttcagagctggcagcaactgcatktttataaatccaaaaagtataagcaacatggatgcatcatttaaaaaatctattttgtaaatgtaggatgctggctttatagttaattgtaccacaggaagatttttccccctttcacatgctttctctctgtattctaaaattctctggccccttcggtttcagcaaattgagtcatttcaaggtttgagaagtatcctcatttgggtattactaatcttcaatgattattttcatgacttcatattgttcatacatttctcagaaaagattttagtctttaccgtcgcaatttaaaatataagcataaaatatttatattttaaattccctatatatggaataaaaatacataaatatatatatacatcccactgttaggctgtgtgacgtttgccatgtgtataatggaaattaaattgagaaggaatgtaatagcttccac

SEQ ID NO: 514312 - DNA, 626 bp, Homo sapiens
tgctcaagtttcgcctcccccagtcacagagctggtttctctgcttttgtaagataatgagtatctcatgctttgaatgtggcacaatccagagaagaagtcaaactgaactgctgctacctttgtagccccccgtagttttaacagaagcacgtgcttcagagctggcagcaactgcatttttataaatccaaaaagtataagcaacatggatgcatcatttaaaaaatctattttgtaaatgtaggatgctggctttatagttaattgtaccacaggaagatttttccccctttcacatgctttctctctgtattctaaaattctctggccccttcggtttcagcaaattgagtcatttcaaggtttgaraagtatcctcatttgggtattactaatcttcaatgattattttcatgacttcatattgttcatacatttctcagaaaagattttagtctttaccgtcgcaatttaaaatataagcataaaatatttatattttaaattccctatatatggaataaaaatacataaatatatatatacatcccactgttaggctgtgtgacgtttgccatgtgtataatggaaattaaattgagaaggaatgtaatagcttccac

SEQ ID NO: 514313 - DNA, 626 bp, Homo sapiens
tgctcaagtttcgcctcccccagtcacagagctggtttctctgcttttgtaagataatgagtatctcatgctttgaatgtggcacaatccagagaagaagtcaaactgaactgctgctacctttgtagccccccgtagttttaacagaagcacgtgcttcagagctggcagcaactgcatttttataaatccaaaaagtataagcaacatggatgcatcatttaaaaaatctattttgtaaatgtaggatgctggctttatagttaattgtaccacaggaagatttttccccctttcacatgctttctctctgtattctaaaattctctggccccttcggtttcagcaaattgagtcatttcaaggtttgagaagtatcctcatttgggtattactaatcttcaatgattattttcatgacttcatattgttcatacatttctcagaaaagattttagtctttaccgtsgcaatttaaaatataagcataaaatatttatattttaaattccctatatatggaataaaaatacataaatatatatatacatcccactgttaggctgtgtgacgtttgccatgtgtataatggaaattaaattgagaaggaatgtaatagcttccac

SEQ ID NO: 514314 - DNA, 620 bp, Homo sapiens
cagatgcccttaggataagaggttcattttcatcttctgttttccaaatgaagctttaaatctaattagatcttgaaagaaaataactgcaatagggtttctgtaagtaaagggccctcatttaaataatgctgttatttgtttatgtgatttacagtaagtgatgaaactcttcgtggccagcacgccgctcacttcggggatcctttgcacagagcactttgagttagttataaaccattctacacacagaagcatttaattgttagaacatttcatagtgtaacagcatttctcattgcctagcatgggccttctccatatcgaaggcccaataaatatttgtagaataaaggaattcacacccatccattgcccagatcataattgagcggctcttctattaaagtttagccttttcatgttaatttaaagtggggaatttgaagggagaaatgcraatttcagactctaaaaaagacaagtcccgtatagaacgaggtcccagagactctaagacgtctgtgttgatagacgtagggctgcaggaattgagaagtggttgacgagggagagtctgtttcagacctgctgtttgcaggttgtatttgttccacagc

SEQ ID NO: 514315 - DNA, 571 bp, Homo sapiens
ctgctggccctggctgaaccgcgatgtggatggggcaccctgtgaagtgctctgagttcctggttcaaggttagggagatggtgaaaaaggctgagcacctgtcagtgcattaaaaccatcgaccatccccgaacggctttggaatgaaggcttcctactccttaggaattctgcccttgcttcatttcattttaattttttctcccacttggtgaacccartgacactcgcccagtggactcacgctctgaggggatttgtaaatatttgacagagttgaattgaagatcaaaaataaaacctagcactgctctccgattttctctgtgctccttgccttcgggggatagcatgataattaggacaaagggatatttgagattatgccttaaataaactggggcagaacttctttaagcttcaccaactatttttatctctgaggcagaaaacaccaatttcagtgctcagcttaacttgactttgacaccatgtaagaaaaataaagatgggagatgttcggctctgggggcctccaggcccagtcagaggaaaggacttaagtgttgc

SEQ ID NO: 514316 - DNA, 571 bp, Homo sapiens
ctgctggccctggctgaaccgcgatgtggatggggcaccctgtgaagtgctctgagttcctggttcaaggttagggagatggtgaaaaaggctgagcacctgtcagtgcattaaaaccatcgaccatccccgaacggctttggaatgaaggcttcctactccttaggaattctgcccttgcttcatttcattttaattttttctcccacttggtgaacccaatgacactcgcccagtggactcacgctctgaggggatttgtaaatatttgacagagttgaattgaagatcaaaaataaaacctagcactgctctccgattttctctgtgctccttgccttcgggggatagcrtgataattaggacaaagggatatttgagattatgccttaaataaactggggcagaacttctttaagcttcaccaactatttttatctctgaggcagaaaacaccaatttcagtgctcagcttaacttgactttgacaccatgtaagaaaaataaagatgggagatgttcggctctgggggcctccaggcccagtcagaggaaaggacttaagtgttgc

SEQ ID NO: 514317 - DNA, 561 bp, Homo sapiens
tcctcaccctggtctgatttcaaagtccctactccttccactcttttcacaatttcccgatcctcgcatgggccctgggcctggccttccattggctctcacatgccgctgccactggaggattttctgggagggtgcgtgtctgcattttattttgttggatgaagattacacgtgcaaggtattccagccttaatctgggaatgcaatacatgacctgggaatgcaataaacacacaaacacaacaaatgaaacaaaccttaacatgacctgggcatttctattcacatcgtggttgactaacatgaggcatgttagatggctgagtaattgtttttgttcttctttataatccatgctgaagaagaagtytgtctttagaaaatgtggctcagatagagatggaattcatttgcttcaattgtgtgaacatctgaaatcggcacctgtctaggtattaatgttccgagtttagaaggtgtttagctggctgtgtgtttgtatacacgtaaacccggtattgatttgaaatacacgtgcacatcagcaagtcgcggtgg

SEQ ID NO: 514318 - DNA, 602 bp, Homo sapiens
ctcaccctgagcatgccacagcctcccacatttgctccacggccgtgactgcggcaacgttcctagcagaccttgaacagacgaggcccagcagcatcctcrgaagaggagagggaagctcgcagcgcaggccccaggccacagccttagatgaccttctgtttgctctcgggacacgcagacgggccggagcgttggctgtgtccgcaccctagatcatctggttccgcttcttcattgtatggaaaaataagagaccaggagggttttgataatttaggcaaggtcataagccagtcagtcaaggcttgaagaagatccacgcttcctaattttttgactgtgctctctggcctactgtgatgtctttgtttaacacctccctgtgagggatagcctccttttatgaatggagaaatgaattaatgagtataatataaataaattaataaagcccttccaaattggacgatactggtaacgccaaagaatgtgcctactaatacataaaaattaaagaaagacaaatgcaacttgtgaacacagcatctcaaagacacggttttaactgagccccagctaaagagcttagctatctacaa

SEQ ID NO: 514319 - DNA, 670 bp, Homo sapiens
ggagccttctggcagagccctggaggcttccctccgggagggccttcatcaatacatggaccttccacaccattcagtccatgatttatgtttcccaggagcttggttgaaattaagaatttgattggtggtttactctaattagaaacccagttgtttgtgcagattgcttttttggttagtacactgtgacaagatgttggatcaatcaatgatatacttttgcatcttctaataagtaccttgtatctttgctcaaatagaagkagaagcatgacaattactctggttaaaaagaggaagccttcagcactctccgtccaaccccagaagctttcagagactccaaaatttgtagaaaaccagaaatttttccatggcatgttgagaaactagaattaggtgtctgaagaagagcttttttacaagagattaattctgaagatccagttattaatagataaaccaaaccaccaaggtgaagtttagatactttcaaattataatcgagctggagaaatgaaaagctttgtgatcatgaagaaacataatgtatgcattttccagcctaagagctggatttgggaatacactcagtcaaattagtaaggaattcaaaatccaccccaggtaatttcagcggcctgactgggcccagtgagaacttgtg

SEQ ID NO: 514320 - DNA, 642 bp, Homo sapiens
tgtggcatggggtgccatgaggaggtgggaagtgagcctgaaaaggcagttaagccacayggtgagagaggctgaatgacaggcagcgtgtcttgtctttgttaggtagtggtgctgtttccaatagcgagtcgtgtagaatggaaagtggaaagtctaacgtatgggtcttgttcttgtccctggcaccggcattcctatgggattccatgggaagacatcacagcacagtgggaaggcgtctgctatcgactggacctgagtcagaaccctgccagcccagctctggggtgccggaggagccatttcccttcgctcctaacttcagcctcctcatctgtgtacaagttctgcctttgcagggttattgtgatttctcctgtgtgttgtacgtttatgtagctaggattcagtgaagcagcttctgtgattgttactttagtgtacagtcagtggtgactgagtgaaaaagcaagtgaaaaacacatccctttcctttccaattctgaacgtcctagcgggtggcctcggtgctctttccagtgcttagctctgacattactgaaacacaaagcttcggggtgaagtcagatggaggaaactcacagcgtaggaacacagagtgtgaattccttctcaact

SEQ ID NO: 514321 - DNA, 642 bp, Homo sapiens
tgtggcatggggtgccatgaggaggtgggaagtgagcctgaaaaggcagttaagccacacggtgagagaggctgaatgacaggcagcgtgtcttgtctttgttaggtagtggtgctgtttccaatagcgagtcgtgtagaatggaaagtggaaagtctaacgtatgggtcttgttcttgtccctggcaccggcattcctatgggattccatgggaagacatcacagcacagtgggaaggcgtctgctatcgactggacctgagtcagaaccctgccagcccagctctggggtgccggaggagccatttcccttcgctcctaacttcagcctcctcatctgtgtacaagttctgcctttgcagggttattgtgatttctcctgtgtgttgtacgtttatgtagctaggattcagtgaagcagcttctgtgattgttactttagtgtacagtcagtggtgactgagtgaaaaagcaagtgaaaaacacatccctttcctttccaattctgaacgtcctagcgggtggcctcggtgctcttyccagtgcttagctctgacattactgaaacacaaagcttcggggtgaagtcagatggaggaaactcacagcgtaggaacacagagtgtgaattccttctcaact

SEQ ID NO: 514322 - DNA, 399 bp, Homo sapiens
tgatattaataactagaaacatataaatagactaatacaccatttaaaaggcagattatcgattgaattaaagagcaagatgaagtatatgttgtcttaagagatgtactttgaattcaaagacataataggtggaaagtctctgtatatatatatgcaactawtagaaaactgaaatagctacagtaacactagacaaagctacctcgagacaaagcatattaccaaagataaagaagaacatttcatgatgtattagtgtgttttcatactgctgtgaagaaatacctgagactgggtaatttataaaggaaacaggtttaattgactcacagttctgcatagctgtggaggcctcagcaaatctacaatcatggtggaaggcagctcttcacaggg

SEQ ID NO: 514323 - DNA, 553 bp, Homo sapiens
catgatggcgccactgcaccccagcctgggtaacacagtgagagagacgctgtctctaaaataaacaaaacaaatcccaaagccagagcactgggagtcacagagctgactgggggtgaggtggggggtgtcagactctcaggctccaagtggaagagctgagagggctgagaggcctgtgggaaggtgtggcccagggctgtgtttggttagtccagcaggatccttgggcaccacccccagtgtgcaccagggtgtggcccagcctccggcatgaaggcgccacgcactgtgagctattccttctacatgcacggcgaccgcagcctttggtcttgataagtagattatgttgattcacggccttggacttcaaattacaaaaccacggtctggcttgggatagttcaccagagagyggagagatagctggtcacaaggcagccatgcgtcatccctgcctcgatctcagggaactctgtccagtgggctctgcgtttgcctagcatgagagagggccatctttctgcttggccccagccgcatttaagaa

SEQ ID NO: 514324 - DNA, 589 bp, Homo sapiens
gcagttttgccacaacagtatactgagcaaaggagacagggtcatttataacctgaygcatccaccctactgctgtgtccagtttccagtggctggaacgggacctcacattctgtatttgtcccgattggctagcaatttagaacttttttaaagaggaaaaggcagaggagaacgaaggaaggaggaaataacttgtggaatgctgaaaaaagtaaaaacaccttcgaataaagaagaggaacaggcaatgacctaaagcttgcttggactagtataagcatgccagggcaaatatttaggctaaattgtgggagctaagaacataaagtacattgatttctttattagggctagcagatatttaagaatgttagcacaggtctttgaataaattttgcttctaagagaagttactatttatttctaatgagatgggaaggaaagtctttgaagaggaaactctactttttacagaagtaggaacttagacttacagtttgcacattgacaaacttgttttccttccgtacacgaggggtttatgatcctctgttgcaactgatttgtcttatgtaacttcaagagt

SEQ ID NO: 514325 - DNA, 589 bp, Homo sapiens
gcagttttgccacaacagtatactgagcaaaggagacagggtcatttataacctgatgcatccaccctactgctgtgtccagtttccagtggctggaacgggacctcacattctgtatttgtcccgattggctagcaayttagaacttttttaaagaggaaaaggcagaggagaacgaaggaaggaggaaataacttgtggaatgctgaaaaaagtaaaaacaccttcgaataaagaagaggaacaggcaatgacctaaagcttgcttggactagtataagcatgccagggcaaatatttaggctaaattgtgggagctaagaacataaagtacattgatttctttattagggctagcagatatttaagaatgttagcacaggtctttgaataaattttgcttctaagagaagttactatttatttctaatgagatgggaaggaaagtctttgaagaggaaactctactttttacagaagtaggaacttagacttacagtttgcacattgacaaacttgttttccttccgtacacgaggggtttatgatcctctgttgcaactgatttgtcttatgtaacttcaagagt

SEQ ID NO: 514326 - DNA, 589 bp, Homo sapiens
gcagttttgccacaacagtatactgagcaaaggagacagggtcatttataacctgatgcatccaccctactgctgtgtccagtttccagtggctggaacgggacctcacattctgtatttgtcccgattggctagcaatttagaacttttttaaagaggaaaaggcagaggagaacgaaggaaggaggaartaacttgtggaatgctgaaaaaagtaaaaacaccttcgaataaagaagaggaacaggcaatgacctaaagcttgcttggactagtataagcatgccagggcaaatatttaggctaaattgtgggagctaagaacataaagtacattgatttctttattagggctagcagatatttaagaatgttagcacaggtctttgaataaattttgcttctaagagaagttactatttatttctaatgagatgggaaggaaagtctttgaagaggaaactctactttttacagaagtaggaacttagacttacagtttgcacattgacaaacttgttttccttccgtacacgaggggtttatgatcctctgttgcaactgatttgtcttatgtaacttcaagagt

SEQ ID NO: 514327 - DNA, 589 bp, Homo sapiens
gcagttttgccacaacagtatactgagcaaaggagacagggtcatttataacctgatgcatccaccctactgctgtgtccagtttccagtggctggaacgggacctcacattctgtatttgtcccgattggctagcaatttagaacttttttaaagaggaaaaggcagaggagaacgaaggaaggaggaaataacttgtggaatgctgaaaaaagtaaaaacaccttcgaataaagaagaggaacaggcaatgacctaaagcttgcttggactagtataagcatgccagggcaaatatttaggctaaattgtgggagctaagaacataaagtacattgatttctttattagggctagcagatatttaagaatgttagcacrggtctttgaataaattttgcttctaagagaagttactatttatttctaatgagatgggaaggaaagtctttgaagaggaaactctactttttacagaagtaggaacttagacttacagtttgcacattgacaaacttgttttccttccgtacacgaggggtttatgatcctctgttgcaactgatttgtcttatgtaacttcaagagt

SEQ ID NO: 514328 - DNA, 591 bp, Homo sapiens
ttcctcctggctgcatctcccacctcccagcaaacaagctcttttggctcagctcccgcctgcgtttgtagaccccgaagtttctgcaaccaagctcttcagacccacatcccttctcccagtgactgaacagtcccagctccggctggagaagggygtctgcagaccccgctgttgcctcccaggggagtctccaggcccagctctcgccccaccgcgacctcccaggcccaagtccctgcctacctcccagcagcccgagtgcgatcctgttcctccctcacggtggcctgttgaggcagggggtcacgctgacctctgtccgcgtgggaggggccggtgtgaggcaagggctcacactgacctctctcagcgtgggaggggccggtgtgaggcaaggggctcacgctgacctctgtccgcgtgggaggggccggtgtgaggcaagggctcacactgacctctctcagcgtgggaggggccggggtgaggcaaggggctcacgctgacctctgtccgcgtgggaggggccggtgtgaggcaagggctcacactgacctctctcagcgtgggaggggccggggtgaggca

SEQ ID NO: 514329 - DNA, 537 bp, Homo sapiens
tgttcctcctggctgcatctcccacctcccagcaaacaagctcttttggctcagctcccgcctgcgtttgtagaccccgaagtttctgcaaccaagctcttcagacccacatcccttctcccagtgactgaacagtcccagctccggctggagaagggcgtctgcagaccccgctgttgcctcccaggggagtctccaggcccagctctcgccccaccgcgacctcccaggcccaagtccctgcctacctcccagcagcccgagtgcgatcctgttcctccctcacrgtggcctgttgaggcagggggtcacgctgacctctgtccgcgtgggaggggccggtgtgaggcaagggctcacactgacctctctcagcgtgggaggggccggtgtgaggcaaggggctcacgctgacctctgtccgcgtgggaggggccggtgtgaggcaagggctcacactgacctctctcagcgtgggaggggccggggtgaggcaaggggctcacgctgacctctgtccgcgtgggaggggccggt

SEQ ID NO: 514330 - DNA, 591 bp, Homo sapiens
ttcctcctggctgcatctcccacctcccagcaaacaagctcttttggctcagctcccgcctgcgtttgtagaccccgaagtttctgcaaccaagctcttcagacccacatcccttctcccagtgactgaacagtcccagctccggctggagaagggcgtctgcagaccccgctgttgcctcccaggggagtctccaggcccagctctcgccccaccgcgacctcccaggcccaagtccctgcctacctcccagcagcccgagtgcgatcctgttcctccctcacggtggcctgttgaggcagggggtcacgctgacctctgtccgcgtgggaggggccggtgtgaggcaagggctcacactgacctctctcagcgtgggaggggccggtgtgaggcaaggggctcacgctgacctctgtccgcgtgggaggggccggtgtgaggcaagggctcacactgacctctctcagcgtgggaggggccggkgtgaggcaaggggctcacgctgacctctgtccgcgtgggaggggccggtgtgaggcaagggctcacactgacctctctcagcgtgggaggggccggggtgaggca

SEQ ID NO: 514331 - DNA, 591 bp, Homo sapiens
ttcctcctggctgcatctcccacctcccagcaaacaagctcttttggctcagctcccgcctgcgtttgtagaccccgaagtttctgcaaccaagctcttcagacccacatcccttctcccagtgactgaacagtcccagctccggctggagaagggcgtctgcagaccccgctgttgcctcccaggggagtctccaggcccagctctcgccccaccgcgacctcccaggcccaagtccctgcctacctcccagcagcccgagtgcgatcctgttcctccctcacggtggcctgttgaggcagggggtcacgctgacctctgtccgcgtgggaggggccggtgtgaggcaagggctcacactgacctctctcagcgtgggaggggccggtgtgaggcaaggggctcacgctgacctctgtccgcgtgggaggggccggtgtgaggcaagggctcacactgacctctctcagcgtgggaggggccggggtgaggcaaggggctcacgctgacctctgtccgcgtgggaggggcyggtgtgaggcaagggctcacactgacctctctcagcgtgggaggggccggggtgaggca

SEQ ID NO: 514332 - DNA, 389 bp, Homo sapiens
aaataacatttgtgaatgaaaaattaaaaaagatgattgcctacaaygcagatatctcaaaaattatatttatcctggcaaaaatctctataaagaagtgctattagccaggtgtggtggtgcgtgcctgtggtcccagctactcgggaagctgaagtgggggatcgctggaacccgggaggcggaggttgcagtgagcagagatcgcaccactgcactccagcctcagtgacagaacaagaatttgtctaaaaaaaataaattttttaaaaattaaaataaataatacataaataaataaagtagtgccatgggaggtgatgcaaataggaaaaaaaaatgttttaagaaactggaatcctgtatacacatcctcaatctaatattgc

SEQ ID NO: 514333 - DNA, 389 bp, Homo sapiens
aaataacatttgtgaatgaaaaattaaaaaagatgattgcctacaatgcagatatctcaaaaattatatttatcctrgcaaaaatctctataaagaagtgctattagccaggtgtggtggtgcgtgcctgtggtcccagctactcgggaagctgaagtgggggatcgctggaacccgggaggcggaggttgcagtgagcagagatcgcaccactgcactccagcctcagtgacagaacaagaatttgtctaaaaaaaataaattttttaaaaattaaaataaataatacataaataaataaagtagtgccatgggaggtgatgcaaataggaaaaaaaaatgttttaagaaactggaatcctgtatacacatcctcaatctaatattgc

SEQ ID NO: 514334 - DNA, 673 bp, Homo sapiens
cgggggtacatctgcatgtttattacatgggtatattgcataatggtaagcattaggcttctagtaaacgtatcacttaaatattgaacattgtacccaataggtagtttttcaacctctccctccctggccactttgggaatcatcagtgtctattattttccatctttctgtccatgtatacyaaatcttcacctcccacttataagtgagaacagctatctgcttctgagttagttcacttaggataatggcctccagctccatccatgttcctgcaaaggacatggtttcattcatttttttgccagccagaccttcttgcattctcaatactcttcctaaaaggaagcctccttaaaaaaaaatcacccttccatgtataaactacatgctcaaaatgacacatccatgtctctcttatgctgttttcctggcctgtaatgtccttcccccaaaggaatgccctgagtccacagcagtgttacagagaggcagtggattccatgcttgagaccagggctcccttcctcaccagctacatgaccttggttagctcatttgacctttcctcacttctaaagtagggactgaaataccaaccaatgccaacctcaagcactatagaaaggcactaaatgggttcatgcatgtaaaatacttgtcaacttta

SEQ ID NO: 514335 - DNA, 573 bp, Homo sapiens
gactgtattctttgcttttgttgctataacaagttaccacaaacttagtggtttaaaggatacaactgtattatctttatttataaagaaagggtgataatgtgagctatggggaatggctgtaaatacagatgaagctttgcttgctcactggcccagttcctaacaggctacatactggtaccttccttcctttccttcctttcatccattcatccatccttcatttcttttttttttttttttttttttttttggagatggagtcttgctctgtcacccaggctagagtgcagtggcacgatctcggctcactgcaacctccrcctcccagtagactgcaagaccagtgttcccagggggtggtgagccccaaaacaaagtaaaaaaatagcgcatgtcagagcctcaacaaggggacctctggacatggttttgtccctcctgggtgcaatgagcaaaaagagacaagttcattcttgcaggagaaatcaacatggacaagcagaggaaataaacacgtattaattttttactaatcttccttttctgatatgtaaatagtcccatttt

SEQ ID NO: 514336 - DNA, 620 bp, Homo sapiens
tgatcagatggtgcccaaccagattaagcgtcggtccgcctttcccagcccactgacccaaatgttaatctcctttagcaacactctcacagacacacccaggatcaatacttttcatccttcaatccaatcaagttggcagtcagtattaaccatcacaacatgacaaataattggaaggatatttgccaatgtaatcattttaaagaggatgtgatggtccaagctagtagacttccagcagttctcaaacaccaacctgtaactattttcttaagaaacactgctcatatcataatataaataagactaacgtgggaccaaaacttcaatattttttcacctcttatcattatagtatatgcatagaaaatatactcatttggaagaaatgggggcatttttctcacacyactttcaagtgttgtaaggacataactatacctctgagttgcccatgagaaatagagcctaaagctctttagctcagttttaccatgaatacatataaaagaaaatgacatgaatcctagaggaaggctctaagtgtgttgggaaatgcttttgacttctttggcactaactttctgataaaatattttagtgagaggtaaattgga

SEQ ID NO: 514337 - DNA, 624 bp, Homo sapiens
gtgcccaaccagattaagcgtcggtccgcctttcccagcccactgacccaaatgttaatctcctttagcaacactctcacagacacacccaggatcaatacttttcatccttcaatccaatcaagttggcagtcagtattaaccatcacaacatgacaaataattggaaggatatttgccaatgtaatcattttaaagaggatgtgatggtccaagctagtagacttccagcagttctcaaacaccaacctgtaactattttcttaagaaacactgctcatatcataatataaataagactaacgtgggaccaaaacttcaatattttttcacctcttatcattatagtatatgcatagaaaatatactcatttggaagaaatgggggcatttttctcacactactttcaagtgttgtaaggacataactatacctctgagttgcccatgagaaatagascctaaagctctttagctcagttttaccatgaatacatataaaagaaaatgacatgaatcctagaggaaggctctaagtgtgttgggaaatgcttttgacttctttggcactaactttctgataaaatattttagtgagaggtaaattggaagttctgtttaaat

SEQ ID NO: 514338 - DNA, 640 bp, Homo sapiens
atacactttctttaacaaaaatattgtatattttagcaaagcatatattattataagtasaggtaaaaaggtactttttgaagtcttaattttttctttaatgaaaatatttttgaaaaatctacaataaaacctcacaacttgtagtccataaaagtactttttaaaatatgtgtatgatttacccaaaagtttgaaatagttatcagtgataacaaatgtgtatttttatgaatgtaaaataatgtattaagagagaaatttctatctctgtttagatgaaatgcttttccctaccatgtcttcaggagttgtcagactttcatgtctaatttgtatccttattgaacattttggtgccacgtgggtagcttctcaatggtgaagctttttggctctgcaatgttcagccttaaaatacggttttacctgaatcatctcagagaagctctttatttagcttatcttggtatcactctctgtccctcacccccaaaacacacacagagtttaatttctgacagattcttttatggatgctattgggcagcagtggaccctctaggtgaaagtggtgatttaaatcaggcctgtgtcagggtagcatggctggattcgctgtggaaccatgattcatttc

SEQ ID NO: 514339 - DNA, 640 bp, Homo sapiens
atacactttctttaacaaaaatattgtatattttagcaaagcatatattattataagtacaggtaaaaaggtactttttgaagtcttaattttttctttaatgaaaatatttttgaaaaatctacaataaaacctcacaacttgtagtccataaaagtactttttaaaatatgtgtatgatttacccaaaagtttgaaatagttatcagtgataacaaatgtgtatttttatgaatgtaaaataatgtattaaragagaaatttctatctctgtttagatgaaatgcttttccctaccatgtcttcaggagttgtcagactttcatgtctaatttgtatccttattgaacattttggtgccacgtgggtagcttctcaatggtgaagctttttggctctgcaatgttcagccttaaaatacggttttacctgaatcatctcagagaagctctttatttagcttatcttggtatcactctctgtccctcacccccaaaacacacacagagtttaatttctgacagattcttttatggatgctattgggcagcagtggaccctctaggtgaaagtggtgatttaaatcaggcctgtgtcagggtagcatggctggattcgctgtggaaccatgattcatttc

SEQ ID NO: 514340 - DNA, 640 bp, Homo sapiens
atacactttctttaacaaaaatattgtatattttagcaaagcatatattattataagtacaggtaaaaaggtactttttgaagtcttaattttttctttaatgaaaatatttttgaaaaatctacaataaaacctcacaacttgtagtccataaaagtactttttaaaatatgtgtatgatttacccaaaagtttgaaatagttatcagtgataacaaatgtgtatttttatgaatgtaaaataatgtattaagagagaaatttcyatctctgtttagatgaaatgcttttccctaccatgtcttcaggagttgtcagactttcatgtctaatttgtatccttattgaacattttggtgccacgtgggtagcttctcaatggtgaagctttttggctctgcaatgttcagccttaaaatacggttttacctgaatcatctcagagaagctctttatttagcttatcttggtatcactctctgtccctcacccccaaaacacacacagagtttaatttctgacagattcttttatggatgctattgggcagcagtggaccctctaggtgaaagtggtgatttaaatcaggcctgtgtcagggtagcatggctggattcgctgtggaaccatgattcatttc

SEQ ID NO: 514341 - DNA, 578 bp, Homo sapiens
aaacttgagtgttgattggaatcccagggttaattcaactttaattttatgaatatgatttcatataagttccttatgataaaaccagagcagatttacaaattaaatatagaccatcaaattagctrtacatatttaaggatgagattttgttaaaaccaaatagtcaatgttagagcttatagaatggcatagcctcaggatcagctttataatcagtttttttaaatttggcttgataatactaacagagaatggctatttgcataaatatgttttataaaatggtgttaacttttagtctttgttcaggataatgagacctactagttaaccagaacggggccagcaagcaactcttgaatgctagttttaatgcctgatcaaaattctgtaaagctgtgttgatcactgaggcgttgcggatatactgagcctgcattaagtggatatttaatctaattatttctggaatctttaccagaaaacatgctcttacatagtttgctcctgggtttgctgttggtgaactgccgttggttggtgggatctctgtgtcccatgggctttgccacaca

SEQ ID NO: 514342 - DNA, 578 bp, Homo sapiens
aaacttgagtgttgattggaatcccagggttaattcaactttaattttatgaatatgatttcatataagttccttatgataaaaccagagcagatttacaaattaaatatagaccatcaaattagctgtacatatttaaggatgagattttgttaaaaccaaatagtcaatgttagagcttatagaatggcatagcctcaggatcagctttataatcagtttttttwaatttggcttgataatactaacagagaatggctatttgcataaatatgttttataaaatggtgttaacttttagtctttgttcaggataatgagacctactagttaaccagaacggggccagcaagcaactcttgaatgctagttttaatgcctgatcaaaattctgtaaagctgtgttgatcactgaggcgttgcggatatactgagcctgcattaagtggatatttaatctaattatttctggaatctttaccagaaaacatgctcttacatagtttgctcctgggtttgctgttggtgaactgccgttggttggtgggatctctgtgtcccatgggctttgccacaca

SEQ ID NO: 514343 - DNA, 633 bp, Homo sapiens
gggccgacataagccagaggagtttctgaagagtctgcttcagtgaggggttctgttgatagccatagaataaagaaatggcactttgcagacattggtacttccttgaaagaactggctgtggcatatacagaactcaaaaattgaaattactagataatggttacttggtttagattgcctggaaattatgagaggttctgtaaatgctttgggattagtagttwgaaccacctagtccattttatgattctgtcttcagaatatagaaggaattgcatcttatttggggattaggatataaagttagtgtacaaggcaaaatagcatgtaggcaaagttacccatgcagagtttgtgggaagatgccttaccacaaaccagtaccttctttttaggttcaagaccagcccatttttcctctagaatgagaacagatcattgctcttctgttgagcacagagttgttggtttgtacttaagggcaatcctgttagaatcactcctgagtggctaaatatcttcagtctgagagacttgtccagcaggttatgggaacagcagattcatgtcacctgtctcttgctcacttaggcaaacgcttagtgtctggaatggtgggtagaacccttg

SEQ ID NO: 514344 - DNA, 633 bp, Homo sapiens
gggccgacataagccagaggagtttctgaagagtctgcttcagtgaggggttctgttgatagccatagaataaagaaatggcactttgcagacattggtacttccttgaaagaactggctgtggcatatacagaactcaaaaattgaaattactagataatggttacttggtttagattgcctggaaattatgagaggttctgtaaatgctttgggattagtagtttgaaccacctagtccattttatgattctgtcttcagaatatagaaggaattgcatcttatttggggattaggatataaagttagtgtacaaggcaaaatagcatgtaggcaaagttacccatgcagagtttgtgggaagatgccttaccacaaaccagtaccttctttttaggttcaagaccagcccatttttcctctagaatgagaacagatcattgctcttctgttgagcacagagttgttggtttgtacttaagggcaatcctgttagaatcactcctgagtggctaaatatcttcagtctgagagacttgtccagcaggttatgggaacagcagattcatgtcacctgtctcktgctcacttaggcaaacgcttagtgtctggaatggtgggtagaacccttg

SEQ ID NO: 514345 - DNA, 573 bp, Homo sapiens
ttaacctttagatgtcaattcagttagtgagtctgttttatctgttgttcaagcaaattctttaaaacacttaaaatagttcagttcttcagttggttgaaatttatatggccatttcttttctaagcagtactctcagataaacaccagaatgctggtctatggacttcagtttgaaatcaatagtttactgtcttgctggaaggaggaaagtgatcttactgttgtggaaaatatatcactgcagaatctactcacttttgctgcaacggtcaagttaatgttttctatcattcagctaagattgctaaattagtataactttcctttgcctttgaactttttagcactacagaaaccaggactacaaatatgttctttacttttttctgttattttcccctatcatgagacttcttgaaggcgawtgctgttcattatgctttctcatctgtactttcatgtacatgtaatccactgtagtgaaggcactaaaacctgttgtattttccacatttcgatagatctctcacaggatttaacacttttggaatgctcagtaaattattattg

SEQ ID NO: 514346 - DNA, 650 bp, Homo sapiens
agtgcctcctggtagaggctctgtcttatttttttctttgtatacctagtacctacgttggtatttgctagagaataggggttttaaatatagttgaatgaattaaggaaatatgaaaaatgtagggaaataatttgacaaaggaacttgcaaagtgaacaggatatgttagtattcatgtgaggaactttgaaatgtgtttttctccctctttaatagggaatgattacaaagaaaaatagttgtcaaggtgaacaagttccaagtttttcctagttataatctgtagtactaaacattagatatcctttagatgcaactattacactcggacaactggagagaacttgatsaatcatctggatatttagtaatagtatttgcttaatttgatttaatgttgatattgatgatctctttgcaaaaatataaggaagggaaagggcgagagagggtagtagatcttttaactgaaaagctgttttgttataattcatgagttctttattggagtaaattgaggtaggttttggagctaaaactgaaggatgtagcgacagtgtaattggatcatttattgggatgcttttcatcattcttttaaaatgatttaaatacagattagcaaatttagtgatacctcaaaagtt

SEQ ID NO: 514347 - DNA, 498 bp, Homo sapiens
ctgttgataaagctgctatcaccatttgtatgtctttcctggacatgttttagtggtaaatattgattttactttgtaagaaaccgttaaactcttttccaaaatagttgtaccattttaaattgaaagttacagttgtaactgtgcaggagttacagtttcttcacattttcattgacacttcgtgttgccagtcttttaaattttggccatcaaatgagtattaagtatctcattgtgggtttgtgtttctcagatgatcaatgatgttggaacatcttttcatatgcttattggccatttgtgtactttttttggttcaagccttttgtccctttaaaaaattggattgtttgtctggttgagtggyaagaggtctttatatgttctgggtacatagtcacattatctgtcagattgtgttgcaaatattttattgttcatttttgtttgattttgtgtatttttaatactataaagatcaagttaaaactttaa

SEQ ID NO: 514348 - DNA, 531 bp, Homo sapiens
caattaggagaaaaggagagaagacttcaaatcagccaggaaatcagtgcccatagaacagagttccacatgcagttttcatacaaaccagtgttgcatagacttgtcccagcaagaccacaaatttattcaagtcaattaccatcctttaccagggtatgtatctgtatacatatacagccgtaatttctaagtaagtatrgtaactacctctgaaaatctgtctgttttaattgtactcaaaaaattgaaggaaaaaaacaagaataaaaacccagggcttcctcccaatttccagtaagtggatacaatttacattaactgacccatttaacagcatggaaatattcagcatggaagtattaatgcaacaaagaacccaaagtacatacttttccctttcctgttattatcattatcatctacatcattgtcatgatacaactactacttgatattttggagcactttatacttcacaaagaagttttatatcatctcattttgctatttgaatcaatcattgtagta

SEQ ID NO: 514349 - DNA, 518 bp, Homo sapiens
cagctggtttgttggtattatagaacactgtctctctggccatgtctgattagctgttctatcacattgaggcaatcatatgctttctcttttgaatttgatctaaagaccacccaaatgtagaaattaaaatatttacttgcgagctgtagaattacatattctgtcaaataggtttgaaagtagagaaggaaaaaggaagcagttatcgagagaaaaacagaggcctaaaacaaagtgaggttatttccctgaaattattattrtcatctactagttgtagtcttagttcctatcaaggcctaagcgatttcttagccttgggtcctatagacaacaaacattcttgtcatagtttggctttctcaaatgtagaccttcagatatggattcataagtaaaagatttttttaagaaatgttcccaggaaaataaagaagtagagtaagtaggtccaggaagggaagaatggtgcaatatcaagccaagcctagtgaagggcaactctggttcaatac

SEQ ID NO: 514350 - DNA, 614 bp, Homo sapiens
gtaatgtgtcctaaatgttaaaatcataaatcatcagtactttgagtaatgaatgttgtgtgttgtcacctggcctggaaatgaactggcccaaacaattccataggcaagagcaatgtgctcaccattgtattcccagtttctaatacagggcttgacatgctgtttgataaatattcattgaatgaatgaattaatgacagatacctgacagcttatttacagactacaagttgcagatgggaaaattagagtatcccaatgcttgtttttattcatgactagccaagactgctccctacagagtgagtagaaagcttttaagggactctttgatcaactcctgcccccttttggttggtgatttagccaagtatttgggagttgtcagtgcatttttttttccagtaaatatttgaagaactccccaatatgtaaagttttctggccaaatcttatcaacaaaatagaaataaggctgttaggaacctgtggcaaacgtatgaatgtctacctccattttgcactcgtctatctcatgaggtggtgctgtgcagtttcgattttctayatattagcatctctgtggaacattgtacacaagctaacatatt

SEQ ID NO: 514351 - DNA, 535 bp, Homo sapiens
ctgtgtacagagcatgtgggaccctgccyaccagcctctctgctctcctccccggctcccttaggctttcttcttttgaacctctaacctgtatgtcttatagccctgattccaaaacctcctctgtagatcttagctgcatgggacatacccagggagcttgggaagggcacaattctcttgtgcctgctcccagggtctctgaataggtccaggtgaggctgacactgtgcctcttacaggcttcccaggtatgttatcatgggtactactggagaaccatggcccaaaacccaccgttggcttttagtttctttgttttcatgtactcacctggggagcctgccagcctgagggccccctgagacatccttctcctaaaatttctctgcagtgacacaagtagagaacctgcaggttgggatctttgttaataaatgtttcaggcacacagaacaaagcgtagtctcaggagacattacgggcaatcagattttgttggtttttgattttgttttttcttccatatgaaggc

SEQ ID NO: 514352 - DNA, 662 bp, Homo sapiens
caacagtgaatttcctgcctgaaattcagattgaatgttgaccatgtgtgaactcaatttttgcactgacaggaagagttttaagaactagatcatctaccaatattttttctcatgttacattgcaatttgttggatttctgattccttctctcttgcaaatgccttgagtgagtctacaccctctttaaacagttatttgttcatcctagataaagctccttcataacttttctagaccagaataacattgtccagccaaccctgctgttagccatgctccagcatccccatttcttcctcatctatttgattactggttccataatgcatagaatttccaagttgaattttcacaatactgctatttcacatgaatgcacacacctcaaatagtattctgaaatttctggcagcagagttggcccaggggaaaacattttccrtcaggaagcacacacggggtcacaatcatacagctctgacagagaggtctagcagcgtagatcatattctccaattctgccatttcagcgttgcgctattttcctgcatccagaaagtagtggaacttcacaaagaaattgattccatttataaactggggcactaggtcaaatctgaatacctgcagaaaaagctattgaaagtttcttactttc

SEQ ID NO: 514353 - DNA, 418 bp, Homo sapiens
ttttgaaagggttggattctgtttagcttttaagaaagaaagtttaaaggcacttagtgagagaaggggtgtaacaggcatgtctgacctcccctgctgtcatggacaataacttagttttcaaggttactctagggtccccttggccaagaggggatccattaagtcagttgtggggtttaggatttcatttttatttctcactaacaaactatacaattatccatttattccaaacttatcagttctcattcttactatcagacagaataagctgacttctagggacagtctagttatattgtttcctatttcatgacttcatctggatcacccactccttcacttccatgtctttattggcaagagccaaagctcaggagtttyatcttctacccagttttcacattctcctcag

SEQ ID NO: 514354 - DNA, 574 bp, Homo sapiens
aatttcaaagacaatcatttaccagataacgtctgccttcaaatccattcagttrccctggaaatcatttactccccctctaaaattagttacagcccccaactttcctctcttttgatgagatggggctgttctcttgactttgactcccttcatgggtgggaaccggagtgactcatttcactcagcttgccgctggccactcctcgagagagggagcatgcgagcaagtgagtgtgggagcaggctctgtgcaggccctgcagcagcatccatgcgcctgccctctttgcacccaggttcttgtccagtgtccaggaagaatcaggtcacatggactaattgaagagcagtgtatgcagaggattttattgagtgatggctctcagtgggttggaagttggaaaggggatggtgtgggaagaatgtgatcttttcctgaagctgcactgtttgaagttactcatgtctatccgtagtttctgatgatcagtcacttgtatccttgacgttcagcagcttgtatcctcaacgctcagcaccttgtatctcagacgctcgactgcttgtgttg

SEQ ID NO: 514355 - DNA, 667 bp, Homo sapiens
ctgctcttgctcaagtgaagggacttctggagcagccagcattattgggcaattgcagagtaatgaccctggtgagcactgggaattggggagaaaggaagctgtccatttaatatgtaaggaggttgagatttatatttttatgtctctgttgagtgctactacctttccccagcacagaacacaagaccccaattcttttctcaaaaatgtatctgcctggacagcagatcttctgtgatgcaaaaacaggagaaatggtaggaagtggccaagttacatcctctaaattcagcatcttggagttagcaggggttaagttaattcaaaatgagttgaggcatttaatatctgggagagccaaagggtttaagrctactggggatcaggagaggggacctttgataatgtcttccatggattgaatccctttaatgttatttgaagtctacaggtcgagatccacaattcattcttgaggactccagtagctccactgtgcccctttggttgcagctcctcacagtaattggcatacttgtggcctttacttatacttaggttacagttcagaatcaattcatttcagcaaacatttcttcagcacttactatgtgccagatattgtgttaaacattatgactgccacctgaactttgatcgtgct

SEQ ID NO: 514356 - DNA, 393 bp, Homo sapiens
attaaaaagaagaaatcacactcatctggatttttttttttttttttttttgagacagagtctcgctctgtcacccaggctgcagtgcattggtgtgatctcggatcactacagcatctgcctccctggttcaagtgattctcctgcctcagcctcccaagtagctgggattacagatgtgtgccaccattcccagctaatttttgtatttttagtagagatgrggtttcatcatgttggccaggctggtctcgaactcctgatctcaggtgatccacccgccttggcctcccaaagtgctgggattataggcgtgagccaccatgcccggctgtcttgttttaattaatagaaaataaaaggagctgacatgtactgaatacagatgtgctg

SEQ ID NO: 514357 - DNA, 652 bp, Homo sapiens
ttgcccattttgattcttttccttcctctcaaattaaatatactcattcatattatctcccccaacatattttgtttttcctctaacatagcccttagaggcaaaaacataaaaaataatttattaaattagtctatagaaagttctaccttggaatacagggtgggaaaaaaggaagaaggggaaaataaaattatgtataactagaatatagctttgtataacatttctgtgtcctcaaactattattccggtaagccaattacattatagatggctcatacatttggttaaataattccaagatttctccataaaaatttaaaacttaattaactgacacttttaaatactcattttttcattrttttgcatgcatacctaatagtttgtattatgctttttaaaatctgttgttcagaaagaaatgttatgtattatcttccatgaaagcatattcttcagctataaagggtatcgagataaactaatgtgactttatattagttaattttcttatactgtacattaaataattgtatctttaaattgtatctttaaaaaaaattactcacatttataaaactgttgacttccaaaaagaccactagatgtcagttctgatctataatccaacaggaaataaatcatg

SEQ ID NO: 514358 - DNA, 623 bp, Homo sapiens
taataatattagatctgaatccttctattctcttgtcatcgtgccacccttgtcacaatgactctggtttccagtgttctgcattcaagtgagtttcacaggcgaactccacagtgtatgaccaatgttaggggtacaacaaggggcagcatctgatgcagcatgtaaaatatgattaatatttttcagaaaaggaatcctgtttcaaaaattgatctactaacatagttcacagtctgaataatgatgtgcaggaaaattgctataaatgaacaaagaaatgggtgtattcaaagaatacatgagtatagcayatgcataatgtgtgacctacggaaaaaggaaagcttgcagctaattcaagatcttattcattccaaggaatgattttgttgttgttgttgtgccagatagatgtctgtcatcacaaaatatttattttgtttataattttaagaaaatagtaaatggatgacaattgcttccatatagctctgtggtattttctttttgtttttggcccctgttgccacatacgagtttttcactaatgatccatcatcgaataaatggtctcacgtgatttctcaggtcattgtttttatataactagtcattggaac

SEQ ID NO: 514359 - DNA, 564 bp, Homo sapiens
acctggcctgtctttagagtattttaaaaatattataaacatgtataaaaatgtgagactacacatagaaaggactgtcatgtcgtagatacaagtatgcttcataggtttctaatttttacattgttagaatatgtttaaactaaaaatgaatattaacttttaatttcacaatgccatagtagtctgaatgttcagttttgaaagcattagcatttctgagctgaatttagctccttttagcatgctttgagcttaactgtggatgtacagcatgtgatcagtgagtaatctttgaaaaattattcagctctaagtaattactagtaaagcttcaatgagagatgcartttatgacattaagacatgtaatgggatacattttttgcagcagaccgtattccatatgtcacttggttgcatacacttaaacttgcattaatagtggatggcaagcctttactcttctgccattttgtgtgcatgtagactgccgggccctttcttctacccctctgtgtctaattttcaaccatgttccgatgccatacatttatggttatg

SEQ ID NO: 514360 - DNA, 528 bp, Homo sapiens
tgaataagaactttaaccctacctacwcttgggaatgtgttaggattttagtccacaagactcttaacagactctagtatgatggataagctaaatttgcctcctttagacaaatttcagtccaaaagacttgccatcacctttagcagagaagctcttgtaagtttgctcagtttttggaatcaagatcctgataccttttttccctgatgatgcctttataccatcactgcacagagctggcatgtgggcctctttcctatgtaggttatgggcattgctctctggtatccccttacaaatacacaaattacaaattgtatgtatggactcatttaccttgtcattagagcatgagttgtgcagattcccaggcccgaaccccagtgattctgtctctgcaggttagaggtagaacctagaaatgtgtacttccagcaaactgcttctgatgcagatggctttgatggagatggtctgaggcctgaagctttttaacaacaagattctaagttatcgaggttctgc

SEQ ID NO: 514361 - DNA, 528 bp, Homo sapiens
tgaataagaactttaaccctacctacacttgggaatgtgttaggattttagtccacaagactcttaacagactctagtatgatggataagctaaatttgcctcctttagacaaatttcagtccaaaagacttgccatcacctttagcagagaagctcttgtaagtttgctcagtttttggaatcaagatcctgataccttttttccctgatgatgcctttataccatcactgcacagagctggcatgtgggcctctttcctatgtaggttatgggcattgctctctggtmtccccttacaaatacacaaattacaaattgtatgtatggactcatttaccttgtcattagagcatgagttgtgcagattcccaggcccgaaccccagtgattctgtctctgcaggttagaggtagaacctagaaatgtgtacttccagcaaactgcttctgatgcagatggctttgatggagatggtctgaggcctgaagctttttaacaacaagattctaagttatcgaggttctgc

SEQ ID NO: 514362 - DNA, 552 bp, Homo sapiens
gaagcctagtagaatatggacttggaaaattctcttaatcactactgtatgtaatatttacataaagactgtgctgagaagcagtataagcctttttaaccttccaagactgaagactgcacaggtgacaagcgtcacttctcctgctgctcctgtttgtctgatgtggcaaaaggccctctggagggctggtggccacgaggttaaagaagctgcatgttaagtgccattactactgtacacggaccatcgcctctgtctcctccgtgtctcgcgcgactgagaaccgtgacatcagcgtagtgttttgacctttctaggttcaaaagaagttgtagtgttatcaggcrtcccataccttgtttttaatctcctgtttgttgagtgcactgactgtgaaacctttaccttttttgttgttgttggcaagctgcaggtttgtaatgcaaaaggctgattactgaaatttaagaaaaaggttcttttttcaataaatggtttattttaggaaagctcagttatattgtcttttaatggttaacacttatgagc

SEQ ID NO: 514363 - DNA, 524 bp, Homo sapiens
gtattaaatctgtctttattttggatcatggcatttatggagatcactaagcaggcagctcatttgaagtgagattcagaacacttacttattttatccatttagcaaacatttacttaactcctactgtgtgtactacatcactggggaagacaattaggacccagtccttgttttcaaggartaagtactctagtccaacatgaaacaactaatgaaactgagcagggataggcaaggcagaggtaagtgtgccttggaagaaaaggggaagaagaaatggtggatgttgaccaaggctggcactaggtaggctccaggttcccctgggatgctagttttagaggtggaagggcagttttgaagtctcatttcaggagcagggagaggctgtgcgttgatggttccagtaggatggggaaaggaggaggagtcagtgcagttggaccaggctcttgtctgtccatctcatctctccccagggataggatgacaaggaccccagaaatcaacagtgacaccag

SEQ ID NO: 514364 - DNA, 588 bp, Homo sapiens
aataaaatatgctgaaataataaattgacagaagtgcaaggagatctgtacaagcatgttcayagaaacattgttcgtaataacaaaaatgaaaacaatctgaatgctcataaatagaataaatggtggcataggcttaaaatagaatactatgcagtagtggaagagcaaaacatagcaacctgaattaatctcacaagcatcatcttccatttaaaaagttaaaaaagcacataaagaataagatacaattttccaaaatataagcatactatatatttgttgatttgcatatgtgaaaaatatataaagaaattagtaacataaatagcaaattcagaattgcttttcaagctgggtggtgggtaaatggaagcctattatattacatttcctagctttatttaataataaattttataaaataaagcaaacacaatagtcaatagaggaatcttcggagcctagccatatttaaagagattgatgacaagataataaccactaaagtagactgagaaagggcagtaaaaaggggacatgttagacctgaaaatacaatagtatggaaaacgacaggcttgtgca

SEQ ID NO: 514365 - DNA, 214 bp, Homo sapiens
ctaaggagtttggacttaatcctgtgggcatgcaggaccctttgaaagatttgcagtgggaaagtgatcggatctgatttgctaactcrttgcaatggctctgtggaagaatatcttggagaggggttcaagacttgagccaggggacatatcaagtagtgtttcaaatgctaactaccccctcctgcttctcacattgctaaatagagtgcag

SEQ ID NO: 514366 - DNA, 367 bp, Homo sapiens
agggagcaacttcttgattttcctcattcttatttccccctcgggccacccagaagccaggccagtcctactcagatgatagaaaaccttattagccctcctaatgaaatgggmagtttggtacagaagaggggaatctgcttggatttaaagatggcgtcaaactattgtccaatgcagggaaatacatttatttctacatgcagaaggaactcattaaaatctgttaggcttggaattttcgacaatgatttgtacataaactccttaagtattgccttgtgtactgacatattaaaagttatgatgatgcttaggaactacagattatttagaaaatgtttgaaaagagataatacacaaaagc

SEQ ID NO: 514367 - DNA, 441 bp, Homo sapiens
tatcactctgtatccataaagtatcctttctgtctctggagaatatctttagcctgggattttctacagtttgcacaagtagttcagaaatgtttggtaaataaattccaagggtttctttgaaattagtcctgaagaagaggtgcccataaaaatctctttttacattctttggcatgcctaaaaatgccttgcaacagttgaaaaaaacagtaattcatatataaggtgttaagttcttaacacattcaaagaagactgstgactcactgcccaagataacatggttgaggcagctccagcagtttgtcgcctaagaaaattacagaagaatgtgttagagaaggcaaggtgatcacttttacagtattttttattattgctctcattatttattgttagtaataattactattattgccaacaacaagctactttatt

SEQ ID NO: 514368 - DNA, 173 bp, Homo sapiens
ctcctatacctgtttaatagtctcctgtctttatttgagcaagctggcaaccttacaacccactagtcaatccctgactagaagaagatggacagtacattctcarcagagattttgaaaaaaagacactttggctattgccacctccaccctggccaccaccctgtaattct

SEQ ID NO: 514369 - DNA, 612 bp, Homo sapiens
gttcttgctcactcacccactctccaaatactatctataagtgagatctacaaagagggagacctggctctttgttccttaaacaagtaggcatttcagatggtagattctttttttaaggcaaggaaaactttgcttattttgactgattattctcatrtgtacttttcaatattatttgatttttcttttccttcctgctatacatcttttgggcaatttatttttagtgatatgagcaagaagaagaaataaactttaacactgacttcactactccttagtagcttttaacagaggcttaatgcatgttcattcattctaatgattggagaaagaaccttcaatttagcacagaaaatataatctagacttgtcctaaaagggagaggaaaagcttcattcatctaaatttttattaactataaaataaaaccaagagcgctattactgtttttaatattgaaagaaatcttgattcataattttcaagttaggctttatttttcaaaacttcccaggcaagtatgtggaagaacttattttacagtacagtaagaacaaagaaactgtaattgtctgtagtatgtatcaaatctggccattagacag

SEQ ID NO: 514370 - DNA, 612 bp, Homo sapiens
gttcttgctcactcacccactctccaaatactatctataagtgagatctacaaagagggagacctggctctttgttccttaaacaagtaggcatttcagatggtagattctttttttaaggcaaggaaaactttgcttattttgactgattattctcatatgtacttttcaatattatttgatttttcttttcmttcctgctatacatcttttgggcaatttatttttagtgatatgagcaagaagaagaaataaactttaacactgacttcactactccttagtagcttttaacagaggcttaatgcatgttcattcattctaatgattggagaaagaaccttcaatttagcacagaaaatataatctagacttgtcctaaaagggagaggaaaagcttcattcatctaaatttttattaactataaaataaaaccaagagcgctattactgtttttaatattgaaagaaatcttgattcataattttcaagttaggctttatttttcaaaacttcccaggcaagtatgtggaagaacttattttacagtacagtaagaacaaagaaactgtaattgtctgtagtatgtatcaaatctggccattagacag

SEQ ID NO: 514371 - DNA, 412 bp, Homo sapiens
  misc_feature (1)...(412): n = A,T,C or G
natattactgtcaaataagtaaaagcctgataacgttttcaggtgcgtgtgtgtatacagttttagagaaagtcttattaaagaatatcagattcaagactcatacaagaaatgccttccrtttggcgagacaatacttgcagccggggggtgctttcactgttggaggtgtctgcaggtagtgcacctgtccagtgggaatgctctgtcaagatgcactagtgtcttctgggctgatgttgcccacggctctcttcccagagtagaacaggggaagctgaacacctgcaggatatcttgggaatgacattcaaaaagctacagctgtcccagctgagccaggagcctggcaagcacttggagcacacattatttatgtaagcaatctctgtcagcgccacatctggggata

SEQ ID NO: 514372 - DNA, 635 bp, Homo sapiens
attgttaggaatctctggtatactgaaggttaatcaaatatgttactgcctggcctcaggctgttctgctacctgaatcaatagagaaagtcttcagtttgctcttcttgtgtgtgtgtgtttgccatggtgctctggttgtgtcaatattcactatactacgttgtgttgtagcatgtcaggacaatatcctacaataacagggtacaggaagcctggcacaatacaagggaaaagtaagcatgagaaaaagaggaagatgcacaaagtcatttatytgcaagataatgagcaggttagacatttttatttttggaagctgcttgtttcccagggctaacaccctgcaggtagcagagccccatgtactgtttaaaatgaggtgtgatcctatcatgactataacttgatgtatatgttttaatggcatatcctgccaagaaggatattaatgagctattgcaccatttgttctgctgttgcttatacacaaatgctgagtccaaatgagattccttgggggtttgagattaaggctggaaaagaattactcacataagctgattttgtggaacacgttctgtgatgggagtaacaaagtttatttaaaaagcgcagttggtcagactaccttt

SEQ ID NO: 514373 - DNA, 635 bp, Homo sapiens
attgttaggaatctctggtatactgaaggttaatcaaatatgttactgcctggcctcaggctgttctgctacctgaatcaatagagaaagtcttcagtttgctcttcttgtgtgtgtgtgtttgccatggtgctctggttgtgtcaatattcactatactacgttgtgttgtagcatgtcaggacaatatcctacaataacagggtacaggaagcctggcacaatacaagggaaaagtaagcatgagaaaaagaggaagatgcacaaagtcatttatctgcaagataatgagcaggttagacatttttatttttggaagctgcttgtttcccagggctaacaccctgcaggtagcagagccccatgtactgtttaaaatgaggtgtgatcctatcatgactataacttgatrtatatgttttaatggcatatcctgccaagaaggatattaatgagctattgcaccatttgttctgctgttgcttatacacaaatgctgagtccaaatgagattccttgggggtttgagattaaggctggaaaagaattactcacataagctgattttgtggaacacgttctgtgatgggagtaacaaagtttatttaaaaagcgcagttggtcagactaccttt

SEQ ID NO: 514374 - DNA, 622 bp, Homo sapiens
gaggtgacatttgccaagaatccaatgctgataccctgacttagagttaacaaagaaaaaaatgagctgaatatcttatcaccatcatcaaagctgcaaccctgcaacctagaatttcattcatctttcacagtggttaacaagctcaaaaaaaagctttctttttctttttctttctttttttttttttttttaaggcaaggtctcactctgtcacccaggctggactggagtgcagtggtataatcayggttcactgcagcctcagacttctgggctcaaacaatcctcccacctcagcctcctgagtggctgggactacaagcacatactttcatgcctggctgaatgttttaatttttgtggagacagagtctcactacattgctgaggctgacctcaaactcttggcctcaatcctcccatctcaccctcccaaagtgctaagattacaggcaagagccaccacacctggccaaaaaagaaagttttgggctgagtaaaataatgctaccaattctctccaggcactgagaggcagcctaaaaccatggtttggtagctgggcatcatgagaaggttgaatggtgttctgatgtacctaggctccaaccctgccact

SEQ ID NO: 514375 - DNA, 652 bp, Homo sapiens
ctggcagaaataaacattcccactgtcaaataaagaagctaccactaaatatttgaaacaaacaaacaaaaaagtggaatttattgcttgctaagtgagggaaaactgtacttgtaagatgcagcctctctaaacaaaaggaaaattacttttatgtgaggtttggggaattatggagttcaaagatcgttggacttttggaagtggaagtgtttagggattagttgaactttaactgtagaagcatcaccaatgacattcagaagtgtggttactgctgccaagatatctttgattgcttgggacagttttaaaatctggatttgttactgtggccaaaaaacaatcagatttttccttgaagaataggaaccttttattcttaccaccagaagttagtttacgaagtcagaggctaagtggcagtcctccttaagccatttccactttggggaaccccacagaagagtggacagttgctcaagtcaacaaacaggagctcttggggcatcagtgtcacatggttccaactttgatctggacagttccaaggcagcaagtcatgttgaaagtttcctgagaacattcctttttgatcagaggcaggacttgcttcccactacagtayaggatggagtggggctggagcaca

SEQ ID NO: 514376 - DNA, 546 bp, Homo sapiens
agggaatgtggggccccccttgttgtaggcaaactctaggctcacaaagaatggtgactaagagaacaaggcgccattttggtcttggatttatcagtggtttctagttgaattgagagagcagatccaggctaagaatttgaatttggttcactctaaatcagaaagtattttataagcctaatctgaaccaggctctggacttggcccagggagtgatatrgagatgcagaccatgtagcttcttgcttcaaagtgggtctaatcatagtcttcatctctgtctacaagcactcctctggtgatctcactcaatttcatggctttaaataccatctctactctgatgacggacacatttacatctgcagccaagacttcaatccccaaattcagacttacatattgaattgcctattcaacatctccccttggatgtctataagacatctctaacatcctatccaaaactgagttctggatcttccttctcaaaccttctccagcacagctttttctattatcagttcataggaattccgccct

SEQ ID NO: 514377 - DNA, 395 bp, Homo sapiens
tgctctccagatctcttcaggtttcaatcaggatttatctaaaggcctaattggctcagaacacctaacgcagtatggcaaacaggtttcatgtttttcattaactctgactgattggaagtggctgcctgaagggatcaattaacgaagactgtcaggtgtgtgtgtgtgtgcatgtgcacatgcacacgggtgtatatgtgtgtggaggggtcatgggattcatgtgaaatacttgccatcattggtttaaggtgtttgttaactttttctataacaggttggcacatttacagcctttttttttttttctactttggagtttttttttttttttttcctgcagtagcttaragtcaggaaaacagctaaagcattggtagtttaaaaaaaaa

SEQ ID NO: 514378 - DNA, 433 bp, Homo sapiens
ctgctttccctcatcaaccctacagcaacaacaacarcagcagcactaatacgagaaggggcatctggatgcaggtgtacagtttacaataccttagatttacatagcaccttttccttctaaagagccactgcctctgccccctcagtcacagccacacctgagtgaagccttcagaacacaaagatcacagctcctgtggcagaggtgggacactgaggcagaggcctagaagggatttcatgcagactcagtggtgtccagggctccctgcacttccttcgagccctccctggggaggtctggccttggccctttgggagggtaagaccggggcacagccctcactgggcattcactttgtatttcaggatgtaggagtagaaattgtggttggcattctccagcaccatgacatagacttcctggcagc

SEQ ID NO: 514379 - DNA, 506 bp, Homo sapiens
catgtccccttgggcatggaagagaattctctaagcatcatgtgaaaagctgtcaacctgggcaatatccctgctttccctcatcaaccctacagcaacaacaacagcagcagcactaatacgagaaggggcatctggatgcaggtgtacagtttamaataccttagatttacatagcaccttttccttctaaagagccactgcctctgccccctcagtcacagccacacctgagtgaagccttcagaacacaaagatcacagctcctgtggcagaggtgggacactgaggcagaggcctagaagggatttcatgcagactcagtggtgtccagggctccctgcacttccttcgagccctccctggggaggtctggccttggccctttgggagggtaagaccggggcacagccctcactgggcattcactttgtatttcaggatgtaggagtagaaattgtggttggcattctccagcaccatgacatagacttcctggcagccag

SEQ ID NO: 514380 - DNA, 577 bp, Homo sapiens
ctcaaaccaaacttaggatacttctcatttagtgtaaaaaagatgttggaatgaagcttaaaaaaaggagcagtgaggagggaaatcagatagtttttgccaagccaaggaaagaaggaatattttcaaatgggaatggtcaagcacaaaagctgaggggaatgagaactgaatrtaagttgttattttgtgaataaagtacaattccatgtgacgttgcaggtagaagccaaattggaggaggccagcacaggagaatgggtagggatttaaggggttcagtggattgaaacttcgctgctttgtcacctgatttatcctattagaatgatatcttcatcccattcatgttcattcaccttaataacatcttaaaaatctttttagaaagtccatatatatatatatatatatatatatacacacacacacgtacatatatatatgtatatatatatataaatatgtatatgtatatatatataaatgaagaatatgacttagcctaatgaaaattccatgtggaaaaattttgtaagatgcatgtgatttacatgttatatttatttttttctgt

SEQ ID NO: 514381 - DNA, 577 bp, Homo sapiens
ctcaaaccaaacttaggatacttctcatttagtgtaaaaaagatgttggaatgaagcttaaaaaaaggagcagtgaggagggaaatcagatagtttttgccaagccaaggaaagaaggaatattttcaaatgggaatggtcaagcacaaaagctgaggggaatgagaactgaatgtaagttgttattttgtgaataaagtacaattccatgtgacgttgcaggtagaagccaaattggaggaggccagcacaggagaatgggtagggatttaaggggttcagtggattgaaacttygctgctttgtcacctgatttatcctattagaatgatatcttcatcccattcatgttcattcaccttaataacatcttaaaaatctttttagaaagtccatatatatatatatatatatatatatacacacacacacgtacatatatatatgtatatatatatataaatatgtatatgtatatatatataaatgaagaatatgacttagcctaatgaaaattccatgtggaaaaattttgtaagatgcatgtgatttacatgttatatttatttttttctgt

SEQ ID NO: 514382 - DNA, 312 bp, Homo sapiens
actgatggctgggaaagtagaatctgttaaccctcaggacatcacatttgatcccaatgactctctcagcaagtgatatgtattagtaatatttaatccaatattttgctaattttaaattacatgttcatttttacaaggaagattcccccrattcctatagtagatgcatggccatttcaccccattcccctgggaggctccgtggccctcttgtttagagcaactgaggctgcagccctggtctgtggaagggcccagccccatgggcccatctcactgaaacagaccccaccaacaccctggactgca

SEQ ID NO: 514383 - DNA, 411 bp, Homo sapiens
ctaaggaacctcagcactagtggcccggactttccacaggtgagcagaggttaaggcagacatggtaacacctcatcattgcatgcatgtgaagaaacactgatggctgggaaagtagaatctgttaaccctcaggacatcacatttgatcccaatgactctctcagcaagtgatatgtattagtaatatttaatccaatattttgctaattttaaattacatgttcatttttacaaggaagattcccccaattcctatagtagatgcatggccatttcaccccattcccctgggaggctccgtggccctcttgtttagagcaactgaggctgcagccctggtctgtrgaagggcccagccccatgggcccatctcactgaaacagaccccaccaacaccctggactgcag

SEQ ID NO: 514384 - DNA, 406 bp, Homo sapiens
aaccttgagcaagttacggaatctctccgtgcctttgcttcttcatctattaatgagaataataatggygcctctctcgtagcgttgttatgaggtttaaataagcaaattcgtgtcacctgctgaggacacagactattgctccaggattttgcacttgctactccttcagcctggaacaccctcatgctacctcctaagaaggaaagggactttccctgactcgccccactctgtcgatcagctcccatgcaagactgggttatgattcctgcctctgggtcctcatgaaaccctatgctacttgaaggcattttatctacttgtcagattctcccattaggctgaactccctgaaagccgggatttggccttaagcattccaatgttagcacaatgttttgca

SEQ ID NO: 514385 - DNA, 445 bp, Homo sapiens
ctcctcacatacaggtgaggagtcttcagcccaggaaggtaaggcaacatgcatgtagttacacagcaaattaagggcagcaagaatccaggactgttccycaaccaatcagtaacattttttcaatcagtaacaattttttagaaaagtcgcattggtgataagtcattttaatattgttatggcagataacatgatgctttgacttccaagtttattttctttgtagagatgagaaattctatctagctctgtaacttctttgaaagccgctccttgtatctctgtagcctctggcatttaaaaacccatgttcacaaaaatttaaataattcaatttaaatagttaaatttttagttgcctttgagatgggcaagatatgagctattgcatcccattgttagagatgaggaagaaaaagccacttgtccagcacctgaaagc

SEQ ID NO: 514386 - DNA, 613 bp, Homo sapiens
aaaaatttgagttcacttctcttttttttctcttattgggagaagtgtggaagcgagatggagctaattctcagcctatcatcttgcctgatgtctggagtatgaattaataaatacaatttaaaaacaatatgcttctctcatttgtaaaacktcctttgtttattttgcaaataggtgaattaactaatggatatctgtgtccctgaacaagataatgaaattgttcacgattcagtttacagtttattaggtacttagtgcatttagcacgtcagatgcaccacattaaaagaaataacagcaaattcacaaccacaaatgccttcctaatccacttgtcccactagagctcatagaaaaggcctttgaagtaaaaattaatggtgactttgtttagttgtggatgtctaaaatcaatgccccaagaaaagtttcctaagttgaaggaatgaaaggagcttttcttcacttagcttctccttctgaaatgcattttgcacctgctctggttagaatatcctgggccccaaatctttgttctctatggaatactcacatgcttcctccattatttaggggtgggggcctgtcttcctgataattggtgggt

SEQ ID NO: 514387 - DNA, 495 bp, Homo sapiens
cacattgcctaagcacctggtattgctaggacctatgccaggaagattttcttgttgcccttaattcaatgcaagagccctggaaggttggtagcagtatccctcaccatataaatgaggaacatggtatccagagagggtaaagaatttattcaaagccacctcattagttttaaatagcacaagccaagccaatgtaccctactgttttgaggccaagaacagtgcccgttctttaacccaacactgagggatcctggagctrtggatgatttaggaatcgctcgctcacaaattttagtgacaggttcatatgctgagaaaagaaaaagtataacaaacctctaaacacctgtgcctcttcacatgcctggctgggctccacgggcatgactctcactgggttggcacatctaatggcacttttgtcatttggtgcactgtgggctcctcaggatgacttcttgccacctctggttgcctgactagaacaca

SEQ ID NO: 514388 - DNA, 595 bp, Homo sapiens
ttgctcaaagaaggttctggagttggcgtgtcctacctacttcctggtctctaagcctggcaaccactaatccgttcaccatctctccagtgtcatttaagaatgttatataaatggaaccttacagcattgccgcctttgaggattgggatttttcacttggcttaattccctttgagattcattcaagttgttgtatgtatggctggttggtttctgtgtattgactggaagatttttgacccagccttagaccagaacactgcggaagaggaaatccatcatggaaacccgagagtgacaggacccttgcttggtgacaagtagagctggtcatgtcgacagccccctcttacctcgtcgcgtctcagcagatgtccatggggtcgtattgggagtgacttttgtaccagttggcttggctgattttggaaagagtggaagaacccccttcaccttgtgagttttgttcatctgtgttgcatgtgtttgcacagtgtacattgactgaaacrtgaagaaacagcccttgggcttttgagtctcggttttctttcttggcgctcatgctctcagaataataatacgtgtggtg

SEQ ID NO: 514389 - DNA, 611 bp, Homo sapiens
tcagtaaaatggtgaggaaatgagaaaaatcatagttgttaaccatgtgttaccagcagctagccttttaaaatataaaactttggctgggtgtggtagtttaggcctgtaatcccagcactttgagaggccaaggtgggtggatcacytgaggtcaggagttcgagaccaatctggtgaacatggtgagagcccatctctactaaaaatacaaaaattagccgggtgtggtggctcatgcctataatcccagctactcaggaagctgaggcaggagaatcacttgaacccgggaggtggaggctgcagtgagctgagatcgtgccactgcactccagcctgggcaacagagcaggactccgtctcaaataataataataaaacgtataccactaataacaaatagatgagatttaatctctttagatgggaacaatccaataaagtcctacaataatatagggcaataaattttggagagctttaattactgtgcaagaaaaatattctagttgaaatgaagagtctccttggcctgtttccgcacagcagagcaaaccgtcttctccattcacatttcttggagttaagagcctggcctaggctgggcg

SEQ ID NO: 514390 - DNA, 611 bp, Homo sapiens
tcagtaaaatggtgaggaaatgagaaaaatcatagttgttaaccatgtgttaccagcagctagccttttaaaatataaaactttggctgggtgtggtagtttaggcctgtaatcccagcactttgagaggccaaggtgggtggatcacctgaggtcaggagttcgagaccaatctggtgaacatggtgagagcccatctctactaaaaatacaaaaattagccgggtgtggtggctcatgcctataatcccagctactcaggaagctgaggcaggagaatcacttgaacccgggaggtggaggctgcagtgagctgagatcgtgccactgcactccagcctgggcaacagagcaggactccgtctcaaataataataataaaacgtataycactaataacaaatagatgagatttaatctctttagatgggaacaatccaataaagtcctacaataatatagggcaataaattttggagagctttaattactgtgcaagaaaaatattctagttgaaatgaagagtctccttggcctgtttccgcacagcagagcaaaccgtcttctccattcacatttcttggagttaagagcctggcctaggctgggcg

SEQ ID NO: 514391 - DNA, 664 bp, Homo sapiens
tggcacccccagacaggaagctctacaccctaggagaattctaattcagttggatttaccatcaaatgactgtaacaaagaaagaatatattaaaatgttcattggggatcttggttattataaattacattatttgaaatctcatttagatccagaaatttccagactgggtttggaagctctgaggattagtccttttggaacaatggagtgtcagtgatcatttggaaaagtaattatgtcaaatttaattatcatgcatatgcatttcatcracatcactgtgcacacccaggagacagtggggaaaggactgctccagcatgagcccttgatagaggaatgcggtgcaaaattgtacatgttgtaattgagtgtcacttaatctgaagcatgatggatacagcgactgtgggtggagcaaatgggaggaagtatttggcccactcagcagatgtttgagatatttgggaaggcttttcaatgttttcaacatattggagaggagcaaactacatttcaagtaggctgataacaatgtttccctgtcttaagcatttcttttgttttctgttcctgtggtagcttcacaattctgaattgcagaatggtttggaataatccagtaaaccgccaaatgagactttgaaagtgtgtgtgtgt

SEQ ID NO: 514392 - DNA, 608 bp, Homo sapiens
agaacattttcatccaaaaggcggtcattaatccttaagctataaaactacactttgcctcagtctccgcattgtacagggaatcagtaatggtgcctacctcattaggttgtcttgaggattagaggagtttatattggtacagtgctcagagcaatacctggcataacctataaaactgttagctcagtgtaagtgacaaatggacagagggccaaatgcctgtgtctatacagtagtattcccttatttgcggtttcagttttcatggtttcagttacccacagtcaaccaatcaactatggccccaaaatattaaatggtaaattccagaaataaacaatttgtaagttttagactgcagtgctgttttaagtaacgtgatgaagtctcactccatctggctccatccyacctaggacatgaatcatccctttgtccagcgtattcacactgtagataatgcctaccagtcggtcactttgtacctgtcttggttatcagattgtctgtcttaggatttcaatgcttgtgttcaagtaacccttatttgacttaataatggtcccaaagtacaagattagtgctgctggtcaattcagatatgt

SEQ ID NO: 514393 - DNA, 608 bp, Homo sapiens
agaacattttcatccaaaaggcggtcattaatccttaagctataaaactacactttgcctcagtctccgcattgtacagggaatcagtaatggtgcctacctcattaggttgtcttgaggattagaggagtttatattggtacagtgctcagagcaatacctggcataacctataaaactgttagctcagtgtaagtgacaaatggacagagggccaaatgcctgtgtctatacagtagtattcccttatttgcggtttcagttttcatggtttcagttacccacagtcaaccaatcaactatggccccaaaatattaaatggtaaattccagaaataaacaatttgtaagttttagactgcagtgctgttttaagtaacgtgatgaagtctcactccatctggctccatcctacctaggacatgaatcatccctttgtccagygtattcacactgtagataatgcctaccagtcggtcactttgtacctgtcttggttatcagattgtctgtcttaggatttcaatgcttgtgttcaagtaacccttatttgacttaataatggtcccaaagtacaagattagtgctgctggtcaattcagatatgt

SEQ ID NO: 514394 - DNA, 573 bp, Homo sapiens
accccagagcaatccaaacttctcacggatcaaggcagtctctcacaggctctgaaaacaggcaggcggcagtcatgtcccttctaattaccagcacaaccacctgcaccccacggtaaatggacggtactgcacgtcccagcctgccctctgtggacatggagctaataagatgtgaattcatggaggaaaatctacgaaaagtggactttgcaagtagttacaatctgatactacctgcacaattattaaaataagccacccaagactatttcagccatattagcaaagaactaatgaggaaacagacatcataaaagaatgaattacctacataataaacctgcatcttccagaatgaagccattagaaattgatcagtaatttaggagcagctgaaggccatagccatgatgaaagcttgcaccaggaacacattctgagtcagcttttagtgaatatagygcactgaggtcacacaggccaccccggtagtgctcctcaaaggatatgtgggcagaggggattctttgggaaagctagagtgtgtgatttcaggccactcttatgcaa

SEQ ID NO: 514395 - DNA, 496 bp, Homo sapiens
ccaccacctccatgtgctccccttcaaggcagcaggacgtggtgtttccctcccatcttggccacagtgtggatcgagctgcataatgctgtgggcatcagcacagaagtgatgacccggtcagacaagcaaagggcagcccctgtatcctgtgggcggggagggaaggggggccggccttctgctcagggtgggctcccagcaggtggggtggctggttccctgctgtctgcagttagacttctctcctgaagctagacactgtggctgrgggacacaaaccccgtgggagctgggaactagggcccaataagcccaaaggaattgctgcggtggccagatgcctgcacccctctaaattgctgtgaatcccacgagacctagccaaaccactgggcccatctgcctggctcctgtggccatgatacattggcaaacacagaacttcagaagaagaattaaggatgtaagaagttgcaaagcatccagctgactt

SEQ ID NO: 514396 - DNA, 366 bp, Homo sapiens
cctatcccgtgtctgcaaggtacccctctatgcagaacaccactccccaagaaacgagtgcacctgtatgtgcgcttgtgatgtatctcatgtgctgaggagggatactgaattagaaagctggatttgaagtgaattgagtaatctatggatgatttgttagagtgaattcacytttagaggcttcaaaagagcatttagggaaatccatagcgttaggaatttagtcacaatgaattgcatgtggtttcagtagcagggaacatgctttagtgtaggtgagaatctactacagcccagggcagagccagggccccttctgggccaggtgtttctgggactctgtagggtcacagggactatgag

SEQ ID NO: 514397 - DNA, 566 bp, Homo sapiens
ctgaccctccagtcctgtgcctggcgccaggctggccacctcaggtgcctgagagagggggaggcactatgtcctccacttcctgtttcaggtgtctggaccttccacgttgccaaggcaatgcgcctcaaaaaccctgaagccagtgggagctggcatctctcaatataagaagctttgagcaggaggcctgaatgtaattgagttggaagggaagctgattttcaagtcggctttattttaaaatgtatctttttgtcattttaaaatctgcccttaataactgcatatcctrgttgttatctgtctgcctagcagcttatcgctgctaaggggaagttatctggaaagcagggagtgggatttactgtagcaaatgtttgtgattcaggcctagggtgcattaaagcaagtccagggagtttcagatgaaccaaggagaagggattaggaccgtatcatgggggtagggcagcatttggaggcagagctgagtggtagtttcgggtgggagacggggctgtgaagggtggggctgggaaatcggggtaacttaaaaataaagg

SEQ ID NO: 514398 - DNA, 602 bp, Homo sapiens
ttcctcctagtaatctaaaacagccacactggcccactttctgttcctcagacagtccaaaactattcccagtttagagcctttgtacatgctctccttctggaaacattttcacccyagaactactcttaatagacttcttgcattagtcagttatcattttccctaaagggattccttatcatcctaagtagactcccctactaagtccttctctgtcctgtattcctattgtagttttcaatagtattcataactatataaaatgatccaacttattttattatttagtttctaaacttttatagatttcttgtctatctcccctcactggaatataagctgcatgaggacagagtattgtttgacctattttcagcaggtccttcagcacttattaaaatgcctggcacagagcaggcactcaataaaaatgaatgattattactatcattaccataaattataaagatatgcatacctatttttacagttagctgaattccaacaggagcatctattcttaggtgactagggtgtagatctggaagaatcttaatacatgatcatacagcgctctccctcaacaaaaattcagagaa

SEQ ID NO: 514399 - DNA, 630 bp, Homo sapiens
cactgcctagctaataatatcctatcacttcctcctagtaatctaaaacagccacactggcccactttctgttcctcagacagtccaaaactattcccagtttagagcctttgtacatgctctccttctggaaacattttcaccctagaactactcttaatagacttcttgcattagtcagttatcattttccctaaagggattccttatcatcctaagtagactcccctactaagtccttctctgtcctgtattcctattgtagttttcaatagtattcataactatataaaatgatccaacttattttattatttagtttctaaacttttatagatttcttgtctmtctcccctcactggaatataagctgcatgaggacagagtattgtttgacctattttcagcaggtccttcagcacttattaaaatgcctggcacagagcaggcactcaataaaaatgaatgattattactatcattaccataaattataaagatatgcatacctatttttacagttagctgaattccaacaggagcatctattcttaggtgactagggtgtagatctggaagaatcttaatacatgatcatacagcgctctccctcaacaaaaattcagagaa

SEQ ID NO: 514400 - DNA, 514 bp, Homo sapiens
ggcaccttctcctctggcctaccaaccatgccctctgccctaataagtgggcatctaaatcagggaggtggggatgttcccagaattagcagtgggcaaaggccaatgctacaaaaacctggggtccactctctcccctgggccctcctttctcccagcctgtaatatttccagaagagctttgcctacctccagcctactgtccactcaacaaatccattcatatcttctaggagtccccataatgcctgtcaactttgctgaacattggtatccttggaagactttaaaatagactgatgcctggctcccacacctgggcttatgatktaagtagaatggggtaggacctgggcactgggatttttaagagcttccaggtgattctaacatacagcaaggactggagacccatgtcatattgttgtcttgttttgtttctttgaagttctcatcatgtgtcttcatagaaattacaatctaatggagaaaacagccatgatttcatgtaaaa

SEQ ID NO: 514401 - DNA, 604 bp, Homo sapiens
atacaagatcccagttcagatctgggcaggatgcagttgattggtcaaggctgtattatagatgcccattttctatgtgcaaaaaagctggaaaagcaagtgtctggtcttacggcttctatagttgaagattaaggtcttgtctcccaacaaaaggcagccttaaaagtcaatactccatttcacccatcttcactgatattttctccagcctcctgagttactgtactaatcactgcccagacattacatttccttgtagtgcacagcagagttcctgaagatttaaagaaaaaaatcaactgaagaatgatttctgatgctgacaatgaaagacacttgcttggatggaggcagggtgtgcacatgtgtgtgtatttgtgtgtgtgtaataattttatggcattctcactatatttgatattattattgatttttttcaggttgttatttttatttttagagacaagctctmgccctgttgcccaggctggaatgcagtggcatgatcatagctcactgcagcctcagcctctcaggctcaagtcattctcctgcctcaacttcccacatcactgagagaacaggcatgagccattgtgcc

SEQ ID NO: 514402 - DNA, 559 bp, Homo sapiens
tcactcatgagtaacacaggcagttaaatggtaccatctggagcaagaggcatctctaagtatccttatttaagaaccagtttacaaataataacagacccctggaattaagcagttagctcctttgtcatggataacagcattcaagggaaatagcttgcttcattgattttgaatcatcacaaacagaaatactaggatattttggctgtttcatyagaaataccaagaggaggatctttcaaatcaataatattgagagtaacagataatccagttggtgtactctagtttatagacgaaaacaaataacagcatttcatacttagaagaagagcaaggaaattaaactgacctaaagaaagaatggttgcagttttggaaaaagcaaaaggcttatttcataacatagaaatactgtataaattaaacaaagtttctagtcattacttgtcacaaactatgttttcactttaggctttgcttatctgcacagtattcatcaaaatcatattttgtttatttgtactgtgcatggtgtattgtatatgctcaagaa

SEQ ID NO: 514403 - DNA, 633 bp, Homo sapiens
ctttgctgctttttttctgatttttttctttctctcttgccttctggttgacagataaaactttctatgctatgctttttcctattgtaatttggaagccatgtgggctgattccttccttcctaccscagctttaaattcaaaaccattgcataagtcgtacataaaaatgtaaccatgtaaaatatttgagtctaaacttataaattttgcattctccctaaagaaaaaatttctattactgtggtggatttctttaaattttgaatatagttactgaaatattaattctttcaattaaatttatatttactcactggttccttccccttctttaaggagacagaaaacattaacactttttaacctctcatttgtttaaaaatttattgacctctcctctgagacagtttgtattcctagatctctttaaacataaatatgcttattttcaagtttttgtcacagtattctaaaacatctttacttggagtgactttttgtttcacttactgattttgttgcctagattagcattcaatttcttaacatgtattatcgttttctgagtttatttttgcttgtgtttttctcactcactgtttacctttccccatctagtgattagtggtt

SEQ ID NO: 514404 - DNA, 617 bp, Homo sapiens
gatgttctttttttttcaacaactttattcagatatactcccacataccctgcagttcacttatttgtacaattcaattgtttttggtatattgcattattaatttttaaaaattatggttagatatatataagtaaaatttgacattttattcatttttaaatgtaccattcagtggcatcatttacatttacaatgctgtgcaaccatmatcagtatctatttccaaacaatttttatcaccccagacaaaaactccataatcaataaataaggactccccacttctctctccctagagcccctggttagctctaacctactttctaaaaaaaaaattttttaaaaaggaatattctttattgagttgtttacttagcttttcttttcaaattgttttgagatcattgccaaattattatagaaacagaaatgatctcaagatgaagagccatttagctaagattttcgacaatgaaaagtttctcagtaatattaaagtaaaataatggctatcttattgaattattttcttctttaggtgaaatctgaaacacttacacatttttaaaacatgttattttgagaatttgatatgtgtgagtgatacttgcata

SEQ ID NO: 514405 - DNA, 617 bp, Homo sapiens
gatgttctttttttttcaacaactttattcagatatactcccacataccctgcagttcacttatttgtacaattcaattgtttttggtatattgcattattaatttttaaaaattatggttagatatatataagtaaaatttgacattttattcatttttaaatgtaccattcagtggcatcatttacatttacaatgctgtgcaaccataatcagtatctatttccaaacaatttttatcaccccagacaaaaactccataatcaataaataaggactccccacttctctctccctagagcccctggttagctctaacctactttctaaaaaaaaaatttttwaaaaaggaatattctttattgagttgtttacttagcttttcttttcaaattgttttgagatcattgccaaattattatagaaacagaaatgatctcaagatgaagagccatttagctaagattttcgacaatgaaaagtttctcagtaatattaaagtaaaataatggctatcttattgaattattttcttctttaggtgaaatctgaaacacttacacatttttaaaacatgttattttgagaatttgatatgtgtgagtgatacttgcata

SEQ ID NO: 514406 - DNA, 305 bp, Homo sapiens
tgctgaccctggtcttaaaaggattaagaaagcaggagagctctgagacattctgatcaaattaacacgccagcaagtaacagtttaagtagcctcaggctaattttgagttatggagtgagaagtatagctgtaatagtgtctgaacatatttagatgtagagtgcaattggaaacaaaatttgggaatatgcatgggttcctgatttctaaaagaaggttcttggatctacaactgaatttccttttgctttttgcacttgcatgagtgttctgcaaagrggctagacagggttgacaaatgc

SEQ ID NO: 514407 - DNA, 634 bp, Homo sapiens
taagaatgaaaatgacatctccattaaataatttgggcaccacacctatggagaggcacttaaatatgcatctcagatcttgatctttcagcaatcctacatggtaaaatagggactattaacctcaatctctagttactcagagaattttaggtcgttttccaaagggcctacaaaaaatggttaggctagatctggaagyagaactcttatgaattctcacctttctggtcatcaattgtgaaagaattctctagatcttaagtttcttacgtaccatgaaaatttatacccatatggtgagcacggagcctagaggagagattgagcaacctttaggaaaagtgtttgaagaggtcaaaagttatataaaagtgcaagatatgtacactagagggtaccaactttcctaggaaaacataaattgtgaaagggtagttttcacattattgggtataaagtgtttaaataaaaactctgatctaaggaagcatggcagaacatagtggcattgctcagaaatcactatggtttccacatcttcaaagcaaggaggatttcattttcagctcactctctgagctaaaatctctctgaaacatatcttctttcctgtgactaaaacatgacctag

SEQ ID NO: 514408 - DNA, 533 bp, Homo sapiens
atcctagaatagagggccctcctcccaatggaaaaggattgcttctgtaggaagaattttgaattttcataacattttctgaacacctattccccacacaatcttccattctttagagatatgttacatttccaaatggcatttattcatgtattcttttattcgttcttcaaaacattacaggatgcyccttataaatcattcactgtttgagtcacacaaaaattaataaaagggcctctgccctcaggaggcttacactcttagaggtcagatgtgaaaaataatcacaacacatacaatgcttcaataatacacttatatgctaagttcagtattaacaagaggtagcctaggataaaggttttggagtcaggttgccagggtcaaatccgtctttctatttatttactttgtgaccttaggcaagttacttaacctttctgtacctcattttccttggctataaaatgggaataatagtactgccaataactgtatctacttcatagggcaattttgagaattaaaaa

SEQ ID NO: 514409 - DNA, 598 bp, Homo sapiens
ctaatgcttatggaaatattcatgctttggttggaagacttataaataccaggacaatcagagaatgtgcgacattctaactatattgcattagcttggccaagagtagaatttgaacagaaataccagtgacaatggatcttttagagaatattatttatttgcttttttcacaaagtcacatcatgaaattgtaccaagtaggcatgggttataaacatgatctgaagcattgtgacatacttgtcagatataaactttcttaaagggtgatgggtttccagttcctctaaacttggtaaagaagggagagagaaagcagcagcacyctcacagtcgagaaactcaacaaattggtcactgccagagaggagtcatccagcctttctttgagacataaatgattatgtctgtgactaagtggatccccatatactggtatttattctctttgtaattacctctccttgagtgtgggatgaattgagggtcttacttctaatgaaaagaatatggcagtagtaatggaatgttgcttctgagattaggttataaaaaagactgtgcttctatcttgtggactctttcgtggtcttag

SEQ ID NO: 514410 - DNA, 632 bp, Homo sapiens
aaggaattcattaattaattaatcctattggttctgtttctctggagaagtctgactaatataccacctttgaaggataggttaggtttggatagaagtaragaggaattggggagaaaagggcaaatgaaagtgagtgaaaatcaattgggtgtgttgacaaaatctggaggatcctgactgacaatattagccaatgtttatcaagcttgtatcatgagccagcctctgctttacctgcactgtctcatgtaaccctcctaagagtctgatgacaaatgctattccctttttagagatgaagaaagctagtcatggagaagtcaagaatattttccaaggtcccgcatctagcaagttgcaagatcagagttcagaccccactaatctgactccagggactatgctattatattatgcagacaagtatttactgaggttgagtggattaaactggataaagctggcacatacacagctaggttttagatgctagactaagtgggttaggtaattgcagaccttaggctcaacttctgcattctgttgagaaggaaattgaagttcatagatgggaagtgacttatcaggttcacacaggccaactaattgagccagaacttgaccttaga

SEQ ID NO: 514411 - DNA, 507 bp, Homo sapiens
ctggacttttgagtacctcrtccttctataaaactgccccctcctctcatcttgccccagggccagagtgaggcctgttgaagcacagtgaggggatggagaagaggaattggggccctgcgtttccctgtcttcctgttttcctagcttcagcacaaatggccttagcagtgcacccagttcggggcctgctggatgaattcggaagaccagacctctcacccaagctctggttgtcatcacagtgtgtggctctggaggggccgctccctctctaagtccttcttccccatctgaggaatggaaggtcagccctccacggattgcatgtgccttccagttcttggatccctttggccctgccttcttctccctcatgttttcctgggctgagtcttcatctcagataccgctgctctctccacctccctagggatccgatctaggtctccctgagatcactgaatctcatgttttagcctcagatcctcagcattagcaatgtcc

SEQ ID NO: 514412 - DNA, 574 bp, Homo sapiens
gacttttgagtacctcatccttctataaaactgccccctcctctcatcttgccccagggccagagtgaggcctgttgaagcacagtgaggggatggagaagaggaattggggccctgcgtttccctgtcttcctgttttcctagcytcagcacaaatggccttagcagtgcacccagttcggggcctgctggatgaattcggaagaccagacctctcacccaagctctggttgtcatcacagtgtgtggctctggaggggccgctccctctctaagtccttcttccccatctgaggaatggaaggtcagccctccacggattgcatgtgccttccagttcttggatccctttggccctgccttcttctccctcatgttttcctgggctgagtcttcatctcagataccgctgctctctccacctccctagggatccgatctaggtctccctgagatcactgaatctcatgttttagcctcagatcctcagcattagcaatgtcccgtgaggcccaggcttccctatggcttcactgaaggagcagaatcagggcatgggatctcccagccccgc

SEQ ID NO: 514413 - DNA, 507 bp, Homo sapiens
ctggacttttgagtacctcatccttctataaaactgccccctcctctcatcttgccccagggccagagtgaggcctgttgaagcacagtgaggggatggagaagaggaattggggccctgcgtttccctgtcttcctgttttcctagcttcagcacaaatggccttagcagtgcacccagttcggggcctgctggatgaattcggaagaccagacctctcacccaagctctggttgtcatcacagtgtgtggctctggaggggccgctccctctctaagtccttcttccccatctgaggaatggaaggtcagccctccacggaytgcatgtgccttccagttcttggatccctttggccctgccttcttctccctcatgttttcctgggctgagtcttcatctcagataccgctgctctctccacctccctagggatccgatctaggtctccctgagatcactgaatctcatgttttagcctcagatcctcagcattagcaatgtcc

SEQ ID NO: 514414 - DNA, 574 bp, Homo sapiens
gacttttgagtacctcatccttctataaaactgccccctcctctcatcttgccccagggccagagtgaggcctgttgaagcacagtgaggggatggagaagaggaattggggccctgcgtttccctgtcttcctgttttcctagcttcagcacaaatggccttagcagtgcacccagttcggggcctgctggatgaattcggaagaccagacctctcacccaagctctggttgtcatcacagtgtgtggctctggaggggccgctccctctctaagtccttcttccccatctgaggaatggaaggtcagccctccacggattgcatgtgccttccagttcttggatccctttggccctgccttcttctccstcatgttttcctgggctgagtcttcatctcagataccgctgctctctccacctccctagggatccgatctaggtctccctgagatcactgaatctcatgttttagcctcagatcctcagcattagcaatgtcccgtgaggcccaggcttccctatggcttcactgaaggagcagaatcagggcatgggatctcccagccccgc

SEQ ID NO: 514415 - DNA, 507 bp, Homo sapiens
ctggacttttgagtacctcatccttctataaaactgccccctcctctcatcttgccccagggccagagtgaggcctgttgaagcacagtgaggggatggagaagaggaattggggccctgcgtttccctgtcttcctgttttcctagcttcagcacaaatggccttagcagtgcacccagttcggggcctgctggatgaattcggaagaccagacctctcacccaagctctggttgtcatcacagtgtgtggctctggaggggccgctccctctctaagtccttcttccccatctgaggaatggaaggtcagccctccacggattgcatgtgccttccagttcttggatccctttggccctgccttcttctccctcatgttttcctgggctgagtcttcatctcagataccgctgctctctccacctccctagggatccgatctaggtctccctgagatcacygaatctcatgttttagcctcagatcctcagcattagcaatgtcc

SEQ ID NO: 514416 - DNA, 121 bp, Homo sapiens
ctaagggcaggcctttgctgtgtttttaggaaaggtgacatgagtatgtatgaggtatgtgacaatcgttacatgtgcagggtgragctcaggtcacacaagcacagtgagaaatcatgtt

SEQ ID NO: 514417 - DNA, 483 bp, Homo sapiens
taagggcccataatcacattcctttaaggctcaaaatagtttaaatttccaatagcttttattttgaattacttattcataaactcccttttgatctttcatgactaattgatctgtctctggaaacacttccgtaaatcaaaaataaaattttaagcccctcaactgactgaatggatctcactctgagccaagcaaacccaaggaaacctgaaaaggtaggtcaggccatgacagaaaagagagggtcagacatgcttctttctactcrcttccttttggagttcaggtgcaactgatcagcattaacattaaaacagagatcttaagactgacaaaacagactctttgtatcaataagatatctaattccaacctgactctagtctgacatcacatgacacataaagaaggaaatcaaaatattttacctcaaatatgtttatttgccatattttcaaatggtcctgcaaaactgtcttc

SEQ ID NO: 514418 - DNA, 678 bp, Homo sapiens
atttattaagactattatcactaaaataagtaaaattacaaaaagtaaaaaaagaaattaaatacccatcactaagtgaattagagaataaattaataaatatatatccgtatcaaaaatgactttgcagtagccatgtagaagaggaagtggacctctattcccagcaatttgatgaactacactgatgttaaaaatctttttctaacaactccaatgatagatggcaatagatgctgaattaaaaagtctctttctttttaaaaaatgttatagcttaaaatgaaagaaacaaaaacaaaaattcaagtaccaaaacaatgaatatgatgaaagccaaagcaataggtgcataagctgatgtttctgcagccatgaaagagtttcagactcagtaatgttgagaaggttagctttcaaccttcaattcctcygggaataggagattaaggctcagatacacaggaagtatggagttacaacttaagtctctgaaaaaatcaagactgctggaatggatataattctggataaagaataaatcaataatttgatatatgaacccaaaagagtatacaataaatctaatgtttctcctcaatctgagtagaaagaaattatcccatggacaagtgaaatcataccccacagagtttagagtccaaatgtactctaccc

SEQ ID NO: 514419 - DNA, 541 bp, Homo sapiens
tgttttaaactaatgttcttttttctattctaggagccaaccaggagccatgttgcattttgacaaatacccttattttttattttttgagacagagtctcactgtgttgcccaggctggaatgcagtggtgtgatctcagctcactgcaacttccaccttccaggcttaagcaattctcgtgcctcagcctcccaagtagctgagattacaggcgtgcggcaccatacccagctaattttttgtgtttttagtagagataagatttcaccatgttgcccaggttggtctcgaactcctgaactcaggtgatctgcccaccttggcctcccaaagtgctaggattacaggtgtgagccactgtgctcggccttgacaaatacycttacaatttctaagtgacatgtgttgaggtcttgacattgaatagtacaaaatttgatatagtctaggatgtagatgaataaagcagtggttagcactctaaaacctggtgttaaagatttccatgattatgagacctggtttcttcaccacggggc

SEQ ID NO: 514420 - DNA, 618 bp, Homo sapiens
ctgtaatctcaactactcgggagcatgaggcaggagaatcacttgaacccaggaggcggaggttgcagtgagccaagatcgtgccactgcactccagcctgggcaacagagtgagcctccatctcaaaacaaaacaaaacaaacaaaaaagaagaactaagaggaaataatcaaaatcaagcattacactggccaaatgtctgaagttcagtaactaaaaatcccacaggtctctaagcaaaagacaaggtactgttacaaggaggaaaagtttttggtgggccttagatttcttcacaataacatttgatgccacaggttataaaaacaatgtctacaaagtgctaagggaaatactatgtggcctgaaacaaccagactcagccaacttgttgtataaacataaaggcaacaggcagacattcccaagtaagaaagtaacgcagtacataaaaggcacacttcggcaaagggcagggggtgcgggaratctgccaagtgactgtactcaccaacaacgacattaataaagataagaaatgagaaataaactgtgccataaggactgaaagtaagcactgcatccatgtgaattatacttgggaaataacatgatat

SEQ ID NO: 514421 - DNA, 618 bp, Homo sapiens
ctgtaatctcaactactcgggagcatgaggcaggagaatcacttgaacccaggaggcggaggttgcagtgagccaagatcgtgccactgcactccagcctgggcaacagagtgagcctccatctcaaaacaaaacaaaacaaacaaaaaagaagaactaagaggaaataatcaaaatcaagcattacactggccaaatgtctgaagttcagtaactaaaaatcccacaggtctctaagcaaaagacaaggtactgttacaaggaggaaaagtttttggtgggccttagatttcttcacaataacatttgatgccacaggttataaaaacaatgtctacaaagtgctaagggaaatactatgtggcctgaaacaaccagactcagccaacttgttgtataaacataaaggcaacaggcagacattcccaagtaagaaagtaacgcagtacataaaaggcacacttcggcaaagggcagggggtgcgggagatctgcyaagtgactgtactcaccaacaacgacattaataaagataagaaatgagaaataaactgtgccataaggactgaaagtaagcactgcatccatgtgaattatacttgggaaataacatgatat

SEQ ID NO: 514422 - DNA, 618 bp, Homo sapiens
ctgtaatctcaactactcgggagcatgaggcaggagaatcacttgaacccaggaggcggaggttgcagtgagccaagatcgtgccactgcactccagcctgggcaacagagtgagcctccatctcaaaacaaaacaaaacaaacaaaaaagaagaactaagaggaaataatcaaaatcaagcattacactggccaaatgtctgaagttcagtaactaaaaatcccacaggtctctaagcaaaagacaaggtactgttacaaggaggaaaagtttttggtgggccttagatttcttcacaataacatttgatgccacaggttataaaaacaatgtctacaaagtgctaagggaaatactatgtggcctgaaacaaccagactcagccaacttgttgtataaacataaaggcaacaggcagacattcccaagtaagaaagtaacgcagtacataaaaggcacacttcggcaaagggcagggggtgcgggagatctgccaagtgactgtactcaccaacaacgacattaataaagataagaaatgagaaataaactgtgccataaggactgaaagyaagcactgcatccatgtgaattatacttgggaaataacatgatat

SEQ ID NO: 514423 - DNA, 558 bp, Homo sapiens
ttttaattctgaagtatcctaacttccttataagactcaattttgcttactatttggcattataaacacaaaccgtggttaccctaaatgatttactttagaaacttttatttaatatagaattacatgtagtattcctttaagaaaagtttctgaataagatgttaaagactgagattactattgataaatactacytaatatacacaatcaacactggcatccatgtcagctttggtgaggaaaagaaatgtttatggtagaggtttgggattttcagtatcctctattataagggaaccagaagattatcacactgaaagcaggtacaggtgcgggagccagctcacaccagctcaggagagccactgcatgcatctctttccaattccatggtcacacatgtagctaccagggaacatggtgagtatttataccacagaaatcaacaaacaccacaaattggggttatttttcccagaaagggtttgttaaatatgtaccagcataccactgtcacaagcagaagacaattggacaccctacacagaataaaaa

SEQ ID NO: 514424 - DNA, 602 bp, Homo sapiens
aatatgcacaatatttcaagtatattgaatgatctagaaaattttcaaaaggtagggataatcagagtcaaataaggagaatgcaggttgttcaccaaattagttcagggttaaaagtttcatttgattatgagttcaatgsgggtagaaaattatttgacagcagtcttttgggctgcttttagataccctaaggagaaaacagagtacaacttcggggaggggtgactgctcaatttctcaccatagcctttttgtcatatagcttgttgctatggagaaggccgtgaaggcagcaactaaaggaaataaaggatctggcaggagtaagcacagggatagtagattaaacaaaaatttcttgagcaattagtgagtagcagggcctataaatgacatacttttcttgtttttcctaacccctacccctttgaaagtacatgggcttggtttaccactataatttaattgaaatacagagaagcctgaatgggcctaacaaagcttaagcctggcagacaaaacacaaggccacttagcaatgctgcctaatgccaggaggaatcagctacctacccaccctatcctggtgaaattatctc

SEQ ID NO: 514425 - DNA, 640 bp, Homo sapiens
gtgaaccaatctttttctttttctttctagtatggtgaaccaatctcatttcaggtatcacactctggtgataataactttcaaatccaaatcttcctcttctcactcctctggctagtatgacttaggcatttcacatttctcaaactctttcattttatttaatattttttgagacggggtctcactctgttgcccaggcttgagtgcaatggcacgctcacagctcactstagcctcgacctcctgggctcaagcagtcctctcacctcagcctcccaagtagctgggaccacaggcatgtgccaccatgcctggataattttttttaatttatgttttatagagacagggtctcttcaggttgcttaggctggtctcaaactcctgggcttaaacgatcctcctgcttcgacttcccaaagtgctgggattacaggtttgagccaccacgcctaaccatttttcaaactcaatatgttgtcgccttctctttattattccttatttttaaaccattacctcttataacttttctgtgtccatgaaaggcaccattattcttccagtcacataaacttaaaaccttggtaaaatctttaccaccctttttcttaatcttttagcttaagccagtcac

SEQ ID NO: 514426 - DNA, 640 bp, Homo sapiens
gtgaaccaatctttttctttttctttctagtatggtgaaccaatctcatttcaggtatcacactctggtgataataactttcaaatccaaatcttcctcttctcactcctctggctagtatgacttaggcatttcacatttctcaaactctttcattttatttaatattttttgagacggggtctcactctgttgcccaggcttgagtgcaatggcacgctcacagctcactgtagcctcgacctcctgggctcaagcagtcctctcacctcagcctcccaagtagctgggaccacaggcatgtgccaccatgcctggataattttttttaatttatgttttatagagacagggtctcttcaggttgcttaggctggtctcaaactcctgggcttaaacgatcctcctgcttcgacttcccaaagtgctgggattacaggtttgagccaccacgcctaaccatttttcaaactcaatatgttgtcgccttctctttattrttccttatttttaaaccattacctcttataacttttctgtgtccatgaaaggcaccattattcttccagtcacataaacttaaaaccttggtaaaatctttaccaccctttttcttaatcttttagcttaagccagtcac

SEQ ID NO: 514427 - DNA, 297 bp, Homo sapiens
gtttccaacacatgaaatttgagggatacattccaaccatagcaccaagggataacctctsaagtatttggggaaaactactccctgatcccaacatttttttcagggtggttacctttcttatgaccaagaacaggaaaaagttgattgacccagggcccctatcagttgatttcatggcatttcccattgtatttttcccacattgcagaaaagaccataaacattgagctgcttaaatctcacagggatgatttctacttatacttcctagtaatgattgagttgtgatattca

SEQ ID NO: 514428 - DNA, 670 bp, Homo sapiens
ggatctatttgaattaattttgtttacattttgtatcagagctcattccttaggtggactgaaggagaacagcaaagctcatttggattttacattttgcttcagttgtgaagaggttcttgctgcacatggaggctcttggttgattgttctcttttctgtctcctggttgactattctcttttctgtctgaactgcttctgatctttcagtctcattttaaatrttttgtattacgtgtatttttaacatgataagctactgtaaatgtttgtgaagtgtgtattaaaaaattatactttagaaaaattagctttcattgactgtgactgaaggaatgaataaatgaatgaaggtagtgacaaatattacttttttatcaaactgtttattggatgtggttgcctcatggtctttccacttagattacaagcttctagaagacaggaattaccttatgtttcatcagtatattccttggtctttagcccaaggttggagtgtaggacttgtgtgaacacttgtaagaaagtatatttaagaaggaaagccctctaaagttaaagaaagggcaggaaagttggaaatggcagtggtatcagatggagttggccaaatgttgttgaagtctcaaaatgtcaactcatagctttatatcagtttaaggagg

SEQ ID NO: 514429 - DNA, 546 bp, Homo sapiens
ctgctgtggctggctttcgccccaagggggaagggtgagctgcaggtcaggccagcacactgctgagtccagggggccctgcgtggggcaacagcagccctcatgctctcacttgcagaagcagacactgtgctaataagtttcatcaggaaacttatttaccttggccaagcctgggcgccaaggtaaaagcagtacagaagggacagtgttgcyagctttgtccctatgaagctgggatgcagagaagtgaaacaagcaggccatgtctctcatctcctagcatctcaaacaaaggaagtgtaaagggctattcatttctgcacatcaagtctaacagtctttaaacagataccaagaagcttgttgttttagtgagaagtttgcttgagacaagccccacctgtttcctcggctcctgagagacccttcagtttattcaacagtccagccgtttcttatgggactgtgatcaggctcccagccttccagacccacctcctcttgcctggggctgagcaggcctggtgtgcaggaaggaggtgg

SEQ ID NO: 514430 - DNA, 670 bp, Homo sapiens
ggatctatttgaattaattttgtttacattttgtatcagagctcattccttaggtggactgaaggagaacagcaaagctcatttggattttacattttgcttcagttgtgaagaggttcttgctgcacatggaggctcttggttgattgttctcttttctgtctcctggttgactattctcttttctgtctgaactgcttctgatctttcagtctcattttaaatattttgtattacgtgtatttttaacatgataagctactgtaaatgtttgtgaagtgtgtattaaaaaattatactttagaaaaattagctttcattgactgtgactgaaggaatgaataaatgaatgaaggtagtgacaaatattacttttttatcaaactgtttattggatgtggttgcctcatggtctttccacttagattacaagcttctagaagacaggaattaccttatgtttcatcagtatattccttggtctttagcccaaggttggagtgtaggacttgtgtgaacacttgtaagaaartatatttaagaaggaaagccctctaaagttaaagaaagggcaggaaagttggaaatggcagtggtatcagatggagttggccaaatgttgttgaagtctcaaaatgtcaactcatagctttatatcagtttaaggagg

SEQ ID NO: 514431 - DNA, 634 bp, Homo sapiens
ccctttagtgcaaagtggaaagttattaaaatggtgtcagaggtgcttcatgttccgggccttcctgcctctctggtagtatctattaatattttggtccactggcctccctgctggccctcatgaccagtttgccaccaagtccccactctccctctggccctctctaccctgcttcacctgtggccccacagcaaaggcacccacccacctggctagcacctactcaccctgcacacatcagcattgatgttactgccctcaggtggccttccctgtgtcagtatcctccccactcccaacgtgtgttctatgccctcctaagtcctctctaaaacttgattcttaccttcatggttgaatggtcacatgaccaacatgcctgcatcacccactagacaggaagttccaagaaggtcctatctattttcctcactattgttttccaggcacctagcacagagcctggaacttagcaggagcacagtgaaaactgcttcattgcatgaatgaatgaaygaatatgctttcctactgctttgttccactggctggctgagattacaccatcgcctctacacccactggctgtctgtacccatggatgcttaatgaaaggtgtcttgcatgggca

SEQ ID NO: 514432 - DNA, 456 bp, Homo sapiens
ctgtgtaagaaaaacaaagtctcccaagtagccttgagttagtaatgccataaacagtggcttttatctcaatgctggtagaaaagtaacagtggatttaaagcaggcagagaagaaaatagagacagagaacttaagagactgtatttaactctatagttgcaagtcaactattacactctgaatttttcctgatgtaatttacccatgtgtttaaaaatgtgtacaagaacagaccataatatgtaaccaactggagtcctagaaaacctaacatggcttcaaattttcccatttacacaaatacttgtgagtagaggcaccataaaaccaaccagcgtgcccaaagcgggtctttctccttgtcttttctcattcttagaggattcatttccttttttaaaggcaggaactgaactgtagtctgggkttcagtgtagtggagttgagaagctc

SEQ ID NO: 514433 - DNA, 697 bp, Homo sapiens
ttgtatgttctcacttgggagctaagctatgagaacataaagaatgatacaacgaattttggggacccggaggaaaaggtgggaaggtggtaagggataaaagcctacacattgggtgcagtgtgcactgctcgggtcaygggtgcaccaaaatctcagaaatcaccactaaagaacttacacatttaaccaaatactacctatttcccaaaaacctattgaaataaaagaaaaacaaacaaacaaacaaacaaataaataaataaataatagatttgtatgtggtgtgagatagggactgaagttcatcttctccatgtggacatctaattgcctcagaacgtttcattggaaacactttctttcccttattgagtttctttggcacattgtcaaataagtgtggccacaaagtataggtatatttccatactctattctgtttatgtagtataaatactccaatattttttctttttcaaaattattttgactctactagatcctttgcatttccatacatattttatgtattttatgaatttccattcgaaaagcctactgatattttgattggtatgtttttcaatctatttatcaattttgggcaatgagtatattcagtttaccatttcacacagtatatgtgcatagttatttaaatgttcatgtctgataaatcaaatatcatttatca

SEQ ID NO: 514434 - DNA, 653 bp, Homo sapiens
tggagtgctaatgctataagcaaggatttctacttgatatagaattaatttacttactgatgtgtctttggtraattgttccagccttttctgttactttttatgtttgtacacttttatctaaccaacacagcatgggataggccaatagttagaataccatggagtgaaaaagcaggaatagagagcccagcaggaattacaaaggtcctgggattatttcctagagtccaagccttataaattgtaatgcaaaagaaattgatggtcaaaaactgtactcttggaatgttgaatgtagcagccctgttcagaagtgcatgcttgtacccaaatatgactctacacatatgtggtctaaaatctgtctccaaaaaccagtctactggagaaactgaggtgacttggcatgtacccacaggtttgtggcacactaactggatgagtggttacagatgaggatcacagagggaagaatctgggaatcatggagaaagctgtaaagccctgagagataaggtaggtgtaggacttgggcagaaaaggggtaccaaatgacaacaaaggtcaactttgcaacttcatggttttgtgatggctgggtaacaacccaaatgtacacactaccaattgccgactgaatactcagtcaa

SEQ ID NO: 514435 - DNA, 501 bp, Homo sapiens
cctgaagaaataattgactccttgaattagtccmaagttagccacactgtcagcttgacatgatgaaatcattcagggatttgtgacccagagttggtgacagcagtaaaaaacagacctcttcctatattatggaaccatattgatttctggatgtcttatacattataactataagttatatgtcctgatagattatttagcatatttaaagcattaaactattgaaagtaagcattttagagtagtatcttgagaaatgtcaataccagtagcccccatttcatagcaactcagtccttataggagaaattgttactgaattattcttgttggaaaaacttattatcaggaaaggttatctctgggccagtgggatgaaggctaattctaagagaacaggaagataaacagaaggtctttctatattcctaattgaaaggcaggaagtagcagagtgacttttcctcttgatttttatcccagtaattacatgtttac

SEQ ID NO: 514436 - DNA, 665 bp, Homo sapiens
tttaggttatttcttaaatatatttgtcagttgtgacagcaagccaaaaaacattttcagagttccatgaaagaaggtcattcaaattctagtctcattttaaatacatattttttccaagttggaagaggataatcaaattggccagatttttagagcatccttctgaaaagattaatcttaaaaacctatcagaaaacataaataagaaatctgaaggaaaagaagtttcaggtacaattacactttttgaagtcrcgagaagtttgggttttctgacgttttctaagtaaaagacatgaactaggcaactagaaatccatagcatcctatggaatttagagacttgtggatatgtgaggtttaagggttaaaaagcaaatttctttaaccatttggttaaaacttacaaatatgttaaaagaagcatcacagactaaactattatatcagataataattacctttctagagagcccaaaaataatagttacttactagatgagagtgcatcaactacaaagacatttatagccacacttctaaacaaaaagcattctgctcaccaacttctagaagagcttgctttcggagatgtaggacctcaagactggctccagagtcttgcaggagcagatgcagaaagtaaacaggatttccacggc

SEQ ID NO: 514437 - DNA, 665 bp, Homo sapiens
tttaggttatttcttaaatatatttgtcagttgtgacagcaagccaaaaaacattttcagagttccatgaaagaaggtcattcaaattctagtctcattttaaatacatattttttccaagttggaagaggataatcaaattggccagatttttagagcatccttctgaaaagattaatcttaaaaacctatcagaaaacataaataagaaatctgaaggaaaagaagtttcaggtacaattacactttttgaagtcacgagaagtttgggttttctgacgttttctaagtaaaagacatgaactaggcaactagaaatccatagcatcctatggaatttagagacttgtggatatgtgaggtttaagggttaaaaagcaaatttctttaaccatttggttaaaacttacaaatatgttaaaagaagcatcacagactaaactattatatcagataataattacctttytagagagcccaaaaataatagttacttactagatgagagtgcatcaactacaaagacatttatagccacacttctaaacaaaaagcattctgctcaccaacttctagaagagcttgctttcggagatgtaggacctcaagactggctccagagtcttgcaggagcagatgcagaaagtaaacaggatttccacggc

SEQ ID NO: 514438 - DNA, 532 bp, Homo sapiens
tcagctctcttatttataatttgaattttgaaattcggaattgttccatggttcaaaaatcacctttgggcgggttgttttgccaagaaaaccttttatcaaaaacaaacagttcactggctggcaatacacactttactggaatggcctcccatagtttgagaagctcatatctggttgtagcccaactggtcaagggtgttattgtctgtctcttgggaaaccactaaaggaaagagtaggaagtaggcacccttggggaaaatggcaaagcctatagggtttcaaatagaacacagtaggcaactaagaaaagtaaaaacaaccmatttttttttgttgttgttgttgtttttaattagagcctcaaccaaactcaaatacaatttgcatgaccacagctgaattcgcctatcatgtataccacaggacatttgcttttcctggttacagcatgactcagactttatttaaatcctttttacaaagaaataagggagataaaagtgacagaaataaagtcattgtttgc

SEQ ID NO: 514439 - DNA, 532 bp, Homo sapiens
tcagctctcttatttataatttgaattttgaaattcggaattgttccatggttcaaaaatcacctttgggcgggttgttttgccaagaaaaccttttatcaaaaacaaacagttcactggctggcaatacacactttactggaatggcctcccatagtttgagaagctcatatctggttgtagcccaactggtcaagggtgttattgtctgtctcttgggaaaccactaaaggaaagagtaggaagtaggcacccttggggaaaatggcaaagcctatagggtttcaaatagaacacagtaggcaactaagaaaagtaaaaacaacccattttttkttgttgttgttgttgtttttaattagagcctcaaccaaactcaaatacaatttgcatgaccacagctgaattcgcctatcatgtataccacaggacatttgcttttcctggttacagcatgactcagactttatttaaatcctttttacaaagaaataagggagataaaagtgacagaaataaagtcattgtttgc

SEQ ID NO: 514440 - DNA, 364 bp, Homo sapiens
aagacgcccagcagcaggcgatggggacaacggaagkttcattaaatagcaacaaggcaactcactccagcccccagcggtcactccttctgctgcccagaccggcaagtgtgactggtactctagaagcacgtagtagccagtacccagtctctagttgtgaggaaaggaataaactaaaatttttttttttttttgagacagggtcttgctctgttaccaggctggagtgcaatggtgcaaatcatggctcatggcaccctcaaactcctgggctcaagcagtcctcccacttcagcctcctgagtagctgggaccacaggtgcgcacctccatgcctggctttttttttttttctttttgc

SEQ ID NO: 514441 - DNA, 663 bp, Homo sapiens
tacacctcacgttcagaagcaagaattcggagcattcattttggggcctgagcatcttaggtgaactggaaggctcatactgtctcaatgaagtatcctatgggtggttagtgtaaaaggagagaatctggtcattcttggggcagaggtgctaaatattaatgagccatgcatggaaacgaccaggcccttgattgaattcggttggatcaattctattacaaatcccagggcgatgaaatcaaagtcaaagaggagacgcctgaggctggagccagcaagaaagaatgctgattaattgttgatgaagagagaaatgtgcctctagaggtctcagcctctcaagaaggtcaaaggaaaaccggaaacctggggacagaagtttctggtgctcactacaggtggaagggggccttcctgaccycaaaactcagagccccctgccctaagtgaagggtgagctgccgcagtggggatgggggcagtgggtgctattcagaggccgcaaatccaaccgtgcatttgcgcctggggcccctcccaccccatccactgaatcggaatccctcgagtaggtacgggagatccggaatcagtattcttagcaagcttcccaggacaccagagcctcctggccctggctgaacagacctgcatttggga

SEQ ID NO: 514442 - DNA, 629 bp, Homo sapiens
caagactcctcttgaccattcacacaggagtgggaccaaggggctaaaggcctattcttaatcaatttcaccgaatactggcaagtttttgtctaacaaagaagggttcgaccaggtgcggtggctcacgcctgtaatcccagcactttgggaggccaaggcgggcagatcatgaggtcaggagaccgagaccatcctggctaacacggtgaaaccccgtctctactaaaaatacaaaaaaattagccgggtgtggtggtgggtgcctgtagtcccagctactcaggaggctgaggcaggagaattgcttgaacccgggaggctgaggttgcagtgagccgagatcgtgccactgcactccagcctgggtgacagagagagactccatctcaaaaaaaaaaaaaaaaaaaaaaaaattaggtttcttccctctccacaccttcaacaatatccatatttgtcactgacggttcctacrgaagtgaatgaagggggacgaatgcagaaataaagacaagagatctgttttgaaagaatgtgtcagggagctccttgcttctggtgagcaaaggcagccttgagcttctacagcccttcatttatattaggtagaaagagcagggagggag

SEQ ID NO: 514443 - DNA, 644 bp, Homo sapiens
tgaccctgctcctatttaaggctcatttgtgtctctcactattgagtgaacccatycatatctgggcagggtatgcaacacacgtgtaagtctatttctcttcctgggcccaaggcagacatcactaatcgatcaaggcacatatcattaatatagtatcatactctttctcactgaatccaatctcaacttctttattgatgaaggctattttttgctcatgtagtatccatttcctcttatttttaaaaaattaaacattcatttttaaatttttatttatttatttattagagacagtgtcttgctctatttatttctttttgttttagagacagggccttgctctatcacccaggctggagtgcagtggcatgatcatacctcactgcagccttgaactcctgggttcaaatagtccttctgcctcagcctcccgagtaactaggactgcagttgtactccaccacacctggctaatttaaaaacttttttttctttttgtagagacagagtctcactatgttgcccaggctggtctcaaactcctgggctcaagtaatcctctcacctcagcctcccaaagtgctgggattacaggcatgaactactgtacttggccatttccccttattttggtaaca

SEQ ID NO: 514444 - DNA, 563 bp, Homo sapiens
gaacatacaactctaagaatagaggcaaaacctggaggctgtttcacacccaaggtttagttcagagtctagtytatagctccgctatgagcagacttcaacccagtgtttgaatcccagaatgtggcgggtgcggtggcttatgcctataatcctagcactttgggatgctgaggcaggcagatcacctgaggtcaggagttcgagaccagcctgaccaacatagagaaaccctgtctctactaaaaatgcaaaattagccagtgcatggtggcacatgcctgtaatcccagccactcaggaggctgaggcaggagaatcacttgaacctgggaggcggaggttgcagtgagtcaagatcgcaccattgcactccaggctaggcaacaagagcgaaactccatatcaatcaatcaatcaataaatcccagaatgcagatcctaattcagaagccccatataaaacctagacccctcctaaattctagatctgaacttacaacccagaccccagccaagaggtcaaaatgcctataagccatatctatgccataaacaggtca

SEQ ID NO: 514445 - DNA, 539 bp, Homo sapiens
gctggaacatacaactctaagaatagaggcaaaacctggaggctgtttcacacccaaggtttagttcagagtctagtttatagctccgctatgagcagacttcaacccagtgtttgaatcccagaatgtggcgggtgcggtggctyatgcctataatcctagcactttgggatgctgaggcaggcagatcacctgaggtcaggagttcgagaccagcctgaccaacatagagaaaccctgtctctactaaaaatgcaaaattagccagtgcatggtggcacatgcctgtaatcccagccactcaggaggctgaggcaggagaatcacttgaacctgggaggcggaggttgcagtgagtcaagatcgcaccattgcactccaggctaggcaacaagagcgaaactccatatcaatcaatcaatcaataaatcccagaatgcagatcctaattcagaagccccatataaaacctagacccctcctaaattctagatctgaacttacaacccagaccccagccaagaggtcaaaatgcctat

SEQ ID NO: 514446 - DNA, 563 bp, Homo sapiens
gaacatacaactctaagaatagaggcaaaacctggaggctgtttcacacccaaggtttagttcagagtctagtttatagctccgctatgagcagacttcaacccagtgtttgaatcccagaatgtggcgggtgcggtggcttatgcctataatcctagcactttgggatgctgaggcaggcagatcacctgaggtcaggagttcgagaccagcctgascaacatagagaaaccctgtctctactaaaaatgcaaaattagccagtgcatggtggcacatgcctgtaatcccagccactcaggaggctgaggcaggagaatcacttgaacctgggaggcggaggttgcagtgagtcaagatcgcaccattgcactccaggctaggcaacaagagcgaaactccatatcaatcaatcaatcaataaatcccagaatgcagatcctaattcagaagccccatataaaacctagacccctcctaaattctagatctgaacttacaacccagaccccagccaagaggtcaaaatgcctataagccatatctatgccataaacaggtca

SEQ ID NO: 514447 - DNA, 539 bp, Homo sapiens
gctggaacatacaactctaagaatagaggcaaaacctggaggctgtttcacacccaaggtttagttcagagtctagtttatagctccgctatgagcagacttcaacccagtgtttgaatcccagaatgtggcgggtgcggtggcttatgcctataatcctagcactttgggatgctgaggcaggcagatcacctgaggtcaggagttcgagaccagcctgaccaacatagagaaaccctgtctctactaaaaatgcaaaattagccagtgcatggtggcacatgcctgtaatcccagccactcrggaggctgaggcaggagaatcacttgaacctgggaggcggaggttgcagtgagtcaagatcgcaccattgcactccaggctaggcaacaagagcgaaactccatatcaatcaatcaatcaataaatcccagaatgcagatcctaattcagaagccccatataaaacctagacccctcctaaattctagatctgaacttacaacccagaccccagccaagaggtcaaaatgcctat

SEQ ID NO: 514448 - DNA, 604 bp, Homo sapiens
ggtggattggggtcttgggagccaaaggggttaaaggactgggtatgaagtcagggatcagaggtcagaggtcagagtgtgtcagaggtcatcacactggagcaaaaggcatatatatatatatgtatgtatgtataggatatgggcattgtgggtcatgggtctggggttagaggtcaccgtagaattaaggtcatgggatccagaggttgtacactctggctccaatctgagcatggcaattgggattctatccagagtcacatctctgagattggaggtcatagcgtttggggtgtggggcccgaagtttggggtcatggaggctgggcccaataaactaggatcaggggacactggcrttggaagcagtgaggtttggaagatgcagagctgaggttggaggttaaggtaaagacagggacatggggtcaggagacagaagatatgagatcaagctgggatcataaggtaataagacagaaggtcaaagatcacagtagctggcattgaagagggtcaggtctggattcgttgtctctgacgctggagagacaagaaagttcttgagttatgccactcaaagtcaaatgtcaaagatcaa

SEQ ID NO: 514449 - DNA, 526 bp, Homo sapiens
ccacccaatccatatttgttaaatatataaaggattggtgttaaactattgcataaacaatcaacaacttttccctaaaaaataagaaatccactgtatagaagaaaaactaagaaaaaattaaatttagatgaraggtagtcagctataagatccaaattactaatttgtttttttaaaaaagactattctaaaaattaaattggtcatcttcacattaacaatggccaaaatgggatatgggctgaaatgggatatggggctgagggttgggaagagagctaagactggaggcatggttgagtttgttgatttatgtggcttcaagatatggaatcaagttagaattggatttggatttgtggcttgggatcagatttgggatctgagtcaatattctgattgaacattgaggtcttataaagatgattttggctacaaggaccaagcaactctaacccagaagggacatctgaaaaatcatgacatgaagaggctccatcgttggttaattcaccagctcagt

SEQ ID NO: 514450 - DNA, 526 bp, Homo sapiens
ccacccaatccatatttgttaaatatataaaggattggtgttaaactattgcataaacaatcaacaacttttccctaaaaaataagaaatccactgtatagaagaaaaactaagaaaaaattaaatttagatgaaaggtagtcagctatargatccaaattactaatttgtttttttaaaaaagactattctaaaaattaaattggtcatcttcacattaacaatggccaaaatgggatatgggctgaaatgggatatggggctgagggttgggaagagagctaagactggaggcatggttgagtttgttgatttatgtggcttcaagatatggaatcaagttagaattggatttggatttgtggcttgggatcagatttgggatctgagtcaatattctgattgaacattgaggtcttataaagatgattttggctacaaggaccaagcaactctaacccagaagggacatctgaaaaatcatgacatgaagaggctccatcgttggttaattcaccagctcagt

SEQ ID NO: 514451 - DNA, 526 bp, Homo sapiens
ccacccaatccatatttgttaaatatataaaggattggtgttaaactattgcataaacaatcaacaacttttccctaaaaaataagaaatccactgtatagaagaaaaactaagaaaaaattaaatttagatgaaaggtagtcagctataagatccaaattactaatttgtttttttaaaaaagactattctaaaaattaaattggtcatcttcacattaacaatggccaaaatgggatatgggctgaaatgggatatggggmtgagggttgggaagagagctaagactggaggcatggttgagtttgttgatttatgtggcttcaagatatggaatcaagttagaattggatttggatttgtggcttgggatcagatttgggatctgagtcaatattctgattgaacattgaggtcttataaagatgattttggctacaaggaccaagcaactctaacccagaagggacatctgaaaaatcatgacatgaagaggctccatcgttggttaattcaccagctcagt

SEQ ID NO: 514452 - DNA, 270 bp, Homo sapiens
tgccagcccaagtcggaacttggatcacatcagatcctctcgaggtgagaagaggcttcatcaagggtgcacctgtaggggagrgggtgatgctggctccaagcctgactctgctctcgagaggtaggggctgcagcctagactcccggtcctgagcagtgagggcctggaagtctgcaatttggggccttttagggaaaaacgaactacagagtcagaagtttgggttccacagggaagggcaagatcggagcctagattcctgggtct

SEQ ID NO: 514453 - DNA, 561 bp, Homo sapiens
ctggtaggtgcaggaggtatcagagactccaggactgtccgaacctccgctccacactgtaaactcttccttctgttgtctcccaaggccactaacaagttcatttgcacaccgatgtgtgtgtccaacacgatttgaacacatttcacgagaattaacttgctgacaccttcccgtagccatgggagagctcatgagtacctccggtattgttactcccctcattgtacagatggaggaagccaagatggagatgctcggccacgtgccaaggttacacaacgctgaacgggggcgccgtgatttgaacgcaggtggagagctctcaaccrcctcacgaaatgttcaagaacaaaggagtggatggtgcaaccagcgatgtggtgggattagccccagacatggggaaagactcctcttacattgtttcgggaaggaagaaggaaagggcaggtcaggtgcgggtagggtgtgagcccgatggcaggaagtcgaggctggtccgtcctgtggcttgtttcttccagggagacgtcagtcggctcatctcaaggggccttg

SEQ ID NO: 514454 - DNA, 370 bp, Homo sapiens
agttgtaaaattaaaaaaaaaaaaaagaagaagaagagtacctactgtatagcattgatttgaagattgaatgagctggtattatacaacgtttagaagcagtgcctgacacgcaaaaggctctcaacaaatactatcctttactaatatcctgtgtgtctgtatcagagctggtggggtggagrgacagaaacaagtgggagaaggtaaagagatggacaaatgatctctaaagtctctctggcactaacacaattctttattatgtgttttgtctggctctttatattgatagctgttccagaggcaatcaatagctattagtcggttttattcttatttttctgtctgatcttacaggggagcaaac

SEQ ID NO: 514455 - DNA, 370 bp, Homo sapiens
agttgtaaaattaaaaaaaaaaaaaagaagaagaagagtacctactgtatagcattgatttgaagattgaatgagctggtattatacaacgtttagaagcagtgcctgacacgcaaaaggctctcaacaaatactatcctttactaatatcctgtgtgtctgtatcagagctggtggggtggagggacagaaacaagtgggagaaggtaaagagatggrcaaatgatctctaaagtctctctggcactaacacaattctttattatgtgttttgtctggctctttatattgatagctgttccagaggcaatcaatagctattagtcggttttattcttatttttctgtctgatcttacaggggagcaaac

SEQ ID NO: 514456 - DNA, 370 bp, Homo sapiens
agttgtaaaattaaaaaaaaaaaaaagaagaagaagagtacctactgtatagcattgatttgaagattgaatgagctggtattatacaacgtttagaagcagtgcctgacacgcaaaaggctctcaacaaatactatcctttactaatatcctgtgtgtctgtatcagagctggtggggtggagggacagaaacaagtgggagaaggtaaagagatggacaaatgatctctaaastctctctggcactaacacaattctttattatgtgttttgtctggctctttatattgatagctgttccagaggcaatcaatagctattagtcggttttattcttatttttctgtctgatcttacaggggagcaaac

SEQ ID NO: 514457 - DNA, 591 bp, Homo sapiens
ctgccccaggccaaatttctgcctgcctgccagcagcctcaacaggcacagctcctccctcacagtggcccatttaggcccaacttatgactgtgaggccatttccaggcctagtgcctgcctcgtggctgactcttgaagcccaaaacttcctcaaatcagscttttgcccaacttctgtctactgtcggactctacaggtcagcctctgcctcacagtggaccctccagacccagatggtgtctcactgtggcatcctcaggtgaagctcctgcctttcggcagcctctccaggcccagctcctcctgcctcccagtggcctctttcggcccagcccagctcatgcctcccggcggccttcccaagccccgcttttgactttcggtggcctctgcaggcctcgacaaggcccagcctcctgcctcccgaaggcctgcacaggccagcctctgcctcacagcggactctccacgcccagctagctgttgcttcactgcggcctcccgagtccaaagctcctgcctctcggccgcttcggaggcccagctcccgcctgccagtggctcttcaggcccatggggctcattcc

SEQ ID NO: 514458 - DNA, 591 bp, Homo sapiens
ctgccccaggccaaatttctgcctgcctgccagcagcctcaacaggcacagctcctccctcacagtggcccatttaggcccaacttatgactgtgaggccatttccaggcctagtgcctgcctcgtggctgactcttgaagcccaaaacttcctcaaatcaggcttttgcccaacttctgtctactgtcggactctacaggtcagcctctgcctcacagtggaccctccagacccagatggtgtctcactgtggcatcctcaggtgaagctcctgcctttcggcagcctctccaggcccagctcctcctgcctcccagtggcctctttcggcccagcccagctcatgcctcccggcrgccttcccaagccccgcttttgactttcggtggcctctgcaggcctcgacaaggcccagcctcctgcctcccgaaggcctgcacaggccagcctctgcctcacagcggactctccacgcccagctagctgttgcttcactgcggcctcccgagtccaaagctcctgcctctcggccgcttcggaggcccagctcccgcctgccagtggctcttcaggcccatggggctcattcc

SEQ ID NO: 514459 - DNA, 588 bp, Homo sapiens
tttttgccataaacttgcctttttgtggccctaatagagtaggtagttttcactgtgattttccttatgtcatgaaacttgcttgtgtagayacttacaaactagaggttgtagtcactgctaacagtgggcttatatccatagctacctgtttcttattaataatatcctatattttcatttcggtaaccgtctagaatccttcttcaggagacttatctaaagcatttgtgtcatgttagatcacatcacagtagggattttgttttttatgccatgtatatttctgtatgtgtagcctttgcctaaaacaacacatgattaatatttgttcattgttccttttgctatcacccctgtctaggatctacacattaagaaacaaagacatgaacgtctccatggaaagactgggaaaatggattgcaggttctagcaggatgtcataataaatggtgcatatccagagtgcaagatgattcagtctcaccaagaacactgaaagtcacatggctaccagcattattgtgataagaactactattttgggagatagtttagcaaaggtgccatgtagaaattgattaa

SEQ ID NO: 514460 - DNA, 588 bp, Homo sapiens
tttttgccataaacttgcctttttgtggccctaatagagtaggtagttttcactgtgattttccttatgtcatgaaacttgcttgtgtagacacttacaaactagaggttgtagtcactgctaacagtgggcttatatccatagctacctgtttcttattaataatatcctatattttcatttcggtaaccgtctagaatccttcttcaggagacttatctaaagcatttgtgtcatgttagatcacatcacagtagggattttgttttttatgccatgtatatttctstatgtgtagcctttgcctaaaacaacacatgattaatatttgttcattgttccttttgctatcacccctgtctaggatctacacattaagaaacaaagacatgaacgtctccatggaaagactgggaaaatggattgcaggttctagcaggatgtcataataaatggtgcatatccagagtgcaagatgattcagtctcaccaagaacactgaaagtcacatggctaccagcattattgtgataagaactactattttgggagatagtttagcaaaggtgccatgtagaaattgattaa

SEQ ID NO: 514461 - DNA, 427 bp, Homo sapiens
ccatgatgaacagtaactccactgtgtaaacgcccatgaacctaagattacaagacttttccagtttagacataccatattttctttcagacaattcttcagtttgtttacgtagatcagcgatacgatgattccatttctctgaaaaccaagcaaaagttgcttctcaataacacgtccctatgtcagagcagcactaacatataatgactgatttcatatattttacattctaacagtccatatcattttactgctttcaagaaaaaatttccccttcttggtggttcttagaattggtttaatgggagactattagagaagctgaaaagcaggagggcagaaaagytcaatcaaattaaacacaataacagggaggtcacaatgaggcggtctccaggggtcttttagcaaacttcctaaaaca

SEQ ID NO: 514462 - DNA, 406 bp, Homo sapiens
actcatcctgttgaatattccataccttgtgattatcttattaaaccctacggtgttcttgcatgtttctctcttcgacatatttcctgtatattgtcataaaatagagaatatttamcaattaggctcatttctagttggttctatgtgctccatattatactttatgtgtattcacttcatgtgatataaaaattgatcagtaggttcaggtattttcagctgattcattccatatatgttttcttctgaaacagttattcgtcattttagcttctattggttgttatcttaggcccattaattcattgggttccaaatgaatttgtctgtatgttagtgtcccatgaaacaattcttttctccgatgttttataacttaattaaaatgccagatcttgatttt

SEQ ID NO: 514463 - DNA, 619 bp, Homo sapiens
acaggcatgagccatcgctccgagccttacctagtcttttctaagccaaacactgcactttgattacaaaaaagtaaaagaaggccaggctcattcatgtatgtaattccagcactttggaaggcccaggcaggaggattgcttgagcctaggagttcgagatgagccttggcaacagagtgagaccccatttctaaaaaaatattaaaaataaaaataaaacactttgggaggccgaggcaggcagatcacgaggtcaggagatggagactatcctggctaacacagtaaaaccccatctctactaaaattacaaaaaaatttgccgggcgtggtggcgggcacctgcagtcccagctactcgagaggttgaggcaggagaatggcgtgaacccgacaggcggasgttgcattgagcagagatccgcgctgcactccagcctgggtgacagagcgagactccgtctcataaataaataaataaataaataaataagagctgtggtagggttcctaagaacctgtgggtgtgggaaggtggtagagtggagatacttacacaggaatgctagcagtgcactatgagtgactacccctgcctcacagagggcttgagcat

SEQ ID NO: 514464 - DNA, 619 bp, Homo sapiens
acaggcatgagccatcgctccgagccttacctagtcttttctaagccaaacactgcactttgattacaaaaaagtaaaagaaggccaggctcattcatgtatgtaattccagcactttggaaggcccaggcaggaggattgcttgagcctaggagttcgagatgagccttggcaacagagtgagaccccatttctaaaaaaatattaaaaataaaaataaaacactttgggaggccgaggcaggcagatcacgaggtcaggagatggagactatcctggctaacacagtaaaaccccatctctactaaaattacaaaaaaatttgccgggcgtggtggcgggcacctgcagtcccagctactcgagaggttgaggcaggagaatggcgtgaacccgacaggcggacsttgcattgagcagagatccgcgctgcactccagcctgggtgacagagcgagactccgtctcataaataaataaataaataaataaataagagctgtggtagggttcctaagaacctgtgggtgtgggaaggtggtagagtggagatacttacacaggaatgctagcagtgcactatgagtgactacccctgcctcacagagggcttgagcat

SEQ ID NO: 514465 - DNA, 514 bp, Homo sapiens
gctgtgacaatcaaaaatgcttccagacattgacaaatgtccttggggggcatttttcaaattttgaacccccaaatcatctagcactgataccactatgcatggaaaataatgacaatgacagccagtaagttgtaaatyattctgtgtgccagtattttgcaagcattgacttaattaacctttataatcccatgagaccgatactacaggttgtgtatcacttatccaaaatgcttgggaccagaagcgttttggatttggggctttttcaaattttagaatatttgcattgctcatcagttcagcatccctaatctgaaaatccaaaatccaaaaattggttcaatgagcatttcctttgagcatcatgtcagcattcaaagtttcaaacttcggagtatttgagatttcagatttttggattagggatattcaatctgtatcattattgttaccgtttggaaacaaaatgaaataacttgctagtgccaaatagttaataaggggtaat

SEQ ID NO: 514466 - DNA, 278 bp, Homo sapiens
tgaagtgcccattccacttggggtgctcagtcctggttctgagaaaggaggcagacaagcactgtttctgtttcagttctgccttaccacctgcaaaccatgtgtatggtatcargcagtttgcttctctcccctgaattccggtgtccttatctgagatctggagtcaataaaatccatctggacaggctttgggggagaattaactatgaggtgatgctatgcttgcaaaaagacccggcacatagcagggaccagacaaacatgagtccctgcta

SEQ ID NO: 514467 - DNA, 628 bp, Homo sapiens
ctgaggggtgaaaccatgtgtaaaacctctggatatcctcctccttcccctccagcaccactrttgtttcttgcccattgtgtataatcaataaatatgtaccatatggcattgcattgatgacaaggccggctacccattctctgccaatgccagccaaggaccatacatataagaaaaagagtcctagatggatttagtgagcctgattaggtggagagaaagagggaaggttttttttgtttttgtttttgttttttattgttgtggtggtggttgtttagatggagtcttgctctgacttgcccaggctggagtgcggtggcgtgatctcagctcactgaagcctctgcctcccgggttcaagcaattctcctgtgtcagcctcctgagtagctgggactataaacttgtgccaccatgcccggtgaatttttgtaattttagtagagacgagatttcaccatgttggccaggctggtctcaaactcctgacctcaggtgatccacccacctcggcctcccaaagtgctgggattacaggcatgagccaccacgcctggccgagaaggtttatttgctttctttgtggtagaagttttgcatttttgccccacttagataataa

SEQ ID NO: 514468 - DNA, 619 bp, Homo sapiens
gtgccctcagggaaaagcgatcccacagtgagggtcaggagtgaactgttgtagcttctgtgaaaacacaccccagagcttcggggaggaggcatccagcacacagcctggmattaagaggctcaaaaactcctagtgccaccttcaaggcctggcacatagcagtggttctgaagtcttgcctttatgttgccccaaagtggctctcccattgcaacttttgaaagaaatttacttaactgatacatttcattgaagagaagttaggaaagctaagataaaagggggggaaatcctataatcttacaacatgaagctagacagcttcccatctttacattttttacatatttccaccaagacctctaggtgtacatctacacataaatatattttacacagatggctttgtactatatgtactattttgcaaccttcctttccacttgacaatacatcatgtttggctttcaatgtcagcacacacagctctacatcattcttgatgactacattgcaatcctttgggtcgatagagtaaaattcatttaaccaaccccctactgttggatatttatgcttctttcaatttttttctataataaacaaagctatagtg

SEQ ID NO: 514469 - DNA, 619 bp, Homo sapiens
gtgccctcagggaaaagcgatcccacagtgagggtcaggagtgaactgttgtagcttctgtgaaaacacaccccagagcttcggggaggaggcatccagcacacagcctggaattaagaggctcaaaaactcctagtgccaccttcaaggcctggcacatagcagtggttctgaagtcttgcctttatgttgccccaaagtggctctcccattgcaacttttgaaagaaatttacttaactgatacatttcattgaagagaagttaggaaagctaagataaaagggggggaaatcctataatcttacaacatgaagctagacagcttcccatctttacattttttacatatttccaccaagacctctakgtgtacatctacacataaatatattttacacagatggctttgtactatatgtactattttgcaaccttcctttccacttgacaatacatcatgtttggctttcaatgtcagcacacacagctctacatcattcttgatgactacattgcaatcctttgggtcgatagagtaaaattcatttaaccaaccccctactgttggatatttatgcttctttcaatttttttctataataaacaaagctatagtg

SEQ ID NO: 514470 - DNA, 592 bp, Homo sapiens
agtgggagaagcagagagcaagcctggtttaatgccttcatttgtaactcttttcacttcttcaagctgtcaatccccctccttccccaccacaagttrtataaactgataccattacctgatacaagtacaattgaagttatattgttttcttaacataaacactgaaagaatccacgtatttgtttcatatgaggctaagacccctctgaggagtgggagagaaaggctctcacaggcaagcttcttggcagtgttgcacatgatcttatgcatctgcctcttccacaacctggtctctgaggatccttccatccaacagtggcttaaccactcactcctttggctccctctattctgaggcagcctctaccatagaatccctaatagtttcgtctgtatctctacctcttcctgcagattggcagctccctaaatgcagggttctatattgtcttttccatttgctactgtatctccaatttgtagcctaattctgggtgcacagtagatgctcaataagtatttgttaactgaataagagagcatctatatgtctggtgtatccgtataccagtacattataaaatca

SEQ ID NO: 514471 - DNA, 556 bp, Homo sapiens
cctggtttaatgccttcatttgtaactcttttcacttcttcaagctgtcaatccccctccttccccaccacaagttawataaactgataccattacctgatacaagtacaattgaagttatattgttttcttaacataaacactgaaagaatccacgtatttgtttcatatgaggctaagacccctctgaggagtgggagagaaaggctctcacaggcaagcttcttggcagtgttgcacatgatcttatgcatctgcctcttccacaacctggtctctgaggatccttccatccaacagtggcttaaccactcactcctttggctccctctattctgaggcagcctctaccatagaatccctaatagtttcgtctgtatctctacctcttcctgcagattggcagctccctaaatgcagggttctatattgtcttttccatttgctactgtatctccaatttgtagcctaattctgggtgcacagtagatgctcaataagtatttgttaactgaataagagagcatctatatgtctggtgtatccgtataccagt

SEQ ID NO: 514472 - DNA, 556 bp, Homo sapiens
cctggtttaatgccttcatttgtaactcttttcacttcttcaagctgtcaatccccctccttccccaccacaagttatataaactgataccattacctgatacaagtacaattgaagttatattgttttcttaacataaacactgaaagaatccacgtatttgtttcatatgaggctaagacccctctgaggagtgggagagaaaggctctcacaggcaagcttcttggcagtgttgcacatgatcttatgcatctgcctcttccacaacctggtctctgaggatccttccatccaacagtggcttaaccactcactcctttggctccctctattctgaggcagcctctaccatagaatccctaatagtttcrtctgtatctctacctcttcctgcagattggcagctccctaaatgcagggttctatattgtcttttccatttgctactgtatctccaatttgtagcctaattctgggtgcacagtagatgctcaataagtatttgttaactgaataagagagcatctatatgtctggtgtatccgtataccagt

SEQ ID NO: 514473 - DNA, 662 bp, Homo sapiens
gggacaatccatgctattaaaatttttcggttatttcaaatctgcatctgtttcaaagaaggagattcctttagcctggacagtgggaaaacgcctgtggcagtaartaatccataaattccaaacttgttttaagcagcaaaaagtctttggaaatacaaggtgcttttgtaggtctgatgatgaatgagggcctacaagtgccagctctttgaatgcattttgcatattctcacagcaacgttgcaagtagttgtttttatccccattcaacaaataaaaataagttcagagaacttaacgtgttagatattagaggtaatgaaaggtgtcctcagcattcaaacccaggatggttaattctttcccttaacaacatagggcctgcatggctctgactgagttacttagttctttgtcattttaccatgaccaatttaatatttctaatacttagtttataagattattgtttatttaataaaatatatttactagaggccatatttgtaaggctaaagttttgatagaatccaaaaagtaaaactgaaagatgaagtgattggcctaaagattgactttttgaaaaaaacaatcttatacatctgagacatttatttatttataaaatattttgcgaagttcttaaatttcaatgtgcc

SEQ ID NO: 514474 - DNA, 618 bp, Homo sapiens
ttttgttttttgtcatttttagatatttcttagagttctcaatccttctcctccaatttttactggttactttctttgtttcacagatggaatcttgagattctccattatgatcaatctgggaatttccctttacctctttccttcatcctgtgtcctgaataccatgttttcattatttcttggtttatgctctgctggagtacaaatcctayagtagagtcttgagaagggctgtaactattttgccttcagcttttgagatgtttggggattcatcttcttactggcttcctccagtcttccttagttatcagctttctctaaaggcaatgtcagttactacccattcttctaagttctaaaattttgttaacatctcttatttgctgctgtttcctactctgttctctttatctttacacattgtgcatattttattcctttatcgtcattgtagtggggtttcaggagggagcaagtagcagcacctttgttcaacataccttgttaactataaaactctcatcagatttttagttaccataatcgagaatgactaatctggtgtgtatacagtgaaggccagaagtagctcaggaaaaaagtcattcaaca

SEQ ID NO: 514475 - DNA, 618 bp, Homo sapiens
ttttgttttttgtcatttttagatatttcttagagttctcaatccttctcctccaatttttactggttactttctttgtttcacagatggaatcttgagattctccattatgatcaatctgggaatttccctttacctctttccttcatcctgtgtcctgaataccatgttttcattatttcttggtttatgctctgctggagtacaaatcctatagtagagtcttgagaagggctgtaactaytttgccttcagcttttgagatgtttggggattcatcttcttactggcttcctccagtcttccttagttatcagctttctctaaaggcaatgtcagttactacccattcttctaagttctaaaattttgttaacatctcttatttgctgctgtttcctactctgttctctttatctttacacattgtgcatattttattcctttatcgtcattgtagtggggtttcaggagggagcaagtagcagcacctttgttcaacataccttgttaactataaaactctcatcagatttttagttaccataatcgagaatgactaatctggtgtgtatacagtgaaggccagaagtagctcaggaaaaaagtcattcaaca

SEQ ID NO: 514476 - DNA, 618 bp, Homo sapiens
ttttgttttttgtcatttttagatatttcttagagttctcaatccttctcctccaatttttactggttactttctttgtttcacagatggaatcttgagattctccattatgatcaatctgggaatttccctttacctctttccttcatcctgtgtcctgaataccatgttttcattatttcttggtttatgctctgctggagtacaaatcctatagtagagtcttgagaagggctgtaactattttgccttcagcttttgagatgtttggggattcatcttcttactggcttcctccagtcttccttagttatcagctttctctaaaggcaatgtcagttactacccattcttctaagttctaaaattttgttaacatctcttatttgctgctgtttcctactctgttctctttatctttacacattgtgcatattttattcctttatygtcattgtagtggggtttcaggagggagcaagtagcagcacctttgttcaacataccttgttaactataaaactctcatcagatttttagttaccataatcgagaatgactaatctggtgtgtatacagtgaaggccagaagtagctcaggaaaaaagtcattcaaca

SEQ ID NO: 514477 - DNA, 663 bp, Homo sapiens
ctaaattttattcagaatgtaataaaccccaagtaaattactgagtgatatttaatatcctgatctaaagttgggatttagattttattttcatatccaaatatttttacactacttgccaaaagtaggtcatgccaaatgagaaagatccctatctcttttgaaatgagatactaattcaaaacatcttctaactactctcataagttagaaattttaggtcacataaaaaaaaatgaattaaacagtgttctgaaggaattcattgttccaccatggtaatcagaaacttgagcaactgaaatcctttttaattaagccttgctatgaacacatgtgtgtgcatatttatatatagaaaatatatcaacatttatttttatcttttgattagtgttaaataaataaaattcttccttaatgattcattctaaaccttagttgtcattgcacaattctactgatgtaaatgttaaatgtacctgggcaactagagcaaaactccrtctcagaaaaagaaaaaaagaacagattgtgggctgattctcaaaattcaccttagagttgttagttttttaaagcatattccttatataagttgcttacttgtcacaaaacctttctctgtaagtaaaagttgaggggcaaaaagttgcttgagag

SEQ ID NO: 514478 - DNA, 564 bp, Homo sapiens
tcatctctcttcaccctcctctcattcagtttgaaccaatggtattggctttctaagtatttatcttttacttatgattcagagtttagtacttgatttttcagcttattatattctctgatgcccatcttcgagataatcaatgaagtgtttcttcttttcctctccccactccatttttccaatttttgatttttttatttctacattatcagatcatacagcatttatccctaatccagtatttgtcttttgttgtgtaacaaattaccctcaaaacttaatagtttaaaactacaagtatttattatctcacacagtttctaaggatggagagtccacaaatagtttagctggatggttcaagcttagggtctctcatgaggtagcaatcaagatgttgactggggtagcagtcatctgacagctaaattggagctggtagagccatttctaagatctttctatggatgcctcatttccttgatggtgattggcagtaggtctcagttcttcatcawatgggtatttctataaggctgcttgagcatcctcttggcgtgg

SEQ ID NO: 514479 - DNA, 515 bp, Homo sapiens
ggccgttggcagaaatgaacctaagagggatggtctactctgaatctacattgaaaagatgaatgtctgactactgccatctgcctgacaacatgaggcagaacatggttgcaggttagggktgccatggtgccatcttctgcctttggccactcttgtttcctgcataagttccctgccttttgcatttctgtagttgaagtgacatggatttgggacagagttgaagtgtgtagtaaaccactgaaaaggagatagtttggccctggctacagggggcctaactaaatccacaaagaaaggaagtatatttattatgaaaggagctgcttgttagaatggttctttcctccctaggagtaaggggcagagccagccgagggaaccatgatgctaactggaatccaggcagcagtgtggccagtaacatgagcagcttggcctcactggtagggacaatgactgggactccgtggttttatctgtgttcaagtgttgtcccagaactaagcagg

SEQ ID NO: 514480 - DNA, 515 bp, Homo sapiens
ggccgttggcagaaatgaacctaagagggatggtctactctgaatctacattgaaaagatgaatgtctgactactgccatctgcctgacaacatgaggcagaacatggttgcaggttagggttgccatggtgccatcttctgcctttggccactcttgtttcctgcataagttccctgccttttgcatttctgtagttgaagtgacatggatttgggacagagttgaagtgtgtagtaaaccactgaaaaggagatagtttggccctggctacagggggcctaactaaatccacaaagaaaggaagtatatttattatgaaaggagctgcttgttagaatggttctttcctccctaggagtaaggggcagagccagccgagggaaccatgatgctaactggaatccaggcagcagtgtggccagtaacatgagcagcttggcctcacyggtagggacaatgactgggactccgtggttttatctgtgttcaagtgttgtcccagaactaagcagg

SEQ ID NO: 514481 - DNA, 472 bp, Homo sapiens
gctgacactgcccctttctctactgtggagaaggatgtgggagaccacgttttgtagtggggcagctatctctcaactgtgtatcaactccagaatttaccagctttgaaaccctggatgaattaagtaatgatttttgaatcttagttcctttatctgtgaaatggggataatttccttaaggtagagctgtttttgcctcagtttataatctgaaactcagaagggaatctaggcttaagtgcagggtcagcactgtcaacattttggggccaaatacttttttgttatggaagactgttacatgcattgtagaatatttagaacgtaagtttctagatgccagtagcacctactccctagttgtgacaaccaaaaatgtctccagaaattgtcaatgtcctttgttgggagtgaaatagcccctggttsagaaccactactctataaaaagattaaagttatgacattt

SEQ ID NO: 514482 - DNA, 606 bp, Homo sapiens
gtgaataagtgtgtggccaagcaagaggtaagatgaggtgggcacagacatccttgcttctgcacctgccataagccatggtcagcatgataacctctttctggcacagcccatgtttccattgccctcagcagtgtcttgactggttagagctccttatggtggggtgatccctttgctttctgaagggtttggtgccttgatagtcatggaactacaatattgctatagttttctttgagtgttaacattgggtgtccacctttgtagtactaggaaaatatacaggacctctcagatccagatgcactttcccttctccaytttatatatcctcatatccccattaacgatcaagcccaattactccagtcgacagtgtaggctctcttttgtatctttttcttcctactgtcacaagggacctaaaccgcctacaatggtctcagccttcgattcagtagaagcatttttccatcacctggttgaaacatttttgctctgagtgccaaaatgcctaaaccagcagagctcagagctgcagaaatgggggttgagtgggggataaaaagaagagtgtgcacagtgtactcccatcatcacctc

SEQ ID NO: 514483 - DNA, 468 bp, Homo sapiens
gtcttaaagatatttttcatttttttctccttacagtttgaatatttgaatgttttcaaaattcatgatgaaacttaatccccaatgcaacagtattaaacggtggggcttttaggaagtgattagggctccccaatcttgaatgggattagtgccttataaaaaggctggagagaaccagacaggcgtttggtccttctgctttctgccatgggcggatgcagcaacaaggcrtcatctttgaagcaggaagcactcattagacaccaaatctgttggctccttgatcttggacttcacagcctccagaactgtcagaatgtaaaattttgtttataaattatctagtctaaggtattttattacagcaacacaaacaggctaagacaatatcgtctaagaaaaatactactttcttattgtgcttattcgtctaaattgtctcagtaatcctggctctttactcct

SEQ ID NO: 514484 - DNA, 489 bp, Homo sapiens
ttagactacctaatcagtttttaatgagaaaatgaaattgtgttgtttgcactttatccaagattggtgtcatattggctaaatctaatcaatacttgaacaaatgcaaaattagagcttctttatcatgaaacactatgtcattctttaagaagatgccwttttttttttttttttttttttaagatagagtcttgctcttgtcgcccaggctggagtgcagtggtgcgattttggctcactgcaacccttgccttctgggttcaagcaattctcctgccttagcctcccgagtagctgggattacaggtgcccgccaccagatgatttttgtatttttagtagagatggggtttcaccatgttggccaggctcacctcgaactcctgaactcaagtgatctgcctgcctcagcctcccaaagtgcagggattacagacatgagccaccactctgggcctccatttcttttttgtagtctttaataaa

SEQ ID NO: 514485 - DNA, 489 bp, Homo sapiens
ttagactacctaatcagtttttaatgagaaaatgaaattgtgttgtttgcactttatccaagattggtgtcatattggctaaatctaatcaatacttgaacaaatgcaaaattagagcttctttatcatgaaacactatgtcattctttaagaagatgcctttttttttttttttttttttttaagatagagtcttgctcttgtcgcccaggctggagtgcagtggtgcgattttggctcactgcaacccttgccttctgggttcaagcaattctcctgcctyagcctcccgagtagctgggattacaggtgcccgccaccagatgatttttgtatttttagtagagatggggtttcaccatgttggccaggctcacctcgaactcctgaactcaagtgatctgcctgcctcagcctcccaaagtgcagggattacagacatgagccaccactctgggcctccatttcttttttgtagtctttaataaa

SEQ ID NO: 514486 - DNA, 489 bp, Homo sapiens
ttagactacctaatcagtttttaatgagaaaatgaaattgtgttgtttgcactttatccaagattggtgtcatattggctaaatctaatcaatacttgaacaaatgcaaaattagagcttctttatcatgaaacactatgtcattctttaagaagatgcctttttttttttttttttttttttaagatagagtcttgctcttgtcgcccaggctggagtgcagtggtgcgattttggctcactgcaacccttgccttctgggttcaagcaattctcctgccttagcctcccgagtagctgggattacaggtgcccgccaccagatgatttttgtatttttagtagagatggggtttcaccatgttggccaggctcayctcgaactcctgaactcaagtgatctgcctgcctcagcctcccaaagtgcagggattacagacatgagccaccactctgggcctccatttcttttttgtagtctttaataaa

SEQ ID NO: 514487 - DNA, 524 bp, Homo sapiens
ccagctgaatctaccatgaaagacttctgaatccaggaaaagagactgactgggtaacatgttattcaggtacaaaaagacttggactgtaactcaaaaatgatcaaataatagtgcatgcatcaagtgcaatgggaagctcttccagaggctgagagaagtttccagttaaggtgacactgaagccaagtcctgaaagatgaggaagagttgtatgagagtggggagggaagggggaggtggagggatggggaatgggctggaatgggatggagtgagctgcccaggcagggaaaccagcactgcacagacctggacaatgaagatggcacattttgttcagggaatgrtgaattaagtgtggcaggaatgctttgtggagacagtaatttgcttgtatggaattttgcctgagagatctcactacagtttctaattttttgatgttgtcatccatcactgtccttgtcaaatagtttggaataggtataattatcacaataacaccaagcataatatttcat

SEQ ID NO: 514488 - DNA, 600 bp, Homo sapiens
taaatatctatctggcttctgcttcgaacatagttttttctctttagtataatattttagagaatcattgaaacagtttctattgacttcagtatattgactaaaaggccttagcatgttcattttgtagaaatgtatttgtagaaatttgaagctgaaagtggtagaagtttcatttatggaaaggctagatggaatgggaaggacttttgctaatacttcagtggcaggataactttctgagatattaatttgggtttttttccctcgatgtcatgaggattgaaaccaacgtaattctgtgtctttatgttaaacaattctgagactaggcatactttcctggcttaaagaatactgaaaacaagtaaaaataacttagctattkgctctaggaatcactgctttcagaaataatattgtaaaccgactaaaacagcttacctaccaccccaaacagcttatttataagactaatgtcatgaccctggctttgctttaccaatacatttcagtcttgaaatacccatcacaaaatcacacaactcagaccctaaaacactatgaataaatgtcttctcctggctttccactcctcat

SEQ ID NO: 514489 - DNA, 525 bp, Homo sapiens
aagtacctctgttctctaaaatttctcaatacttcccgccaccctgctgagtctggagtctgagtagaactcacgctgattggaagatgcactgaatgcattcccagagttaaacctcaacaattactaatggctcccagctttgaatgcaaaggaccattgtctattaccaagatacaaatctccttttgaaatatctttatccaaggccaggttgacctaaatgctaatttggtgagtgattctgtagggaactataaacagttcacttgttcactgagaataaaaacaaattacttaagaaaaagtttgttttgattcttaatttttccacttatcatgctgaggggaatttttaaaaggtcaatctttcccttcctctgagttgggacttggtcttttaatatagagtaattcccctctatcctcaggatacattccaagactcccctagtrcaggggttcccaacccccaggcgacggactggtactggtctgtggcctgttaggaatcaagccacacag

SEQ ID NO: 514490 - DNA, 551 bp, Homo sapiens
cctgtaaaccaatttctacgggaaaagaatttgctcatctggacaatagctattctctcaagtctagtcagcaaactactcctttgcttatcaaggagtagtttacttataaagaagggcttaaaatgctcaccttgctgtgttccccaatcctaaatcatgaacagcactcatttacaatctgtcctccaccttgaaagaccccttgaggccagtctcccagaccctgtcaaaatccctcttctccttcmaacacctttaagactcaggcaagctggtattcttccccactgctgtaggtctaataaacttcccctgacttcatgcacaactcatgctgatggtctttctgcggagtgagcagtggatgtggctttgacaaagccagcattatagagaaggaaagattttattcaggacactggagtctgaagctcctgtttctgctgggattccctcttgatctcggggaagtcactttctctctttgaacctcagtctcattctatgaataatgagggaagttggaataaacggcctttcccctccag

SEQ ID NO: 514491 - DNA, 648 bp, Homo sapiens
cccatccttatccagaatataaatgtcagaaatggaggaatgactcaggatcattatcccaaaatggagccagtggaaacccctgtagggaaagtttcgtgctgtgatgagatgacaggtccagttccttgccttgagcccctgagcaggctcacaggtgccctctctcacagcaggtcccctctgggatccttcatcccaaggtcaccctcaratttgccccaacagcagagtatgtttggtgtccacaacaaccgctgtgctcaactgcagcattttccaagtgttagagctcccccaaccctgggcactgggtaggaagacttccagcaaaagtcttcaacctgataatgaggctgctgacacaaatgaatgtttcaaaaggagcttctacctgtcctgttgtgagctgagtttcagggttgaatgtagcttcccggggctggggtcagagcagcctgtcaacatatgtcagcctctggtgatgagcaatcccattctcaatgaggtagtttaaaattgacttctactgtggtggagtccccacgaaataggcacaaatgtggggggccctactcagacagcagcatccaccaataagctgcaggggtcattcctcactgcaaaagcacagacagcatagtcatc

SEQ ID NO: 514492 - DNA, 648 bp, Homo sapiens
cccatccttatccagaatataaatgtcagaaatggaggaatgactcaggatcattatcccaaaatggagccagtggaaacccctgtagggaaagtttcgtgctgtgatgagatgacaggtccagttccttgccttgagcccctgagcaggctcacaggtgccctctctcacagcaggtcccctctgggatccttcatcccaaggtcaccctcaaatttgccccaacagcagagtatgtttggtgtccacaacaaccgctgtgctcaactgcagcattttccaagtgttagagctcccccaaccctgggcactgggtaggaagacttccagcaaaagtcttcaacctgataatgaggctgctgacacaaatgaatgtttcaaaaggagcttctacctgtcctgttgtgagctgagtttcagggttgaatgtagcttcccrgggctggggtcagagcagcctgtcaacatatgtcagcctctggtgatgagcaatcccattctcaatgaggtagtttaaaattgacttctactgtggtggagtccccacgaaataggcacaaatgtggggggccctactcagacagcagcatccaccaataagctgcaggggtcattcctcactgcaaaagcacagacagcatagtcatc

SEQ ID NO: 514493 - DNA, 573 bp, Homo sapiens
gcgagtagcagcctgctcagccctgctcaccagtctttgttaagaactacacgtcccatggggggttacaaaaccaccaataccttacaggggtcacaaaaccgccaatacctttggacacttttgaaatggagggaaagggcaaatgcagtytctgagcctcacaggacacccatgccctctctcatgccctctctcagtaacccggaggaaagttaccttcatgaacaaggaagaggaccgaggcatgatgcatttcatccagcacatggctctatgtgcccggatgcagcacctatgcttacataatgagaaaaggtgtgagaggaacttttgtttcatggagcattgcccagcccacaccacagtcctgtaagtgcccatcctgtttactttgccattgctgcactgatggacagccatctatggagacaaagccagagcaggggatgcaaagctgggctggaccagaagggttgcctcagccatctagagatggggaggggacataaatctctgaatcattctctagggggctaaggtcactgatgggaagagcacacaatgagccgc

SEQ ID NO: 514494 - DNA, 625 bp, Homo sapiens
gatcatgtctagctaatctcccaaaccccaaccccttctacgaaacaacaactcctttccttcctaggcatggttagctacttccgcctttggatacctacttttaccatcctgactaaaccattatataaactcaccaaagcaaatctaggtgaccccatagatcctaaatcctttccccactcccctttccattccttaaaaaacagccctaaagctgctcccacactagctctccctaactcatcccaaccatttttcgttacacacagccaaagtacagggctgtgcagtcasaattcttacacaagagctgggaccgcaccctgtagcctttctgtccaaacagcttgaccttactgttttaggctggccccacattatttcagataccacacctgacccccatgactgtatctctctgatccacctgacattcactccatttccccatattttcttctttcctgttcctcaccctgatcacacttggtttattgatggcagttccaccaggcctaattgtcactcattagcaaaggcaggctatgctatagtatcttccacatctatccttgaggctaccactctgccccctccactacctctcagcaagccaaactca

SEQ ID NO: 514495 - DNA, 625 bp, Homo sapiens
gatcatgtctagctaatctcccaaaccccaaccccttctacgaaacaacaactcctttccttcctaggcatggttagctacttccgcctttggatacctacttttaccatcctgactaaaccattatataaactcaccaaagcaaatctaggtgaccccatagatcctaaatcctttccccactcccctttccattccttaaaaaacagccctaaagctgctcccacactagctctccctaactcatcccaaccatttttcgttacacacagccaaagtacagggctgtgcagtcacaattcttacacaagagctgggaccgcaccctgtagcctttctgtccaaacagcttgaccttactgttttaggctggccccacattatttcagataccacacctgacccccatgactgtatctctctgatccacctgacattcactccatttccccatattttcttcyttcctgttcctcaccctgatcacacttggtttattgatggcagttccaccaggcctaattgtcactcattagcaaaggcaggctatgctatagtatcttccacatctatccttgaggctaccactctgccccctccactacctctcagcaagccaaactca

SEQ ID NO: 514496 - DNA, 586 bp, Homo sapiens
gctgccattcagggacattccttcaacatatcttctgggtccaataacacattcagtcattcagtaaacatgttcattctctcatatgtgtttcagacactgtaccagattctagaattaratcaatgatgtaagcatactattggccttcaaggagccattttaatagaaacaataggttaattgttgatgtacagggaagtttaatttatgtaatccttatctagcagtattttatttttttactaagcattatctgattatggatttcctaaatatatagttatatcatctattaattgcatcaggtacttttagtagcatgctttctaattgtatcagtaaaaagacttttttttttattttggaaaattaatagaataaaccaaaaataaaaatcacctgtaatcttattgttagattgatcacttgtgctgttttagtctccattgtactttttcttatacttttttccacatacacataagtttttaagcatatctcttaattaattttgctttatcaaatattatatgcatgttattttacaagccaaagaatgctgcaagtcttataacaaaaggtt

SEQ ID NO: 514497 - DNA, 657 bp, Homo sapiens
cttaaatcattagtgcacaaatccagcaatacataaaaagtacagtattgtcacaaccatgcaggctctatttcagaagtggaagtttggcttaataatgaaaaatcaattaatgtaattaacttttatatcaaagcagaaaaaatcatgtacaaaaaaggctactgataataaaaatcaaaagctagtgataaaatgcaataatcatttatggtacagtatttaacaaagtaggaatagatggaatttttcttatctaatagaaggattttgcaaaaacttgtagcaaatgttattatgaattgttaaaatattatccaatgagattagaaattagaaaaaagttcctaatattatttccctttcaaattataytatacattcttgtcaaaacaggaaggcaagaggaaaaaagttataaaggttgaaagaaagcaataaaatgctcattagctgcaaaatatatgattatgtatctataatatccaatgaatgtacagatgagttatctggattattaagaagtttagcaaggatgttggtgcaaggtaatatatcaaaatttacatataaaccagtggtaaacaattgaaaataaaatttaaaacataatattataatattattgatatatcgtataccaaaaaatagtcctgc

SEQ ID NO: 514498 - DNA, 631 bp, Homo sapiens
ccaagtgtagtgaagttttgtttagtgttcctagggacgtcccattaaagtcttttttcagaataaaacaaaaagtctatcttcttgtcttgtggattatatatattagataaactttgtccagggatgagttcaatgttaattaatcaacaatatatattaaataaggtgtctttaaaaagaatcacacatatacaaggttatatattaaaaggttgacggaaatttgatcataggttcacgggagcctatctgagagtaatggtttgctattcactaattcagtctgtgtggcaaatttatagaacaaaactaccataaataaygagaattgactccacttcaaacatcacttcatacacaaagaacctctatctaccataaagtcaccgggttctgcagcacattgtgcacgttagggagctatagcaaccatgggcacagaaggggctgtgactgggcagggccagtgcctcaatgactcctctgagccctggggcagagaaaaactcagaatcaaggataataggctaattcaagcgctgaattggaaacagacaaactcagagcttggattaatccaaaaacccaaacaaataggcttttgccaattgtggcagcgaactttggg

SEQ ID NO: 514499 - DNA, 558 bp, Homo sapiens
tgttaagtttggtgatcaggcaaagttaaagcatggccaaaaggcactgagtttccagttacctgctaagatgtgtaattaaatttaggtgaaaactgagagtgttaattccttggtatctatttttcctgcctctttgcacttatgatttgtgatggtaaacattaataatctaatcagatgcatgggacaattgaagtaaagagagatgtgtatggcatatacccagtgagaggttcctagaacgtagtaaatttgttctaataaaagaatctgacaattgaagaaaggaatgcaaactggcctatggcatagttaccracttaccatttgtgccaacgaatccttgggtgacctcactgtaaggagctacatgagataaagatgggctcaatgtagaaatgaaaataataaatgccttcaatgggaggataggtcaacatatttgaagtattctggggtactactaagcctgggaaataatctagggacagaagaggtaggcactagtcttggcttccaggctttaattaaacacctatatatgggcagcatcag

SEQ ID NO: 514500 - DNA, 611 bp, Homo sapiens
ctggtaaagttaaagtggtgctgtcaagccctcttactcgaagactagttattatttatcttgataatatgtgtgtaatgggctgtatctgcttggctatataaaatttctttctgtctttgcaatctctttgtggattgcctgtgatatkctcacattctagattaattcttattcaataatgatttttttttgtttctctactacttttataggaaacatttctaggttgagagattattttatcaccaatattgctaatacagattttctctgctgtaaatagcctttgtattagtttgttttcacactgctataaagaatacgtgaaactgggtaatttataaagaaaagaggcttaattgactcacagttccacatggctgggaaggcctcaggaaacttacaataacagcagaaggggaagcaagacagcaggagagagagtgaggcaggggaaattgccagaaacttatcaaacaaccagatcctgtgagaaatcactcaccatcatgagaacggcatggggaaactgtccccacgatccaatcacctcccaccaggaccacccctaccctgcccttgacatgtagggattacaatttggatta

SEQ ID NO: 514501 - DNA, 558 bp, Homo sapiens
tccttcactaactgaaggtgagcatttccacaaaatgatgaaaatatacacttgatgacaattgccatttcctagtttatgaatagctagatgytaattatttggaatacggcagtcacaaagtggccagtgcttcctgagaagcagaatgtatattttatcttcatatttactaaaacgtactgaatcagagatacgtaactggcttctactgtttttttctcttaaaattctgacatttcgtacaatataggtgaggaggaactaatgagatccaaacacagatgtgcttacactctttagtctagaaatccaaaaaaacactctgtgtttttctctaattatactctttaatattagttcacatttttaaatattatattattggctgatatttgtgctattactctttttaatttataaaattaacatttctttcaatcaagtgactagtaaactttctgatgataaataacccttggttttcagtctacctgccaatttatggggtactcattaaatgagtaatgtgtaatgctctatcttttcaattttttt

SEQ ID NO: 514502 - DNA, 502 bp, Homo sapiens
ctgtttaaaatgaggtaaatatgctatctatatcacctatacacacacagagacctataggcaaaaaacatgcattaaaatattttgggtcgggcacggtggctcacacctgtaatcccatcacattgggagcctgaggcaggtggatcacctgaggtcaggagttcaagaccatcctggccaacatggtgaaacctcatctctactaaaaatacaaaaattagctgagcatggcagtgggctcctgtaatcccagctactcgggaagctgaggcaggagaactgcttgaacccgagaggtggaggcttcagtgagctaagatcgtgccattgcactccagtctgggcgacaagagcaaaaactctgtctcaaaaaacaaaaaacaaaacaaaacaaaaaattggaagtttacaaaggaaacctctctgggtctgagaagtctaactgagttagaagtaaaaactttgcatatcmtccatggcttgttttttaaaccagacg

SEQ ID NO: 514503 - DNA, 520 bp, Homo sapiens
tcttaattggcactattgtagtggaaaaaaagacaaaaagctttagttaatgctagggaccaggctagggtttcaatcttaacactgtgcatcctaggttagtaggtttaagttagtcccctaatttacttgaatatcttttagtcccagggaacttctctgttatttgcagtgagtgctttgtctacacacactggcacattcaatagtcttgtcagagttcttgtcactgcctctttgggacagcatacactatgccaatcattttaacaactgctttctgtgttaaccaaccaaagggaagtccctttgccagggtgattagattcttcacctaaattcagcccaagctcaatagttttccaaataggccaactcttggaaatattggaggaaataccaatccttccaattggtatattccacagggtggtaacactatagaatataccaattggaaggacttttagaaattatcttatctactrccttcattttatggattttaaaataggctaga

SEQ ID NO: 514504 - DNA, 559 bp, Homo sapiens
aatctttgggacatttctaattggtgaggaggaaaatccataagtgcaataagccactatcggtgaataagctcatgagctactgaaggctgatttaggagttgtcattttgaagtctatttccttacctgggccccacacaatgccctcctctccctcacacatctctaacgtgcgtgaaatacgtatttttaaaaagccaagttttcttattttaatctgccagcccataatatggttcagtcaaccctaaggctcttttcttggcttttgctctgaggagttgccaggaaggagaatcacagctccagactacttctcctttacgaaaaaattgaggcagtggctgrgcatggtggcttatgcctgtaatcccagcactttgggagccgaagcaggttgatcacctgaggtcaggagttctagaccagcctggccaacatggcaaaaccctgtctcgactaaaaatacgaattttagccgggtgtggtggtgggcacccgtaatcccagctactcaggaggcagaagaattgcttgaacccaggaggcagaggttg

SEQ ID NO: 514505 - DNA, 607 bp, Homo sapiens
cagaggagatgtgtttccaggagtgctgtggatgcttcagcatgaaaggaatgaataaagctaagagctgagcagaggggagtgtgtgtgtgtgtgtgtgtgtgtgtgtgtgtgcgcgcrcgtgtgcatgtttgtagaagttgggggacagataatggggagagaagagaaggtaatcagcccaagaagcagaagtagagacacagatgagcaaaacagtcatggaaacaaagaaagattgaataaacaattcaacacaagtcctaaggctcctggttaaggtgtctgttaaagcattgtgtataaaactagccacctaaaaaaatatctaaaaggagaacatgtcttaacatagcaaggtctttatcacatattttaagtagagaaaagcaggcagtaaaatataatatgcagtgtgattttggcatcatggttaagaccacaggctctgaagcctgaccatttgaatcccagctcaaccacttgctaactgtttgatcttaggcaaagcacttactttttgagccttagttttttcatctgtaaaatgaggataataatagtatcccctttacagaacagtttgagaattaagtgacttgataca

SEQ ID NO: 514506 - DNA, 607 bp, Homo sapiens
cagaggagatgtgtttccaggagtgctgtggatgcttcagcatgaaaggaatgaataaagctaagagctgagcagaggggagtgtgtgtgtgtgtgtgtgtgtgtgtgtgtgtgcgcgcacgtgtgcatgtttgtagaagttgggggacagataatggggagagaagagaaggyaatcagcccaagaagcagaagtagagacacagatgagcaaaacagtcatggaaacaaagaaagattgaataaacaattcaacacaagtcctaaggctcctggttaaggtgtctgttaaagcattgtgtataaaactagccacctaaaaaaatatctaaaaggagaacatgtcttaacatagcaaggtctttatcacatattttaagtagagaaaagcaggcagtaaaatataatatgcagtgtgattttggcatcatggttaagaccacaggctctgaagcctgaccatttgaatcccagctcaaccacttgctaactgtttgatcttaggcaaagcacttactttttgagccttagttttttcatctgtaaaatgaggataataatagtatcccctttacagaacagtttgagaattaagtgacttgataca

SEQ ID NO: 514507 - DNA, 534 bp, Homo sapiens
aatgttttcagccagtgacagactgcacataaaacggtgcagtcattaaggcgtaggtgtgaagtgggctacaccatctaggtttgtacaactacagtctataatgtttacacaatgatgaaatcacctaagaacccatttctcagagcatatccctgtcattaagcaatgcatgactgtatatatgtgtgtatatatatgcacatgggcagaatacagaatgtaaggatgttaatagtgatgggagattatgggtaattaaaattttctcctttakgcttacctgcaggttcaaattttttctatttaaagcatattaatcgtattttttttaatgaaaacaaaacacaaaaaaggaactgagatgggtatcaggatttggagtacaaagctaggaaatgaaaaaaccagaagtgagaccaagagaaaaataacgaaagaaggcaagggggagagagagcagtcaaggccaagaccccaggcagccagttatctatgactggcttctctgcttacaatgagatgggtgaccac

SEQ ID NO: 514508 - DNA, 503 bp, Homo sapiens
ctgttgtgtgatctgcaattgtaaacttctccaaggcaggaaatggtattagttttgcatcttcaataccttacacaatgtctgacacatagtaggtttacaattaaaatgtcctgtatttatttgttagttaactcatagggctgaacagcagcgggtctgtgaaggaagttaagaagaatggtacttgttctgaaatcccttcaagccggggcattttactctctggaaccagtttagcaaacatgatgacatcattcactgccttctgagtccagaaagtcagatgggcacagctcctggagagcttccctagtcagtccccaggcaggccgagtccatcaaggacaatctttaagagtctgataaatcaaattataataacccaagcatgctcagtcagttgaatrcctcgaataactgaagacattaatacatcttctggaagggagacattgggttgtgcaacaggacagataatagaccttattcaggtcagcatg

SEQ ID NO: 514509 - DNA, 569 bp, Homo sapiens
gccgcattcacctgtctgctaattagtgctgactacacgggggtacctccattctccctgatggctttcatcctccagtaagttagatctggccttctggccttcttacaaggaggtctcaggacagcgtttcaagaaaggtgagaaagctctaagacctcttgacgtctaggctctataactagtaaaatgtcacttctacaacatycttttgttcaaaacaagtcacaagaccagtccaaaatcaaggtattagaaacagactctacttcaggacagcaagagcatcaaagtcacattacaaaggggaataccagtcaggatgtaagggatttgtagctgttaatctaccttatgctgcaatgaacatttttataaattgagctttatgttttagagactaaagcattatttcctttcaattaaccctagaatttgatttgccaggtaaaaagctccagatacaaaggctcttgctttccagaattcacctccatgaccactcactacctctgctttcttaggcaaaggaaattcagtcagtcagccccaaataaaaaagttacttc

SEQ ID NO: 514510 - DNA, 569 bp, Homo sapiens
gccgcattcacctgtctgctaattagtgctgactacacgggggtacctccattctccctgatggctttcatcctccagtaagttagatctggccttctggccttcttacaaggaggtctcaggacagcgtttcaagaaaggtgagaaagctctaagacctcttgacgtctaggctctataactagtaaaatgtcacttctacaacatccttttgttcaaaacaagtcacaagaccagtccaaaatcaaggtattagaaacagactctacttcaggacagcaagagcatcaaagtcacattacaaaggggaataccagtcaggatgtaagggatttgtagctgttaatctaccttatgctgcaatgaacatttttataaattgagctttatgttttagagactaaagcattatttcctttcaattaaccctagaatttgatttgccaggtaaaaagctccagatacaaaggctcttgctttccagaattcacytccatgaccactcactacctctgctttcttaggcaaaggaaattcagtcagtcagccccaaataaaaaagttacttc

SEQ ID NO: 514511 - DNA, 556 bp, Homo sapiens
agtcagctcctctgagatctctttagctctggaagctctggttaccagagccatggttcacctccctcctcccatcacccaaagctccaaatgctccccaaatgtagtaactctctccagtaacatcctctccaacaatttcttccaagcagagtaattcctcaaaattgtctttgaaaccagagcaggtgggtttcatttcagttactgtatttttcacttctagatgctctcaytgcttttcatatgtgctctggcatggtttatatttttgcattcagcaaatatgttcaatttttcatttgtttaaacatattgaactaatagttaacttataatcaatgtctggttgttctactctctgaagtatgtgtaggtctgtttttgcttttgttgtttcttctggttcttgctcaagttaccttgttaccttgtggacctggttatcttcagttgctggtcattatctttgaaatattatctgtagaatttctctgggattgaggataaaggtcttgtttttgtttgcttctgcagatatatggtggaactagca

SEQ ID NO: 514512 - DNA, 557 bp, Homo sapiens
agtcagctcctctgagatctctttagctctggaagctctggttaccagagccatggttcacctccctcctcccatcacccaaagctccaaatgctccccaaatgtagtaactctctccagtaacatcctctccaacaatttcttccaagcagagtaattcctcaaaattgtctttgaaaccagagcaggtgggtttcatttcagttactgtatttttcacttctagatgctctcactgcttttcatatgtgctctggcatggtttatatttttgcattcagcaaatatgttcaatttttcatttgtttaaacatattgaactwatagttaacttataatcaatgtctggttgttctactctctgaagtatgtgtaggtctgtttttgcttttgttgtttcttctggttcttgctcaagttaccttgttaccttgtggacctggttatcttcagttgctggtcattatctttgaaatattatctgtagaatttctctgggattgaggataaaggtcttgtttttgtttgcttctgcagatatatggtggaactagcag

SEQ ID NO: 514513 - DNA, 512 bp, Homo sapiens
attccagcctgggcaacagagtgagactctgtctcaacaacaacaacagcaacaacaacgtaaatttttttttttttttttcaccaaatagttcccctttttgttttggaggaagtgtatcaggtaaataacagacagttttccacctttgtcctatttcaacagtctccattcccaccaaggaaaagcctcacggtgaatggcatttttggaagtccatgtctctaccgtcactcagcatcaagtcactgaagatgctgggcattcctccatgttctcaggaccccagactgtcattcccagcagagaaataggtcctgaggtctggctgctacccccgccttccctctgctcacctcacctccaacttacacagaattggctctgctggcccagtccctgcagatatcctggaagcaaactacctgccggcctggcttctgcacactgcttccctggagtctytctttgggatactgcacaaactgctgtaagacccaaggctgattact

SEQ ID NO: 514514 - DNA, 457 bp, Homo sapiens
gttagaaacactaaactggaggtagtacatttagctgtgaaatcttttctggtttcctctgactaaatctttccatcctttattcagtgagaatctatcctaaatatctgaagaattctcaacatagtaatgatgctctgtatatagtgtagagaaatcttggaacgggtagaactcacacaaaggaacaaagtctgagatgcatttgcaagcctcagacatgagataggagcaatgtcaggaagagtgatggaagatacctttgaagaggtgaggaaggaaatgaattggtaggcatgattccatacatagaaaggaagtgctcttgagggtaaagggatagcagaatttaactagaggcaagtaacaagttgtaagttgtgagtagtaaagataccagcttcacaataataacttayttggtggtgaagacaaagataagttggaaagacttaaa

SEQ ID NO: 514515 - DNA, 661 bp, Homo sapiens
ggctcatgaatggagggtctgcttcctgtggtgatggtagttaatgttttcaagctcaacatgtagaggcaacatgttttaagcaccttacatggattaactcatagaattcctcacaataaccatgtgagaggggtgttactatctccattttacagatatagaacttgagactgatagcttacgtagctagctcaagtcatctgttaggaaaagaagcaaaacttgagtccaggtagaatgcctttagtaccagcaccctaaacaagtacattaatgccacgcttcctctcattatagtcctcaagagtttctggtagatacatggaagacatcaaatctacagccttctaccttcctttgtctatgccgtggaagtccaagccctagcttttgtagaaatacatggattcargattaattgtacattgagttctataaaacaatttttggaattactgactatgcatgtaattacaataatgacagcaaatgctgcaattataccaaatgacataattttgtataaatgtggtacgtataaggaaatcactagattgtataattgtagcaccatgatgaggtcgcaaggttccttgttgaattagataaagatgtgtataaccacagagcacagatttaagtttggtggtgaaaggaa

SEQ ID NO: 514516 - DNA, 598 bp, Homo sapiens
gacaatcactgagccaatccctgatgatcctatgatgttccagaaggtttctcagaaagaattatcayagtgcccagaaaccttctgagttctggttattaagtattctacacatcccagcaatcatttgtaaacactagagaccctgattacattctttaaagtattttaaaaatcaagtttgatgtaacatggcttacacagaaaccacagagtctgatagatagttatttatctaacatccttcagttaaaaagcttccctctttacatgatgttttgtgtttttccctaggctaatttttgaatcaaagcttgtggtttgcagcatacacgagagagaagagagctaacctattcatgaagtgcttccataggcaggggttgaattagaagtaactcataacccgttcatttttatttgccttcctttagtatttatccattttattagtaaaatcacaagaaagtgtcctgagagaaaaactcgcgagcatcctagcattcttcttcatctttctcttctttttttcttctttcttttcttcttcttcttgcttctttcttctctcttctttcttcttttcatcatctttttc

SEQ ID NO: 514517 - DNA, 593 bp, Homo sapiens
gcagctgtcagggctctgattgttttgtgggcttgtagcaccttcaaaccatactatacctttttatgctctagttgattggaaaaacacaaaattacaaatcttgccatattccctgacagtttttgaatcacctccattagcaacttgttcaaagcacttagagataatggtaataaaccattttagaaacagattatgggtttcattactttccagagcttactcaatgtctcaattatttactgtagtgtaatatctatatataaggatactaaaatctatattagtattctaccagagaaacagaaccagtagaatgcaggatayacacacacacacacacacacacacacacacacacacacagatttgcagatgcacgtacatgtatataagtgtctgtgtctgtgtatgagagagagagagatttattgcaaagaattggtttatgtgttgtaggggtgactaggcaagtttaaagtccacagaaaacgcaggctagaaatcttgggcaagagctaagattgcagttcacaggtggaatttcttcctgtgaagacttgggaaaccagaaaaacctaatttttgtt

SEQ ID NO: 514518 - DNA, 513 bp, Homo sapiens
ctgcttcctctccctgaggtctgtggggctctgaggttccaacattgtcctccagcagatccttctgcctgaaggaggaggaggctggggtggccagcagagagcagaacatggactgggccaatgactttctttggagcagtcttttattttccttaagcccctagatgctttttgtgtgtcacactatctttgttttaagttttattttattataagaaagtctctctacwttcaatttgtgatgtgaataatcatagattataaatagtatgatgattgttttttaattacaaggctattattgatatagactataaggtaaaactataaggtacgaccattgctttttaaatatttttagagccttctttttggaattgcctacagatcctttacatatttaaatgagatatgtataggaggtgacaaagctttgctatttgagaatggtttgatatttagaactagagccagatctgaggagtgaggtgctccaagtgagtaatattg

SEQ ID NO: 514519 - DNA, 467 bp, Homo sapiens
cattaacctattgttttgaatagtattatttatctcttctgaatatgtaaggggtcctctttttcattcttaataatatttgacatctcttttttctttgattaatcgtgtcacatttgttaatattaatagccacttcaaaaagacaatatttgagtttgattatycactctataatgtgttttaaaatcattaattgctgccttttattgttttcttctaagttcttttacatttattttgtttttttcatttttaaaaagttattttctatgttaggatatgctaattgctgtgacaacctccaaatctcagtagtctaatacagtaaaagtttatttctcatatctcagtccaatgcaggttgctctggaggatcttgctccacccaaagtcactcaggaactggagacgctttcatcaattggttccactatactctggattgcagagtcctacaaaagatg

SEQ ID NO: 514520 - DNA, 429 bp, Homo sapiens
gaacccccttgagctggcaggtgctctgagagtgatgtggacacaggtactcatggggatgggacagagtttgatgaaggaggagtgtcagttcctagatggggaaggaatacaggaagcagaaaaggaaaggtctgtatggarcgtgaggatgcctaacccagagattcttgctagggtgttgtgggagatgaggacatgcaacagaaaggagttctagaggctgtgcaattagtctggatctgatctgaaaataattgatggctagagaaggtctaagcagaggcatgacacatatgttctatgtctgtgacagtaattcagtagaacccagctcagcaccaggagagataactcgcaccaaggctttggaaaacagaaagcatcaaaatttggccatctaggtatgtgtccctctcccaattttct

SEQ ID NO: 514521 - DNA, 574 bp, Homo sapiens
gaatccctcagcctcccaccaggaacatctcagtagacagcaatatagaccaaaggcccaagggcccttcccaatttctcattaccttgttccagatttagaaaaataaaataccattctttttcttattaccaggatgctatgaactaaaatttattgcagggtgtgtgttggggaaagaacaccaattcccactttttccccaataagcctttgttcccaccactttcttggacaccttcttatgtggccttctagaagggccttcctgagcccagyctgtgagccacagcaggtgctgctgcctggaggcgaggattgggaagagtcaaattaactgttttaacagtgcctctctgcagcagtggctttgaggtgaggagacagggaccaggaaacaccacaacctctccctgctccccagtttagcatttttccatccctgccccccagatatttctcacaccagaatagcatggtgtctcttcactctctttatccactcttttccccaggcctcttgtcacttctagggttccaggtaagcacataccccctcaaggataggagggag

SEQ ID NO: 514522 - DNA, 594 bp, Homo sapiens
gtgttggggaaagaacaccaattcccactttttccccaataagcctttgttcccaccactttcttggacaccttcttatgtggccttctagaagggccttcctgagcccagcctgtgagccacagcaggtgctgctgcctggaggcgaggattgggaagagtcaaattaactgttttaacagtgcctctctgcagcagtggctttgaggtgaggagacagggaccaggaaacaccacaacctctccctgctccccagtttagcatttttccatccctgccccccagatatttctcacaccagaatagcatggtgtctcttcactctctttatccactcttttccccaggccycttgtcacttctagggttccaggtaagcacataccccctcaaggataggagggagatgggctatggcctagtgatggatatagggcctgggtccccaggaaggttggtgccccagccctctcccctgggaggtaggagagcaagaatcttgcctcccctccgcagctcccctctgggctcaccctctggcagagccgaggtgacgggcttctgctcaaagtccggcgtgctgcagccttcag

SEQ ID NO: 514523 - DNA, 469 bp, Homo sapiens
tggtgactggctgtgtccagcattcaaagagggagccctatccttatgctttgacatacttggtggtcaataaatacccatggttttagctatagcagcccaacttcatttctaggaaaaccacccgaggtgcagagttctctggcactgggtaagtagtactgctgcctgcattgagagaatgtcaccctgcattcatcagtaaaatgtcaccccaaaatggcttgacactcatcccttccatatctcacctagaacctccactcagggcctctggttgggacaatgagctgaasgcagaggctgccctgatcagcctccaagacagagaggtttcttagttcttctccagatcatcctaaatacgttacggccatcaggtagttcggaaacgtctagctctataacggggttctgcttattttcagaacagtgtggtaccagtagggaagagcacaggatggagagc

SEQ ID NO: 514524 - DNA, 469 bp, Homo sapiens
tggtgactggctgtgtccagcattcaaagagggagccctatccttatgctttgacatacttggtggtcaataaatacccatggttttagctatagcagcccaacttcatttctaggaaaaccacccgaggtgcagagttctctggcactgggtaagtagtactgctgcctgcattgagagaatgtcaccctgcattcatcagtaaaatgtcaccccaaaatggcttgacactcatcccttccatatctcacctagaacctccactcagggcctctggttgggacaatgagctgaacscagaggctgccctgatcagcctccaagacagagaggtttcttagttcttctccagatcatcctaaatacgttacggccatcaggtagttcggaaacgtctagctctataacggggttctgcttattttcagaacagtgtggtaccagtagggaagagcacaggatggagagc

SEQ ID NO: 514525 - DNA, 635 bp, Homo sapiens
tttacagtggcagaaaccttagggttatttccttgaggagaggggattttatttgtctcatcttctgtgagtgtggagtttgctttgcaaagtgctacatctcatatctatactgtcaggaaaagctttctggaaaaattccaacaaccaccaccatttattaaatacctgctctgtgccagaaactttatatggaccttcccactgaatcctctcaaatgatcctacaagcgtgttttcacrtctccttttgcagttaggaaaactgaagttagagcagttaggtaagtagtccgaggcacagactggtgagcgtctgagacaggtgcacagacccaccggtccaggcccggagcctgtgcccctccactgtgctgcctcccaagctggcgttaaggaggtgagatttagacaggtttcaacaaggcaagggaaacagaatggggcttgaaagatagaaatgaagaaagcattctaggctatgggagtaaaaggggtgaaatggcagagggagacgcgagagaagggtctggatatataccccaaaaattgaagacagggacttgaacagagatttgtccgcccatgttcatcgcagcattactcaccatagccaaaaggtggaaaccacccac

SEQ ID NO: 514526 - DNA, 631 bp, Homo sapiens
gccagtcaccggaagacaaacactgtctgattccacttaaatgagttgcctagagtggtcaaattcatagaggatgatgcgtcaggcactagtgggagaaggaaatgggagttcttttttaatggctgcagagtttcagtctgtgataaggaaacaattctggagaaggatgacagtgatggcaacccaacaatgcgaatgtactaatgccattcaattgtgcacttaaaaataggtaaaatggtgaatttcatgttttgcatattttactacgattaaaaacatgtataattatttagctacacctgaatgctccttaaaagttcatattcctgagccccagcccagacctgggtgggctsctgaaatgtcccttttaaaagaagtaatgccagatgattctcacgctctgtagtttgagaatcattggctggaacgaagagggctgactagtgacaagaaactggtctggaggagtatgcggacatggccagtcttctcacagcagggggctgtgtccagcagcctgcagggaccctgcaccactccactctgtctgctggccttggaccctcgacgtggcagcctgccttatctgggataagctcgtcctcatcgcagaatcctgatc

SEQ ID NO: 514527 - DNA, 631 bp, Homo sapiens
gccagtcaccggaagacaaacactgtctgattccacttaaatgagttgcctagagtggtcaaattcatagaggatgatgcgtcaggcactagtgggagaaggaaatgggagttcttttttaatggctgcagagtttcagtctgtgataaggaaacaattctggagaaggatgacagtgatggcaacccaacaatgcgaatgtactaatgccattcaattgtgcacttaaaaataggtaaaatggtgaatttcatgttttgcatattttactacgattaaaaacatgtataattatttagctacacctgaatgctccttaaaagttcatattcctgagccccagcccagacctgggtgggctcctgaaatgtcccttttaaaagaagtaatgccagatgattctcacgctctgtagtttgagaatcattggctggaacgaagagggctgactagtgacaagaaactggtctggaggagtatgcggacatggccagtcttctcacagcagggggctgtgtccagcagcctgcagggaccctgcaccactccactctgtctgctggccttggaccctygacgtggcagcctgccttatctgggataagctcgtcctcatcgcagaatcctgatc

SEQ ID NO: 514528 - DNA, 604 bp, Homo sapiens
gcagtggtgagatgattctctaggtcccaagtggtgtgtgttgatgttggcagtggctgaaatgagctgggcaggtcagtttccaggcctacaggtgacacttgtagctgaggtggtagcagatgggagtttagtctcaacctcrtgcccctgtgaagtgtgcccagtgcccaaatggtggattggtttgggcaattcctaggaccccagagtatgctctgtctttggagagaggaaggaagcaagactgggtgggtttggacttaaacctcccaatgctgagagcagtcacaagccatggtgagaaggggtggggtgattcccaggtcccatgtggtaatagtcatgttgaggccccactactggaaaagataggaccaccctcagtggccacagcctgggcaagctagtaggaattgtgcatccctctcattcctcagtcctgggggagcttggccccaacccttgaaaatggtcactcaagcctagcttgtaccctagccctgactgcagcagcctctgcccagctcatgaaccagtaccagtagcaacaggtatcctgcttgcatccaagtctccatactgacagtgctcacttcctggc

SEQ ID NO: 514529 - DNA, 604 bp, Homo sapiens
gcagtggtgagatgattctctaggtcccaagtggtgtgtgttgatgttggcagtggctgaaatgagctgggcaggtcagtttccaggcctacaggtgacacttgtagctgaggtggtagcagatgggagtttagtctcaacctcgtgcccctgtgaagtgtgcccagtgcccaaatggtggattggtttgggcaattcctaggaccccagagtatgctctgtctttggagagaggaaggaagcaagactgggtgggtttggacttaaacctcccaatgctgagagcagtcacaagccatggtgagaaggggtggggtgattcccaggtcccatgtggtaatagtcatgttgaggccccactactggaaaagataggaccaccctcagtggccacagcctgggcaagctagtaggaattgtgcatccctctcattcctcagtcctgggggagcttgrccccaacccttgaaaatggtcactcaagcctagcttgtaccctagccctgactgcagcagcctctgcccagctcatgaaccagtaccagtagcaacaggtatcctgcttgcatccaagtctccatactgacagtgctcacttcctggc

SEQ ID NO: 514530 - DNA, 610 bp, Homo sapiens
caaagctgaaaatatttactgtctggcctgtttaatctcctgaccccagatatatagcatataagtgtttagaaataagtcctataaaatgaatacaggaagaagatgaaaatgcaatcctattttacatctaaattaaaaggtggggaagaaatcttctaagagatttaggctaaattgtcattcctttaaagggcttgtaattcaaagaaattctagaaaagtagaggtgagtgagtatgaaatgagagtcagtagactagcttttcataactaacttcattagataygtagttttaagtaaatagtttcattaagtgttatactttaataaaaaccagtaaaaggtggtcttgtaaactatgatggtaaagttgcaattgagctggctaatgtaaaacgtccattattgtccaccatttctgacatcaaagaactaaaatatttcacttgtttttttctgagtctctggggaagttggaacttgtaatagtcaggataggcaaggtatggcacagtaataaacaacccccaaataccagtggcagaaaaacaagggttaagttttgttcatgcaaggtgcactgtatgtctggtgaccctccaggca

SEQ ID NO: 514531 - DNA, 594 bp, Homo sapiens
ccaaacgtactgagcttcatccacaagcatacaggagaatcattcatgaactcttaatatacattcctgtttgatatattaaacatattgtaatgaagagttcaataaagtcagtgccaatggaaaagaaataatcacatatttgtaaaaatctaggggaccctagagattgaagaygagctctctggaatcagagttctgggtttaaatctcagtgctgtcactgcctatgtgactgaccttaaacaagttactacactgaaaataatagtgaatacctacagtagacagaataatggtcccatgacgatgtccacatcccaatccctggtatcttacatgaaatgtaatatgttacctttcatgaaatcacattcgtgaatatgctaccttacatgaaaaaagggactttagagatgtgattaagttaaggatttcgatatgggaagattatctgtggattagctgggtggttccaatgtaatcacaaggactcttataagagggaggcaggagtgtcagagtcagagaaggagatatgaggatagatgcagtcatcagagtgatgctggtccatgagccaaggaatgtggg

SEQ ID NO: 514532 - DNA, 594 bp, Homo sapiens
ccaaacgtactgagcttcatccacaagcatacaggagaatcattcatgaactcttaatatacattcctgtttgatatattaaacatattgtaatgaagagttcaataaagtcagtgccaatggaaaagaaataatcacatatttgtaaaaatctaggggaccctagagattgaagacgagctctctggaatcagagttctgggtttaaatctcagtgctgtcactgcctatgtgactgaccttaaacaagttactacactgaaaataatagtgaatacctacagtagacagaataatggtcccatgacgatgtccacatcccaatccctggtatcttacatgaaatgtaatatgttacctttcatgaaatcacattcgtgaatatgytaccttacatgaaaaaagggactttagagatgtgattaagttaaggatttcgatatgggaagattatctgtggattagctgggtggttccaatgtaatcacaaggactcttataagagggaggcaggagtgtcagagtcagagaaggagatatgaggatagatgcagtcatcagagtgatgctggtccatgagccaaggaatgtggg

SEQ ID NO: 514533 - DNA, 648 bp, Homo sapiens
ggtgggggtgagggcctctgctccgtggcccgccagtgtgggcttcccgggctactctgcggcgaggtgggggagccgagtacgatccggcagaggtggggccggctgagggcggaagcggcggcgacgcgattacgaaacccgctccgctcggagccsggcgcactgctcccctctggactgcggaggcactgcactgcgcgggacgtgggagggtgcctctgcagcccctcaatggccgcccgtcgcggggagaactggagaatgcggacacctagatgaggccctgcacccaagctggggcccccggaatctcacgttccctttactcgccaggcatttcggggcaaaacgaagcggagccccccaaacccccagacctaaccaagttcagagattcgcagaagcacgccccccaccccaaatttattgtgctctacccaaaatggaataggactaggtttatttacccattgtgagggtagagaggcgagtctggaggagcagggattgggagaaggggtggaaaaatactctgattcttaaaaatactttgtaacctaaagtccttaaattgtggaagaaaggaatactcctcctttccattgtagtctagagttaagatttcaaatccataaattagaggac

SEQ ID NO: 514534 - DNA, 620 bp, Homo sapiens
gttgtaactcagtttcccaactgcacgcacagcctcaggactctgcttgggtagtgggatgtgggataccaaaaaaattgggatttttttttcttttttaaggaaggaaatgaacaaagctcacaaggactacaaccctrtgatgaatggttcctaaacactttttttttttggtctctcaaaaaagaaaaaaatttcaggaaccattcatcatagggttgctatgttgcccagactggcctcgaactcctcccaagtagctgggaatacaggcatgtgccaccaaacccatctgcttcctgaatttttgatgtctaaagaactgacctatttgcatgtagtttgcttgtatttgcatgttacccccaaaatagattaaaattcaaggaattctgtactgggtccagtctctaaacactatttccctcccaagccaatctaacccctaactccctaacctctacccgacaaaaatttgcctctctcatgtcagcttgagctggataaggtcccagtgggccctcccaccctcacctgtggatcaacaagccagccatggtacagaggtatgcctagcaggtcaaagacactgcactcgggtgtatactcaaaatcagaga

SEQ ID NO: 514535 - DNA, 474 bp, Homo sapiens
ctatgcaggaaaattccaataactraatcacttatgggttggtttctaatatcttttttcttttttttgggggggggtcatttgtttctattttcttgcacaataaaataaagaattgaatgatagattctggaggttacttgaatctctggctgatgttatattcctccagaaaggatttattttatcttttgtgggtgggtgggagtgaagataggcagttatagtacagacagatgatcataataaaatgtgggctctaactgtatcaaagccaggtttcagtctttataaaggctggtatttttccaattttccctctctcctaggctctagccccttctggcatcgttactggaaatgtgggtgtttccagtgtcactctaccttgatgggccttgaaacctcacttttatttccctacccttgtgagagagctcaaagctctactcagtttccagcttctcagcagca

SEQ ID NO: 514536 - DNA, 626 bp, Homo sapiens
ttaaaaataattcttctattccttaaggagtttaaatacactgtaaaattataagaccagagactcacaaataaattttcaaaacaaaaccacagcaaaaatgtgacctcattaaaaacctaagggtatttaagaaatgctttttcctgctttaaagccccaaatctctgctctcctttagggcaaaacttctctaaagagcaactatcgttactgtttctaatttacctcttcccattctctcatggacaaactccaattaagatttttctccactactccacaaaaaatgctctcatcagatcaccaataatccagaaggtaggaagtccaatggtcaattctcagtcttcatctttctccacgttatcctttgatacacctcttctttcccttttataaacacttttaacatttggcttctgagatattattagggacagggggcacaaaattctaggcagaaaagggtggtccctggcgaaacaccaccccctcaagccaaaaagcctgagcccacagtcctaaaygagaatttatatccctgttttcctgctcgaatgttgccttttcctaaaccacccatggccgcacaccaccccatcctgtgcctataaaaaaccgag

SEQ ID NO: 514537 - DNA, 593 bp, Homo sapiens
gtttcgtacttttagtagagacagggtttcgccatgttgcctaggctggtcttgaactcctggactctagcaatccaggcccttcggctcccaaaatgatgggattacaggcatgagccactgcacccagccaggaccagttaattattaaagatgacctttaaagaagaaaacagaatctggaaactacttttaagagttacaaaataaaataaaatgaatagcatctttactatgctacctgccctaagtaagaataattttacccttagattttttcactggttctgctaacttgactctagccagctactattgtcaaaaaagtwaaattaaaagaaaaccttcttcatctttgggggaagtgcacactagatcacggcaaacctccttctccatttcaacttcaacttcaaagaaggtatctacaagatcttctgctgtacctaaagaaaaacaattcaagatatataaaatgatgaaaggaaaacagattttcaaatcctagttttcaaatggaataaagatattacctttcacttgatcatctttctctgttattttctgttgagcctttctgaatactcgtaagt

SEQ ID NO: 514538 - DNA, 399 bp, Homo sapiens
tcttaggttgtaagtcccttccctacccaacctcccccaactgtgggatgcttacttaactgaaagcaaggtaagaaatttggacttgttgcaccccsgccacctccatccctttagggcagaagtaggcattccatttacattcccctacaatgcaagccacaaatttgtcaggtgattgcttaaaaagagaagacattcagcaatccacagttcaatcttcagtccctacttaccttggttatttgactgacagctaaggtcagtagttttcaattggtggtaatttggcaccccagacactatttggcaatgtccacatacatttttggttgttacagtgggggagggggtgctactggcatcacctaatgggcagagcccagggaagaggccatc

SEQ ID NO: 514539 - DNA, 572 bp, Homo sapiens
tcatcaaccttgtcccgttgtrttaaagacatagtaggatttgccatcatgttttttataatattctttgcttatgcccagttaggatttcttgtttttggatcacaagttgatgacttttccacttttcagaattccatgtaagctcttagtataaatgtaattatatcttctatattttcttacaaaaaaaattggaaaggtctaaccttctatgataagtagtaatataagctttaatatatttaaacttagtttgatattttctttttctttttatttttctggagacagggtctcatagctcactgaagcctcaaacttctggactcaagctatcctcagcctcccaagtagctaggactacaggtgtgcaccaccacgcttggttgattacatttttattattttttggtctcaccatgttggccagggtggttttaaacttctgggttcaagtgaacctcctgcctcggcctcccaaaatgctgggattacaggcatgagccaccagcctggctgatattttcactgatggctaaatatctgtcacattcaaattaggatttgac

SEQ ID NO: 514540 - DNA, 594 bp, Homo sapiens
atccacataaacgcacataggcaaacacacatacacagggtcttctatagatagaatttttaacaggaaagcaacttgcaaaagaaagcgatattaaagcctgccatgaaaatcaaagctgttttcaatcaactggacaaaatccctttaaattccctttaaactgaaattgagggtctatatgtacttgatggactgtgaggttatatggggctctaatattcaataattatgtgaccctagggaacattgcttctgcactgtcccagaagtgactgtagggaccagtgacagccctgagattaagwctgaagctataaagcctgactgcttctctcagtgctctctaagtcccagcttctctataatctccccaaaatgctactgctcttcgcatgtatttattatcatgaccactcagccccccagccccgcttcctcgcacttcaaactgccccttgcctccatgagcttgtcactgtcccccttctctccccctctgtgcctcagcttctcagtctctcgcacagatcagtactgccaaggtggcgaggagctaaattaaactgtactagtggaagagggtaagggaaa

SEQ ID NO: 514541 - DNA, 638 bp, Homo sapiens
gctggataatctcaagggccaaacattcaatgtgttccatagttcaagatgtgaaaattctttggccacagtacataatgacttgaggctttcattcactgtgtggggagagtggagagcatggaagagctccatatcaaatttttaaatactaacccaaatgaaggtgaaaatgtctccagtaacgttcacagattggggtaaagattatgacaaaaacagtgactaaagyagaaatgcttatagactatgtggtttggcagaagacttttacaaggcgaactatttataataaaacattagaggtaatgaaaacaggtcagattcttaattactcatcattgatagaaatgattaaagagcacagcaaattagctacaaagaattagcagagagaaaggcaatgcagtaaatattctatgctataggttgggtattcaaaatgagaatagagaagagtttggtatacaattttacaacctaatgggtgaaatccacacttttgtccatctttttactttatttaaccttgggaaattagagctatagcaataaaaatcagtttgagaaaagttcagctatagtttcttattctagtaaattaaatggataaaagcaaattgctcttatttggaaat

SEQ ID NO: 514542 - DNA, 638 bp, Homo sapiens
gctggataatctcaagggccaaacattcaatgtgttccatagttcaagatgtgaaaattctttggccacagtacataatgacttgaggctttcattcactgtgtggggagagtggagagcatggaagagctccatatcaaatttttaaatactaacccaaatgaaggtgaaaatgtctccagtaacgttcacagattggggtaaagattatgacaaaaacagtgactaaagcagaaatgcttatagactatgtggtttggcagaagacttttacaaggygaactatttataataaaacattagaggtaatgaaaacaggtcagattcttaattactcatcattgatagaaatgattaaagagcacagcaaattagctacaaagaattagcagagagaaaggcaatgcagtaaatattctatgctataggttgggtattcaaaatgagaatagagaagagtttggtatacaattttacaacctaatgggtgaaatccacacttttgtccatctttttactttatttaaccttgggaaattagagctatagcaataaaaatcagtttgagaaaagttcagctatagtttcttattctagtaaattaaatggataaaagcaaattgctcttatttggaaat

SEQ ID NO: 514543 - DNA, 601 bp, Homo sapiens
acataataaaaataattttaatggtacctaacagaaattacgtactcaaaaatgttatattatattaaccattctaggacttattcccaactctcccctacccactgacaaaaactttctcttgaaccaaacttcagtttggctcctctgaaccttcttctagaataggcctcaaacttgggcttccatgtgcatccttactgagtcttgttttagtagaaatattgaatcagtaattttttaaaaatcaaatacataatcataatcaaatatagacagcataggacatattcctataagtagagttgaattataggagtggtcaaattataaaaatgcatattttatgacaatgacactgttactttggtgaacattaattttttttagatatttttatttattatactttaagtaacacttcaaaatattttcagataatacttatggcagtggcgggcagtctacttccgcggctaccatcacrctggttgcagcagcgaggccgctggctggggctacatttcacggagcctttgggaacccaccccttctgagttaaggcaagagatccccaggtgctgccgcagccgcccaaacc

SEQ ID NO: 514544 - DNA, 618 bp, Homo sapiens
gcataagaaaactgagcatcttgcgggagggatgacagccatcacagtggctgctagctgcctaagatactgaactcttgggagagaagggcagcacccatcactacagctccaggtggctgttttattccctgctggtgctgaagagactggacagcttaatcccaagaggtattccacacaacgtagcacaccggctgtggcrgactgtggtcagacttcctcgtcaggccggaccctaacccaaccttcctcactggatgagtcctccctgcaggagctccagcaagtccagccaggggagtagggacagaattcttatctccctcggcctgagccctacggagaggggtggccatgatcacggaccagcagacttagtctttccccttgctagcactgaggaatccaggcagcacagatgagcaggtttcccccagtgcagcacacccccttcacccagggacagccacagtgctttctaaagcaggtcctggatcccatgcccccggaatgagtgagacgccctatcaggggtcaccagacaccttatacaggagagttcctactgccattgggtcaatgcccctggaggacagagatcccagaggatgaagg

SEQ ID NO: 514545 - DNA, 618 bp, Homo sapiens
gcataagaaaactgagcatcttgcgggagggatgacagccatcacagtggctgctagctgcctaagatactgaactcttgggagagaagggcagcacccatcactacagctccaggtggctgttttattccctgctggtgctgaagagactggacagcttaatcccaagaggtattccacacaacgtagcacaccggctgtggcggactgtggtcagacttcctcgtcaggccggaccctaacccaaccttcctcactggatgagkcctccctgcaggagctccagcaagtccagccaggggagtagggacagaattcttatctccctcggcctgagccctacggagaggggtggccatgatcacggaccagcagacttagtctttccccttgctagcactgaggaatccaggcagcacagatgagcaggtttcccccagtgcagcacacccccttcacccagggacagccacagtgctttctaaagcaggtcctggatcccatgcccccggaatgagtgagacgccctatcaggggtcaccagacaccttatacaggagagttcctactgccattgggtcaatgcccctggaggacagagatcccagaggatgaagg

SEQ ID NO: 514546 - DNA, 564 bp, Homo sapiens
ctgcataagaaaactgagcatcttgcgggagggatgacagccatcacagtggctgctagctgcctaagatactgaactcttgggagagaagggcagcacccatcactacagctccaggtggctgttttattccctgctggtgctgaagagactggacagcttaatcccaagaggtattccacacaacgtagcacaccggctgtggcggactgtggtcagacttcctcgtcaggccggaccctaacccaaccttcctcactggatgagtcctccctgcaggagctccagcaagtccagccaggggagtagggacagaattcttatctccctyggcctgagccctacggagaggggtggccatgatcacggaccagcagacttagtctttccccttgctagcactgaggaatccaggcagcacagatgagcaggtttcccccagtgcagcacacccccttcacccagggacagccacagtgctttctaaagcaggtcctggatcccatgcccccggaatgagtgagacgccctatcaggggtcaccagacaccttatacaggagag

SEQ ID NO: 514547 - DNA, 618 bp, Homo sapiens
gcataagaaaactgagcatcttgcgggagggatgacagccatcacagtggctgctagctgcctaagatactgaactcttgggagagaagggcagcacccatcactacagctccaggtggctgttttattccctgctggtgctgaagagactggacagcttaatcccaagaggtattccacacaacgtagcacaccggctgtggcggactgtggtcagacttcctcgtcaggccggaccctaacccaaccttcctcactggatgagtcctccctgcaggagctccagcaagtccagccaggggagtagggacagaattcttatctccctcggcctgagccctacggagaggggtggccatgatcacggaccagcagacttagtctttccccttgctagcactgaggaatccaggcagcacagatgagcaggtttcccccagtgcagcacacccccttcacccagggacagccacagtgctttctaaagcaggtcctggatcccatgcccccggaatgagtgagacgccctatcaggggtcaccagacaccttatacaggagagttcctactgccattgggtcartgcccctggaggacagagatcccagaggatgaagg

SEQ ID NO: 514548 - DNA, 607 bp, Homo sapiens
taaataatagagtcagttatataataggcatttgatatacatttgttgattaactagatgtattcattcaccttaacatatatcaaattatttagcaattccttctgaagtttaaaattttggaaatatatgacaataaaaaattcaagtctgtttccttgcaaattgtaactaaaattatcttcatatctcatataatttactttacgatcgtattaagcaaatagcttagcctttgtatctcagtgtcttttgtaaaatgagacattggactagataatttttatgactatttatatctgcaacattctataataacaaatatraaacacccttttctcagcatttcatactttcaataatttataggagtttatttaactttcagttttggtttcctctctgagtgcctgaagacatggaatcctctgtattctactagattctcttagtcctgctatagaatgatcaattcagtaagaaccttcttaaaagctaaaaagaaaaaagaaatgtgtgtgcaatgtggaatctcaatattctaggaaaaaaaaaagagagaagttcttagcaggagaatcaatagggaacaaaaagtattaaaaaa

SEQ ID NO: 514549 - DNA, 650 bp, Homo sapiens
ctgacccccagtaactgttgagatgaacttgaatagatggtcactcttcaatatgtggctctccctaagtaatccttacattcttctaccgagagaacagccacgtccattctctgatgtcctgcctattctgcaacaaatcaagtgtttttaccaacctttagaccatctgctcctgtcacccaactgctggaagacagtgtcctggctgccaatggacatccaaggcttagatttctgttctttctcagctttctgtttcaatacatttgactttagagaagactttgtggcatgaaattaaatttttttatttcagtagaaatgtaatgaagacccatcatatgacatgcactggagatacgagtgggaaccatcagagaacctgaaaggtgaaaacactaaaagagaaatggggaaaaaataagataaagaggcatgagagtgaaaggaacagagagacaggggtgggaagaacatggggtgagacagccagagagggagaaagattgagaagatagatagatagatagatagatagatagatagatagatagatagatagatagawagaacaaaagcataaatggaagagactagttctataataggatggccaataccaaaattacaaattaattttcagctac

SEQ ID NO: 514550 - DNA, 650 bp, Homo sapiens
ctgacccccagtaactgttgagatgaacttgaatagatggtcactcttcaatatgtggctctccctaagtaatccttacattcttctaccgagagaacagccacgtccattctctgatgtcctgcctattctgcaacaaatcaagtgtttttaccaacctttagaccatctgctcctgtcacccaactgctggaagacagtgtcctggctgccaatggacatccaaggcttagatttctgttctttctcagctttctgtttcaatacatttgactttagagaagactttgtggcatgaaattaaatttttttatttcagtagaaatgtaatgaagacccatcatatgacatgcactggagatacgagtgggaaccatcagagaacctgaaaggtgaaaacactaaaagagaaatggggaaaaaataagataaagaggcatgagagtgaaaggaacagagagacaggggtgggaagaacatggggtgagacagccagagagggagaaagattgagaagatagatagatagatagatagatagatagatagatagatagatagatagatagatmgaacaaaagcataaatggaagagactagttctataataggatggccaataccaaaattacaaattaattttcagctac

SEQ ID NO: 514551 - DNA, 651 bp, Homo sapiens
tttttaatgaagcattgaaggaccacagtatttaaaaaatactaatttagttttgttctctgcatgtttcaagcaacaaaaatgtattttttccattataatatcagtctcaaaaaacagatgtccccagaacacaccagactgtccccagtattattatgcttccatttcctattagcttatctacagccttccagaatatatttccattttattttttaataacagctttattgagatataattcacttcccataaaatttatccctttaaactatacaattaggtggcttttagtatatccacagatatrctaaaaagtttcacaattataaaaattttagtatatccacagatatactaaaagtttcacaattataaaaatttttataacatttttattacccctaaaagacaccctgcacccattagctgtcagtttacatttccccatccccccattcccccatcccccggaaaccactaatctatgttctgtcgctatagaattgcctattctggacatttcatataaatggaatcatataatatataggattctctgactggatttttttcactttgcatattttcaaggttgattgatattgtagcatgaacggtacttcatttccatttatggttgaataa

SEQ ID NO: 514552 - DNA, 609 bp, Homo sapiens
taaccattaataaataacagcgacgtttgaaatgggagagctccagttttacaataattttcttacaaaagctataacatgctaacaaatgatgaattgcctatttggtaatagtcattcaggctaaagcacaatttgcctattgattactgaaagttttgacaattttctatccacttgagcctcttccacattactaacactattcattacgtctcagcaaagrtatttcacggggtggaatttttaactcaaacagagccatcctaattgtgaatagaagtaggtttttctcctcccccaaaactctttgaaattgtgaaggaagaaataaatatgccttgtaaaattgaatgaattgtcaattgaacagtagttcttgcgccccttctcaccaggcaaaatgaagaattctataagggagaagaggagaaaaacaccataaaattggtgtggattctttcactggataaagaaaaaaaagtgtcacagacaaagaaaagagactttggacttgaaatataatgaaagtgatttttctgaacagatgaagcagatggcatttacaaaagctactaaactttgtgaatagtgtggagttttctttgg

SEQ ID NO: 514553 - DNA, 609 bp, Homo sapiens
taaccattaataaataacagcgacgtttgaaatgggagagctccagttttacaataattttcttacaaaagctataacatgctaacaaatgatgaattgcctatttggtaatagtcattcaggctaaagcacaatttgcctattgattactgaaagttttgacaattttctatccacttgagcctcttccacattactaacactattcattacgtctcagcaaaggtatttcacggggtggaatttttaactcaaacagagccatcctaattgtgaatagaagtaggtttttctcctcccccaaaactctttgaaattgtgaaggaagaaataaataygccttgtaaaattgaatgaattgtcaattgaacagtagttcttgcgccccttctcaccaggcaaaatgaagaattctataagggagaagaggagaaaaacaccataaaattggtgtggattctttcactggataaagaaaaaaaagtgtcacagacaaagaaaagagactttggacttgaaatataatgaaagtgatttttctgaacagatgaagcagatggcatttacaaaagctactaaactttgtgaatagtgtggagttttctttgg

SEQ ID NO: 514554 - DNA, 609 bp, Homo sapiens
taaccattaataaataacagcgacgtttgaaatgggagagctccagttttacaataattttcttacaaaagctataacatgctaacaaatgatgaattgcctatttggtaatagtcattcaggctaaagcacaatttgcctattgattactgaaagttttgacaattttctatccacttgagcctcttccacattactaacactattcattacgtctcagcaaaggtatttcacggggtggaatttttaactcaaacagagccatcctaattgtgaatagaagtaggtttttctcctcccccaaaactctttgaaattgtgaaggaagaaataaatatgccttgtaaaattgaatgaattgtcaattgaacagtagttcttgcgcyccttctcaccaggcaaaatgaagaattctataagggagaagaggagaaaaacaccataaaattggtgtggattctttcactggataaagaaaaaaaagtgtcacagacaaagaaaagagactttggacttgaaatataatgaaagtgatttttctgaacagatgaagcagatggcatttacaaaagctactaaactttgtgaatagtgtggagttttctttgg

SEQ ID NO: 514555 - DNA, 577 bp, Homo sapiens
tgactctggattcacctatctctccaggtttccctgttacttcagttttatgatgggttcaagaaaagatgttgatttgccatttgttcagcttttgttgttgttgtgaggataagagtgattggttctttagttgtttcatttgtgcaagtaattcctgtttctgtttgggtggcagtagaagatgtgtgtgtgtgtgtgtgtgtgtgtgtgtgtgctttgttgtgattcttttgcttgcttttaagccagggatataactactagtaaagtaattgtagatcagttattagacagttaacaaaaccttggaattttcgggatagcatccactaaatatctcaggcataaatagttattatttttttgcctggttcctccttttctatgtaacttgtttaattctgcagtttcatttattcttgagtactttttttccccatcatcaaatcttcttttgtcttttttacttgcttttacctctgactccagtctttcaatatctrgcttattctcttgttcaattattgcctctgcttgtattcggcttttgatacatcaagtaagtacctccttt

SEQ ID NO: 514556 - DNA, 573 bp, Homo sapiens
ctggtaatatttcacagaacagtatattttgcagtcaactcattattagaagtgtctcatttaagattcttacagtagcttggcttttttctaggctgttactctttgctgtttcaccgtctttaattatttctccccctgcatgtattgaaatggaatgcctcaaggacaccgtgatggcaacactgagcgacactgttttctacatcttgcgggaggatgttgttagaccactaggcaaaatagaaaggtggatttaatttgcctcaaataaatatattaaagttaaatgaatcaaagatgcaaatatgtattaacatccagctaagaatgcttaggaattgttwtacttctaagtgttcaatcccatcacctctacagaaagaagtgtggcaatctcttctccagcagagcatgtgtcctgtcaaaacattgttactttggatacaaggtcagaatgtaaaacacatgtcaaggccattgcttcctgctcctctgtgtagtgtagcaagttgtaagcataatattttcctgattcaacttccttagacaaaataagtactccttggtttc

SEQ ID NO: 514557 - DNA, 582 bp, Homo sapiens
tgtggtggtgtgcactcccctctccgtctggtatatggcagtatatatggtatatacggtatatggcactaccatataccaggtctggccttgtcacctggagacctgggagtcttcttttgttttccctgacttttgtcaccagatctgcttacttacaagtccygttggttgtgcccctcccagcctttcccgtcttcctcctttttatcttggtcattatttcaacccagctagaatcatatctggcccagattactgcattagttcctagttggagtcctttaaactctcttttttaaaaaaagatggctgaacatgtggttcctgcctgtaatccaagcactttgggaagctgaggcaggaggatcacttgaggccaagagttcaagacaaccctgggcatcagagtgagacccccatctctacaaaaaaaatttaaagttatctgggtaaaggaaataatgtatacagtggtccatttccaagacaaagtgccttaaatcagattaggtcagcaaactacagaagaaacagggtatacacggctcggcatggtgactcacacctgcaatcccagca

SEQ ID NO: 514558 - DNA, 582 bp, Homo sapiens
tgtggtggtgtgcactcccctctccgtctggtatatggcagtatatatggtatatacggtatatggcactaccatataccaggtctggccttgtcacctggagacctgggagtcttcttttgttttccctgacttttgtcaccagatctgcttacttacaagtcccgttggttgtgcccctcccagcctttcccgtcttcctcctttttatcttggtcattatttcaacccagctagaatcatatctggcccagattactgcattagttcctagttggagtcctttaaactctcttttttaaamaaagatggctgaacatgtggttcctgcctgtaatccaagcactttgggaagctgaggcaggaggatcacttgaggccaagagttcaagacaaccctgggcatcagagtgagacccccatctctacaaaaaaaatttaaagttatctgggtaaaggaaataatgtatacagtggtccatttccaagacaaagtgccttaaatcagattaggtcagcaaactacagaagaaacagggtatacacggctcggcatggtgactcacacctgcaatcccagca

SEQ ID NO: 514559 - DNA, 582 bp, Homo sapiens
tgtggtggtgtgcactcccctctccgtctggtatatggcagtatatatggtatatacggtatatggcactaccatataccaggtctggccttgtcacctggagacctgggagtcttcttttgttttccctgacttttgtcaccagatctgcttacttacaagtcccgttggttgtgcccctcccagcctttcccgtcttcctcctttttatcttggtcattatttcaacccagctagaatcatatctggcccagattactgcattagttcctagttggagtcctttaaactctcttttttaaaaaaagatggctgaacatgtggytcctgcctgtaatccaagcactttgggaagctgaggcaggaggatcacttgaggccaagagttcaagacaaccctgggcatcagagtgagacccccatctctacaaaaaaaatttaaagttatctgggtaaaggaaataatgtatacagtggtccatttccaagacaaagtgccttaaatcagattaggtcagcaaactacagaagaaacagggtatacacggctcggcatggtgactcacacctgcaatcccagca

SEQ ID NO: 514560 - DNA, 582 bp, Homo sapiens
tgtggtggtgtgcactcccctctccgtctggtatatggcagtatatatggtatatacggtatatggcactaccatataccaggtctggccttgtcacctggagacctgggagtcttcttttgttttccctgacttttgtcaccagatctgcttacttacaagtcccgttggttgtgcccctcccagcctttcccgtcttcctcctttttatcttggtcattatttcaacccagctagaatcatatctggcccagattactgcattagttcctagttggagtcctttaaactctcttttttaaaaaaagatggctgaacatgtggttcctgcctgtaatccaagcactttgggaagctgaggcaggaggatcacttgaggccaagagttcaagacaaccctgggcatcagagtgagacccccatctctacaaaaaaaatttaaagttatctgggtaaaggaaataatgtatacagtggtccatttccaagacaaagtgccttaaatcagattaggtcagcaaactacagaagaaacagggtatacacggctcrgcatggtgactcacacctgcaatcccagca

SEQ ID NO: 514561 - DNA, 634 bp, Homo sapiens
tgaggccctagctaacagcccacattaaccaggagatatttgagcaaggaaaccattgagactattctaactgcatactgtttgaaggcaaccacataaaacatacaaaggcagaactgcctaggtgagtctagtcagccttcagtattgtgagaagactaataagcatcattgtaactttataccattacgcttggagtggtttgttacacagcaatagatagctgatatacaaagtgatcttccaatacgaatattatgtcagttctccacttgacagcatttaatgatttagaattgagtgtaaaagtcaaaacccaattctgaatccatctgacaagggattaataactagagtacataaagagctcaggtggaaaaaaaaataaatgggaaaaaatataataaactgattttaaaatgggcaaaagatcagaatagatatttctcaaaagaagacatacaaattgcaaacagrtatataaaaaggtgctcaacatcatcgatcatcagagaaatgcaaatcaaaactacaatgagctatcatcctaccccagttaaaatggcttatatccaaaagacaggcaataccaaatgctattgaggatgtggagaaaagggaaccctgatacac

SEQ ID NO: 514562 - DNA, 578 bp, Homo sapiens
ctagcctgcgtcagtaaggcctaactacagggaaaggctgaagctactattttcaagactttgcctaagctagttcttgaagtgctgctttcttcactctgttaacagtctcccatgacagttcatgcaccatcataaataacttacacataaaaccttggctcaaggttggcttttggataaccatacttgagacagggtgtattaatttacacacaattataaagccttgtatctggagcaagagtgaggtcagtagacctaaaccccatggtggagtatgcatagggttttctctcaagcaaaacttggagtcttgttttaccagatttttgtagcttgtaagaattaaagagagaggaaagagacagaaaaagtggcttgacagttaaagacaggtttattttagagaataaacatgagaggggcttctggccaagttaggtcaggggcactctctcytatggactaagagtttttaaggatttagggtgggagaatttatcagaggcttggactgcttctgtgtttctttgttgtgcttatttgggagtgagagttgtatgtctgttcccata

SEQ ID NO: 514563 - DNA, 634 bp, Homo sapiens
gtttcactggtaaagagcccctttataccttacatttttattttacagttcaacatttacacatgtgttttcgtataagtttattatttcagacaaaacaaacaagtgggaacttttctttttccaaaagtagagaaagagagtgataatcatccttgaaacaagatctgtttttaaagtctgtgatatgttccctttaccttgtcgtacccacacaggcactataaacttcatttatggatccaattctgtctgcttgtattacaagaaagtatgaatagaaaataaggcagcaaatggtggattttttctccttgtggagcttcagagtgtagttagtagtaagaataatctgagttgataggaatgatatggcagagtattcctaacgtgtccagtttttcaagcataaatggtcttttagacattctatcacttttaaaacatttcctttgacrctgcagctccatatgtaagaatctattctaaatccatttatggaacacatagacatacacacaaaaacagacacacacacacacacacatattcattaggtattagcttttctattagtttttctatttagttctctgttcctcatgtaaaagtcaatataagagagaggagtttc

SEQ ID NO: 514564 - DNA, 568 bp, Homo sapiens
atgacctttattgcagtagccttcaggttcctaaggagttaccactgggaggattaacagtattttccctgcttatttgacttcctgagtcacaaatttccttcagacccagggggtggctgttcttttagtagggcctaatttttcttggtggaaaggttatgctttccttatagtatgaattctccmctataagaagctcccactatgtgcagctcagagtaaactgggacaatttagtttaacgttccttgttaaacacatttctgtcctttaagtgctgagagtgagcccataatgtactcgggattcctttcttacatgcccatgttatagcacaaaggcaaatacatttcataaaatactggtttgttgcagttgattcttgttacttgcaaccattctggtctacaaagtcattggtgatactaaccattgcccttaaggaaaattcagggttaggtcccttgcagtcacaatgttctcataactacataacgctagttttgtgtgtgtttctgttttttttttttaatatatattgctgatttattaacattgaactcac

SEQ ID NO: 514565 - DNA, 636 bp, Homo sapiens
aaatatattagggaaacagagtaaaagaccttataattcataaaaatagattcatatatatatcaaaccttcctgaattttaatttttgataccaaatctgtttaaaatttgctattttgataattatgaaagggtgttaaaaatcacacctcaggcattcctagattccctgatgttggtgcccagttactttattcagaagtatcatatcgttttttgtagctcctctatcagtgaatacaatccaggggactagagtgctattgctggttagcccattcaggcaagttctattctcttagcacattcagataaaaaccacacagcaaaacaccaagctgtcccaggatgtgctttaggccattgttgaagttaaatgagaaaaggaatgtaaacattaacaaaatctgaaaggtgagtggaaattaggttttatagcataatttagtataaaaattttccaaatgttagagcaaattatgtgttttcctactccttcactaatgakatattttacatcaagaatatttattattttttgaaattgctgacttcccttggggtgaaaataagtatttttttaaaaagaaaaaatgaaagctttaaaaaaagggaaaaaaaattacatattgcca

SEQ ID NO: 514566 - DNA, 405 bp, Homo sapiens
ctgggcatgcctgggcatgcctatggtcccagttgctcaagaggctgaggcaggaggattgctttaagtccgggagttcaaggccggcctgggcaacacagcaagaccctcatctctaaaaataataataatactattttcatcagagccacatagttcaattccacttggagaaaacaaaaaagcaccctaactgaaattcctaggacattggcataaaaacatcagggattgagcagaagacaggaagcagcatgattgaagaaagtctgttttttaaaaaaaaaatttcaaaaagctagtaataccataatttcyttttttttttttttttgagacagagtctcactctgttgcccaggctggagtgcaatggtgtgatcttggcttattgcaaccgctgcc

SEQ ID NO: 514567 - DNA, 498 bp, Homo sapiens
tttgtatttttaatagagccaggatttcgctatgttgcccaggctggtctcaaactcctggcctcaagtgatctgcctgcctcggcctcccaaagtgctgggattacaggcatgagccaccgcaccgaaccccataatttaattatacattaacagaatatagaattctggattcaaaataattaagtgataggttaatgtggtctagaattccagattcagatggagtkctgcagatggagggtcccatgctactgtggttatcaaccccttataggtgacatgtcattctcctatcatatctaccaagctttgggggattttctctttatcctgggaattcagaaatttcatgaggatataatgtttcattattcttgcctagcactcaatggaccctttcaatttgtagaattaaggctttctacaggaaagacatcttttctattaactatctgattctttcactccctcaattatttctatttatcccttctg

SEQ ID NO: 514568 - DNA, 556 bp, Homo sapiens
cggcagcagtttttacatcctctcagcttcaaatctggcggacagagaaagatactcttcccactgagtgacttgagcccttgagccctccatctatgggggaaagtacccataactaagccaacctcaccactacactgaatactagcatcaataattagcctccatccactggagctcgacctgagcgtggggtcagcctctcccaaaccccaggactgagctgcgaaggagcagttcccagtggaaactcacagaaatgttttaccagaagggcaaaaggattctgcacagaaaatcagcatgtgtgactagctagctattccaaatcatacatgcattttctttttattctttattcttttttcttttctttttttttttttttttttgagatggagtctcactctgttcccaggctggagtgcaacggcatgatctcaactcactgcaacttctgactcccaggttcaagcrattctcctgcctcaacctcctgagtagctgggattacaggcatgtgccaccatgcccagctaatttttttgtattttga

SEQ ID NO: 514569 - DNA, 639 bp, Homo sapiens
caatgatgtcgatcctgccaggtgactacctgggtaaacagtgttcccggcctaagaaatacaagacagaaatggactaaggacagaactaagcaggggaatagggaagggaggtagggagagagagacagtgccagaaaagacaggtgctaaataaccagaagagtgttaggtaatgaagataaagagatgggggagaagtctgcatttgggggccttcataaggagttggttttatttcaatagcactggaaaagagggttaaaaaagtgagtgctataactgaaaggctgagtgtcctaccccagcacttgctactgaggacactcagaattagtcctcttcacctgaaggtcaccatgatctcttgagggaaaaacaaaatttgttactgtggttagggagatgataaatgaaattataagacaggaccacatgactgtagctaaacttgctgctggctgatggcagtgttgggacataggcataagaacatcttttataaaagcaatagctacaatgttacastagcaaccccggaacaaacactgctaaagatcacattagtcttcaatgccactttccgggataaacagaagagaagaaaatccacaagaacaatgaaaccaatcacttaag

SEQ ID NO: 514570 - DNA, 639 bp, Homo sapiens
caatgatgtcgatcctgccaggtgactacctgggtaaacagtgttcccggcctaagaaatacaagacagaaatggactaaggacagaactaagcaggggaatagggaagggaggtagggagagagagacagtgccagaaaagacaggtgctaaataaccagaagagtgttaggtaatgaagataaagagatgggggagaagtctgcatttgggggccttcataaggagttggttttatttcaatagcactggaaaagagggttaaaaaagtgagtgctataactgaaaggctgagtgtcctaccccagcacttgctactgaggacactcagaattagtcctcttcacctgaaggtcaccatgatctcttgagggaaaaacaaaatttgttactgtggttagggagatgataaatgaaattataagacaggaccacatgactgtagctaaacttgctgctggctgatggcagtgttgggacataggcataagaacatcttttataaaagcaatagctacaatgttacagyagcaaccccggaacaaacactgctaaagatcacattagtcttcaatgccactttccgggataaacagaagagaagaaaatccacaagaacaatgaaaccaatcacttaag

SEQ ID NO: 514571 - DNA, 544 bp, Homo sapiens
gggaaatgcttggaaacctttttccgtattcctaaaactgtagcatagataaggaccatcttggcatgatgaatggaggtgaaattgaagttgccagataaaatacagtatgcccagctaaatttgcatttcaaataaataacaaataatgtcatagtttaagtatatctgatgcagtatttgttacaatattgcatgggacatactgatactaaaacattattcactgtttatctgaaatgcaaatttaactggtgatatggtttggctctgtgtccccacccaaatctcatctcaaaatgtaatccccacatgtcaaggaagggaagtgattggattattggggcggtttctaccatgctgttcttgtggtagtgaattatcaygagatctgatgattttataaatggtaattctgcttgtgctctcactggctgtcctgctgccttgtgaagaaggtgcctgcttccctttccaccatgaccgtaagtttcctgaggcctccccggccatgcgaaactatgagtctattaaacctcttttg

SEQ ID NO: 514572 - DNA, 544 bp, Homo sapiens
gggaaatgcttggaaacctttttccgtattcctaaaactgtagcatagataaggaccatcttggcatgatgaatggaggtgaaattgaagttgccagataaaatacagtatgcccagctaaatttgcatttcaaataaataacaaataatgtcatagtttaagtatatctgatgcagtatttgttacaatattgcatgggacatactgatactaaaacattattcactgtttatctgaaatgcaaatttaactggtgatatggtttggctctgtgtccccacccaaatctcatctcaaaatgtaatccccacatgtcaaggaagggaagtgattggattattggggcggtttctaccatgctgttcttgtggtagtgaattatcatgagatctgatgattttataaatggtaattctgcttgtgctctcactsgctgtcctgctgccttgtgaagaaggtgcctgcttccctttccaccatgaccgtaagtttcctgaggcctccccggccatgcgaaactatgagtctattaaacctcttttg

SEQ ID NO: 514573 - DNA, 615 bp, Homo sapiens
atgtcagtgtgccttcctaagacagacagcttaggttctggtttgcccttcaacactcattggctgtgagaacctgggcaattcacaaacctctctgaacctctctttcctcatctgtaagatgtggaagyctctacctcattgagtagttgtgagaattaaatgaaataataaatgtaatacacttaatccagagtctaacacatgaaaagcactcaataaatacctagttactatcgttttctacttaaaaaaatttacacaattgtcagttatttatatgatcatcagttttcaactggttgaagtttcattgatttaccaaatttagaacatatgttctctctgaaataaaatatagtatacatggcttgaataaaattcactttggggactccgaggacactttatacagagggacaattactttctagagcaggaaaaactgagaaacaatgacaggcctgagacactactgatggagaaagatttcaggatggggaaaataaatgacggttcctactgcgagcccctcatagaggtacagagagaagttgatttgcagttgagctgcttcttgcgtgggcaactgtgtaatgctctccaggatgagtg

SEQ ID NO: 514574 - DNA, 615 bp, Homo sapiens
atgtcagtgtgccttcctaagacagacagcttaggttctggtttgcccttcaacactcattggctgtgagaacctgggcaattcacaaacctctctgaacctctctttcctcatctgtaagatgtggaagtctctacctcattgagtagttgtgagaattaaatgaaataataaatgtaatacacttaatccagagtctaacacatgaaaagcactcaataaatacctagttactatcgttttctacttaaaaaaatttacacaattgtcagttatttatatgatcatcagttttcaactggttgaagtttcattgatttaccaaatttagaacatatgttctctctgaaataaaatatagtatacatggcttgaataaaattcactttggggactccgaggacactttatacagagggacaattactttctagagcaggaaaaactgagaaacaatgacaggcctgagacactactgatggagaaagatttcaggatggggaaaataaatgacggttcctactgcgagcccctcatagaggtacagagagaagttgatttgcagttgagctgcttcttgcrtgggcaactgtgtaatgctctccaggatgagtg

SEQ ID NO: 514575 - DNA, 311 bp, Homo sapiens
cattcatgttgccaactctcttcctcttagcttccaatcgagactttggtttggtgttgtaattagttatgccctaaagcagagtttctcatccttggcactactggcatttggggccacatacttctttgttgtttggggctgtcctgcatattgtaggatgttcagcagtatccctggcatctagatgccagtagcrgaccccctcccctaagttatgacaaccaaaaatgtctccagacattgtcaaatgccccttggtggacaaaatcagccccagtgatgaccactggtttgaaggaaggcctctg

SEQ ID NO: 514576 - DNA, 510 bp, Homo sapiens
ataatctgtgctgtccaaacagcagacactaagccacgtgrctttttaatctttttattgtccaaggggaaaaaaaaagggatggccaaagagaggttcttgtttataaacgggcctttataacttttagggaagagaaacctaaaatattgaaactgtaatcactcacttttattctctttcatcatcacttgattctgttaaaagaagcttttaaaagacccacatgatttaaactatcttttaaaaccatgtagataaacaagaattccaagatgtcagcagaatgaaaactgcttaaaatgcatgttagtatcatgtgggccatctgtagtattttatctgttctagcactgcccaccctaattctgggggcatggcacctcttttgtcctaactccaaacacatgacaaggggctatgtgccaatcacaagactgatcccttggtgggggaaacatgtgactcaagcaaggccaatcaaatccttccctgagagatttttttttt

SEQ ID NO: 514577 - DNA, 510 bp, Homo sapiens
ataatctgtgctgtccaaacagcagacactaagccacgtggctttttaatctttttattgtccaaggggaaaaaaaaagggatggccaaagagaggttcttgtttataaacgggcctttataacttttagggaagagaaacctaaaatattgaaactgtaatcactcacttttattctctttcatcatcacttgattctgttaaaagaagcttttaaaagacccacatgatttaaactatcttttaaaaccatgtagataaacaagaattccaagatgtcagcagaatgaaaactgcttaaaatgcatgttagtatcatgtgggccatctgtagtattttatctgttctagcamtgcccaccctaattctgggggcatggcacctcttttgtcctaactccaaacacatgacaaggggctatgtgccaatcacaagactgatcccttggtgggggaaacatgtgactcaagcaaggccaatcaaatccttccctgagagatttttttttt

SEQ ID NO: 514578 - DNA, 582 bp, Homo sapiens
ctgagattttatggttgcttttgccaagtaattttgaattgtatcctggtcattwaaaatattacattataagaccctgtcttgttaaatactacagagaatattgatatttttgttttagcaagcaatcatgctgattaggttcaggctgcaggttggaattgtaatttcagtgtcatattggtttcacaggttttgcagtgctatgtgcatctatctggtgtgtccctccccaggggtcagtctgggatgtgagcagagatatatttgttacctcagttcttcaattctggggcatgctattgggatcggttccatgcatacacaggttgggggtgaggccaagagttcataaacagttttatggagtaactttactaagctcttcttgattcattctctccccagtactttctggttctctgggtttcccattttttatctggcctaaaactgcctagttccatgattatgcaacatccaggccaaacactaggagaacagagaaagaatagagatctggttgcaggctcctcttgctggctattgttgctgccacctctgtccccactaccactgctc

SEQ ID NO: 514579 - DNA, 599 bp, Homo sapiens
ctgttttctgccccctggggtatggattcgtctgtgaatggaatatgatgcttatcttcatattgatttttcttggtccaaaattcagaaacaaaataaggccaaatagggcccccatgggatgaaatttggtcgtgtaacttgcttgcaaagaacaggacacagagttatgactgatggaggatacattctagtctcctttcacccctggggcattaaaacctccgggagtttgagcactcttcaaatagacacctgatttcccagctagagatttgggtctcacggaagctgagatttcctctcaaccaagtactcacagtgaaaacttcacaccctcctagcatgatattaacatttgccagagcccaaacacaggaacgagagtcaccctggaaaggaccgcactgaggctgaagtcaggtttgttcacaaatgtttagcccaattagtcttacagttcaccaaggttacacatggggacatttgaggatagggtgggcatggcctgttttcataaactaggttgaaacttttttggatcttgatcccatgagcctgggcaaatakaatctgattgggttaaatgtctttagagt

SEQ ID NO: 514580 - DNA, 633 bp, Homo sapiens
ctgttccagcagtaacctgtaatgtaggctaaaaatacagattttgagatttatttaatcagaatccctggagtgttaatttttatatcaagatctcatagtgttttatttgaagtgacagggaggtctgtagatagctggacatgtatgggactggaagcttaggaatctttaagttcttccaggttattcttatgttcatttgtttattctgaaaatagcatctaatgtattttaagaaatggaataggcacatagtatacattgggtaacacaacagatagggtccccgtgcttaattcttagtcttgtgaaggtgacaaaaatacttaaaaatatgtgatcmtaaattagaatgagtgttatgggagaaatgacagcaaatagtgatgagaattaatggggaggggaattgtctagatgagagggaaaaggtctccttgaaaaggggatgttaagtgggactgcaggatgagagggaaccgtctcttgtctatatgagaagtgagggttaaacgttttccaggtagagaaaaggaacaccatgtgctatgtcttagaaccagggatatccagtcttttggcttccctgggccacattggaagaagaataattgtcttgggctacacacc

SEQ ID NO: 514581 - DNA, 630 bp, Homo sapiens
aataaagcccttccttctacaacttggtgtctgagaggttttgtctgcggctcgtccttctacatttcttggtcccctgaccgggaatcgaggtaactgagggatggccgaggtagccccttaggcagcttaggcctgccctgtggagcatccctgcaggggactctggccagcctgagtgacgtgatccaaagagcactcctgggtagaaaattgcctgggtggaacgcctcaccagaacagcacgtagcaggccccygtggaggattaacacagtggctgaacaccgggaaggaactggcacttggagtccggacatctgaaacttggtaagactcgtctttggaacttgccctactccatctgagtggaagcgtggcctgatcacccacggtgtgcctgtattggcacttttgttctggttttgacttgacttgacttggtaagactagtctttggaacttgccccactccatctgagtggaagtgtggcctgatcacccacgacgtgcctgcattggcacttttgttctaaacaagaaaatatggacaggatacttatctaaataaaattactaaatattttgatactttattccagtaaatatggatgcttagataaaagggatc

SEQ ID NO: 514582 - DNA, 499 bp, Homo sapiens
ccggcaagaatttgtttatattcttatgttcttccyatttaaaattctccctcttctttccattgcatcattgagataaaagtgctgaggtaggtaccagagacatctcctggctaacactgtgcaccaatttggtctttcagctctcctgcttctcattctagatgctatcttccaaattctctcctttcatgccaaactcatatacatacattctgcaatgagtaaagtcagggaaaaacaaccaggtacctattctttgaagaaaaaatgaaagtttgaaagatgatatattggactttgctagagtcttttagtgatatttaggttgtttttcctcaatgtggacagctttgaaatctgccaaaagcttggtatctgctatttgtgcagcattatgcatcctcttccgtctgcttggactagtcaaggtgtcacttgtgcccttgatcacaatagagagagtcagtagaaaatgagaatagaaaaatggttggca

SEQ ID NO: 514583 - DNA, 490 bp, Homo sapiens
ccggcaagaatttgtttatattcttatgttcttcccatttaaaattctccctcttctttccattgcatcattgagataaaagtgctgaggkaggtaccagagacatctcctggctaacactgtgcaccaatttggtctttcagctctcctgcttctcattctagatgctatcttccaaattctctcctttcatgccaaactcatatacatacattctgcaatgagtaaagtcagggaaaaacaaccaggtacctattctttgaagaaaaaatgaaagtttgaaagatgatatattggactttgctagagtcttttagtgatatttaggttgtttttcctcaatgtggacagctttgaaatctgccaaaagcttggtatctgctatttgtgcagcattatgcatcctcttccgtctgcttggactagtcaaggtgtcacttgtgcccttgatcacaatagagagagtcagtagaaaatgagaatagaaaaa

SEQ ID NO: 514584 - DNA, 603 bp, Homo sapiens
atgacctactatgtaatagtcaataatgataaatactrtgtgcaatttcccatcaaggatattacagtttggagataaatgacattgccaccttgtagattaaatccagcactttgaaccaacagtaagagaattgccacaagaaagattattatgcctatattttttaatcactacaacttacagaaacttgtgttcaactttagcggtgatgctgagatgaataagtcatggcacatgtgatcaaagcattcacatttcagccgaaaagagacaaggcagattttgaaagtaaagggacactttgagaaaaggacatgctaagggaaaggaaaagagagatcaattacctgtctatagaaatcttaaaattgtaataacaaagtaatatttgggcagggcctatatagatatgaagacttttgttagataaaaacacaagagaagcaaaaattctaaagggagcagtggcctgaaaggcttacttacaacatgtgtggaaaatggagaaaattcctgtgttgaacaaataggaagaggtacttggtgataatactgaagaaggtattatcaccaactgcctgcagcatgataattcttgca

SEQ ID NO: 514585 - DNA, 603 bp, Homo sapiens
atgacctactatgtaatagtcaataatgataaatactgtgtgcaatttcccatcaaggatattacagtttggagataaatgacattgccaccttgtagattaaatccagcactttgaaccaacagtaagagaattgccacaagaaagattattatgcctatattttttaatcactacaacttacagaaacttgtgttcaactttagcggtgatgctgagatgaataagtcatggcacatgtgatcaaagcattcacatttcagccgaaaagagacaaggcagattttgaaagtaaagggacactttgmgaaaaggacatgctaagggaaaggaaaagagagatcaattacctgtctatagaaatcttaaaattgtaataacaaagtaatatttgggcagggcctatatagatatgaagacttttgttagataaaaacacaagagaagcaaaaattctaaagggagcagtggcctgaaaggcttacttacaacatgtgtggaaaatggagaaaattcctgtgttgaacaaataggaagaggtacttggtgataatactgaagaaggtattatcaccaactgcctgcagcatgataattcttgca

SEQ ID NO: 514586 - DNA, 544 bp, Homo sapiens
ctgcctgtttgccatctggtttacgttactacttagctaaataacgctatgtatctaatgatttattctatgttttcacctagtgtatagtatttgtttatctggagatgtaggcatttacattctattctccttactatttagacattttaaagaaaaggctgagattatttctaaggctgctaatcatttattatgtagaatatttggagacgaacacagcaagtcagaggtcattatttttcttctwgtaatcagcacatgccatccatgaatctctttcctcaggcgccagactcttgtcagtgtgtcaatatatacaaatttcaattgtgatttccccactaaggaggtctaatacatatcagttccactatggtgagctaattgcaggcctgaacgtttaccctaggtctgcatagcaagtgcaaaggcctgcgtgaatttactggcttatgaaccctatgttaaacatggttcctggaaaaaaaaatcaatgatatacttcattttctggctctaaatctctgaaaaaccatcttaa

SEQ ID NO: 514587 - DNA, 616 bp, Homo sapiens
ggtctgtaaggtagaaagtaggagttattattatgtttgtagatgaggaaacaggttcacatcaattaaggattttgtcaaaggcaaacagctaataagttgagagaccagaaatctaattccatctgtttgactcaaaagctcttatatgtaagaacaacatttagttctgttattttcttggttgggagagaaagcggtgtcaaatgacacctaattctgtttttcaaaacatgtcctttatacatggaattctaacacaatgaatgaaatgaattacattactacagagcacaattgcttcagacctttctgggaaaggaggcaattttctatcattatgattattttaatgtcaaaaagttgtgtctacacacaatcaaatttattttttacatgcttaacttcccaaagtgaagaaataatgctacgcctgaagagagccccctgagctactctgctctgtccctgggcctccatctccctactggacytgcaggctcttccttgggctcaaatgtgtcccccatctgcctttgctcaacactcacttattctccaagtcttgcttccatgtaggttttcttcatctagaaactaactagcataaaatcta

SEQ ID NO: 514588 - DNA, 634 bp, Homo sapiens
tgcaatggcttagagccaacatcctgttttcttacaaaattcaggatactttaggaactgaatcaagattatgcagccaaattagaggtctgagattgaggcaaaaagcctgattttatatgtggccatctaccattggcttacagacttatctagagtctgtatgttcttatgtccaagaaggtataaaatgtttatgacctacctgaaacaaaagaggagatgatgatactttgtctcacctgctttcttcagaggttaaagagaaatttaacttgtgtaagtgaaaatatggtagccaaacttcaatacccttccatataaatgaaaattgtagagttacaaagtcttccacactattaaatatataaagatttttttaaaaattaatgctcactgaaggtattgtaagtagtcaattgctgaacaagttttggactcagaatttttaatcaaaaggttataaatattctcacattaaaaygaattactaggttagaagcccatgtgctaatattttaattgtgtaaaactactaaaagaaattagaaatatgtaaaaattatctcagagaattagaaaaaaattacaatcttaatccagagtttacctccttctttcttgtagccacaca

SEQ ID NO: 514589 - DNA, 500 bp, Homo sapiens
tttacctccttctttcttgtagccacacaaatcatgctgcagatagcgcttgcaatctagagcaggggtcrccaacccctgggccatggagttaggaagccagccgcatggccagaggtgagcagtgggccagggagcatgaccatctgaactctgcctcccagatcggagggggaattagattctcacaggagcgagaaccctattgtgaactgcgcatgccagggatctaggttgcaggcaccttattagaacctaattaacgcctgatgatctgaggtggaacagtttcatcccgaaaccatccctccccgcacttctgcccatccatggaaaagttgtctttcacaaaaccagtccttggtgccaaaaatgttggggactgctgatctagagggcaagacatagacacagtatatggtataacatgcaaagtgatgcatgaagagggtaaacagtgagtgctaccaaagttctaaggcagaatatatcacttccag

SEQ ID NO: 514590 - DNA, 510 bp, Homo sapiens
attctagcaaaactctaaataatcaaagaacatgaatggattttcttaagtatatggaaatttttataatatagttgaactcaactacagtagataatgacaaacttgactcattcatctattggatgaaatggctaagaggctcttaggtagcagtagatwcactgtattaacaccaagacacaggatatcatgcgaatttctatacaagataaaaaacaagatgctttgaagcagttttcttattcagttctgttgaaacctgggtaagctgctgctggaatgccatgtagctctgtttaaggtttttaactgatatctggggtatttgggtgtattttttttcccaaatttaaaagcattaaagcagatttttcaaacttgtaagtgaagcagctggaggaaaagctaatttagtaggcaacaaaatcaacattcatttatttaggtcaaaacaagagaccaaattagaaacgatcataaaagccttctctttgatgtccaagaatt

SEQ ID NO: 514591 - DNA, 620 bp, Homo sapiens
tcagaattcccttgttacgtggacgtccttctaccaatctctgccatccctttgccctttcatgacttcaaacacacatggacaaattcctattcaactacattcaggagcagaaaaccttctgtctttgataattggagacagcactgctttcactaatactaaccttgctgatttgtttttctccaaytatttttggttatctcaactatactatcaatagcaatataacaataaaataaccacaccaaagagctaaattttaagttacaactaagtaatttgctcaaatacatgaaactagagagtgatagtgccaggatttgaaccccaatctttctgacttccaaagccagtgacccctatactatctcccttgatatacttacacccccacatgaaaatgtgccagcaactctgtcacactcttaccaattcctgtactctccatttctatcgccgtagcatttgccaccttccaaaatctactataggcatcctggagtcaaaggtcaacaagcctctctcaattcttcccctgctttatcctattgatgtggatctagcagatggtaacaaataatctgagtgtccttttgggtcatttcattttagtgcta

SEQ ID NO: 514592 - DNA, 620 bp, Homo sapiens
tcagaattcccttgttacgtggacgtccttctaccaatctctgccatccctttgccctttcatgacttcaaacacacatggacaaattcctattcaactacattcaggagcagaaaaccttctgtctttgataattggagacagcactgctttcactaatactaaccttgctgatttgtttttctccaactatttttggttatctcaactatactatcaatagcaatataacaataaaataaccacaccaaagagctaaattttaagttacaactaagtaatttgctcaaatacatgaaactagagagtgatagtgccaggatttgaacccmaatctttctgacttccaaagccagtgacccctatactatctcccttgatatacttacacccccacatgaaaatgtgccagcaactctgtcacactcttaccaattcctgtactctccatttctatcgccgtagcatttgccaccttccaaaatctactataggcatcctggagtcaaaggtcaacaagcctctctcaattcttcccctgctttatcctattgatgtggatctagcagatggtaacaaataatctgagtgtccttttgggtcatttcattttagtgcta

SEQ ID NO: 514593 - DNA, 598 bp, Homo sapiens
cccttgttacgtggacgtccttctaccaatctctgccatccctttgccctttcatgacttcaaacacacatggacaaattcctattcaactacattcaggagcagaaaaccttctgtctttgataattggagacagcactgctttcactaatactaaccttgctgatttgtttttctccaactatttttggttatctcaactatactatcaatagcaatataacaataaaataaccacaccaaagagctaaattttaagttacaactaagtaatttgctcaaatacatgaaactagagagtgatagtgccaggatttgaaccccaatctttctgacttccaaagccagtgacccctatactatctcccttgatatacttacacccccacatgaaaatgtgccagcaactctgtcacactcttaccaattcctgtactctccatttctatcrccgtagcatttgccaccttccaaaatctactataggcatcctggagtcaaaggtcaacaagcctctctcaattcttcccctgctttatcctattgatgtggatctagcagatggtaacaaataatctgagtgtccttttgggtcatt

SEQ ID NO: 514594 - DNA, 619 bp, Homo sapiens
acatgaatatttgtgcagactaaatataattgcataacttcttgagaattaggcaagttatctattatacctttctttcawctcatttgcctcacttatgaaataaagataataataatactcatctcctatgatttttttaaagattgaatcaaataatatataagatagaacattggcacagactaaagctttcaataaatgaaaactagtacgttttaaaatattagctgtgctttgacgtttttggtatagcccccattaaagacgtttacaatttacaattatgtaaatttttgtttcattttatggtgtttgggtttataacagctttgcaagcagttaaatagattacaactaagtagactatgctaatctaatcaaagaggcgaccgaattaggcttctgtttttgtttttctttagcagttttatctatatgaaaattatcctcttcaagatctttcaggaaagcttttccactgttggagcacttttaataaatagggttttggttaagggaagaaaattaacaagagacctcaaagaaaattcacttcataaaggatatagacttttagatgacatagcaccttacagcgagtttggagatggagaag

SEQ ID NO: 514595 - DNA, 619 bp, Homo sapiens
acatgaatatttgtgcagactaaatataattgcataacttcttgagaattaggcaagttatctattatacctttctttcaactcatttgcctcacttatgaaataaagataataataatactcatctcctatgatttttttaaagattgaatcaaataatatataagatagaacattggcacagactaaagctttcaataaatgaaaactagtacgttttaaaatattagctgtgctttgacgtttttggtatagcccccattaaagacgtttacaatttacaattatgtaaatttttgtttcattttatggtgtttgggtttataacagctttgcaagcagttaaatagattacaactaagtagactatgctaatctaatcaaagaggcraccgaattaggcttctgtttttgtttttctttagcagttttatctatatgaaaattatcctcttcaagatctttcaggaaagcttttccactgttggagcacttttaataaatagggttttggttaagggaagaaaattaacaagagacctcaaagaaaattcacttcataaaggatatagacttttagatgacatagcaccttacagcgagtttggagatggagaag

SEQ ID NO: 514596 - DNA, 619 bp, Homo sapiens
acatgaatatttgtgcagactaaatataattgcataacttcttgagaattaggcaagttatctattatacctttctttcaactcatttgcctcacttatgaaataaagataataataatactcatctcctatgatttttttaaagattgaatcaaataatatataagatagaacattggcacagactaaagctttcaataaatgaaaactagtacgttttaaaatattagctgtgctttgacgtttttggtatagcccccattaaagacgtttacaatttacaattatgtaaatttttgtttcattttatggtgtttgggtttataacagctttgcaagcagttaaatagattacaactaagtagactatgctaatctaatcaaagaggcgaccgaattaggcttctgtttttgtttttstttagcagttttatctatatgaaaattatcctcttcaagatctttcaggaaagcttttccactgttggagcacttttaataaatagggttttggttaagggaagaaaattaacaagagacctcaaagaaaattcacttcataaaggatatagacttttagatgacatagcaccttacagcgagtttggagatggagaag

SEQ ID NO: 514597 - DNA, 576 bp, Homo sapiens
actccaaagagtgtcctttaaatctctgaggttaacagggaacttggtaaattgatagtgtagaacctagtgaaagatttgaatataaatagaggtcctcaaactttactgctgaccttgagatttggaaataatatttgtcacattattagaaagctaytgctttttcaatgacaaattatttgtcatgtggggttgtaatcattagaccccattttttatagtattgattgtttgtgcaaacacgagatttagtcagagttttatttacatttttttcccaacctctcctgctagattctatggtgctttaaatatcttttattttggacaattgcaagggaaaaacagtcacatagaatttctttgttttgatgtatagaatgtaacatttgaagtttaattacagtatcatggtccttttctccattttaattaccctctatctatagattttatatcaaatgtgccattttttatatggttcatccacgagaaagagaaaatcatctgataaaatccacttgcttgacctttacagttaggtctttcttggtatttttaagagctgtgcca

SEQ ID NO: 514598 - DNA, 610 bp, Homo sapiens
  misc_feature (1)...(610): n = A,T,C or G
atttcagtggataaaccaaaagtctagcaagacagatgaaaacaaagaaaagttgagatagaaaatagaaccatattgagcacagttattactggtttttacatatgatttacatttttccaccagcttcttttttttttgtatgtctcattaagtacttctatcttttattcagctcaatgtatagatacttaataatcaggaaaataaatggagcatctttagtctgttcactgttagaattttgcctattttgttttgcccaagtaaaatctaaagtatctcctttggctgttttctaaatttcttccacttgtcaatttttatactaccatgagtgtcaaataatatgctattaaggaaaacctcatcaaaacagtgttggtatcttagactgctaaaytgtgatttctttctttccaggctataagttcagagtttttcctgctgcaactttacaactgagtcagcttgaaaaagattaatatggccaataatgaaaaagattatatggccaaggcttgttttgtaagtgacatctattattcagattaaaaaaatgaaagaatgataacttaaagcacctccatcataggctgagtgcagggan

SEQ ID NO: 514599 - DNA, 625 bp, Homo sapiens
  misc_feature (1)...(625): n = A,T,C or G
agaagagattggtgcatttcagtggataaaccaaaagtctagcaagacagatgaaaacaaagaaaagttgagatagaaaatagaaccatattgagcacagttattactggtttttacatatgatttacatttttccaccagcttcttttttttttgtatgtctcattaagtacttctatcttttattcagctcaatgtatagatacttaataatcaggaaaataaatggagcatctttagtctgttcactgttagaattttgcctattttgttttgcccaagtaaaatctaaagtatctcctttggctgttttctaaatttcttccacttgtcaatttttatactaccatgagtgtcaaataatatgctattaaggaaaacctcatcaaaacagtgttggtatcttagactgctaaattgtgatttctttctttccaggctataagttcagagtttytcctgctgcaactttacaactgagtcagcttgaaaaagattaatatggccaataatgaaaaagattatatggccaaggcttgttttgtaagtgacatctattattcagattaaaaaaatgaaagaatgataacttaaagcacctccatcataggctgagtgcagggan

SEQ ID NO: 514600 - DNA, 479 bp, Homo sapiens
caaatgtcagctccagaacagggaccatgtttgttctgttcactgctttatctctagagccttagaattctgcctgccagagtaggagctcaaaactttgtttttgtgactgacaacctctgatccctggtccctctccaatttgtccctctccatcaggcaggcccctcccgtcttcgaagctcccatcatcgccccacccctcctcttgccaatatcctgagttcctttgcctttaatcaaacctgttggaagacgctcctggctggatgcattccactgtccacgcttgctgtttggtgtctcaccataagaaagcccattcccaagcacaaatcctgtcaactctgggttctccaagccagcctggttttcacgttaagaaacttttagccctctcatgtggttagctggcaacagaccctaccttcaaaacacacaaacsgacaagcttgcctgtctccactcatctctgcatc

SEQ ID NO: 514601 - DNA, 541 bp, Homo sapiens
gagccaagcttccagtggcttcccagtaccctcctgatgaagtctcaactccttggggcctacaaagctgraataatcggccctttctcacttttgcagtctcacctctctcttcataccctcatttaccactcccttccccccccttcaatgccattaatgtgtgtacgtgtcattttgttggtttatgtgctttttttttttttttccgagatggagtctcactctgttgcccaggcaggagtgcagtggctcaatctcggttcactgcaacctccgcctcctgggttcaagcgattctcctgcctcagcctcccgagtagctgggattacaggcatgcgccaccacgtctggctagttttttttgtatttttagtaggtatggggtttctccacgttggccaggctggtctcgaactcttgacctcagatgatccacccgccttggcctcccaaagtgctggaattacaggtgtgagccaccgcgcccggccagttcatgtgcttttaacgttagtccttctgcatttggttttattt

SEQ ID NO: 514602 - DNA, 565 bp, Homo sapiens
gatgttggatttgaatgccaagccatagagcgtgcagtgactaaacaccagaaacttttgagccaatgtgggatatggtccagggagacccaagagaagaattttagtagtgtagtaatgggatgctaaactatgaacaatatgtattctagcaaataaaataaaaaaaatttttaaacctttttattacagagatttccaaacttayatagaaagaagctagtgagcccccatcgtcccatcagatagcttcagtaattatcaataccttgctaaacattttgcttcacctatacctctacctgccctcccacccatctctgtctacacacacacacacacacacacacacacacaattattttaaagtgagtcctagacatcagttcagatagatttaacaactgaagttcaaatgattttcagagcgtaggccttagttttttggtataatagttattgactgttatcagagatacagaagtagggtgttgatgagtctagtttgggacatacagagtttgaggtgcctgtaggacatccaactgaagatacccaaccagct

SEQ ID NO: 514603 - DNA, 642 bp, Homo sapiens
gatttatttttcttgcttaaataaaagaacacaggcttcgctcagttaactgacttgcagtcactaactgacaatggggctaacaggagacacggctctttgtttttctctatcaagatatttttaaaaattgtttattaaaattacatttgtacgaaacagaatgtacagaattgcatgatcatctggaatcttccctggtcatgtcatgactgtcagatatatagacaaaactatttactttcacaaaagctgtctagaatatacttgtccttggaaaaatgctcatcttcctttcatcagtattactcagaaayagaaactcagtattctgagaatcttaatgaagtccacaaaaagtttttaatcactttagcttttgcatgaaatcacaccttgccagaaaagattatgcttttaatatatcttttagttttctgccagttttcttaaaagataagattactttaactcaagctatcaattaaaaagggtgggttatatattcttcatcataaaatacaagccagtgactggagattaaatatctgacataacttataagcccatattcatagcattaaaggttcttcctggtaacttgtcaagaaataatctgacaaactattggctcttttagca

SEQ ID NO: 514604 - DNA, 561 bp, Homo sapiens
cccagctcctggggctgttgacactattggtctgtggccttttgggaatcaggctgcacagcaagagatgagtagtgtgctctgtaaatatatttgtatttataataaatgtaatctgtatttataatacatgtaataaatctgtatgtaaagcccctccctattgcttgcatgaccacctgagctccacctcctgtcagatcagcagcagcattagattcttgtaggagtgcaaactctactgtgaactgtgcatgtaagggatctagttgcatgctccytatgagagtctaatgcctgatgatctgaagtgggacagtttcataccaaaaccacccccgcagcccttaccccatctgtggaaaaatcgtttcccaggaaaccattccctggtgccaaagatgttggggaccactgctttaaatcattcttagattacttataatacataatacaatgtaagtgctacagaaatagttgctattccgcactgttttttgcaatttgtatttttattgttgtattgttatctttattggttttgtttttgagtattttcaa

SEQ ID NO: 514605 - DNA, 572 bp, Homo sapiens
cacaccggactgcctctgggctccacccaccaaagtcttgtcagtcagccctgccccttcagcaagcagcccagtccctgccctctccaatcaccccatggtgactttgggtgggtgactcttggggattcccactccattactgggccctcacctcctaccgccccaaactcaacctccctgggctctttgggctcacatctccaaggaccttggtcccccagccccaggccccgccctcgccagtcatccctgggtgactttgggctggtgactcctgaggctccctgctgcagactctgccctcccctcctgctgcctcaaggtcgacctccctgggctctttgcgctggcgtctccaaggagctgggtcccaaccctgtgtttccctcccccatcatggagcagcaactcagacwtcgtgctgatgtccctccccacgaccaggagggtggaatgtagtgatgtcacaatccacctgggaactgtcattactgcaagaccagcctttgatcttatgacccagtcccctaagcgttgtcaccccatttctgattcctctggtcacagca

SEQ ID NO: 514606 - DNA, 466 bp, Homo sapiens
ctgcattttgtggaaatcagaaaggaggaaaagtgtaaatattaaattgtaaattgtaaataaagccacataaaggctgcactttataaggtcatcctgtgtccagccatttgggtctctctctcaccacccctgataccttctcacaacttcacctccaagacctctcagacacaggctccagggaccaactccttcatgattacaccatcaattttgtggttcctcaaaaagtggaaaccacttttgtggttcctcaaaaagttaagcatagaattgtcatatgacccaacaattccactcccaggtatatataccccaaataattgaaagcaaggacttgatcagatatttgtacactaattttcatagcagcattattgataatattcaaaaggtagaaacaaatcaaatgtccacagatgaatgattaacaaaacrtgatacatagaggtggctggcaagg

SEQ ID NO: 514607 - DNA, 529 bp, Homo sapiens
tgggctgtgcagcatgccttttcctttcccctagaaaaggcaagcccttgctggagcaactgagggccaataatgcagtactgtttggccattttaaatccatgctcccttactaaaaaagtaacccaaaaagtcacaccccctcccccgagagattctraaatgcacccccaccacaaacacacatacacacacacatacacacacatgtgcgtgcactaggggagttggggtagtgtcctttggtttatgctgcacaagcccaccagcttgcctgtgttcttttcccatttctaaatataaaatgacaatattgaaaactcctcattaaactacacagcccctgtccctgggtcacctacagctctcaaggaccaggtttccaccttcaccccatctttgagaactgtgttagaagaatgcaaggtagagatcatcacatctgtggctgcaggcagggagaccccatgggaagctgagacctggaatgcgatgacaaaggctgaacaggcaaggcctgtgggaatgg

SEQ ID NO: 514608 - DNA, 365 bp, Homo sapiens
cagctgaagcaagctgaggagctcaggtgaggggacccgtggggggagggcaggcgggtaggtgtgtagatctctgaagtacagcagctcggcggggagaaataagaacgaagctgggccaggggaagggcagaaattgccatgrcaggctcatgacacacaaatatttatcagtgaacaaggataataataagttctgtgttgcagttgtttcttagagccttgttttctctttttcaaagcgaagtaattgatgaggtgaaatttacataacacgacaattcacccaagggggggaaccacccagcagcattcagtataaacaaaatggtgtgctatcaccaccccacttacccttagtgaga

SEQ ID NO: 514609 - DNA, 352 bp, Homo sapiens
acccagttattctctttctagtaatttttctacccaaataataattcaggaagaaaacctttacagagattattcttataatgtttgtgatacaatatttacrggcaacataaattctcatccagagatcggagtaaatattatatagtatatctgtagaacgaaatgtaccttgctgtttaaatgaataaattagttattatcataaaataaatgtcatgtaaagacatttattttatggtgtataaaattagaaaaacaagttattaaaaataacatgattttttgtaaaatgcttttattttgtttttaattgacataataattgcacatgtttatggggtacagtgtg

SEQ ID NO: 514610 - DNA, 480 bp, Homo sapiens
ctaggcaagagaatcttaaccaccatcaaatgttttccacacagaataggcagacctagtttattctggaaaattgagggtttggatatgtactatataatcagaggaaacaagcagtaaaggacctgagctaatttggggtaaccaaagacttggctaacagatgcttccttactctggatccctcatatgaatcagatctggccagygatatgctggacagaagatatctgaggttgagatacctgatttctcaactaagggaatgaactatgcagtacatgaaaaccaaccctcttcttagtgcctctgttttcctatcacttcccctatcccaatccattcttgctcttgccttagagattcttagattctgattttcctcgcaaaacatggccacaagcctaccgcctctctgtctggtagaagtataagaatcaagagtcaaggccaaaaaggtctgagggaaggagcacaatt

SEQ ID NO: 514611 - DNA, 616 bp, Homo sapiens
ccctctcttcctgtccccaggtcctctccttcaccctcactctaggcattctacctccaaacgttcaagttaacatgtgctaaaggaatgattttctaaatcacttacctgtcactgtgaaactagattaatccacatactggtttagtaaaacctcacrcaaaccagcatatacacagaagacagcaatcaagatgaagaaaacgtttgaaactgtgtcattaagaaaacgtgatgaagaaattggtaatgattattccaggaaataacagtcccttctagtctcctcagctcccttcctctcacccttctcctacctatccatcttctaaggcaccactaatattcaaagatttaggatctaagcagtgcaccaaaagtcctctgattttactcttttgtcccacagtacttgttcctttgtctgagtgtccatagttattatctgtgcccctacactgggatattacaaactgttttattttacacatctctgtatgcttcatctccccagcaagacttcagaagactgccaccatgtcttatgcaggagaaactgcattcactgtcagacagtctctgggtacgtatacttgtgaataaagaagtcaggtaa

SEQ ID NO: 514612 - DNA, 616 bp, Homo sapiens
ccctctcttcctgtccccaggtcctctccttcaccctcactctaggcattctacctccaaacgttcaagttaacatgtgctaaaggaatgattttctaaatcacttacctgtcactgtgaaactagattaatccacatactggtttagtaaaacctcacacaaaccagcatatacacagaagacagcaatcaagatgaagaaaacgtttgaaacygtgtcattaagaaaacgtgatgaagaaattggtaatgattattccaggaaataacagtcccttctagtctcctcagctcccttcctctcacccttctcctacctatccatcttctaaggcaccactaatattcaaagatttaggatctaagcagtgcaccaaaagtcctctgattttactcttttgtcccacagtacttgttcctttgtctgagtgtccatagttattatctgtgcccctacactgggatattacaaactgttttattttacacatctctgtatgcttcatctccccagcaagacttcagaagactgccaccatgtcttatgcaggagaaactgcattcactgtcagacagtctctgggtacgtatacttgtgaataaagaagtcaggtaa

SEQ ID NO: 514613 - DNA, 615 bp, Homo sapiens
aagaaaacgtttgaaactgtgtcattaagaaaacgtgatgaagaaattggtaatgattattccaggaaataacagtcccttctagtctcctcagctcccttcctctcacccttctcctacctatccrtcttctaaggcaccactaatattcaaagatttaggatctaagcagtgcaccaaaagtcctctgattttactcttttgtcccacagtacttgttcctttgtctgagtgtccatagttattatctgtgcccctacactgggatattacaaactgttttattttacacatctctgtatgcttcatctccccagcaagacttcagaagactgccaccatgtcttatgcaggagaaactgcattcactgtcagacagtctctgggtacgtatacttgtgaataaagaagtcaggtaacacaggcctcttgggcttttctgtctattcacaatacccagtacagtgatcagttatagtagcctgctcaataaatactagtgtgataaaaattaaacttttgtttgaaaagtgaggattctatagtgcttcagagtccatctaactttcagtgttcagcacacaggattatagacagtgactgcaggaaaatgac

SEQ ID NO: 514614 - DNA, 615 bp, Homo sapiens
aagaaaacgtttgaaactgtgtcattaagaaaacgtgatgaagaaattggtaatgattattccaggaaataacagtcccttctagtctcctcagctcccttcctctcacccttctcctacctatccatcttctaaggcaccactaatattcaaagatttaggatctaagcagtgcaccaaaagtcctctgattttactcttttgtcccacagtacttgttcctttgtctgagtgtccatagttattatctgtgcccctacactgggatattacaaactgttttattttacacatctctgtatgcttcatctccccagcaagacttcagaagactgccaccatgtcttatgcaggagaaactgcattcactgtcagacagtctctgggtacgtatacttgtgaataargaagtcaggtaacacaggcctcttgggcttttctgtctattcacaatacccagtacagtgatcagttatagtagcctgctcaataaatactagtgtgataaaaattaaacttttgtttgaaaagtgaggattctatagtgcttcagagtccatctaactttcagtgttcagcacacaggattatagacagtgactgcaggaaaatgac

SEQ ID NO: 514615 - DNA, 514 bp, Homo sapiens
aatgcagtattcaccaaacctggcccatgtacactcatgtaactatatgcagatttagtgttctagaatgatatgaggtactcaggcctacctaatgctactgtctttaaatttagaaattacataaagcagtgttttaatcatattcctgatctgaaaagtcccctttttgtatactttcaaatgttccacacttccwtttcagaaggttccatttgaactaccaacttaaaacaggtaattctgtcccattttattgacaggcaaactgagactcaacgtgacagtacattttccacgagtatatctcaggttagctacagagtgatgggatcttgagtgaattatttaacttctcttagcttccatatagtctctctctcacatgaggactaaagtaaatacatgtaaactacttgagaacagaccctaatatgcaataatgttagctagcattatagactttaacttgccaaagatccaattgttaataggaatcaggactcaaacttaa

SEQ ID NO: 514616 - DNA, 514 bp, Homo sapiens
aatgcagtattcaccaaacctggcccatgtacactcatgtaactatatgcagatttagtgttctagaatgatatgaggtactcaggcctacctaatgctactgtctttaaatttagaaattacataaagcagtgttttaatcatattcctgatctgaaaagtcccctttttgtatactttcaaatgttccacacttccatttcagaaggttccatttgaactaccaacttaaaacaggtaattctgtcccattttattgacaggcaaactgagactcaacgtgacagtacattttccacgagtatatctcaggttagctacagagtgatgggatcttgagtgaattatttaacttctcttagcttccatatagtctctctctcacatgaggactaaagtaaatacatgtaaactacttgagaacagaccctaataygcaataatgttagctagcattatagactttaacttgccaaagatccaattgttaataggaatcaggactcaaacttaa

SEQ ID NO: 514617 - DNA, 544 bp, Homo sapiens
cattattttgattagtgagttttttggcactctcttaaatttcacaagagaggcctgtgccttacttgcctcaccatggtcccagccctgccattcactggcrgcccctgtacagaaggccacattatagtcagtttttttcatacttggctttactctgaacctctctaagaagcccaagttaatgaactggtaattattttatgacttcccaaagaagtgtgaaataatatgataacaatattgattaactgcaactactaccacagacttgagttatctgttatatgtggtacgcataaatagcatgcaataaataactcttgaattaataaaacctgaacatattacattttaagaaaagattactctatgagaggtatttaatgagccaaaaaaacagcattctttgttttatgttaaaaagataaatgaactatggaaaactggccaagcttctgctatcattttccagaaaaactatatacacaatgttcagctaaataggcaccgtacttgaaggaactaggctggcagaaccagt

SEQ ID NO: 514618 - DNA, 409 bp, Homo sapiens
cttgggatttagatacttcagatgagtattataaggattcatcaatgagtgtttaggaaaatgctagataaataatagatcaccattatactgatgaattacttagccttcaggtgaagttttaaaacrgactgcttcaagaagtaatcagaaacagcaataacagtaattcgacaaactaaaattgagagcctagtatgcaccaggcacaaaattaggatccagaaaaaaggagaaatggaatacataaataaacgaataaacataatctctagctttaaggggcccataaaaagatggggagtagatcatgaatagagactgcagagagagtatcaaaagaaataaaaggagaaggcaattttatacatacagataaaacaaaaattctcaaactgttgattccccc

SEQ ID NO: 514619 - DNA, 615 bp, Homo sapiens
gctgttgggatcacacaaagagtcaccaggctgcaggcccaaacaggcaaattcaggaagagggtcatcttgttgtccatatcccacttccctgtaaggctcaaatgctccctcttcccacactgataagcccaatgcaacaactataattaaaacagttaatgtcaggttatttcctccataccaaagttctcaaactgattttttcattctctttagacacttttattagtttcagtgagaacttccggggttttttctatttactttttttctttaaataaaataataaataaataaaaccstcacagtaggaaaggaatgccctgtaggcacagaaaaagctgtagctctgtccccctgcaggaatcctggtgcagtggagggactcaggagacctgaaatcctgtctgtacccctaactgcaagcaaagcacaacttcatgggggctcaatttccctacctgtaccaagctgagagcgaactaaatgtccctaaaggttccctgtgatccaccagcgacagctccctccttataagtacatgaatggcatgcccagtgcctgaagaaacctggagtacatagtgacccagccacccatgactcagaatgc

SEQ ID NO: 514620 - DNA, 598 bp, Homo sapiens
ctgttgggatcacacaaagagtcaccaggctgcaggcccaaacaggcaaattcaggaagagggtcatcttgttgtccatatcccacttccctgtaaggctcaaatgctccctcttcccacactgataagcccaatgcaacaactataattaaaacagttaatgtcaggttatttcctccataccaaagttctcaaactgattttttcattctctttagacacttttattagtttcagtgagaacttccggggttttttctatttactttttttctttaaataaaataataaataaataaaaccgtcacagtaggaaaggaatgycctgtaggcacagaaaaagctgtagctctgtccccctgcaggaatcctggtgcagtggagggactcaggagacctgaaatcctgtctgtacccctaactgcaagcaaagcacaacttcatgggggctcaatttccctacctgtaccaagctgagagcgaactaaatgtccctaaaggttccctgtgatccaccagcgacagctccctccttataagtacatgaatggcatgcccagtgcctgaagaaacctggagtacatagtgacccagccac

SEQ ID NO: 514621 - DNA, 587 bp, Homo sapiens
tatagggtcatagcaaattattactgcttttcaaaaactgaaaatataccttaagaaaatataatcaacgataacaacttataaatgaatattttttgtattactaatagacttttcatactataaaaaaatcattccagttagctgataaatctagaataatttttggttttaaaaattccaattttgttctattttataatattgaactyattgcaaaaaaaattcatcagtgtttgctgtgctatattgaaatctactatacactgtgtagtttttccttttatttttctcttattaaagacttcagaaaaaaattcaatttatgcatgggttaaatttcaatacctggatcttggagatgagactaatgcattcagctcttctacatgaaatataaggtttgaaaaatccacaaatacttacaaattaggatgtagccaatttgctaataatgatcacctctatacccatgtacattcttttacctgaaaaatattttacctccttttcctttttctctatcttgctaaattcctactatatttcaaatcacagataaagcattattttcctgaagaagctgt

SEQ ID NO: 514622 - DNA, 587 bp, Homo sapiens
tatagggtcatagcaaattattactgcttttcaaaaactgaaaatataccttaagaaaatataatcaacgataacaacttataaatgaatattttttgtattactaatagacttttcatactataaaaaaatcattccagttagctgataaatctagaataatttttggttttaaaaattccaattttgttctattttataatattgaactcattgcaaaaaaaattcatcagtgtttgctgtgctatattgaaatctactatayactgtgtagtttttccttttatttttctcttattaaagacttcagaaaaaaattcaatttatgcatgggttaaatttcaatacctggatcttggagatgagactaatgcattcagctcttctacatgaaatataaggtttgaaaaatccacaaatacttacaaattaggatgtagccaatttgctaataatgatcacctctatacccatgtacattcttttacctgaaaaatattttacctccttttcctttttctctatcttgctaaattcctactatatttcaaatcacagataaagcattattttcctgaagaagctgt

SEQ ID NO: 514623 - DNA, 587 bp, Homo sapiens
tatagggtcatagcaaattattactgcttttcaaaaactgaaaatataccttaagaaaatataatcaacgataacaacttataaatgaatattttttgtattactaatagacttttcatactataaaaaaatcattccagttagctgataaatctagaataatttttggttttaaaaattccaattttgttctattttataatattgaactcattgcaaaaaaaattcatcagtgtttgctgtgctatattgaaatctactatacactgtgtagtttttccttttatttttctcttattaaagacttcagaaaaaaattcaatttatgcatgggttaaatttcaatacctggatcttggagatgagactaatgyattcagctcttctacatgaaatataaggtttgaaaaatccacaaatacttacaaattaggatgtagccaatttgctaataatgatcacctctatacccatgtacattcttttacctgaaaaatattttacctccttttcctttttctctatcttgctaaattcctactatatttcaaatcacagataaagcattattttcctgaagaagctgt

SEQ ID NO: 514624 - DNA, 619 bp, Homo sapiens
tggaacatcccagttccttatcataatgttaaatgtgcaccagagctgggggacatttaagagccagayaccatgatctaaaagatgctaaataaaggtatctgctgaaggtaggaaagcactggctttggtctcattagttacctgtaaacccgacttgacaggtgcactcataggtatcccggctgagcatatggcatgtgccgccattcaggcaaggtcgagacacaaagcatggatgagatgtcgagtactggcagtcctctcctgtaaaccctgaggcacatcggcacgtggctttccccagcatggcctgggccacacaagtcccaccattctggcagcggttcttctcacaggggtctcgatgttgacaatattcccccaagaagccttctggacatctgtatggaaaagagaagagtccatgaaaacacctgacttcttgtaagtccaaaaaattacagtaaaacaatacagtccaatcaagaaagcacgagattgtgaatcaacagacctacaaggaccacctataaaactgcttccctttagaagaaagagtccttagagaacttaaccacatactcccatgtccttttgagtcctggcaggtgacaga

SEQ ID NO: 514625 - DNA, 437 bp, Homo sapiens
gctgggtgcatttaggtggataagaaaacaatgaattactccatcaaaagcaaaagcacaagcacatagkaaagttgatcacctactgttaatgtcaattcagtttaaagcactttattaaccacacatacatattttccagtgtctaattctcatcgtgttcttttccattccagacttccctgtctctttcccagagctctgttcctcttctcactgtttctacaaaagggacaataaacaattttctagccactcatcatcataaaccctgacatgctaaattatcccctgctcagtttatggaccacagtgggcccataaaactcctccctcactagcaacccaccccacacaatattctcacttccctttttccttgcgcttcctaaaaaaagcaattgagccacacccactacctcctgtgctaggggttt

SEQ ID NO: 514626 - DNA, 657 bp, Homo sapiens
ggtgcatttaggtggataagaaaacaatgaattactccatcaaaagcaaaagcacaagcacatagtaaagttgatcaccyactgttaatgtcaattcagtttaaagcactttattaaccacacatacatattttccagtgtctaattctcatcgtgttcttttccattccagacttccctgtctctttcccagagctctgttcctcttctcactgtttctacaaaagggacaataaacaattttctagccactcatcatcataaaccctgacatgctaaattatcccctgctcagtttatggaccacagtgggcccataaaactcctccctcactagcaacccaccccacacaatattctcacttccctttttccttgcgcttcctaaaaaaagcaattgagccacacccactacctcctgtgctaggggtttgtcccctaatcctgggacactagggagctccttacctggaaggcagttgcactcaaaagtgaagtcaccagtctgccgacaggtgcctccattgacacaaggcgagggtgcacagggcacatacaggctgtcacagtactggcctgtgaagccctgaaggcactggcactggtaggaaccaggcaggttgaggcaggtgccaccatgctggcagtgtcctggaa

SEQ ID NO: 514627 - DNA, 437 bp, Homo sapiens
gctgggtgcatttaggtggataagaaaacaatgaattactccatcaaaagcaaaagcacaagcacatagtaaagttgatcacctactgttaatgtcaattcagtttaaagcactttattaaccacacatacatattttccagtgtctaattctcatcgtgttcttttccattccagacttscctgtctctttcccagagctctgttcctcttctcactgtttctacaaaagggacaataaacaattttctagccactcatcatcataaaccctgacatgctaaattatcccctgctcagtttatggaccacagtgggcccataaaactcctccctcactagcaacccaccccacacaatattctcacttccctttttccttgcgcttcctaaaaaaagcaattgagccacacccactacctcctgtgctaggggttt

SEQ ID NO: 514628 - DNA, 657 bp, Homo sapiens
ggtgcatttaggtggataagaaaacaatgaattactccatcaaaagcaaaagcacaagcacatagtaaagttgatcacctactgttaatgtcaattcagtttaaagcactttattaaccacacatacatattttccagtgtctaattctcatcgtgttcttttccattccagacttccctgtctctttcccagagctctgttcctcttctcactgtttctacaaaagggacaataaacaattttctagccactcatcatcataaaccctgacatgctaaattatcccctgctcagtttatggaccacagtgggcccataaaactcctccctcactagcaacccaccccacacaawattctcacttccctttttccttgcgcttcctaaaaaaagcaattgagccacacccactacctcctgtgctaggggtttgtcccctaatcctgggacactagggagctccttacctggaaggcagttgcactcaaaagtgaagtcaccagtctgccgacaggtgcctccattgacacaaggcgagggtgcacagggcacatacaggctgtcacagtactggcctgtgaagccctgaaggcactggcactggtaggaaccaggcaggttgaggcaggtgccaccatgctggcagtgtcctggaa

SEQ ID NO: 514629 - DNA, 532 bp, Homo sapiens
ctgttttgagtctctaaaagtgtgaaatgctcagcatttcccaaatgtatttgaacatggagtgttatatttactaaaaagttaacaagcaagtattcccctaaacactctagcaaatactactagtacagacaaattatgatgtaacattatagtacattttaacttattaggttaattttggttgcaaacaatcaaaattcaaaatggcttgtataataaagagattttgaacaatagtataggctcaagatagyttaatgcagaagtttaataatgacacaaaataaatgcttcttgtcctccctgtttcttcactctaccttaagtgatatagattgaatgtttgtagtcccccaaaatttgtatgtttaaatctaatccctagtgtgatgatatttggcagtgggtcttcggggggtgattaggtcatgaggacagagccctcatgaatgggattagtgcccttataaaagagaccttagagaacttcctagccccttccaccatgtgaggacacagcaaaaagaca

SEQ ID NO: 514630 - DNA, 532 bp, Homo sapiens
ctgttttgagtctctaaaagtgtgaaatgctcagcatttcccaaatgtatttgaacatggagtgttatatttactaaaaagttaacaagcaagtattcccctaaacactctagcaaatactactagtacagacaaattatgatgtaacattatagtacattttaacttattaggttaattttggttgcaaacaatcaaaattcaaaatggcttgtataataaagagattttgaacaatagtataggctcaagatagtytaatgcagaagtttaataatgacacaaaataaatgcttcttgtcctccctgtttcttcactctaccttaagtgatatagattgaatgtttgtagtcccccaaaatttgtatgtttaaatctaatccctagtgtgatgatatttggcagtgggtcttcggggggtgattaggtcatgaggacagagccctcatgaatgggattagtgcccttataaaagagaccttagagaacttcctagccccttccaccatgtgaggacacagcaaaaagaca

SEQ ID NO: 514631 - DNA, 455 bp, Homo sapiens
cagaaattgatctttaattataagctaagagcaaactgccaaagaactgagagaaattttgaagaaacaggtctatcaggactaaccattttaagataataaagactaatcagacacacacacatatgcacaaaaagagggagagagagaacaaaaatcctatgaaatacattttaaaaacttaatttttttaagaagaagcatttgatctgccaaagagaagagttagcagtttggagatctgacattgctaatctcagggcaagaaaataacaaaataagacaccaaagaattacctaaactgtggaagatgaagctttcagagttctcacagagaratgggatactaaagtaccaagtttaagaggtgtaatctattaatgtttaatttatgtcccaaatacttaaaaactatgtttcattgttatacatatttattttattataaagataa

SEQ ID NO: 514632 - DNA, 538 bp, Homo sapiens
cagctgctcctcattaaagttcctctttactccctytgggctagtttccagcagaaaattctttaaacagaactctgctttcaacccactttcttcttgccctgggcctcttcgcgccaatccgcagtggcagcctgcctagctgagctctagaggggggagctgtcgttaaggtaaatgaggtaagggcaggggaaaaaactaacaaaacccagaaaccaaattaagcatcggtcagtaacaaaggtctgcagtttgaaaggctccaaatcagtctgttctttcctgtgaccataatgccagcttagtttcctgcccccctactctgtcccccctgttaaagtagataaaaataattgctaacagccaaggctagctggaaccagtgaaagttcctatgtaacattcaattcccaaggctccgactacaaacttgtagtaccccagagcctatagaatcaagtctaaacttctaggctggcattcaggaggcctaacccacctattggtctagactcactggtctccctcctttcag

SEQ ID NO: 514633 - DNA, 497 bp, Homo sapiens
cagctgctcctcattaaagttcctctttactccctctgggctagtttccagcagaaaattctttraacagaactctgctttcaacccactttcttcttgccctgggcctcttcgcgccaatccgcagtggcagcctgcctagctgagctctagaggggggagctgtcgttaaggtaaatgaggtaagggcaggggaaaaaactaacaaaacccagaaaccaaattaagcatcggtcagtaacaaaggtctgcagtttgaaaggctccaaatcagtctgttctttcctgtgaccataatgccagcttagtttcctgcccccctactctgtcccccctgttaaagtagataaaaataattgctaacagccaaggctagctggaaccagtgaaagttcctatgtaacattcaattcccaaggctccgactacaaacttgtagtaccccagagcctatagaatcaagtctaaacttctaggctggcattcaggaggcctaa

SEQ ID NO: 514634 - DNA, 538 bp, Homo sapiens
cagctgctcctcattaaagttcctctttactccctctgggctagtttccagcagaaaattctttaaacagaactctgctttcaacccactttcttcttgcsctgggcctcttcgcgccaatccgcagtggcagcctgcctagctgagctctagaggggggagctgtcgttaaggtaaatgaggtaagggcaggggaaaaaactaacaaaacccagaaaccaaattaagcatcggtcagtaacaaaggtctgcagtttgaaaggctccaaatcagtctgttctttcctgtgaccataatgccagcttagtttcctgcccccctactctgtcccccctgttaaagtagataaaaataattgctaacagccaaggctagctggaaccagtgaaagttcctatgtaacattcaattcccaaggctccgactacaaacttgtagtaccccagagcctatagaatcaagtctaaacttctaggctggcattcaggaggcctaacccacctattggtctagactcactggtctccctcctttcag

SEQ ID NO: 514635 - DNA, 538 bp, Homo sapiens
cagctgctcctcattaaagttcctctttactccctctgggctagtttccagcagaaaattctttaaacagaactctgctttcaacccactttcttcttgccctgggcctcttcgcgccaatccgcagtggcagcctgcctagctgagctctagaggggggagctgtcgttaaggtaaatgaggtaagggcaggggaaaaaactaacaaaacccagaaaccaaattaagcatcggtcagtaacaaagktctgcagtttgaaaggctccaaatcagtctgttctttcctgtgaccataatgccagcttagtttcctgcccccctactctgtcccccctgttaaagtagataaaaataattgctaacagccaaggctagctggaaccagtgaaagttcctatgtaacattcaattcccaaggctccgactacaaacttgtagtaccccagagcctatagaatcaagtctaaacttctaggctggcattcaggaggcctaacccacctattggtctagactcactggtctccctcctttcag

SEQ ID NO: 514636 - DNA, 567 bp, Homo sapiens
agtttccagcagaaaattctttaaacagaactctgctttcaacccactttcttcttgccctgggcctcttcgcgccaatccgcagtggcagcctgcctagctgagctctagaggggggagctgtcgttaaggtaaatgaggtaagggcaggggaaaaaactaacaaaacccagaaaccaaattaagcatcggtcagtaacaaaggtctgcagtttgaaaggctccaaatcagtctgttctttcctgtgaccataatgccagcttagtttcctgcccccctactctgtcccccctgttaaagtagataaaaataatkgctaacagccaaggctagctggaaccagtgaaagttcctatgtaacattcaattcccaaggctccgactacaaacttgtagtaccccagagcctatagaatcaagtctaaacttctaggctggcattcaggaggcctaacccacctattggtctagactcactggtctccctcctttcagtacctcctggctgaggtctgatgggcttgtcaactttttaattctgtcactctgtgtaaaggtaactaact

SEQ ID NO: 514637 - DNA, 567 bp, Homo sapiens
agtttccagcagaaaattctttaaacagaactctgctttcaacccactttcttcttgccctgggcctcttcgcgccaatccgcagtggcagcctgcctagctgagctctagaggggggagctgtcgttaaggtaaatgaggtaagggcaggggaaaaaactaacaaaacccagaaaccaaattaagcatcggtcagtaacaaaggtctgcagtttgaaaggctccaaatcagtctgttctttcctgtgaccataatgccagcttagtttcctgcccccctactctgtcccccctgttaaagtagataaaaataattgctaacagccaaggctagctggaaccagtgaaagttcctatgtaacattcaattcccaaggctscgactacaaacttgtagtaccccagagcctatagaatcaagtctaaacttctaggctggcattcaggaggcctaacccacctattggtctagactcactggtctccctcctttcagtacctcctggctgaggtctgatgggcttgtcaactttttaattctgtcactctgtgtaaaggtaactaact

SEQ ID NO: 514638 - DNA, 593 bp, Homo sapiens
gctgctcctcattaaagttcctctttactccctctgggctagtttccagcagaaaattctttaaacagaactctgctttcaacccactttcttcttgccctgggcctcttcgcgccaatccgcagtggcagcctgcctagctgagctctagaggggggagctgtcgttaaggtaaatgaggtaagggcaggggaaaaaactaacaaaacccagaaaccaaattaagcatcggtcagtaacaaaggtctgcagtttgaaaggctccaaatcagtctgttctttcctgtgaccataatgccagcttagtttcctgcccccctactctgtcccccctgttaaagtagataaaaataattgctaacagccaaggctagctggaaccagtgaaagttcctatgtaacattcaattcccaaggctccgactacaaacttgtagtaccccagagcctatagaatcaagtctaaacttctaggctggcattcaggaggcctaacccacctattggtctaractcactggtctccctcctttcagtacctcctggctgaggtctgatgggcttgtcaactttttaattctgtcactctgtgt

SEQ ID NO: 514639 - DNA, 669 bp, Homo sapiens
tttctcatggaaggcctccacaggcagtggcagggtctcaggccggccagtgagggtgagcagaaactcaggagcacattgaggtaggcagtggggataagcggggaggccttcactggtgcagggttctcccagggagacctctcccttcccagaagcccctggggcattccccgcattgggtttagagcctctggctccagccctggatgcctgtatctctcatggagggyctccacaggcattgggcggcaccacaggcaggcatgtgcaggcaggcagaaactcaggggacactgatgcaagcagaggggagaagcggtgaggcctgaacatgtgctgggtcctcccaggaaggtccttcccttccctgaaggtctccctttgtgtgagctagagccccaggctctggcctggggtgaatgtgtctctcacagagggccccttgggtggcagcggggtggcaggcaggcctttgttggcaggcagaaactcaggggacgttgaggcaagctgagggaagaaacagcgaggcctgagctggtgttgggcttcctcagagaggcctctcccttaccagatgtctctgttggctctctggatggggactagggccccttgctctggcccaaggtgcctgtgtctctcaccgagggccctcacagatgg

SEQ ID NO: 514640 - DNA, 500 bp, Homo sapiens
cccactggggccctctgcatgagacacagacaccctgggctggaactcattgctctagcctcttcatggggggcaccccagggcttctggcaagtgagtggccttcctgggaagacccagcacccgtttaggcctctcagcttctccyctcttcctgcctcaacatccccttgagtgtcttcctgttagtagaggctcacctgtggccccaccttcacttgcgcaggccttccgcgagagacacaggcaccctgggttggagtttggggctgtagccctcacctgggggttgcccctcatgcttctgggaagggacagttctccctgagaaaacccagcaccttctcaggccttgctgcttctcctctttgcctgccaaaacttccccctgagtttctgcttacctctacaggcccacctgcggccctgtcgctgcccattggggcccttcatgagagacacatgcacactggatcggaacctggggctatagcccctac

SEQ ID NO: 514641 - DNA, 500 bp, Homo sapiens
cccactggggccctctgcatgagacacagacaccctgggctggaactcattgctctagcctcttcatggggggcaccccagggcttctggcaagtgagtggccttcctgggaagacccagcacccgtttaggcctctcagcttctcctctcttcctgcctcaacatccccttgagtgtcttcctgttagtagaggctcacctgtggccccaccttcacttgcgcaggccttccgcgagagacacaggcaccctgggttggagtttggggctgtagccctcacctgggggttgcccctcatgcttctgggaagggasagttctccctgagaaaacccagcaccttctcaggccttgctgcttctcctctttgcctgccaaaacttccccctgagtttctgcttacctctacaggcccacctgcggccctgtcgctgcccattggggcccttcatgagagacacatgcacactggatcggaacctggggctatagcccctac

SEQ ID NO: 514642 - DNA, 406 bp, Homo sapiens
aggggcatttcagaccataagaaggcatatctagggatagtgggttttttcaccatagaccttagttgaaacttactagtgaaaaacccaatacacctagataaaaactagaaagaagctatctgtgaaaatgctttctgatgtgtgaactcagctcacagatttaaacctttcttttgattcagcactttgaaaacactctttttgtagaatttgatgaggggcatttcagagagtagaaaggcatctagtgaaaaactaaatatcccatgataaaaactagaaagawtctatatttgaaactgctttgtgaagcatacattcaactcacagagttaaacctttttctttgttcagcaatttggaaactatatttttgtacaatctgcaaagggacacttcagag

SEQ ID NO: 514643 - DNA, 406 bp, Homo sapiens
aggggcatttcagaccataagaaggcatatctagggatagtgggttttttcaccatagaccttagttgaaacttactagtgaaaaacccaatacacctagataaaaactagaaagaagctatctgtgaaaatgctttctgatgtgtgaactcagctcacagatttaaacctttcttttgattcagcactttgaaaacactctttttgtagaatttgatgaggggcatttcagagagtagaaaggcatctagtgaaaaactaaatatcccatgataaaaactagaaagaatctatatttgaaactgctttgtgaagcatacattcaactcacagagttaaacctttttctttgttcagcaatttggaaacwatatttttgtacaatctgcaaagggacacttcagag

SEQ ID NO: 514644 - DNA, 508 bp, Homo sapiens
acttggcctggatgctttattttcctggctgcctcaaggtcccctttcaacccagacgtcctgtctccatcccccaggggccttcttgctgctttggggtgcctccctttagtgagacatgcacactgggtgcaagccatggactccacgacccctccgggccyggtgcaggtgctgcctggaaggccaggcctccgtaggaggctttcagtgtcccttttggcctggccgctttttttccctggctgcctcaaggtctcctttaaaacctgaagtcctctccttttcccttggagaccttcttgccattttggtatgcccctccccaccccgtgtgtgagacacgcaccctgggtgcaagccagggactccacgacccctctgggccctacgcagaggctgttgggaaggcccgggcatcagtgggaggtcttcagggtcctgctcggcctggccactttatttccctgcctgcctccctgtccgttgtcaagactgatgtgctgtc

SEQ ID NO: 514645 - DNA, 634 bp, Homo sapiens
ctctgctccatagaaaaccctaatccagaagcagggtgtctacaaatagtttagcatcagattccccacaaacctgttatgtgatgggtcaggggatsaccgcatttctggcagcagcccatttcccaggacggggggctctctgcaccggacctcagttccgccgcgcgttgggagcactcgcatggggcagggcagaccgccagcagggacagcagaggaccggctatccgagccaaccaagccccacagccctgccatatccttccgtgggattctgacttaggggcgttgggtcataatcccacagatagtggctttaccccattggctcctcaaccaagcacacacaccaaatgtctgaacctgtggttcctcttgtactgagcagattaccgtggtagcatcacatgggcaaaacacatggggaacacacacagtaaaactaacctgtctcacatgggtctaaccatgatgctttccagggcatgcgcaccacttttgggtgaatccatttcagtttgccttgcccttcacaaagaaaagagaactctccaggcgcagtgactcatgcctgtaattccagcacttcaggaggctaaggagaatggatcacctgagctcaatagttcaa

SEQ ID NO: 514646 - DNA, 634 bp, Homo sapiens
ctctgctccatagaaaaccctaatccagaagcagggtgtctacaaatagtttagcatcagattccccacaaacctgttatgtgatgggtcaggggatcaccgcatttctggcagcagcccatttcccaggacggggggctctctgcaccggacctcagttccgccgcgcgttgggagcactcgcatkgggcagggcagaccgccagcagggacagcagaggaccggctatccgagccaaccaagccccacagccctgccatatccttccgtgggattctgacttaggggcgttgggtcataatcccacagatagtggctttaccccattggctcctcaaccaagcacacacaccaaatgtctgaacctgtggttcctcttgtactgagcagattaccgtggtagcatcacatgggcaaaacacatggggaacacacacagtaaaactaacctgtctcacatgggtctaaccatgatgctttccagggcatgcgcaccacttttgggtgaatccatttcagtttgccttgcccttcacaaagaaaagagaactctccaggcgcagtgactcatgcctgtaattccagcacttcaggaggctaaggagaatggatcacctgagctcaatagttcaa

SEQ ID NO: 514647 - DNA, 620 bp, Homo sapiens
gaccttcccttgggggccttcttgccactttggggtgtccaccgtaggtgagacatgcaccttgagtgcaattcagggatgccatgaccccagtggaccccrcacagaggctgacgggaaggcatttacatctgtgggagaacccaggtctcagtatggggccacgccgattttttcccttcccaagctgactcaacgacccctttcaagcctgaacttccgttgcaggccttcttgctgccttatggtgcctcctgtggcaagacatgatccctgggtgcaagccagggacaccaagaccaccctggatttacacaggggctgccagaagacattttcatccatgggaggacacaggccccccatcctgagctgtgcccctttttttccttcccatgttgcctcaatgtcctctttcaagcctgacttgccgtcccctttctttgggggccttttggccactttagtctgcctcccatggatgagacacccaccctggttgcaagccagggatgccacggcccccccagaccctgctcaggggctgccaggaaggcattttagtccgtggcaggacccaggcccccctcttgtgccgcactacattctttcttacccca

SEQ ID NO: 514648 - DNA, 631 bp, Homo sapiens
tttaattagtaaaaaatgggttttaaagttctcagttttaatttaaatacagtaaatattaataacagttgtaacccacatgaacaaaaggtgtttggggtacacagtaaattttaagaaygtaaatgaccaaaagctttagaactgttaaaaaaattttttttttgttcaatgttaaaatttctgctcatttttatgattccttatgatgaagacttcatggtccttgaaatatgagaagttgtttaaaacagatctaattaaaaatcccttacagcattttcataacataaaaaatactgagctccttagaaattgctccatttgcaaaatatatttataacttaaccaaaataaataattcatacctcaccaagtgagtaataacgtcttgggatctgggagtccggatagatgttttctaggtaccaagaaaagggcttacacttcagattttctcttagtgtttttctgactgacacatctccataatccactttgacaacacctggaatttttcagagaaacacaaatcagtttgtgctatttttgttttagtactgttttactacatttactttgctatcagttttcttcttcataattccagcaaattcaattgcatatgcag

SEQ ID NO: 514649 - DNA, 521 bp, Homo sapiens
ttgtaaccaaggctgagaatcaatactcaatataatcgatttacagtgggaggaaatttaacaagagagtggataactgttaagtctctgtgaatcccatttagttttataccttactacctcatccagtggcaatattgcagatgagagagtattaaaatgcaaaagaaaatacttaaaattccaaaattccctcctctttccttctccaatccctgagccttctgttttctgtaccacaaagcttgttcgacatccttgatgaacagaacttgggttttctgagctttcttctggcttagattggcctcacaatgaattgggttatcttcttgctgtcagttttccaggaaacaacaacaaggatttgattgattgcttgtttgttgtcatagggaatgacctagccatgttgagtgggaagtaactggctatttggttggtggggaaatatgtccaaggtggagggatggtgaagaayggaccgcatgttcctacaaagaacagacgtgaccatccag

SEQ ID NO: 514650 - DNA, 509 bp, Homo sapiens
cggaggttgcagtgagtggagatcatgccatttaactccagactgggcaacagagtgagactccatctcaaaaaaggaaaaagtaattgctccatgaagtatagttgttattattattaatactattattgctattattgtctggttttttttggaagtctatatgatgaatatagcccaaatcaatcagattgggcataaaacaaaagcaaagcatgttattgctaaacctcaactttggkcaactttagctttttttttttttttagaaaatccatcacttcttgattttatgttttagatgttttcccaaaacattttggagaaaagaggcataaaaatgaagtactcatttacatacatagtcctgataaattgtaccttctgtgtccccttttctttttccagtatgacttctccccctctgtacaccctggaacataactctgctgtactggccaagtgctacagccgaaacgagaacagtatctggttaagcagatgtgtat

SEQ ID NO: 514651 - DNA, 522 bp, Homo sapiens
agtgaactatataacaaaaaatttcaaataaatgggaactttaataagaggtttattttctctcatgtaaatgaaacccagagatacaggcaattgaagcctaattagttgactgcacaaaataattcagttcagttccttccagctttctcatctaccatctctaggatgtggtccttgcttcatatttcaagggtggctgctctagtactctaggcagccgaatggggactgaaagaaaaaaggtatcagtcctctcctttaagggaacttagcacaagtctcacrcatcttcagttttatattcattagccagaactccataatcaccagtggtagtaagtaatatgttcacccacaaatgtttacccctaatccctggaaaatttgaatgtattaagtttcatggcaaataaaactttgcagatataattaaggtcacagacctgaaaacagagaatcctggattttccaagtgagaccaatgtaatcatgtgagtccttaaagcaaagaactttctc

SEQ ID NO: 514652 - DNA, 630 bp, Homo sapiens
tgccagtggtaggaaggattcttcctgcctgagctcacagacacaaatcccagaggctgtacatgtcccagcaaagaagatattgaaaatgtgtgaaaatgggtaagagtcccaactcaccctatttatattacctgtcagttcgttccctcctacaatgaaatagccataactgctgctagccattagactacaaagttctttacacatgtaatctcacagaatcctctcaatccacmctgggtctggtaagatcatacttacatttgaccatagttccagacatcatgttgccttggtcagagatgtggtattcatttaatctctattctccaaaaaccactttagtagccagataaaaactcttcctagagaattcacagaagaggagatttgaggctggattctttaggttttttgtttcccatgtgctgggcagaatgttatgtgttttacaggaaatatctcatctgatacctcccaaaaactaatgaaataggtcctgttatctttattttttccctctttttgacagatgaggaaatagaggcataaagaagtcagggactttggcaaggcaggtagaatacctgagatttgagcccagggattacccaattcaaagctcct

SEQ ID NO: 514653 - DNA, 630 bp, Homo sapiens
tgccagtggtaggaaggattcttcctgcctgagctcacagacacaaatcccagaggctgtacatgtcccagcaaagaagatattgaaaatgtgtgaaaatgggtaagagtcccaactcaccctatttatattacctgtcagttcgttccctcctacaatgaaatagccataactgctgctagccattagactacaaagttctttacacatgtaatctcacagaatcctctcaatccacaytgggtctggtaagatcatacttacatttgaccatagttccagacatcatgttgccttggtcagagatgtggtattcatttaatctctattctccaaaaaccactttagtagccagataaaaactcttcctagagaattcacagaagaggagatttgaggctggattctttaggttttttgtttcccatgtgctgggcagaatgttatgtgttttacaggaaatatctcatctgatacctcccaaaaactaatgaaataggtcctgttatctttattttttccctctttttgacagatgaggaaatagaggcataaagaagtcagggactttggcaaggcaggtagaatacctgagatttgagcccagggattacccaattcaaagctcct

SEQ ID NO: 514654 - DNA, 461 bp, Homo sapiens
tcttcctgttctggtgatttattgcagaacrtggtgactatagttaataataatgtattgtatattttaaaatagctaaaagcaaggattgtaaatagtattaccacaaagaaatgataattatttgaggtgatagatacgctaattagcctgatttgattattttacaatgtttacacaattatatgtcaattaaaaataaaatttcaaaaaaacctaagagaattttcaaaaaatgaattcctgactctcaaatacatataaaataaatgtgttataggttttctttaatgtaataagaaaactaggcagatgttacaatgagctcaaaagagaatccatgaacggatacatttatagatcaagaatattaaaacgtgtgcaaactttttctctgggataaaagagacagaatttttatgtctatagacaagaattattttgcatagctatcagttatc

SEQ ID NO: 514655 - DNA, 461 bp, Homo sapiens
tcttcctgttctggtgatttattgcagaacatggtgactatagttaataataatgtattgtatattttaaaatagctaaaagcaaggattgtaaatagtattaccacaaagaaatgataattatttgaggtgatagataygctaattagcctgatttgattattttacaatgtttacacaattatatgtcaattaaaaataaaatttcaaaaaaacctaagagaattttcaaaaaatgaattcctgactctcaaatacatataaaataaatgtgttataggttttctttaatgtaataagaaaactaggcagatgttacaatgagctcaaaagagaatccatgaacggatacatttatagatcaagaatattaaaacgtgtgcaaactttttctctgggataaaagagacagaatttttatgtctatagacaagaattattttgcatagctatcagttatc

SEQ ID NO: 514656 - DNA, 622 bp, Homo sapiens
cccaggaatggacaatttgaatggggcccctacttggagaaatgacgttttaagaaagtgtgccttttttttttttttttttttwaatatgggagaattacagcagagaggagggaagagccttctctagagcttcaaggacggtaatatgtggaaaacagacaagaagggttgcttttggtcctaaactttctccgttccttctttaccagctaacaaacatgccccctgagttgtataatatgaacccttcgaccaaattaatcgatgcctcaaaactggtcctctggcagttaccgaaatcatgctgtgtggaaaaacaatccttttctcctcagaggagcttgaaaccctgttaagaaaatgacttaggccatacttaaaaacctgccaccttcaaccttctaaatctctgctcctacagattgctgccccgaatacgtgtgctttgtctctgcttgtgctaatggttttctgtgttccgttctccaacggaagacagcacgtgacagccggtgtcatggtgctgctgaaaaatgcattctccgtgcccaggaagaacctgtataaatattctcaataaataaataacagttgtcattttcagaatatgacaatctcc

SEQ ID NO: 514657 - DNA, 559 bp, Homo sapiens
tgtgatcatgccactgccctccagcctggacaactgagcgagaccctgtctccaaaaaaagtaaaattaaaaaaaaaattaaaatgtgatggagtgcagaggaaaggtcagttgattctcactaagggttggacttcattggtgattttctgtctttttaagagttagaaactcctttttcaaatgaaacgtgtatggacctccaatgtcttcagccaggtcagagatgttttgttggggamgggggcttccagcccactgaacacccctgtcctgccatagccccagaggtaccaccttgggctctgcccagtgctgcttcaacacctccagatgggaggagagggacctttccttccagttctaacccccacatcagtcaagggaaccctgtacaaaatgctgagaaagccaaagaaagtcagagtgcaggcagcttcttgtgacttactgcgggggctccttgtgtctcccctcctcctgcctgttagacttctccttgctggctgggcccacgcgtggatgcacgggtgcggaggatgggaacccaggatcactc

SEQ ID NO: 514658 - DNA, 588 bp, Homo sapiens
ctgacctcccctgagcaagaagaaattctgctgccagattgcttttatttacttgtttgtttgtttgtttgttttttgagacagggtcttgctctgtcccctaggctggagtgcagtggtgtgatcatggctcactggagcctcctaaccttctgggctaaagcgatcctcccacctcagtcccctgagtagctgggactacaggcatgtgccaccatgtccagctaatttttaatttttttgtagagctggggtcttgctatgttgcccaggctggtgtcaaactcctgagctcaagtgaccttcccaccttagccttccaaagtgctggaattacagkcatgagccaccatgcccggcccagactgcctttcaatacaactctttcctgggtctctactcttgatggccaaccctgcagattttggacttgccagcccctaaaactgtgaatcaatccttaaaatctgtctctctcattcttttcatagcctattgtttctgtttctctggaggacgttggataatacaactagtttgccaaatagaaaactctgggggttttaactgctggaatggggaagttca

SEQ ID NO: 514659 - DNA, 493 bp, Homo sapiens
ggaaaattaactcattcagagatgattgccaagtggtgttaatttggactgattaatataacagtggtaccttgtctgtaaggttacaagtcttcgttatgaaatttggtgtgacaaagggggagattatgtgaaatgttatcactttcttgcagcatatgataagctgttactatatgaatttcttatctttgttcagaacatttcaacttcccccactggatgaattggtgaggaacaaaacgggtatccaaattcaatactagaaatccaagcaacaaattcattaaattaaataacaaggaatgaatagtgtcttgaacagtgcctggcaaacagtaagccatcaatacatggtagatctaaatagctggagcaacactagtgttctagagagcgtcgcarcttggggcaggtactccttatcactgtaatactttggatttcaggagtgtactaagtattattgcagtaaagcaaaatggagaaaatg

SEQ ID NO: 514660 - DNA, 553 bp, Homo sapiens
agctacttaagaggctgacgcaggagaatcccttgaactctggaggtggaggctgcagtgagttgaaaccgtgccactatactccagcctgggcaacagagtgagactgtctcaaaacaaacaacaacaacaacaacaacaaaaactttggccccttgaacttctaagtaagcacataattagataagctagcagggcaagggagtgtctggtgtgaagggccggagacagagttttaaagtatgtttcatggctaaaagcaagaaaggaaaaaagtttcaatatgcattttgaagctaaactacttggttacactggcatgattgacagaacatccagtccaacagggcctcaatagggggacacatcagaacaaatgagtcctaattmtttccagctttaactaatattgtgtgttatattttatttctacagtccagatctgtgcacgcttttgtgcatttctgtcttcttccatgaacattttaatcctctctgtcacaagtttccatggcctcttgttggagtactccaaggctccttaggtctttat

SEQ ID NO: 514661 - DNA, 646 bp, Homo sapiens
gggtgagaaatgaattcttggggatgtgtgcagtttgtttattatataaatactatgagaagaaaggttctctgaatcccagggcagcttcatcatcagagggctagcgtggaattaatgtaaaattctaacatttcactgtgtgaaccatgcttttctccaggtccttacaacgtataatagtttataaatccaagctaacaaatgtgctacaattaaagtaaaccaaatgaatcaaaataaataaaacaaaacaaacaacaacgagaatacaactatcatgacagaaatctcattaggagagaatctgtgaatcatttagggagaaaaatgatggagtgctctgtattgaaataatacgcatctctacagtcaacagttaaaataggaaagaaggaagggagggagggagaaaagaagggagaaaggtaaggtgaaaggaaaggaagggaagggagatgctcagaaaaggaaaaacaaaaggtattttccagtgggggaaaaaaaacaaatttttatttgctctatttcactgaagaatcttgattaatacaggtgctattttttatttttattaaaaagttattttttcttttcttttatayattatggagatccatccagcccttctgtttgctcaaaggtg

SEQ ID NO: 514662 - DNA, 512 bp, Homo sapiens
agagtcagagaatgataaaggtaaagtctgactgtagtactttaataaagaatgacaggacatgattagaggcattgaatacatacaactcttttgcaaatttccctataaagggttgtagagaaacagcatagcagacgaagatggaagtacaaygagaagaaaaaaaattagttgagatatataatagtatatttatacaaaaagaggaataaccagaaagagaggaaaaactgagaattcacttgatccaattatatcactttataaattaattttttgtttactgtttcttccaaagttctaccaatttgttttatgccccagtcctactgtagaaatggagatactgaattatgaaattttgattttgcctcttcccaatttaatttcctctaggcttcataattgtccttttaaaataatgtggatttgagaaattacttcacagacatcttttagttaacagtttctgaattctataaaggatataccattgatggacaaagata

SEQ ID NO: 514663 - DNA, 596 bp, Homo sapiens
agatattaggattgttggttgcctcagtgtaacctagcgtattttgactgatatattatggaatatttggaacaaagcataggacttcaaagaacaataaaatgctattaagaaacacaatagttgaaacaaaattcataaattaaagcctgtggctttgtgtgtataagtaatttctcaaacccaaacttagtttctgcatgtaaaacctgaagctaagttgagtaacttgaccagttkcacaaagtgacttcaaaatcacttcatgctctttccactctcctctatgccatgcagtttttattcctgtttcacagaaaggaaagctgagtttgtggaagatagttactaagaaggagctcaattggcttcatccctagtgttatttccactactaaaattatcctcactgtcaaggagaacacttaaaatttatattttagagaagtggtgtaatacagatggtgataagccatccacattacatacttaccactcctttattccttccaccttctgtttatgcagtgaatcagaacaagcatagctgaattccaacttcagctctacctcttagaaatcatagagatagaagc

SEQ ID NO: 514664 - DNA, 584 bp, Homo sapiens
ttggtcatatccatgaagtataacatttgtttaaaagctttcagtaaaagcttaggcaagtgaggcaaaggaaagaaataaatacttgtatttgttttaagcttctttttcttactggactacagggasagttaattggaacaatgtgcattacaatttgctgcttctttggtttaaaatgaacaaagaatgaattataaatgtataagaaattatatgatattcctagcaattgtgtcaaaatcattaaccaggatacatgttatgatactcattgatttagaatatttcttgtccctttttccttccttccttccttccttctttcttctttcctttctttcttttgtatcatgggaaaatgtctagggactcagggtataattcagggaagactctgaagaaaagaagaaaatatctgaaataatggtgggaaaaggcctaatctttgtttgagtgttccagttcagactgttaacatcacacatagcatccaactgaatcaaatgaggcacaaactaccacacatatgaacgttacatggctccaaaggcgaatgcaaaggagagtgttactaaatgaca

SEQ ID NO: 514665 - DNA, 632 bp, Homo sapiens
gcaattataaatcacctatgggataaaaaacaaaacacaaggggaattgaaacctaatttggcctgaacattaatgaaactacaacacatttgtggggtgcagataaagctttgtttagaggagatatatataagattatatgcttataataaaatagagattcaacatcaattatctayactttcatatcaagctaaaaaaactagcaaaacagagagaaagtagaagaaaaagaataataaatagaacaatgagaaatcaatgggctatatattacaaataatagaagaaatcataaggccaaaagtttgctggctggttgcagtggcttattcctataatcccagcactttgggaggctgaggcaggaggatcttttgatcccaggagttcaagaacagcctgggcaacatagtgagatgccatctctacaaaaaaagtaacaaagtagtcaagtatagtggcacatccctgtagccccagtgtattagcctgttcttgcattgctatgaagaaatacccaagacaggataattaataaaagacatttaattggcttatggttccacaggttgtacaggatacatgatgctggcatctgctaggcttctggggaggcctcaggaaactt

SEQ ID NO: 514666 - DNA, 593 bp, Homo sapiens
tcttgcaagacgcatgttttggtgctgagagtaatgaaagtagtgtcatcataggttagaagactttcaaaatcagttctaagatccttaaatagtgtaaatctaagagcagcaataacaacttgggagagaaggtgcttgacatctggactcacactgtccaggtcagtggtcactagccacatgtgactgttggggccattgagataygtggtcagtgtaaagtggacccgcaattttgaagacttagtatgagagataaaaggcaaaatatctcattaataattttttattgatttcatgttgaaattacagtagtttggatatattgggttagagaaaatacactattaagtgcatttcacttgtttggtttgacttatttttaacattacgtaacttaaaatcatatatgtggtttacattatgtctgtgttgcacagtgctgatggactggtgtgacaatgatacctgtaattctagaagttgtagaaggagaagtcatgtctcatgtcagcgttcatttgctgatgtggcgtatgtatctttggaaaacacacattcatggaagcaaaacctttaacagtcatggc

SEQ ID NO: 514667 - DNA, 593 bp, Homo sapiens
tcttgcaagacgcatgttttggtgctgagagtaatgaaagtagtgtcatcataggttagaagactttcaaaatcagttctaagatccttaaatagtgtaaatctaagagcagcaataacaacttgggagagaaggtgcttgacatctggactcacactgtccaggtcagtggtcactagccacatgtgactgttggggccattgagatacgtggtcagtgtaaagtggacccgcaattttgaagacttagtatgagagataaaaggcaaaatatctcattaataattttttattgatttcatgttgaaattacagtagtttggatatattgggttagagaaaatacactattaagtgcatttcacttgtttggtttgacttatttttaacattacgtaacttaaaatcatatatgtggtttacattrtgtctgtgttgcacagtgctgatggactggtgtgacaatgatacctgtaattctagaagttgtagaaggagaagtcatgtctcatgtcagcgttcatttgctgatgtggcgtatgtatctttggaaaacacacattcatggaagcaaaacctttaacagtcatggc

SEQ ID NO: 514668 - DNA, 328 bp, Homo sapiens
ttgactgactctgtctccacttgctaataaagttttaaaagcaatggcttgatttaagaagtgagaaactcatttgattttctttcagtgaaggtggtaaatatcacatctgtatgtcttagttttgtcatgtataaaacgagagttgatgtaaattatttctaaaactccttttcagcttgtgcatctcaagattctgagtcttttctagaagaaaccagaacttcatacttaatctgtctcatgtctcttgtattttcaggrtgttcatagaccccctaagcttgttcctgaacacttcaggatcctttgagttcaagttaagcac

SEQ ID NO: 514669 - DNA, 686 bp, Homo sapiens
tatccttcaagggtgagaaagcctattggtgccctggactcatagatctgtaagacagtgacagtagagagactgcagtccggacagacctggatcagatcctattttattgttattaattgactcgtgggtagaaggcagtttatctccctattgaaggcatactgcagattgaaactgatggtggatgaggccatggttgggggacctctctacatggttatcttctattaattactgaytgattttagggctcacgttacatgttaactccctaccaaaagcaaatttatcagagcaattcagtgattgaagggaagtcttccagttgtattgctaggacaattaattcacccacctaatgtttttgaggcctgtcacagagttctggaaatactgtggtaagattaggagacaaaactgatgaggagactggcactgatcgatttcgttaaacaaatacgtaattaccaagtgagatatgcaaaaggagcaagattccacaagaggatatgacagaggcatctaaccaagcatattcattatctattgctaagttttaaggtaattgcttactgagaaagctaaaacgatatatttaatgatctcacacagtttctgagggtcaggaatccaggggtggtatagctgggtggtcttggctcaagaactctcatgaggataca

SEQ ID NO: 514670 - DNA, 686 bp, Homo sapiens
tatccttcaagggtgagaaagcctattggtgccctggactcatagatctgtaagacagtgacagtagagagactgcagtccggacagacctggatcagatcctattttattgttattaattgactcgtgggtagaaggcagtttatctccctattgaaggcatactgcagattgaaactgatggtggatgaggccatggttgggggacctctctacatggttatcttctattaattactgattgattttagggctcacgttacatgttaactccctaccaaaagcaaatttatcagagcaattcagtgattgaagggaagtcttccagttgtattgctaggacaattaattcacccacctaatgtttttgaggcctgtcacagagttctggaaatactgtggtaagattaggagacaaaactgatgaggagactggcactgatcgatttcgttaaacaaatacgtaattaccaagtgagatatgcaraaggagcaagattccacaagaggatatgacagaggcatctaaccaagcatattcattatctattgctaagttttaaggtaattgcttactgagaaagctaaaacgatatatttaatgatctcacacagtttctgagggtcaggaatccaggggtggtatagctgggtggtcttggctcaagaactctcatgaggataca

SEQ ID NO: 514671 - DNA, 503 bp, Homo sapiens
agtcatgtttctgtaaaagttaaaaaatacaaacaaaaaagaaacgtgtggtgagtgtgatgtgagagagaggctgcgagacagatttatgtatgctgatgaagctcaagaagctactatttacatttaactccccacatgagcaagcatgaaacattttgctagcacttcaggaaatccactttattattattttctgcctgccttctctgttcttttctcttggtgaatctttttattataaatttcatcccgcagtgagaaaaaatttgaattaagcatggaaagaaaagcaagcttaggtttaaatkccatcatcttgattttttcattatttacagcctttggtgcttcttgtatttattccagttacactaagatagtggaataacatctgttcagaaaaaaaataacaaaggatttatatacagaaagcagaaagacaatgttcccctattggtaaagtaatatagctgatgtgagcttatggcatgccctcgtaa

SEQ ID NO: 514672 - DNA, 539 bp, Homo sapiens
ttaaatgaatgaaagaaacctcatctttcatgatgaaatgaggcaaattatttatgctataaataatataatgtaaatgttaatataatatataaataatacagaagtaaataatatatttatatctatcctttatatattgtattagggttctctagagggacaggattaataggatagatgcagatatgaaaggaagtctattaaggagtattgactcaacatgatcacatgatgaagtwtcacaataggccgcctgcaagctgaggagcaaggaagccagtccaagtcccaaaacctctgaagtagagaagctgacagtgcagcctccagtctgtggtgaaatgtctgagtccaaaagctgaagagcttggagtctgatgtttgagggcaggaagcatccagcacaggagaaagatgtaggacagaagactaagccagtctagtctttccacgttcttctgtctgctttatattctggctgtgctggaagctgattagatggtgcccacccagatggagggtgggttgtgcctctc

SEQ ID NO: 514673 - DNA, 539 bp, Homo sapiens
ttaaatgaatgaaagaaacctcatctttcatgatgaaatgaggcaaattatttatgctataaataatataatgtaaatgttaatataatatataaataatacagaagtaaataatatatttatatctatcctttatatattgtattagggttctctagagggacaggattaataggatagatgcagatatgaaaggaagtctattaaggagtattgactcaacatgatcacatgatgaagtatcacaataggccgcctgcaagctgaggagcaaggaagccagtccaagtcccaaaacctctgaagtagagaagctgacagtgcagcctccagtctgtggtgaaatgtctgagtccaaaagctgaagagcttggagtctgatgtttgagggcaggaagcatccagcacaggagaaagatgtaggacagaagactaagccagtctagtcttyccacgttcttctgtctgctttatattctggctgtgctggaagctgattagatggtgcccacccagatggagggtgggttgtgcctctc

SEQ ID NO: 514674 - DNA, 574 bp, Homo sapiens
tgtctagcttggtcctggggaggtccttggatgatggagccacatcttaactgtccctggcagcacaattcttacccccagaccccaccccataccccctaacttcaccttctttttccctcggagggagcagtgtttcttctaacgccatagctaccttcgtttacattttcaccaccagagccttaagacagggtggggagccttcctgttgatgagctaactgaggaagagggaactgaaggaattcagtgactcctctctcaggataatatcctggcttgaagaccattgtcctgccacatgatcatattttgaatgtcaaaagttgaatatcaacctggcctttttctaggcaatccttctctaacaggttctaatctcttcccagacacatggctgcctagggcagactttgtgtaaaggtcacagactcacaaagacaaaagtgacaaatcgcatgcaatttcaaattatttctccagttacaatcttgaatctctatccaccctaacccagtggtttttccaagctctagcktttaatagctaactgcccatgagatatctgcaac

SEQ ID NO: 514675 - DNA, 624 bp, Homo sapiens
ggcagctctatgtctgccgccatgrcacgttgccctcacctggaaccctcaagatccttcttttgaagccaatggtcacatgtccccttttctgtgaatatccctctggacaaccaccttgctttgttgctcttatgactgctactctagttatttacctgcctctgtggtatccatgccaagtgcaggtacggtgacaatgtcagtgaggcagcctggggcttgtgtgtgtgttggggagctggctcagggagctctgggggtggcccacacagagacacacggggagtctcagctatcctggcctcagcatcctggcacatcacagcaaggcataggctgcatttagcctgatcctgggataacaggtcaaggtaggaggcaaaacgtatacttcgcaaagcaaaccaggcagatgtgagccaagggacagtgctgagatcctagaacagcatgattgggcttgaccgtgcaaccctgactatggacacaaacatgaaatgtgtctcccttaccatcgttgctaacactgcactgggggaacaccctctcctcccacacagtggctcccttgaacacctaactcgcttcacaacattttcagtcaccttcatcattaaaaca

SEQ ID NO: 514676 - DNA, 628 bp, Homo sapiens
aatgtaatctaacatttaactctggagagtgttgttgaaggcttccgcagagttggtggagagcagagttggtggagaccgtggaactcaagcaaacatctgaaataaactaagctaatgaaaccacgaggccattttgaactcaaggaaaataaaaaaagttgtccaataaaagcgcaattttagtgttctacactggctcaacagtcagcaaaacgtagtcaaaataatgatgatactaaatgtggatttaaccagatattttaaatacattttactttcgtgtaatcggtactgatataaacatatatactgagaggatagaggaagagagattaaataatgtctagcactgttaaatcaagagctagaaggtatgtgtattattttaaaatgtggaggcaaatagtagaagaaccagctaaataagagttgaaagtagttcttctgagaagcagaccacaacggtggggcatggggaagaytgtgttaagctgtgacattattaaactttccatttatatacatatattactttatttaaaaatgaaataaacttgttaaatacaggaaaagtcacctatggtcaatgttccctgtgatcactatttctttaaaggggcacagg

SEQ ID NO: 514677 - DNA, 564 bp, Homo sapiens
tctccattctgcccatgtgagcttttgaaacctttgtctgatctgttacttttcttcttgaaatccactaatggtaccctattggcctatgggccaaattccagccaccctcaagttagttcccagtgctcttcagtgccctgtgagatcctggatggaacgagatagacctgccctctcctgaccttggcaactccacagcccttgccctgaaccaggtgctgtattagataaggaggcagcaggcatcacacatgtgtaaccttgtttcattttaggattgaccagccacttggaaagtcttagggactatctctcaataagagataaaactcttactggcatacctctctgtctctcttctttaccagtaatcacaattttggataagcttttgcattttggcaaccatgaaggatggtaagtaaagwggtctaatatcgtaagtcttgagcagggcaggtagcagctacggttgccatgatggatccctccaggacatgccttcctcagcatggtctttgtaaatgttgtcccctgagttgtgcagtgcaagcctgtgca

SEQ ID NO: 514678 - DNA, 608 bp, Homo sapiens
agggatcttgtggtggtggttgtttttgttagttggtgaagtatgtgggagaagggaaatatatcaagtttcaggtatagacatcactgtcttcaaaataaggctggtggtagcctttgaacaagcctatgaacttgtttctcatctcattctctgactcctccacatactagagtccattccatgatagtccactgtgatcatctgataaacattcaaaatgtggtgttggcacatagcctgattctggtcttcyagctctttcccttgactgagtagccctcactatgctccagcctctggttttgacagtagttaccaattctaattattcagtcaccaagagatacgaggaggatttagtgcacatcacttattgatgctgtttctttcttagatcactagaaaaggttgaattgtttttggctattatccaaacatgctttccattctcagaaaacatctattcaaattatataaaatattattatagtcacctaaataccccattatgaaggaattatatttatggaacatgatatatagtgttatactgaaataggttaaaatattaatgagttaattctttcattagggatcagatggtg

SEQ ID NO: 514679 - DNA, 555 bp, Homo sapiens
agaatacctttaaaaagtagaaatcacagtggatatcctttgtgccttaaagatgatgggggcaaggattacagtaaccttcacttcagattgcctgctgggcaggcatttttaagcttaaaatcaaatatatatagtctctttctaagaagcaaaatgggaagaacagcgttcctatggtaacaagaatttattctgccaggggctattacttcctctataaatatggtttttggttgtcattatcagtgaaccaaaatttcttactgccttacatcagtactaacataatctgggaatcactgtgccatgatggatcttcttacccagccatgaaaaagagtcagtatatttggaaatgtgtgtgtgtgtgtgtgtgtgtgtgtgtctgtctgtctgtctgtctgtctgtctgtctgtctgtctgtctrtctatctatctatctatctatctatctatctatctaatcatccatctaccccataaaaggctttgtattaatgaaagatccacaaagctgccatttgacatgtgggtgtgtgtgatctgaacag

SEQ ID NO: 514680 - DNA, 572 bp, Homo sapiens
gctagaatacacagctcctccaggtacagatttttcgagtgataagagaggaaggaagaaggaagcaagagagcaaccgaggcaggcccagggtagagaaacggagagggagtgtttcacagaagctggacaggatcggaaaatgtcagccaggccaygtttcgtgctgcgacgttctagtcccttcagcttctttcaccctctggctggctccgtcactcagcccctttctttcttcctttgccaacaaagaagattttgttggtcagtcaaggtcatggcctgaaacactccaatgggcccgggagtaagtggggtaaccaaggaggagaggggcacaggcaggaagcaccgggtggcagcctccacagcgccttcgccacctcatggccaagcgtccgtgtctaggctcagccttgtcatggctgtccccacacccacgcctgggactgccgggtgacgcaccatcccaggctccgtgactcaccccagcctgccccttaggcggccatctagcccagccagagggcccggcattgacagaacacggggcagatgagacgatgtgcctg

SEQ ID NO: 514681 - DNA, 527 bp, Homo sapiens
cacacccacgcctgggactgccgggtgacgcaccatcccaggctccgtgactcaccccagcctgccccttaggcggccatctagcccagccagagggcccggcattgacagaacacggggcagatgagacgatgtgcctggttaagtcaccaccacgagcagcgcccagccaacaagagtgcttgctcctcacctcattcccgatcgtgggagcccagctttgctgcaagcctttagcttccaccatgttttctagcccaggtaatgaggaagaaaaccagtgaaaagaggacaggacaaactgctcagggggatcagcctcgtggcatcttcctgagaagtggggcaggctgaatttcaatctaaagaaacagggaaggtgaagcaagcaaatgtcctcggcccacctgatcgctcctggyaactcacctgggtgtgggaatttgtttaggggccctgttgggagggcaggagaggccatgggcacttctgctcccaccagggagccaggcacagcccgggccagc

SEQ ID NO: 514682 - DNA, 527 bp, Homo sapiens
cacacccacgcctgggactgccgggtgacgcaccatcccaggctccgtgactcaccccagcctgccccttaggcggccatctagcccagccagagggcccggcattgacagaacacggggcagatgagacgatgtgcctggttaagtcaccaccacgagcagcgcccagccaacaagagtgcttgctcctcacctcattcccgatcgtgggagcccagctttgctgcaagcctttagcttccaccatgttttctagcccaggtaatgaggaagaaaaccagtgaaaagaggacaggacaaactgctcagggggatcagcctcgtggcatcttcctgagaagtggggcaggctgaatttcaatctaaagaaacagggaaggtgaagcaagcaaatgtcctcggcccacctgatcgctcctggtarctcacctgggtgtgggaatttgtttaggggccctgttgggagggcaggagaggccatgggcacttctgctcccaccagggagccaggcacagcccgggccagc

SEQ ID NO: 514683 - DNA, 498 bp, Homo sapiens
aaatggcacctctaatgcaattagtctgccatataggtcacatgagccaatgtaaacagttttggactttatagtaatctgtacaatttcagacttttgaaatgtactgatacttattttatggttccaattgatatatcttggtgaatattccgtgtgtacttgaatgtgtattcttgcaactgtttcaatactataccaaacaactgcagaatccagttggcrtagctcagtaagtgtaaattatgtcaacttgtttttttgtctacttattttatcagttactgataaaacccccaattgaacaattgaactcatggatctagagagtagaaggatggttagaagtgtctaggaagagtagtaggtgtttggggcagtgggaaaggtggggatggttaatgggtacataaaatagaaaagatgaataagacctactatttgatagcaaaataaagtgactatagtcaataataacttaattgtatattttaaaat

SEQ ID NO: 514684 - DNA, 340 bp, Homo sapiens
aggaagcaggtgctgggagagcacctatcccaggttatccctattgactcacctgtgacaaagcacaaaaatcatagttagagtaagaatgtgagttctaaggacagttgaagaaaatctccttcggcttccctaggcaaagggtcaatcccaggcaatgtgttcagcgggtgttcagcctcttgcccactccctaactttctgtggctttctctcgctctagctctgcccctttctccagcatcactggcacttggggccttcatttggctccaagttctccccaagccaccckaatctaaagtgatgtttttgactctccagtggaaacttccatctc

SEQ ID NO: 514685 - DNA, 519 bp, Homo sapiens
acctcctggccttgaatttaaagaaggtcttaaaaatgtctcagggtaagctcccctaatcaactcttaactgcatyggagacacccagatcagaatttgcattattaaaaacttctcaagacagaggagacagattcctgacgttgacacccatgtggcattttcatgttcctagtcgtcatgtgtgtagacgattagtctacagaaagtaaatcaggtgggattcatgccaggtgagaaattcagtgtggaccctgatagtcacttcattcagtttcattggctttagaggtaatgggtggaggtgggggtggagtgtggcagtagggtcatccatgaacaatgtgagctttactcaaaaacattactgaactggatccatctacatagcttcaagctcttgcttcaatgctcactaaaggcctttctcaccaccatgagatgagtcagaagtagctaaatctttcttaaactgtcacctccaggtgcatccagatttggaggcaggtctgcctcag

SEQ ID NO: 514686 - DNA, 531 bp, Homo sapiens
tgagccaaacatgctgcctaaagaaatgcaccgatttgagtggtttagtcctaaattatatgctccatatttgagctagggaggcatgaacacatgggctgagagtagggaatgaagtgggccctcagagggaaattggagtaaggccattaaagagaggctgaatagagtccaggtggcaaaatgttcactctagggtaaaatacagttgggatggggacaaaagaaagagaggcactacaaatttaaccttgacatttgtttattgatgttaaaaaactaaatagctactaaggacagaatgtttttgctctctaaaaattcatatgttgaagctctaatccccattgtgatgatatttggaggtgaggcccttgtgagggagttagatcatgataatagaacccttagaaattggattagtgcccttataagaagaaacacaaaagtgatgatctctctctcctcggtgtgaggacatagcragtagatggcctttggcaaaccaggaagaggactctcatcagcacc

SEQ ID NO: 514687 - DNA, 640 bp, Homo sapiens
tccacctctcaatagcagaagcttggaagggctcaggatcttcagaaaaaaacagaccaagcattgtctgcaatctgccgacaatgaataccagacatatgggacatggttttgctcaatatggaataagtggtgtctgaaattctgaggtgtcccttcaagagagggaattgtgctgagggtccaaagcagcaggtgctggctagaaggttggctgatgcctgtctcaccgcaagctcaggcatcctttgaggctcctgtcctcaaagtgtaggatatctcactggggcaaggaggagagggcattaaagctcagggaaatcatgttggtctactttttctaacagccatgtgagcacaaccttatcagagaaaattttataycacctttgaaatcagctttaaatgaaccccagtagcaaattactaaggatgggaggtcacagatcttcagatacagacagaactgagttgaattctggattttggcatagcctatctaagcctcagcatattcactggtaaaatctgcatgatgatcacagcaacccataggagtgttgtaatggactaccaattgagcagtgtaagtaaaggtttagaacagtgccagtcacttaggatggcttctctattggca

SEQ ID NO: 514688 - DNA, 393 bp, Homo sapiens
ctggcgaggctcattcctgttcagcattgaggagtaaatgagaccatcaccaaagcccatgtgcaatccctgtcacatcgtagccactgaaaacatgttagtaaattggtctgtggaggaaatgaggccggcattcactcagcagacacagtgctaggctacatgtccccaagaagaatgagacactgtttgtgtcctgcgaggctcacagatgggtctatcataggaaaaggtgggtggattgtggttgctggtgtaagcagaggtttcaagaatctgctaaatatgttcaaaggtatctgctaaatttgttcaaaggtatctactaaatatgttcmcaccaaagattgctgggaagctgtagggagctgggaagatttcatggaggagatc

SEQ ID NO: 514689 - DNA, 393 bp, Homo sapiens
ctggcgaggctcattcctgttcagcattgaggagtaaatgagaccatcaccaaagcccatgtgcaatccctgtcacatcgtagccactgaaaacatgttagtaaattggtctgtggaggaaatgaggccggcattcactcagcagacacagtgctaggctacatgtccccaagaagaatgagacactgtttgtgtcctgcgaggctcacagatgggtctatcataggaaaaggtgggtggattgtggttgctggtgtaagcagaggtttcaagaatctgctaaatatgttcaaaggtatctgctaaatttgttcaaaggtatctactaaatatgttcccamcaaagattgctgggaagctgtagggagctgggaagatttcatggaggagatc

SEQ ID NO: 514690 - DNA, 634 bp, Homo sapiens
atcttccccaccatgctgcctgtgcaaagcagaggactagctgtgttcttggacctccatatcaggacctggcatctccttggttggagccccctgtgaggggtgctggctttctgaaggatctgcagaaggcatctgtctctctccttagaccctttgcataggcagtgacccaaaacctcatagacaggtggttgatggaagtctggacaagtttttagaaagtgtttactctctcagcagtattgccaccatgctgtgtgatggctgcatctttggtccccgcaattcatctgcaaagtaggggtgacaccctcctccaccttcctagtggaactccagggtacctcaagggttaggtgaatgtggacttgcctagtgaagatcaaatgctctgtcctgcaagggatcagggtaactcttgggtggtcatagggagtttctcacttgtaatattttcacagtaaragtcactaaaggggtaaagaggatgaagaagtaggaactagagtagaacccctgaccctgagtttcattcactgtgtctgtgcctctttgcattgccagtggaaagcagaggtctgagaacagctttttgatgatcctcttctgggtgaggatcatcctcttggtg

SEQ ID NO: 514691 - DNA, 482 bp, Homo sapiens
tgaaagttcattaatttctttaatcctagggagtctggaaaaatccatagtgaatatgggtagatagctgatatgtgtgtgtgtgtttcttcccgattttctgagtcttaaaatgagaccacagtaccagaagaggagagaacaatgagatgttggcaaactggctagaataacactacaggaccagattccttggatgtgccttgaaaagacatgtggtgtatttccaataagtaaatccctctaggcctcaaggaacattttcaccactccctttattcattcaactgtattcattcaaagatatttcatcccatcaaccaaacaatgacaaatgccacttaaatggttgtgagataataaaataatgagctgcctctgggaatgctgagaaggwcttccacattgggtatggttttgtcaggaagtaggaagccttggctaggtgtacactagctttggtgactgagcaatacatttac

SEQ ID NO: 514692 - DNA, 485 bp, Homo sapiens
tgagtgcagctgataaaaatgaaaccgttaaaaaagccaatggttcttagaagatttaactcacttcaaaagtgcagaatgccaaattcagtaatgactttaaattgtgaagtgactgaggctgccatacattttgttcttgtatgtaaacaagaacaagccatttgagraattgctgtgagaattctaagctgtgcaaaaattgttcaagtgaaaataaattttgatgagagctgaaaaaggtggttagctggcagttcagagatgtacacaaaagcaagttcctctcacatgaaatatgaatgacttggtagaaccccaggagtttgtgcaaacaatcctctgaccctacagtcgaagaagtcattgatattactgttcaaccgatcacctatcataggcaagtaggaggagaggctgttcccatccatagagacgtatttcctccagagcagaagggctgctggaggagcctgggaggatgt

SEQ ID NO: 514693 - DNA, 645 bp, Homo sapiens
tgctgcctaacaccaccagcttgcccttgaattctttcctggatgaagccaagaatcctccctgctatacctcagttttgaggcttgcccgttctgcatcgcttgcacagtattcaaagaaaagcctccaccaacgaggcttaaaggcagccaaggccaaatgcccttccagctttgagcgacgaggcaggctccacgactggggagctactttttaaatgaagtccaaaatgttaagcggaaagattaaaacatttctgactggttttgtaggtctgttttgtcagagtgctatttatggatttggggacaggtgaattgtatttaatgatatgaataagattttaatgttcatgggagatttgtcaatgttcaatttatctgtgatttgtctgtgtcaaacacatgtatgcacatagacaaatacatagaagaatgaaggggaagygagggtgggagaagtaaaggaaataaagaaggaaagtcacaaagaccggattgtaagagagttttgcttgtgctcatcatgaagcatcaggcattagactagcctccccatttgttctaagactggacacaatctataaaacaactgttttcaaatgttagcagcactggcctgcaatctaagaaagaaggaagaac

SEQ ID NO: 514694 - DNA, 596 bp, Homo sapiens
ggacacagcctcttccccgctgcatttctctctgggctggcaaagctgtctcctaatgccagcaagtcacttggctggggatagagctcagagccctgctggcttctcagactgtataaccrtcaccaccagagtgcccagtccacgcatctgcatggagccagccagcggcatttccagtactttctcattctctaatagcattatttccaataagtcataaaaaaaaaacttttgaaatatgtttttgggaatattgagaaaaagctactttctaagtaaggcagtagtaaagagaggagagagaggaatataaaaataaaaataactggcattcacatagactcatgtatcatgcagagcactagaatggaggacatttcccaaggtcacagagtaaattattagaagaaatggaaccagagctctccttttctgaccaggtgccctcgtggaactgctaaacttggctcattgagaatcaatgaaacaagatctttttctattcctccgttgctttccgtcctgtttcccagattcctcgttgagaatcccaggcttaggaagccctgggacacagcaccccagttgaagtc

SEQ ID NO: 514695 - DNA, 621 bp, Homo sapiens
agggtggacatatttgccagtttttttggagacggtcctaatttgtgtttgtgttttcaacataattattatcagtgatactttttacttttaacattgttccagttaaaatgataaataatatagttacgtgaagtataatctaagaagaaactgaggttgaatttttaaaatcactgtgattaaaatttaaggcctataattattgyataatgttgattttagttttctttttcagaaaaataaatgttattacacatcactatcactttatagtcacacaaaagatggttgaaaacttgactggcctaaggtcaccagtctgagtgtcactgttggggtatacagttaagaccctaatactgtggtattgttatgatcgttagcctacatttacttcctttcaaaagcaaaaatcactttagacttgccaagagtaatagggtcattgaattttttttttagcagtccagacaaacccaacagaagcaatctctttgtactttgttacttctgggattttcaactctgtagaagagacatcatgcttcttttctgccttctctaaaccggaaagacaacctgggaggatttatatctatgataggaaaaggaaaggca

SEQ ID NO: 514696 - DNA, 531 bp, Homo sapiens
gtgtgtgcgtgtgtacatatttatcccttcttgctgcagcatwactctttgaccagaattgtttactggcttatttttctcttcagtttcacaataaggtgacctgcttcatgctgcatcacattgaagaaccctgctccctgggggctcatgctgctgttattgtcccgcccacttggatcattaaggtgaagaaacctcaggtaactgccaggactctggtgctgctgggccagtgcagagaaaaatgaactgctgcttcgtgcttttctccccagactagtctttgggttcctatgacctcagttcactcatccccaaggccctgtgcttagcttcctcagttcatcccattggcccatctctttcccactttgggctctctcatggaaccagcctccccatcctaatgaattcaaagttctagagcaggaatgttgcctcctcattcatgtgctaatgatattctctttgataggtgctcttccaagtttcattgagtactagtggtgggtatagctgatgcttata

SEQ ID NO: 514697 - DNA, 542 bp, Homo sapiens
acttgcaaacattcaccatccctacttgcattattgtccaaaagactgtggatagcgacattccactgaatcttgtatccctactgatgttgacggatgcccattctgctaaggtttcctgtctactaagtgctaattagagctgcaactctggcttcagctatgatattattatctaggactgaataaacaatataaggcttatggaaattgcagaagcgctagggcrataataatagtaacaacaactattattatttttgaccacttattatttgccaggaaggtgctaactgccttatttagtgctcactacatttctattatcagtcccattttcagatcacaaaatggtttaaagaaggtaactttagcgttctgaccatttagattggaactaaattttttgaccatacgtcttgctttatccacttgctatcatgtcttaatattaacggatatcactcctatataattcatgtttccagtgacagaatgagttaatggagtccgtggtttaaaagtgaccctggagaaccaaa

SEQ ID NO: 514698 - DNA, 542 bp, Homo sapiens
acttgcaaacattcaccatccctacttgcattattgtccaaaagactgtggatagcgacattccactgaatcttgtatccctactgatgttgacggatgcccattctgctaaggtttcctgtctactaagtgctaattagagctgcaactctggcttcagctatgatattattatctaggactgaataaacaatataaggcttatggaaattgcagaagcgctagggcaataataatagtaacaacaactattattatttttgaccacttattatttgccaggaaggtgctaactgcctyatttagtgctcactacatttctattatcagtcccattttcagatcacaaaatggtttaaagaaggtaactttagcgttctgaccatttagattggaactaaattttttgaccatacgtcttgctttatccacttgctatcatgtcttaatattaacggatatcactcctatataattcatgtttccagtgacagaatgagttaatggagtccgtggtttaaaagtgaccctggagaaccaaa

SEQ ID NO: 514699 - DNA, 542 bp, Homo sapiens
acttgcaaacattcaccatccctacttgcattattgtccaaaagactgtggatagcgacattccactgaatcttgtatccctactgatgttgacggatgcccattctgctaaggtttcctgtctactaagtgctaattagagctgcaactctggcttcagctatgatattattatctaggactgaataaacaatataaggcttatggaaattgcagaagcgctagggcaataataatagtaacaacaactattattatttttgaccacttattatttgccaggaaggtgctaactgccttatttagtgctcactacatttctattatcagtcccattttcagatcacaaaatggtttaaagaaggtaactttagcgttctgaccatttagattggaactwaattttttgaccatacgtcttgctttatccacttgctatcatgtcttaatattaacggatatcactcctatataattcatgtttccagtgacagaatgagttaatggagtccgtggtttaaaagtgaccctggagaaccaaa

SEQ ID NO: 514700 - DNA, 503 bp, Homo sapiens
tccagttcctgggccctacacatccaagcatttactgggaggggctcccaggagccacaggttcttgtgagcctttgaaaggaggccttgacagttccccaaacctgggttcccacttcgtcaaggagccaggaaggagytcagactggcagaagagatagcatctccctgggctggtaaaaccatgcttaccctggatagggcccattttccttgacaaacagagacagaggtagaaaaccctgagtgccctggggatctggctcagatttcatttctaaggctctgagatgtttccaggtcagacttggagtgggcagaggtttgaggcatgatgccaggaagcagatctctgccgcacttagggaaccaggtcctctgctcccatgttcatcacaattcttcctttcctcccccagaactcacccttaaaatctacagaaagcgatagcccctctctgcagagcaatgcatataaacatgcatttttcatgcaatttcag

SEQ ID NO: 514701 - DNA, 519 bp, Homo sapiens
tcaagtcttcaagtcttttaacttgtactgatttggcagtttaattgttcttagcatgctttgtcttttcttcctattttatacatctttattttatttcacttaacctttttgtcctcaatcacatatatatatcacatatacatatatatcatatatacatatgtatatttatcatatatacatatatatatatattttttttttttttgagacagagtctcactctgtcacccaggctgaagtgcagtggcrcaatctcggctcgctgcaacttccacctcccagggtcaagtcattctcttgcctctgcctcccgagtagctgggattacaggcacacaccatcacacccagctaatttttggattttagtagagacggggtttcaccatgttggccaggctgctctcgaactcctgacctcacgtgatctgccctccacagcctccgaaagtgctgatattaccggtgtgagccaccatgctcagccctcaatcatattttttgtttcttcttg

SEQ ID NO: 514702 - DNA, 561 bp, Homo sapiens
catttgaattccactttttccggtggtgtcagcttcctggagacttacccaggggagctgcccaataaggaccgatctcaaagcacccccagagaggagaaaatctttgtagaatccagtgtcagcctctcaagggcaaggacacctagatcccttggtggaataggcctagctcaaccgacacttgtctggcaacagaaaaccccagagcccttaccattcatggagcrctgctgccgcagacatcatcagccattagcctcccaacagttctaagaggaaggtattggccgggggcagtggctcatgcctgtaatcccagcactttgagaggccgaggagggcgggataatttgaggtcaggagttcgagaccagccaaaccaacacggtgaaacgccgtctctactaaaaatacaaaaaaattagccaggtgtggtggcacacacctgtagtcccagttactcgggaggctgaggcaggagaattgcttgaactcaggaggtggaggttgcagtgagccaagatcacaccactgcactccagtctgggcgacagagta

SEQ ID NO: 514703 - DNA, 638 bp, Homo sapiens
tcttgtgccagaggatgggcttgggcaggctgcgsttggcgtggatagtatgaatctttgccatttctaaggcgattaacctacagcagggaacaggaagagtagagcatcagtgctgggacattgccttccccactcatttcctcctggccagatagggaccctccaggcccaccagggcacttgccagagggccaaggatgggatgattgcaagtcccttaggagcacaggtcctgcagaaggaaggtctcagcagaagagaggagaatgaattaagaccttagcctggctgctccctttccagtgccaggctggggctgcctcagggagcagaagggcagagcagtggggctgttggtcacaggtcagtggccttgtcctaccccagtgtacccatagcaactcctgagaacagaggggcacctggggatgggggcggggctggccctcctctccccggactctgacccatcctctcaggggacgtgaacatagttcactttgcaccaagagatcagggggtggtgatgccaggcagggaagaaatgcccgcctcttatcagcctggccaaggtggggagggaaacaggctggcccagggtagccccttcctctgctatagggagttgatgctgg

SEQ ID NO: 514704 - DNA, 197 bp, Homo sapiens
gtgataatttaacaaagttatatttgaaaaaaggggacacatagttattccatgaaacatgtgaatgaaaaaatgaacaayttacccagaacgtttcacccagaagagagattatatgtcaagcactgtgcttgacactaggaatggggcccataatatcctcatcaaaggctatatccatccatagctatgttttt

SEQ ID NO: 514705 - DNA, 642 bp, Homo sapiens
atgctcctgagcaacccattcaattttccaagctgcctgtattgctgcactrttgcttttagtattgttaagtcattgttttagatgatttagtcttcgagaggcccctactgactcctacatgggtactgtattgcatactaatactgaatctcttgtcaattaaaaccttaatggggatttctggcagagggtgagagaagaaccctaattgaagagaccaacccagaagtgctggtgataagagggcagtagtatgtagaatagaaatgagcatcaggtgagttgagacagtgccaggtggggaagtggaacgagtgagccaacattttcagatacatttctcctgtcactctatacccacccctctctctttttaaggctctcttttaaagagctgaaaaaacattgagaattgtggatagtgcgtgctacctgggttcacaaagttttgcattatttcatcctgcaccctcggtctttgtaggaatgtaaaggaatgaaataccataagcacaaagggacatgaaaattgaggtgatctcaagaaggtgactgaaagaattatgaaggaattatgttgagcctcattcatacatgtctaaagccaagctggaatctactctaatatcattgtatcag

SEQ ID NO: 514706 - DNA, 575 bp, Homo sapiens
ctgcaggcttttccgtatttattttgcagtctctgcctatgtagaaccgtaccagcaacgtggggattgatcactatttaacagactgcattagtcctcagatgtacaattcttcctccatggaaggtaatgaaagggatcagggaaaatataactgcaaaaccttagagaattagtttcttcaatcaggtgcttcattctagctgtcaatagacttttcacagtcgtgctctgtaaaagtaattagaagccagaataaatgtgatcattacaggaatgaacacactttacacagaacggtgcattttatgcagaaaaacgcaaatctttagtcaagaaggaacacattctcccttcaatttatttttactacttgatcactttacaatcaatayacttacttagcatgcttcaaacctagtttctttttaatcatgaactcattttagtatgatgaagtctacattcacagtgaagtaatttggaccgcctgaattgatgtctacctaaacaatgcatttaaaatataaatgctgagaccaagcttgtgattgttgaattatggatgttgggag

SEQ ID NO: 514707 - DNA, 562 bp, Homo sapiens
tgagaccctgtctcaaaaatataaaaaataaaaaaataaaaatcaatccagttttttccctcatacagcttacagtctagcaagcttttgttcacatcatttgactatgattctattccaataatatgctttggataattatatttatacatgtattgatcttatgtctgtaattatatttcaggcagttatagtacaatctcaacttttgcatcagacataaygcccagaataggacttacaaaacacagagttaaagaaaactggaagaacaattacagaaccatgaaaaaatagttgaattataaagtaggaaattgacagggagaagattgaagggtcaagcctaaagtcacagggtgagatattctgagtaagtgtttattgatttgatgaacttgaagagacctctgttcaaaatctcatgagaatctttgccaaactatttccctcatttgctagtttatattttccatgtcattggtggtttatttagtaacagatttcagaaacaaatttttgatgaatctccctatttttacacatggaaaaataagccata

SEQ ID NO: 514708 - DNA, 562 bp, Homo sapiens
tgagaccctgtctcaaaaatataaaaaataaaaaaataaaaatcaatccagttttttccctcatacagcttacagtctagcaagcttttgttcacatcatttgactatgattctattccaataatatgctttggataattatatttatacatgtattgatcttatgtctgtaattatatttcaggcagttatagtacaatctcaacttttgcatcagacataacgccmagaataggacttacaaaacacagagttaaagaaaactggaagaacaattacagaaccatgaaaaaatagttgaattataaagtaggaaattgacagggagaagattgaagggtcaagcctaaagtcacagggtgagatattctgagtaagtgtttattgatttgatgaacttgaagagacctctgttcaaaatctcatgagaatctttgccaaactatttccctcatttgctagtttatattttccatgtcattggtggtttatttagtaacagatttcagaaacaaatttttgatgaatctccctatttttacacatggaaaaataagccata

SEQ ID NO: 514709 - DNA, 560 bp, Homo sapiens
tcctagttgctaacggtataaaaatgcacataattcccaaactctagggtcatagagggtggtatatttaagatgattaatgcagtacacaatccaaaatggcaactaccaagacaaagcagtggacactaatgcaaaatgagagagaaggcaatgagaaacatggactatagaattcaaaaaatttagattgaatccaacatctgtttatggaacatctacagattacttgtcatgcactgaactaagatggatatttagtatgtaggaacacatgtatagtcattacctttatgaaatttacagtctaaatgaggaaaactgattaaaaaaaaaaaactacaaaaatgatgagagaagcctgggtcaggaaaggtcatcagcattcaagatgagtaagattaagcaacagaagaagggaacagcaaccttgttaacaaaaacaggatgaatacatgcactgagatgaaaaagcaccagatattttggtgggatggtgagtggctcagtccggacagatgataaacatcagtggrtgtgcttagaaagagacatggata

SEQ ID NO: 514710 - DNA, 558 bp, Homo sapiens
ctctcagaccaagtccaccacagtctcttgaaaaattataattagagattttatttttaataaactttctaggtgattctttttgcacacttgggtttgggaattgctggtctagaagagaagtaatagaattcttaaaagagtatcagaaaaaagaggaggaggagttttaagaaatatttaggaggtaaattaacaaaatttgttaatccataggatgtggggaagtgaattataggaaaaaaatcaggatgctgccaaagtttttagcttggacaattggttcaattaaaaagggatggcagaggaagttgtagtctaggaagaaaagacaatagatgccctttggggcatgttgaatttgagcacatccagatggagggagccaataggcctacyctataggaaaatcctgtctgaactttaagtaaaaaatggggactggagatctaggaaatgtacatgaataattaaggccacccacaaaaagcacatggagttaaaagactagagtgctgaggataatgttctggaacactaaaattaagcaaacgaaaa

SEQ ID NO: 514711 - DNA, 525 bp, Homo sapiens
gatgacactgattttatctgtcatatagcactctgctttgttgggcgtcgtggcttatgcctggaatcccagcactttgaaaggccaaggcgggtggatcattcgaggtcaggagtttgagaccagcctgaccaacatgcaaaaccccactctactaaaaatacaaaaattagccaggcatggtggcatgcatctgtagtcccagctactygggaagctgaggcaggagaatcatttgaacccaggaggcagaggttgcagtgatcaggccactgcactccagcctgggggagacaatgagactctgccttaaaaagaaaaaaaaaaagtattctgctttgacctaatcctgaaatatggagacaacacatggtgaatttagaaacaaaatatattcccactggacagctatactattcaacaccccattcatgttgaaaactctcaataactgggcttttaaggaacatacctcaaaataataagaaccatctatgacaaaaaccacagccaatatcatactga

SEQ ID NO: 514712 - DNA, 525 bp, Homo sapiens
gatgacactgattttatctgtcatatagcactctgctttgttgggcgtcgtggcttatgcctggaatcccagcactttgaaaggccaaggcgggtggatcattcgaggtcaggagtttgagaccagcctgaccaacatgcaaaaccccactctactaaaaatacaaaaattagccaggcatggtggcatgcatctgtagtcccagctacttgggaagctgaggcaggagaatcatttgaacccaggaggcagaggttgcagtgatcaggccactgcactccagcctggkggagacaatgagactctgccttaaaaagaaaaaaaaaaagtattctgctttgacctaatcctgaaatatggagacaacacatggtgaatttagaaacaaaatatattcccactggacagctatactattcaacaccccattcatgttgaaaactctcaataactgggcttttaaggaacatacctcaaaataataagaaccatctatgacaaaaaccacagccaatatcatactga

SEQ ID NO: 514713 - DNA, 590 bp, Homo sapiens
acactgattttatctgtcatatagcactctgctttgttgggcgtcgtggcttatgcctggaatcccagcactttgaaaggccaaggcgggtggatcattcgaggtcaggagtttgagaccagcctgaccaacatgcaaaaccccactctactaaaaatacaaaaattagccaggcatggtggcatgcatctgtagtcccagctacttgggaagctgaggcaggagaatcatttgaacccaggaggcagaggttgcagtgatcaggccactgcactccagcctgggggasacaatgagactctgccttaaaaagaaaaaaaaaaagtattctgctttgacctaatcctgaaatatggagacaacacatggtgaatttagaaacaaaatatattcccactggacagctatactattcaacaccccattcatgttgaaaactctcaataactgggcttttaaggaacatacctcaaaataataagaaccatctatgacaaaaaccacagccaatatcatactgaatggacgaaagtgaaggcattccccttgataactggcacaaaacaaagatgctctctcactactcctat

SEQ ID NO: 514714 - DNA, 568 bp, Homo sapiens
aaatattcacagttctccaaaccctgatataattatcttgcttaaaattcaagataatacatagaagccaagtatatgctgtatggttcttcttatctgaagttcaaaaacagataagctacattataacgttacaagtacgagtaatggttatccttgggaggtgtggagcaggtataggaactgaaagcaccagggagcttttaagattttggtaatactctgtttctttaactggctgctggttacacagggtgcattcactttattaaaactgaaatttgtgatttatgtacttctctatatgtatgttatgacaatagtcacccaaaaatgttacatgcataaaataatttaacctgaatattttmtaaatcatctaattagacatatgctgttcataggaagaaaatacaaatgctcaataaatatacaaagaaatgttcgacttcactattttcaagaaaatgcaaattaaaacaataaaactccattcccctctcctgtagattgttaaaaaaaaaaaaaaaaaaaagttttgcccctgatattctaaaaatcattgttg

SEQ ID NO: 514715 - DNA, 600 bp, Homo sapiens
tgcagaaagtgagctcagaaacattcaaacatgcccatgagagaggataaagtaagaaaycgtgagagaggataaagtaagacacccgtaaggcaggcaattggggtgagtccttggtaaaactccttcaaacaaagaagcctgaaaatcaaactgcaggccccagataagaaagagcccatgtccttcaatggaaatgcttactctgtgaacccaaaaccctttggatacatttctctctccttggcatgccttagtcccttacttttcacctatttgacatatgtctacttttctgtaagtagccacgggctaagtcttcatttatatagggtgaatcatcacttcagcccctgattggtcccaggccaaggtcctgggcctagcctccacctctgcctccaattctttacactaacatacttctaagtggtgctttctccaaaacagcctgcagaccagtcagcacattccttgtctttccagtccataaaatccccggactcagcctcatagctggcaaccctctttcaggccccctctcagttgcagagtttttctctttcgcttattaaacttttgctccaacctcacccttgg

SEQ ID NO: 514716 - DNA, 453 bp, Homo sapiens
tctttctattgcccaagctcaatttatacctcatgtctaagcatttgctcatatacccgctttactcctctcaaggaaattcaaccccatcctacaagtccagctcagttctctcctcctacagtaaccctacccaaactatcagttcagaaaagtctccttccttccctagaagtataagacttaactattcataatgtacatagtgttattgtgttaaactgatatttatctcacttttttcatgtatgtcttatttctacatgtcagagacctgttacgtccattcttgtatcatcctcacctagtgggtagccagaaaatgtgtattttttaaaattttaggctacaagttaaataagatggtacttaaatatatgtatggatacataygacatgatacataaatgcctaatgtatgctcaacctagacacagtattacagtttccctt

SEQ ID NO: 514717 - DNA, 643 bp, Homo sapiens
aatgagcttcaaaaaatcttgggatttccttatagatgtatcttttgttattcataacaagagtctcttttgaccacacctgagtttatcctaataaggtgactctgggtgggcccttagatagttcaggaaaggagctgtccacatcagagagaccttggaacttttagccccatcccctggtctctggggagggggcagtgactagatagcagagcccagtcatctggctagtgatttaatcactgatgcctaggtcatgaagccccrtataaaaaccctggaatagcagtgaacatactggtttgctaggaagatgacacctggatttcttcaggggagagcagggaagctttgcatccctctgccctctttcctagaccttgcccttgctctgtgcacctcttccattgggctgttcctgagttgtagcctttataatgaaactgtgattgtatagtgctttcactgatttctgtgagaatcgttgaaactgaagggaggttttgggaatctctgaatttgtagccaagttggacattagtgtggatagcatggggataactgaagtgagggcagtcttgttggaaaccttgctctttaacttgtgggatctgatacgaactccaggtagtgtcagaat

SEQ ID NO: 514718 - DNA, 632 bp, Homo sapiens
attctgcttttacctatttgataattctttattttattagaattgttaggactttgtaaattttttcataaagaaccaagctcattttaaagttccgctgttttttctgtgttttctttttttcttttcttttcttttctttctttcctgctttcttttttttttctttgagacagggtctcactgccacctaggctgggctggagctcctagactcaagtgatcctcccaccttggcttcccaaagtgctgggattgtaagcatgagtcaatgtgcctgaccctttctgtgtgttgttatctaatcaatcatttttactgtcatccatatttctatttttgttttttaatcacaccttttattttaaaaatttgactgcttgattttaaaatttgsattgcttagtttatgttctgtttatttaaatactattttagaaactatttcagtacagctttgtatgaatcctgtaacttttgatatgcgatgtctttatattttttctaaatattctgttgcactggttctaaactttggtgaatatcagtctcagctggcaggcttattaaaaatgcagatattccaattctacttaacactgggtatagggcctgagcttctgcatttttaa

SEQ ID NO: 514719 - DNA, 632 bp, Homo sapiens
attctgcttttacctatttgataattctttattttattagaattgttaggactttgtaaattttttcataaagaaccaagctcattttaaagttccgctgttttttctgtgttttctttttttcttttcttttcttttctttctttcctgctttcttttttttttctttgagacagggtctcactgccacctaggctgggctggagctcctagactcaagtgatcctcccaccttggcttcccaaagtgctgggattgtaagcatgagtcaatgtgcctgaccctttctgtgtgttgttatctaatcaatcatttttactgtcatccatatttctatttttgttttttaatcacaccttttattttaaaaatttgactgcttgattttaaaatttgcattgcttagtttatgttctgtttatttaaatactattttagaaactatttcagtacagctttgtatgaatcctgtaacttttgatatgygatgtctttatattttttctaaatattctgttgcactggttctaaactttggtgaatatcagtctcagctggcaggcttattaaaaatgcagatattccaattctacttaacactgggtatagggcctgagcttctgcatttttaa

SEQ ID NO: 514720 - DNA, 485 bp, Homo sapiens
taataagagtttattattcctctattcctgcatggcaggaagagaggtggattctcatggatatccaagaggtggatccgtagactggctaggacttgtggagattaaaactgtcttttgttatgaatcatagtcagctttggggggcttttgcccttcactctcatatgcttttatttattctttttgagatggagtttcactcttgttkcccaggctggagtgcaatggtgcaacctcagcttactgcaacctctgccccccgggttcaagcgattctcctgcctcagcctcctgagtagctggaattacaggcacctgccaccacgcctggctaattttttgtatttttagtagagatagggtttcaccatgttggccaggctggtctcgaactcctgacctcaggtgattcacccgcctcagcctcccaaagtgctgggattacaggcatgagccaccacacgcggcctcttgtatgctat

SEQ ID NO: 514721 - DNA, 585 bp, Homo sapiens
gctggataagcttttcaatgtgctgctggattctgtttaccagtaattttttaaggatttttgcactgatgttcatcaaggatgttggcctcaagttttctatttttgttgtatctctgccaggttttggcgtcaggatgatgytgccctcatagaatgagttagggaggagtttctactcctcaattttttggaatagttttggtaggaatagtaccagctcttctctgtacatttggtggaattcagctgtgaaaccatcaggtcctgggctttttttggttgttatgtgtgagaaacaaactcacttgtccaaacccaaagaatggactcagagacacagagaacagcggaagtgagactttcaatggtgatcttgcaagattgggtgtctggcacgcaggcacatccagcacagtatcaacaagcaatttatcccatagtgtgcaagtccctcccctggttcctcataggctgaatatatgaggttacaatcttctcggacgtcgcctattgatttttgggtagtggcttcaggtgtttttttagggttgtcttgctgcattttttttgcaacccacaatg

SEQ ID NO: 514722 - DNA, 477 bp, Homo sapiens
gaagttgacggggcaaggtaatctaaggatttggagctttatcacaaacctggggggaaatattaattgatcatatgcagagacagccatgatcaaattgatactttggatataacacactcaactgttcatgatatccccaaactagaaatactgtagaatttcattaataatagaatgaataaataagatgcaggatattcacatagtggatttttatacagaaaaaggaatgaagaacttactctgtaccataacatggatgaataccaaaatcattttgtttgccacaagaacaaccaaaaatgattgcacaygataccacttcacttatgtaaacgtcaaagaaaagcaacgatggtgttgggagtcagaaaggtgattctctttaggatttcattgggattgcattaaatctatatagcagttggtaaaattgccattttaaaatattgaattttataggctgtgaatgta

SEQ ID NO: 514723 - DNA, 508 bp, Homo sapiens
gcagccaagggagtgacagggcctcagcrcgaccatcctgtcccagtgcaatcgcaggcaccaagagtcggggagtatgggccccaaaggaggatgggctgctgtttcccatgtccgccagtgggaaagaagacagcaggaggcttttggtgcctgaaagaaggagagctaggaactgcgggagagaaatggaggcgaaatgcctctcaccattctcccttggctggacctggtgctggggataggtgctgcctcctccatggggccatctctgattacctcgccttgcatctgggcccagggatcttcaggctcctgtgtctcccccggcccacgatggactgtttacttatctctgttctgtaccagatggaacgctcctccaggccaggataactaacaggatacctgttagttacagtggcaaacacctcccccagcccacgtcttaacttcattcaagaagttgacttctctggcacacaaagctccatgtggatgttcccag

SEQ ID NO: 514724 - DNA, 591 bp, Homo sapiens
cagtggcgccggcaccactttggtgtcacttttaacactgcgcgttaacaccactggctgactgtctgcgcaaggaggccccggcagagccgcgtgcagccacaccccacatgtggagttgttaatccggcagttgttcagcaggttctctgggcctcacctccaaaygtgttacttctggagggaaagacgcccacagaacagcacaagctctccaggaaggaacgacagaaccggcctgtcctgcgttggccaggaagagaagaggaggcatttctgagcaaggacatgcaaagttttggtgcctggatctctgccacctacatacagttccctaaattagaagaataagaggaaggagagaacgaggaagagggaaatagtgtcaccatacaacttaaaatcttttcttaaatctgcagctttatccgtgccacatgttttcgaagaatattttatgatgtaatgggaagagacaaaagcagtgaaaaagcaaaatcacagacgcgatgtgtcttcgattctgggaatgtgtggggtggacgtagtcacggtgtcccaggtccactcgcccattgcatccaggcaccc

SEQ ID NO: 514725 - DNA, 452 bp, Homo sapiens
aagttgctgccacctgactgtggcctgcaatttcccgattccctctccaggcttctccccttcccacctcggcctctctctaaatcctactgagagaaccccaggtttaacttttctatttttgtcttcccatggttttgtttgctgtttccctccctgccatctctctttgggagggagtgtaatccgcatagagaggagagtcttttatatgacttgagattcacagtagttcacaactcccacctttgtcaccgtcaccctggcatcttgaacctaaagtcactttctgctctccatggcatcttgaacctaaagtcacttttatcttttggccccgccttgcaagacccgcccactgctgtggcccactcaggaatcccggacaccaagtctatcccccggcatccccctgcactccrtgcctttgagcatggagcatacattgagtg

SEQ ID NO: 514726 - DNA, 465 bp, Homo sapiens
ctctggtgagtgacaggcaattggaccggtcagggtgacccggggcaygcggtctcaccacctcaccacagtgctctcttcccacggcagcaccctgcctagaggatggtggctgggcaggcgctgcccccactgcctcacaggcctcttgggggtcagagatggacaggggtttaggtagtccctcctccatcctgtcctcatggatggatgcctgtgccctccctagatttttctcacggtccgaaggaagggctagcccctggagagcatcttatctcttgtttgatggatggcccagagagggtgagtggcttgcctggggccacagagcaaactggagtcagggccacccaaacacaggagtcctgactcccagacactcatgcactggcggggcagggcctacactgtcttccctgcttcccaggaagataccttgtgggtagatgtgggagggaacag

SEQ ID NO: 514727 - DNA, 693 bp, Homo sapiens
ctgatgaagtctggggtctgtgaacaccttcttgaagaggtgacctgtgagctgggractggcaggggcttttttctccagtctggcacagatcccacctgggtcattcatccagcatcagtaaattacatcaccctctggcccctctgggtgctgtgtttgtgctcccactttatcatcccattgtggctgtcctttctttcgaggtgccaaacttagcttggatttagggttgtggatgtggtgtctatccttggaggcagatgtctgtctcccagaccatgatgtctactttctaaaagttcagcacctggttctgatgctccaccaggtttgggaatgtctgctgcagagatctcaacctcctcttctcatatgagtccccagcagaatgataagacacagttcccatcctccaggaacacgcagccctgcaggaaagcagtgtcatggaaccataatgtaacctgataaaggtttgcacaaggtgctaaagaggcacacaggaggatgcccaacccagccaaggaatcagagaaggactcctccctggaggaggtgatgcctgagctgaatctgacagagtgagaggcaaagagaggcaacattccagggaaagacagcagtgggtacagagactcagaaatgaaagagagcaaggtccagcctaggaacaaaaggtagttctgtgca

SEQ ID NO: 514728 - DNA, 155 bp, Homo sapiens
gtaaacatttgattttctctggtgcrctattggttattttactaaagaggcagcatcttcaatgctgtagttcatttctattcttgatgaggaccctggtgtttaggattttgctgatttgggatataggttatctttaaaacaatagtcagcct

SEQ ID NO: 514729 - DNA, 492 bp, Homo sapiens
gctgggactacaggcgtccgccactacgcccggctrattttttttgtgtgtgtatttttagtagacacagggtttcaccatgttagccaggttggcctcaatctcctgacctcatgatccacctgcctcggcctcccaaagtgctcggattacaggcttgagccaccgagcccggcccatttctctttatttatatatgcaaacctatgagaagcctgctgatgtgtacatttgtttacaatgagaactactgaagccttaggcaagatgacaaggcagttcccatgacagcagacataatgtacaactttgtaccatttcagctccctggaatagtagcagacttatcagtaacacacatgtcaaataatgctatagtttattacttgtattctccattcaataatctgacaaatacactaggtatttgttgtagaaagactactcagccaccagctttccccttcctcctagcatcctgatgtccttttt

SEQ ID NO: 514730 - DNA, 492 bp, Homo sapiens
gctgggactacaggcgtccgccactacgcccggctgattttttttgtgtgtgtatttttagtagacacagggtttcaccatgttagccaggttggcctcaatctcctgacctcatgatccacctgcctcggcctcccaaagtgctcggattacaggcttgagccaccgagcccggcccatttctctttatttatatatgcaaacctatgagaagcctgctgatgtgtacatttrtttacaatgagaactactgaagccttaggcaagatgacaaggcagttcccatgacagcagacataatgtacaactttgtaccatttcagctccctggaatagtagcagacttatcagtaacacacatgtcaaataatgctatagtttattacttgtattctccattcaataatctgacaaatacactaggtatttgttgtagaaagactactcagccaccagctttccccttcctcctagcatcctgatgtccttttt

SEQ ID NO: 514731 - DNA, 492 bp, Homo sapiens
gctgggactacaggcgtccgccactacgcccggctgattttttttgtgtgtgtatttttagtagacacagggtttcaccatgttagccaggttggcctcaatctcctgacctcatgatccacctgcctcggcctcccaaagtgctcggattacaggcttgagccaccgagcccggcccatttctctttatttatatatgcaaacctatgagaagcctgctgatgtgtacatttgtttacaatgagaactactgaagccttaggcaagatgacaaggcagttcccatgacagcagacataatgtacaactttgtaccatttcagctccctggaatagtagcagwcttatcagtaacacacatgtcaaataatgctatagtttattacttgtattctccattcaataatctgacaaatacactaggtatttgttgtagaaagactactcagccaccagctttccccttcctcctagcatcctgatgtccttttt

SEQ ID NO: 514732 - DNA, 492 bp, Homo sapiens
gctgggactacaggcgtccgccactacgcccggctgattttttttgtgtgtgtatttttagtagacacagggtttcaccatgttagccaggttggcctcaatctcctgacctcatgatccacctgcctcggcctcccaaagtgctcggattacaggcttgagccaccgagcccggcccatttctctttatttatatatgcaaacctatgagaagcctgctgatgtgtacatttgtttacaatgagaactactgaagccttaggcaagatgacaaggcagttcccatgacagcagacataatgtacaactttgtaccatttcagctccctggaatagtagcagacttatcagtaacacacatgtcaaataatgctatagtttattacttgtattctccaktcaataatctgacaaatacactaggtatttgttgtagaaagactactcagccaccagctttccccttcctcctagcatcctgatgtccttttt

SEQ ID NO: 514733 - DNA, 526 bp, Homo sapiens
ggcagatgtatacagaaatatattttaatctttaagagtatggagagatgctaggtgtgacgctaatagaaggatatcttaggaatgggaaatacatattcaaaatctaatatacctttatatagatggttatatttctcttaatcctctaaaatattttaatcacactgtatgtgttacatattatatttatctaatgtcagaacagtttgcttattatatacaaagattgatctagtcattgattctgaaattttagtgtacctcagaatcaaccggggggcttgtyaaaacatggattgctgcctgcctccccccgaccccacgcagttttagattcagtgtttctgaggtgggggtcaagaatttgcatttctatcagttttctaacttatgctgatgccactgtttgggaaccaccttttgaggcctatggatctagggtgtgttttaaaatcaacctgtaaacttgaacttttagctaaataatcagagatatgagataatgagtataaagtatcttaca

SEQ ID NO: 514734 - DNA, 438 bp, Homo sapiens
gctctcaatctcccatgactcttccattgtgcttgaggctctctctacagagccctgtgtcttttcaaaacagttaaacaatacttgagatacagtaatacggtttcacacacacaaaaatactgatgaagagagaaagtgtctaggaaagattttatagcatctgtggtagttgaaatcttgaagaatggttataaatttgatgtgcagggyattccaggagactgttcacactggattctccaccatactgaatagaattcatcatgtaaaatcttacttaatcacataaaggggcagttaaaaacagtacatttaaagagcatgattttagagttagactggttttggatcccagttcaatcacttctctctatatacacactctgtcctttaatgatctcatcttatctgatggctgccatcaatgcctttcac

SEQ ID NO: 514735 - DNA, 506 bp, Homo sapiens
tcttccatgaagccaggcattaaagagatttgcaattatgcaaaacaatgctacccttcttactattttttgtttgtttttgaaaatagttatttttcataataatgggttattttttgttaacaggtagtggtttgattcttgttatttttggaatgtcccatctttaatatggcaaatatcaatagatatcatccacataaacataagttccttcaggtcttcaatttttaagagttcacagagtcctgtgatcaaagagtgagaaacactgctgmagacatttcttcattgccagtggattcctgttctatccatagagggcgctagagagagacgagaaggcacaggggttggggcggtggggtggggagtcgcgggagaaggggctggacccagcaagagaacctgctgctcctgttgaatctctgcagcgtttcagcccggtggcggtacgatgttgtctctacctgcagactctaaagcagtgtaggctctagtctcta

SEQ ID NO: 514736 - DNA, 674 bp, Homo sapiens
tgaagaataaaacagtaagctatagatccttgattaaaagacatactgaaatcmtagtaaaaatattctgcttaaactttttcgaatccattatttgctttttgtaattagtagaatgtagtagcattatctttcggccatttcctattttttactaaaataatatatttctaattgtctttctactgagtcttcataattctagtcttaggtaaaggtagagttaatggagtatgtgactctgaagtgctaaaatagttttcatttgccaaaactaatttaaaaattaaaattcaaggttttcacactttgtactctttctcttcaaaggaactatctatatgacagctttaggggactatcaaggaactctctgaaatttgaaataatgaatagtcaattgcagtgcaagataagcataagcaatgcaatatttaaaatataaatttttctaagtgaattttaacataaaaaattgtattttgaaatctcagtaagatagccatgctgcatatttaatcaatatacttttgctcagtgaccttcatatcaatttttgagtttgatataattagttaatgatataaattagaatgcgaaatagaaatggaactgtaaaaaaaactctgattaatttaaattattatctagttaatttcatcagagttctttgc

SEQ ID NO: 514737 - DNA, 674 bp, Homo sapiens
tgaagaataaaacagtaagctatagatccttgattaaaagacatactgaaatcatagtaaaaatattctgcttaaactttttcgaatccattatttgctttttgtaattagtagaatgtagtagcattatctttcggccatttcctattttttactaaaataatatmtttctaattgtctttctactgagtcttcataattctagtcttaggtaaaggtagagttaatggagtatgtgactctgaagtgctaaaatagttttcatttgccaaaactaatttaaaaattaaaattcaaggttttcacactttgtactctttctcttcaaaggaactatctatatgacagctttaggggactatcaaggaactctctgaaatttgaaataatgaatagtcaattgcagtgcaagataagcataagcaatgcaatatttaaaatataaatttttctaagtgaattttaacataaaaaattgtattttgaaatctcagtaagatagccatgctgcatatttaatcaatatacttttgctcagtgaccttcatatcaatttttgagtttgatataattagttaatgatataaattagaatgcgaaatagaaatggaactgtaaaaaaaactctgattaatttaaattattatctagttaatttcatcagagttctttgc

SEQ ID NO: 514738 - DNA, 674 bp, Homo sapiens
tgaagaataaaacagtaagctatagatccttgattaaaagacatactgaaatcatagtaaaaatattctgcttaaactttttcgaatccattatttgctttttgtaattagtagaatgtagtagcattatctttcggccatttcctattttttactaaaataatatatttctaattgtctttctactgagtcttcataattctrgtcttaggtaaaggtagagttaatggagtatgtgactctgaagtgctaaaatagttttcatttgccaaaactaatttaaaaattaaaattcaaggttttcacactttgtactctttctcttcaaaggaactatctatatgacagctttaggggactatcaaggaactctctgaaatttgaaataatgaatagtcaattgcagtgcaagataagcataagcaatgcaatatttaaaatataaatttttctaagtgaattttaacataaaaaattgtattttgaaatctcagtaagatagccatgctgcatatttaatcaatatacttttgctcagtgaccttcatatcaatttttgagtttgatataattagttaatgatataaattagaatgcgaaatagaaatggaactgtaaaaaaaactctgattaatttaaattattatctagttaatttcatcagagttctttgc

SEQ ID NO: 514739 - DNA, 521 bp, Homo sapiens
tctacaacagtcgtaggctatgtctagctgctgtaccgatcttacagagaatttggttattctatgcctaaaaaatataaatttctatgtagcctgtgtgttctctattttcttaatttgttttctgtttgagatcactgtaaataattaacaaaatataaagacaattttttttccaggtctgagaatgaataaaggtgccatcacccctccccgractacttctcctgcaaatacgtgttccccagaagtaatccatctgaaggacattgtctgttacctgtctctgcttgaaagaggaagacctgaggataagcttgagtgtatgtgtttcttcattttgtttacttatcgtgattgggggcaggagaaaggactggatattgattaacttaaaattgcattagtatagttgtataatttttgttgaataaagtgatcctgcttaatagtaaaaatttcctcctgctgaggatcagacaaaagatattaagatctattaatttcaggttcttatttat

SEQ ID NO: 514740 - DNA, 508 bp, Homo sapiens
attcagaggcttgtgactgtatgaccttaacatttcttaggatatggttgaattgatgggaaactgaatcagaagctaaactgttgggcactaaacacctactttaatttagattttcttcttttctcctttaagccttgaactgagagtcccatttctagatcatcaattttcttcctattacttttctctgacaccagaaatgagaattccaaaggcaggtgaatcaactcaagataaaactgttcattgccatcagattatatttgtaacttttactggtgctccttttttttcatgtcagaatgtgatagaaaaacatctcctgagagagacatttgaggactccaattggatactcaaagagattctctggtgaccaaaaggagccttcagtgatcraataacttcagttaagaattcctggtttaagattttacaggaatacattgaacatcaggtataattactttaaaaacaatttcaagaataggacaatttggatgca

SEQ ID NO: 514741 - DNA, 437 bp, Homo sapiens
caggcggataacctgagcacaggagttggaggctgcagtgaactatgattgcaccactgcacaagagcctggacaacagagtgagacttgtctttaaaacacaagattggtcttcaaagagaataacatctgcggtgtcttgtgaggatggatgaggggctgccaagttcgcaatgaatgtgtcccatttcttyttagtttatggacttaccataaactgaagatagcagtttggtgggttggagaagcatgtggtaatggtgggaattataatacattacttacagggaaagacaggcctttgaaaggtaaagcgtaagagtgagaatggaatacggatgaatgaatgaacaagatgaggtgagaaggaagaggtaaagggaaaaggagaacaggaagctgtcctctgcgtggcacctgtgataaatggtttctgg

SEQ ID NO: 514742 - DNA, 565 bp, Homo sapiens
tacacgacacccaccacctacatcgatgacatcaccgtcaccaccagcgtggagcaagacagtggtgagggcttctggtaggatcctctctcagcggggcccagggtggctctgtttgttccctgtttggaaagctctcccaggaaaaaggtgctcccagcatctctacaccctcacagattcccttccacctatgaagctaaaattcagcctgtgtgagcggatacgggctcccaaaatcacccgtgtggttgacctcgctaggagaagaggggtctggcctaacgtcacacagctcggggtggcaatcctgtcccttctctatggtgctactctcactccatctccccttgctacacatcgtgctcaaggaacaggcagcttcggtggggggggcgccgggcatggtggcttatgcctgtcatccagcactttgcaaggaggccctggtataaggatcacttgaggccagtagttcaagagcagcctgggcaacatagygaggccatcaccacaaaaaattaaaaaattagccagggatggtgatgtgtgccggtagtcccag

SEQ ID NO: 514743 - DNA, 590 bp, Homo sapiens
tggccacccagtttgagaactggtataagaagtatcagaagcccattattcagagcgagtatggagcagaaacgattgcagggtttcaccaggtaagcagtgttgagctttctgcttgtgtgttctctcagggcagagatgtcactcacctcctccagcctgacctgcgcccactgcactgctcccctcgcttcagctttgggctctcctcccacggccccgtccacgttccctcaccgccarcagccaggcctgtgccccactcacttggtcctcagaggtggcctccttactggctttgtttccagatagcctcctatcacccgtgcccaagtggtctttctaacagatccaaatttgtatttgtttttgagaccggatctctctgtcacccaggctggagtgtggtggtgcgatcactgctcactgcagccttaacctcctgggctcaagtgatcctcccacctcagcctcctgagtagctgggaccataggcacatgccaacacgcctggctaatttttttacttttgtagagatggggtcttgccatgttgcccagactggtcttgaactcctggcctcaagtga

SEQ ID NO: 514744 - DNA, 590 bp, Homo sapiens
tggccacccagtttgagaactggtataagaagtatcagaagcccattattcagagcgagtatggagcagaaacgattgcagggtttcaccaggtaagcagtgttgagctttctgcttgtgtgttctctcagggcagagatgtcactcacctcctccagcctgacctgcgcccactgcactgctcccctcgcttcagctttgggctctcctcccacggccccgtccacgttccctcaccgccaacagccaggcctgtgccccactcrcttggtcctcagaggtggcctccttactggctttgtttccagatagcctcctatcacccgtgcccaagtggtctttctaacagatccaaatttgtatttgtttttgagaccggatctctctgtcacccaggctggagtgtggtggtgcgatcactgctcactgcagccttaacctcctgggctcaagtgatcctcccacctcagcctcctgagtagctgggaccataggcacatgccaacacgcctggctaatttttttacttttgtagagatggggtcttgccatgttgcccagactggtcttgaactcctggcctcaagtga

SEQ ID NO: 514745 - DNA, 496 bp, Homo sapiens
aaatagaatttttgagggggatggggatggggaccagggaatggctctaactactctgcaggtgattcacatgtgcagtcagggctgcaaatttttgaattaacaaaaatgatctctattaacaattatgaactgaatatctcatatgggccagacaatatatgattgtctcatgtaagtctcacaagtcttcaaggctcaaacataagtggtagagccagggatttctagtcaatggtctcggacactaagtccttcccactataagcttggtactccagtgatggtttgaggagcagcagcacccctcgggagcttgttagaactgcatcgcaggccactatgtcagtctgcagtttaacaagatccccaggtgattcatgtgtacattagagtttgagaagccttgaattatgccactctgatgtaatgtggacccaaatcacatttgggtcccttkgtgagccaagggcaatgtttattttacagaatcctt

SEQ ID NO: 514746 - DNA, 636 bp, Homo sapiens
atgggcgggtggggaagataaaaagaaaatggcgcagggaggtttagttcaaaaatccagtattctatatcaaaatatttgagacgccttgaaagcaaaccacagtraaagaaacactaacatctttaagtttataatagggaaaataaatgagacaggcacaactcgttattgaggaaaaaatgtttttattcctatctcacaccatccataaagtcttcctgcacaaaactcagaaacctcaaagaaaaagtggacagatttcaaatagtatcaattaaaactttcataacagagcaaaaagacaagtaaccaaataaaagtacttgtaacatatattacaaaggatgaactggataatagagggcttctgtaactcgttaagaatataaggaatcctttagaaaaataggctaaggagatgaataggcaattcagaagtatgacaatcaatgagcatgagaaaaactgttcaattaaagtaagatttattttttccctaatctgaatgtcaaaagtttaaatgattacattaaatgtggactagggtaggggcccccaaccccaaggacacagactggagcccacagaaggagatgagcagtgagcaagcagcaaagcttcatctgtatttac

SEQ ID NO: 514747 - DNA, 513 bp, Homo sapiens
aacactaacatctttaagtttataatagggaaaataaatgagacaggcacaactcgttattgaggaaaaaatgtttttattcctatctcacaccatccataaagtcttcctrcacaaaactcagaaacctcaaagaaaaagtggacagatttcaaatagtatcaattaaaactttcataacagagcaaaaagacaagtaaccaaataaaagtacttgtaacatatattacaaaggatgaactggataatagagggcttctgtaactcgttaagaatataaggaatcctttagaaaaataggctaaggagatgaataggcaattcagaagtatgacaatcaatgagcatgagaaaaactgttcaattaaagtaagatttattttttccctaatctgaatgtcaaaagtttaaatgattacattaaatgtggactagggtaggggcccccaaccccaaggacacagactggagcccacagaaggagatgagcagtgagcaagcagcaaagcttca

SEQ ID NO: 514748 - DNA, 636 bp, Homo sapiens
atgggcgggtggggaagataaaaagaaaatggcgcagggaggtttagttcaaaaatccagtattctatatcaaaatatttgagacgccttgaaagcaaaccacagtaaaagaaacactaacatctttaagtttataatagggaaaataaatgagacaggcacaactcgttattgaggaaaaaatgtttttattcctatctcacaccatccataaagtcttcctgcacaaaactcagaaacctcaaagaaaaagtggacagatttcaaatagtatcaattaaaactttcataacagagcaaaaagacaagtaaccaaataaaagtacttgtaacatatattacaaaggatgaactggataatagagggcttctgtaactcgttaagaatataaggaatcstttagaaaaataggctaaggagatgaataggcaattcagaagtatgacaatcaatgagcatgagaaaaactgttcaattaaagtaagatttattttttccctaatctgaatgtcaaaagtttaaatgattacattaaatgtggactagggtaggggcccccaaccccaaggacacagactggagcccacagaaggagatgagcagtgagcaagcagcaaagcttcatctgtatttac

SEQ ID NO: 514749 - DNA, 609 bp, Homo sapiens
gtatacaactccagaagatagaatttattcctgtttcatctttgtgtgcacttttccccatggttaaccagtgcattgcactagaaggctcagtgtttgttgaataaataatcccagaaataactagaaaatagtgcagaacagtgaagagagagcttaagtagagatcaggaaagatacagcatcttcttcctttctttactatgttgagatactctctgagcattgttttccttatttgaaaaatgaagagtcaaaatgccttaagtacctttcagttcagaaattctttgctttgagagtaaatatacttaagattgagtgctagaattcagaattttgcagtgcaagttaaaaaataattctatctttggggagaaaaaaaatggggttatattttatttattttttatactctgtcagtagactaaagggggtctttaattagtaaaattgtacatttcaawatgttcatgcttgcacacagaaaggtgctgagtacctgccatggctgtactgcaatgtctattgtaaatgttagctctttggggggcaagcatacccacattcatatggcatttcctaagcctgttttccttctcagggtta

SEQ ID NO: 514750 - DNA, 398 bp, Homo sapiens
cctcaaacctgaagtgttttatgccatccttggtaggttgtgagagatattttggaagcacctttttagaagctctgttaattgaaactattcctcaagctttgcaataaatgcagaaagtttcagtgctccctcacatcctggaagctgactgtagcctgtagagggctactgggttaagccctctacaaaggtgmcgatagagtccagttcaggaagccatcttctggccaggtagggtggacatgggcacactggagccagagggaggtcaaaagagggtagtgagtgtaggggccagaaatgattatccaagagtaaattgaggtccagaagctgttcagaggcacaggagccctttttcatcttgtctttgttcctgttgatagtgaatatac

SEQ ID NO: 514751 - DNA, 398 bp, Homo sapiens
cctcaaacctgaagtgttttatgccatccttggtaggttgtgagagatattttggaagcacctttttagaagctctgttaattgaaactattcctcaagctttgcaataaatgcagaaagtttcagtgctccctcacatcctggaagctgactgtagcctgtagagggctactgggttaagccctctacaaaggtgacgatagagtccagttcaggaagccatcttctggccaggtagggtggacatgggcacactggagccagagggaggtcaaaagagggtagtgagtgtaggggccagaaatkattatccaagagtaaattgaggtccagaagctgttcagaggcacaggagccctttttcatcttgtctttgttcctgttgatagtgaatatac

SEQ ID NO: 514752 - DNA, 596 bp, Homo sapiens
gataagtataattaaagtatccactgycaatattttctttgtgaattaaatagcttaatatagtttattattttagtttgtatttctttgttgctgagactaaatattttttcatatgctaaatgttatagaacaagttctacctttgtatttattttacttctccatttttctgtttgcatgttctccattttcctattgattggtaagtgccctttaaattaacgtatagtgaaattgactttttggggtgtattagttcattttcatgctgctgataaagacatacccgagactgggaagaaaaagaggtttaattggacctacagttccacatggctggggaagcctcagaatcatggcaggaggcgaaaggcacttcttacatggcagcagcaaaaaatgaggaagaagtaaaagcagaaacccctgataaacccatcagatcttgtgagacttattaactaccatgagaatagcatgagaaagaccagccacaatcaacagaactgaaatagtaagtattggtgaggctgtgaagaaattggaatccttgttcattgctggttcttcgctggtgggaatgtaaaatggtt

SEQ ID NO: 514753 - DNA, 605 bp, Homo sapiens
ttacttcatatttttgcaacaagttagcagaacacaaccttctagggtctcaatgtcttgtcttcaggatgcaggacaattgtcttctggctgtaagtaagcttgtaagtcattctgatcaaatcatctccatcctttttttttttccaatggatgctgtgaatacattaccatctccaaatgtaatgtcaattcatatttttattttctttgtagcagttcttgctttcagtattgtgtttttgcagggcataaaaattaataaaaattttatttttgttagagtgtaactttaatccatagaaaatgttcatttttaatttttcctctttgaaatcacttgcatcccttattaatgctgatatgtctgcttttktgtttttgtattttttaaaataaaactttgttgattttgtcattttcaatgcttttatgtttagtttcaggtgtgtcttttataagcagcttatatccagatgtttttaacccaatctgacagcttctgtgagatggaaattcaatgcattcatatatactgtgatgattcaaatgtatttcttgctcttacccccttttaattttattttctatttttatgctttatt

SEQ ID NO: 514754 - DNA, 300 bp, Homo sapiens
tacacaaattatccaggcatggtggygggtgcctgtagtcccaactacttggaggctgaggcaggaaaatcacttgaacccaggaggtggaggctgcagtgagccaatattgtatcactgcattccagcctggttgacagagtaagactctatctcaaaaaaataaaataaaataaaataaaataaaataaaataaaataagaaaaagaaaaggaaaatattccatgtgccttgggtttagtgctcagaatctgattaccttgtagctgcttggtgctgcggtgtgccctgtcctggctg

SEQ ID NO: 514755 - DNA, 489 bp, Homo sapiens
tttattaaaatacaccacaagaagagtgaaaattggcccagagtgggaaaagctgttggccacacatgtaactgaccaagttyatatatctaaaacattgtgacatacagaaaatccgatagaaaaatacacaagaaaatggaatgagcacttcaaaataaaagcaaaaatcaaatgtttagttaatatatgcaaagctgcttaacatcattagtaatgaggaaaatgcaaatgaaaaccacaataatatattactatgcactcatcactttggaaaaaaatgtatctcataatatcaagtgttcctaaggatctagagcaatggaaactcatatactctaagtgatatgattttgacttgtctttatctacagcttggttttatctaagaaggttgaagctatgcatattctacgatacagcaattcctttcctagggtatgccagagaaactctcgcccagatatacatgtaaaggatgtttgtagt

SEQ ID NO: 514756 - DNA, 489 bp, Homo sapiens
tttattaaaatacaccacaagaagagtgaaaattggcccagagtgggaaaagctgttggccacacatgtaactgaccaagttcatatatctaaaacattgtgacatacagaaaatccgatagaaaaatacacaagaaaatggaatgagcacttcaaaataaaagcaaaaatcaaatgtttagttaatatatgcaaagctgcttaacatcattagtaatgaggaaaatgcaaatgaaaaccacaataatatattactatgcactcatcactttggaaaaaaawgtatctcataatatcaagtgttcctaaggatctagagcaatggaaactcatatactctaagtgatatgattttgacttgtctttatctacagcttggttttatctaagaaggttgaagctatgcatattctacgatacagcaattcctttcctagggtatgccagagaaactctcgcccagatatacatgtaaaggatgtttgtagt

SEQ ID NO: 514757 - DNA, 489 bp, Homo sapiens
tttattaaaatacaccacaagaagagtgaaaattggcccagagtgggaaaagctgttggccacacatgtaactgaccaagttcatatatctaaaacattgtgacatacagaaaatccgatagaaaaatacacaagaaaatggaatgagcacttcaaaataaaagcaaaaatcaaatgtttagttaatatatgcaaagctgcttaacatcattagtaatgaggaaaatgcaaatgaaaaccacaataatatattactatgcactcatcactttggaaaaaaatgtatytcataatatcaagtgttcctaaggatctagagcaatggaaactcatatactctaagtgatatgattttgacttgtctttatctacagcttggttttatctaagaaggttgaagctatgcatattctacgatacagcaattcctttcctagggtatgccagagaaactctcgcccagatatacatgtaaaggatgtttgtagt

SEQ ID NO: 514758 - DNA, 597 bp, Homo sapiens
tctatctttagagaattttggaacttacctagtttactgtagttttctgtctaccggttgaacctgtgccttactctacagcctaccctgaagggtgacggccacagagaaagtgctcagtaaacactttgtgggaaattaatgctcctcktccagcctgtgttgaccagctttgtccctgtcttggcctgggtgacaatgctcaagcccaaccctggccctgctcagctccatccctgcaccaacgtattcagattccctgtgacactggtggcttctcactgtcaagtttgctccttttgtctgatagctgcatctggccccctgccctatcttcaaagccctcaggccataggaggttaggtttcaacaaatagagacatctgggtgtcaggggaagctaaacagcagagagaacaaatgtgctggggaggaagggtaaaagttctcaaggatctgagagtggatgtctctctggggcacagggcataggcactcatgggcatgggggagagggggtgtcaggaggagaggaaggataaagcccaggacagatgaggccaattcatttattccataaatacttcttgagcacct

SEQ ID NO: 514759 - DNA, 597 bp, Homo sapiens
tctatctttagagaattttggaacttacctagtttactgtagttttctgtctaccggttgaacctgtgccttactctacagcctaccctgaagggtgacggccacagagaaagtgctcagtaaacactttgtgggaaattaatgctcctcgtccagcctgtgttgaccagctttgtccctgtcttggcctgggtgacaatgctcaagcccaaccctggccctgctcagctccatccctgcaccarcgtattcagattccctgtgacactggtggcttctcactgtcaagtttgctccttttgtctgatagctgcatctggccccctgccctatcttcaaagccctcaggccataggaggttaggtttcaacaaatagagacatctgggtgtcaggggaagctaaacagcagagagaacaaatgtgctggggaggaagggtaaaagttctcaaggatctgagagtggatgtctctctggggcacagggcataggcactcatgggcatgggggagagggggtgtcaggaggagaggaaggataaagcccaggacagatgaggccaattcatttattccataaatacttcttgagcacct

SEQ ID NO: 514760 - DNA, 597 bp, Homo sapiens
tctatctttagagaattttggaacttacctagtttactgtagttttctgtctaccggttgaacctgtgccttactctacagcctaccctgaagggtgacggccacagagaaagtgctcagtaaacactttgtgggaaattaatgctcctcgtccagcctgtgttgaccagctttgtccctgtcttggcctgggtgacaatgctcaagcccaaccctggccctgctcagctccatccctgcaccaacgtattcagattccctgtgacactggtggcttctcactgtcaagtttgctccttttgtctgatagctgcatctggccccctgccctatcttcaaagccctcaggccatrggaggttaggtttcaacaaatagagacatctgggtgtcaggggaagctaaacagcagagagaacaaatgtgctggggaggaagggtaaaagttctcaaggatctgagagtggatgtctctctggggcacagggcataggcactcatgggcatgggggagagggggtgtcaggaggagaggaaggataaagcccaggacagatgaggccaattcatttattccataaatacttcttgagcacct

SEQ ID NO: 514761 - DNA, 541 bp, Homo sapiens
agtttgcagacagcaagctatagagagcatatgtgaaaggatcatgggagattaaacaggtctgccagtcctgggggccagccaacacttctgttaacctcttttccctctgaagaaacagagaaatgagtcccacacttggtgaggagagctgagctgtttgtgtgtcttacttttgccaccgtgaggttcaagaacacctcggccagagtgaygccgaaaacatctcatgtagaactgggttcctttgctcacatttttaatcttattcacaatcaaaccttattcatgaagacttcactaatttagactttctgttttaagaaatgaaatattcacagtttgtgagcaaatagatctgctcattggatggtgctggtcgtgttggaatgagtccggggctaaaggtcgggagacaagaagcccataatagctccctggtctttttgcatgctcaggacttttgggcaatactcccgagcacacacgaagtccagggagccattctgcaagctggtctttagaatagcttgtttatccc

SEQ ID NO: 514762 - DNA, 429 bp, Homo sapiens
ttgcagtaagctgagatcgcgccactgcactccagcgtgggcaacacagtgagactctgtctcaaaaagaaaaaaaaaaaagaaaattgtcaaaacacaaccaayagataatgttaacatgcattctaacatgcaatttattggatttagcgaatagaatgtgagtggaagttacttttggtagaactgttgggaaaagggcttgtggagtgcctgcataaactggccataaaaatatgggacaataagttgtggaaagccacaagaggcctctgaggaggaaagcctcctaattgccatcacgttcctatgaccagagtgtgacctgctctcttatctataaacactgtgctcaaggagaaagacactcctttgaagcattggaatgtggccagatatgctggcttctagttaggcccactccccaca

SEQ ID NO: 514763 - DNA, 526 bp, Homo sapiens
cctgcgatcacaaggcagcatcttcgggccctcgtcggcacgatccgctcccagagagcattcgcgcacaatcttatcccatccacgattttgattccttttctcccacttcttcaaccctatccgggacgagaccatcaggtcccacctccaccttcaccttcattttccgcgcaatgcagactgagccctggactcacccatatacagattgaattgtcyggtcagtgtttcatcccctctgcattctgagggcgagttagcatctgggtgcatgagttccaaactaacagccaggaccaggcttggagccaagaatcctttggctcgcatcgtggctgggttgaccgcttttctgccctggactacatttcccatcggttctaccgttcggagctacttccgccgagaaccggaagcacgttttcctgtgtcttaccccagataacagagctgccagggataatcaggcctgaccactctagcgggcgagccggccccatagcgagccgctcggcatgagggc

SEQ ID NO: 514764 - DNA, 631 bp, Homo sapiens
cttaagcagtcgttgtatttattacttcccataaattccctgaatagtcagaaggaagcattcgatgctgtgtttggtttgcagmcaagccattcagcaaaattctgttcagacatcctctatgaacatgtaagcaaaataaagtaaatatcttttaagcttattatcaacagaagtgttcttatcaatgcattagcaagaataataaaagcaacgcacattcagaccaaaggcacggagctcagccatggcctctagaagctcttttcataaatcaattcataatctttttacaattgagtatccaattaactgtaaataaaacctcagagatgcttcaaaattctttcttcccccagaattgacagttagaaataactttctgataacaatcataactggcttttaccatttagtacagaaggcttgactatggttaaaaggtttaatttttatgtttcaatggtcgcaaagtcaaaaacatggatttatctacaacagcaaagctagctataaattctattaccagtgatagcaattttccttcaaataccctaggctaaatgtaactttattgctacttctagtagaaacttccaggcaatttccattttacagtgatcatgagtta

SEQ ID NO: 514765 - DNA, 631 bp, Homo sapiens
cttaagcagtcgttgtatttattacttcccataaattccctgaatagtcagaaggaagcattcgatgctgtgtttggtttgcagccaagccattcagcaaaattctgttcagacatcctctatgaacatgtaagcaaaataaagtaaatatcttttaagcttattatcaacagaagtgttcttatcaatgcattagcaagaataataaaagcaacgcacattcagaccaaaggcacggagctcagccatggcctctagaagctcttttcataaatcaattcataatctttttacaattgagtatccaattaactgtaaataaaacctcagagatgcttcaaaattctttcttcccccagaattgacagttagaaataactttctgataacaatcataactggcttttaccatttagtacagaaggcttgactatggttaaaaggtttaatttttatgtttcaatggtcgcaaagtcaaaaacatggatttatctacaayagcaaagctagctataaattctattaccagtgatagcaattttccttcaaataccctaggctaaatgtaactttattgctacttctagtagaaacttccaggcaatttccattttacagtgatcatgagtta

SEQ ID NO: 514766 - DNA, 640 bp, Homo sapiens
ttacagggagtgcagtgtggaatgggagaagtaaaaaaaaaaaatgagtagctttacttggaagaaactaaagataatacctcattcagcccagtattcgaagttaacatagacagtggaatcatgtgtgccttgatatgatgtgataaaaatgacactttgactttgggattttctttcccacactaatcagtccagtcaaatcatgagaaaaacatcagacaaatctcaactgagggatattctacataacatctgatatgtactccttaatactgtcaaaatcatcagaaaaaaaatctgaaaaactgtcacaaccatgaasagtctaagagtcatgataactaaatgtaatgtggtttctcagatgggatcctggaattgaaaaggcacagtaggtaaaaaccgaggaaatttgagtgaactctaatttgaagttgaacacaaaggaggtatataaatgtaaacaggtttttgggtgagttgaaaggatattgaggcaactcccaattgaaattgtattgttttccttgtgagataaaaataaaatcaactactaaaaatgaaaatggagtccaaaaatttaggatagtactgaatttgaaagaaaaaaaagcgcaaaatgtgatggcacatttat

SEQ ID NO: 514767 - DNA, 640 bp, Homo sapiens
ttacagggagtgcagtgtggaatgggagaagtaaaaaaaaaaaatgagtagctttacttggaagaaactaaagataatacctcattcagcccagtattcgaagttaacatagacagtggaatcatgtgtgccttgatatgatgtgataaaaatgacactttgactttgggattttctttcccacactaatcagtccagtcaaatcatgagaaaaacatcagacaaatctcaactgagggatattctacataacatctgatatgtactccttaatactgtcaaaatcatcagaaaaaaaatctgaaaaactgtcacaaccatgaacagtctaagagtcatgataactaaatgtaatgtggtttctcagatgggatcctggaattgaaaaggcacagtaggtaaaaaccgaggaaatttgagtgaactctaatttgaagttgaacacaaaggaggtatataartgtaaacaggtttttgggtgagttgaaaggatattgaggcaactcccaattgaaattgtattgttttccttgtgagataaaaataaaatcaactactaaaaatgaaaatggagtccaaaaatttaggatagtactgaatttgaaagaaaaaaaagcgcaaaatgtgatggcacatttat

SEQ ID NO: 514768 - DNA, 640 bp, Homo sapiens
ttacagggagtgcagtgtggaatgggagaagtaaaaaaaaaaaatgagtagctttacttggaagaaactaaagataatacctcattcagcccagtattcgaagttaacatagacagtggaatcatgtgtgccttgatatgatgtgataaaaatgacactttgactttgggattttctttcccacactaatcagtccagtcaaatcatgagaaaaacatcagacaaatctcaactgagggatattctacataacatctgatatgtactccttaatactgtcaaaatcatcagaaaaaaaatctgaaaaactgtcacaaccatgaacagtctaagagtcatgataactaaatgtaatgtggtttctcagatgggatcctggaattgaaaaggcacagtaggtaaaaaccgaggaaatttgagtgaactctaatttgaagttgaacacaaaggaggtatataaatgtaaacaggtttttgggtgagttgaaaggatattgaggcaactcccaattgaamttgtattgttttccttgtgagataaaaataaaatcaactactaaaaatgaaaatggagtccaaaaatttaggatagtactgaatttgaaagaaaaaaaagcgcaaaatgtgatggcacatttat

SEQ ID NO: 514769 - DNA, 412 bp, Homo sapiens
caaaaatgatatattggaaaaataaattaataagttagctaatttctgtaaggaagagttcctacaaatcaatcagaaatgcattttaaaaaattaaaatgagcaaagatgacagtagaagcttcacagaaaaagaaatataaatggttataaaaatataaaattatcaactttcttcataagagaaataccaaattaaaaaaatgagaattcttttaggcctgtcagaattgaaagatcagagagtcatattattttgtgttgggaaaatagcattcttttatgatgtagctcccagcaaagcytgtgccttaataaaggttgccaggcaaggctgtgagttgggctgaaattcagccaatgtgtagctctttaagccttgccatcaggactaatccatctatttcagggg

SEQ ID NO: 514770 - DNA, 541 bp, Homo sapiens
atcttagatatctgaagtacagaattgctactgatcacattactcaaaagtaaaaaaatatattttccccatggaagccaaaatattattaaagtcaccracatgagtacgtatgattgcttttctgcctactcccaagagactaggcaaaagaaatactttcttaatggcaatgtgtcatacattcaaatttaaggatttgttcatttgtttctgtgtataacaacacaagatagatttgtaacaaattaaacctatgaagaattaatttattaaagttacagcctaagtttttattataaaatgaaaaatttacccttatgaatataacgtttgtattcagagatagtaaaagcactcccaaaatggcaaattttatatttctaaaaccactgcaaatttatttctagtttaacgtcttagaaaaaagatcccaatttggagatatacttcagggatttggtgatacatttgcatttttcagaagacacgaatagatgaattctaattttgaaacaccataatcctatataaaatcatg

SEQ ID NO: 514771 - DNA, 450 bp, Homo sapiens
aaaacatgcatgtaaaacactttgcattaaagcttctgagtccggaactttttttgtccccactccagaataatgccttcatttaaaattagagggctggctgggcgcggtggctcacgcctgtaatccctgcactttgggaggccgaggtgggcggatcatgaggtcaggagttcaagaccagcctgaccaacatggagaaacccatctctactaaaaatacaaaaattagctgggcatggtggygcctgcctgtaatcgtagctactcaggaggctgaggcagtagaatcacttgaacctgggaggcggaggttgcagtgagccgagatgggccattgcactctagtctgggcgacagggcgagattcctctcaaaacaaaaaacaaaaaacaaaattaaaataaacaaataaataaataaaattaaaggtctatcagcaccataaga

SEQ ID NO: 514772 - DNA, 633 bp, Homo sapiens
tttgactggatatagaattctttacttgcatctttcttccttgagcttcttgatggtggtattccacagttgtttaatgaaacagctggtatcatactgattttctttcccttctcagtaatgtgccttcttgcctggaggcccttgaggtatttttccctttacatttatgtctactaactttgcttgggtagtttttagaactgacaattttgaatctatttcctcaagtatatagtggattcttctcatatgtagttaagtctcttatttaacagatattgttcttcagttacagttttaaatattagttctctcattgttttgttttctcttcactgattctaagcatgtattttagctatcttcccccatattctatgtctgtcacaaaatttatatcagagrttgtgtacttccttttactgtatttttattttcttaataatttacattcttattgttcatccccctttggtacttttcataatatctactctactttggggtctttgcagttgagttattctttctgagatacttttgcctgttttgttttttgatttatagtaagaattttgttgactcacttttcactctcttctagttgttcatttccatgctgagttttga

SEQ ID NO: 514773 - DNA, 633 bp, Homo sapiens
tttgactggatatagaattctttacttgcatctttcttccttgagcttcttgatggtggtattccacagttgtttaatgaaacagctggtatcatactgattttctttcccttctcagtaatgtgccttcttgcctggaggcccttgaggtatttttccctttacatttatgtctactaactttgcttgggtagtttttagaactgacaattttgaatctatttcctcaagtatatagtggattcttctcatatgtagttaagtctcttatttaacagatattgttcttcagttacagttttaaatattagttctctcattgttttgttttctcttcactgattctaagcatgtattttagctatcttcccccatattctatgtctgtcacaaaatttatatcagaggttgtgtacttccttttactgtatttttattttcttaatamtttacattcttattgttcatccccctttggtacttttcataatatctactctactttggggtctttgcagttgagttattctttctgagatacttttgcctgttttgttttttgatttatagtaagaattttgttgactcacttttcactctcttctagttgttcatttccatgctgagttttga

SEQ ID NO: 514774 - DNA, 633 bp, Homo sapiens
tttgactggatatagaattctttacttgcatctttcttccttgagcttcttgatggtggtattccacagttgtttaatgaaacagctggtatcatactgattttctttcccttctcagtaatgtgccttcttgcctggaggcccttgaggtatttttccctttacatttatgtctactaactttgcttgggtagtttttagaactgacaattttgaatctatttcctcaagtatatagtggattcttctcatatgtagttaagtctcttatttaacagatattgttcttcagttacagttttaaatattagttctctcattgttttgttttctcttcactgattctaagcatgtattttagctatcttcccccatattctatgtctgtcacaaaatttatatcagaggttgtgtacttccttttactgtatttttattttcttaataatttacattcttattgttcatccccctttggtacttttcataatatctactctactttggggtctttgcagttgagttattstttctgagatacttttgcctgttttgttttttgatttatagtaagaattttgttgactcacttttcactctcttctagttgttcatttccatgctgagttttga

SEQ ID NO: 514775 - DNA, 556 bp, Homo sapiens
gcatccaaagcttcaaggcagaggtggcagaggtcacatccattctcattttactttctgaagtgtatcacatggccaagcccaatgcgggtgagttaggaagttacacttcctcctgtgggaggtgagaataagtatgtgtttaaacaaaacaaaacaaaacaaaacaaaacaaaacacatttacccaaaaatcgtggggaaaaaatgaagatgccactaaaaggccaaagtaagaaactaacaatgtagactgtacttaattatctaggaagatttcacaaaaagagaacttaacacgttgaaaactaatgaatcatcttcttagcctccagctctatcaatccataaataatgccaaytcatacaaaatcttgtatatctaccacttctccttgattcctacagccacactcctggtctaggctcacagtacctcttgcctggtcctctagaatagtcttaatgcttctacttggcctccctccaggtgatcatcctattgttgccctagtaatttctccattaagaactctgaaaatgtctttcactgactc

SEQ ID NO: 514776 - DNA, 279 bp, Homo sapiens
aaggataatactgcctaaatcctagggttttgataaaattaaagcaattaatacaaatgaaggtgtcagaagagtgcccagcatagagcgagtgtacagaaaatttattagctctggtgatttgtaaagttttttagatcaggaccaatgttaagcctgggatcaacaaggtggccacaccagggggttgtaatttatgttcattttaattggtcagtttgggaytataatagtcgatggatatttttaatactatccttggcaaattttcatatattc

SEQ ID NO: 514777 - DNA, 584 bp, Homo sapiens
gctgctgtgcacagagcaggagctccttgcaatttggtgtcttctggttagattttgtggctctgaccctcctctgctctcccattcctggtagtatctgctgggttgtgtggtttgttccactttttttcctgttagcctgttgtttaactgtatttcccagggtctttagggattctacccttactagactagtgactggacattggccaggtacttatcttgctagagcccccatgctcattctctccagtggagctgtgaagrattcaacttacttgtcagtcttctcattcggatattgctggactctttatgaatctgggaattgtgtctttggtctcatcaatattatctcttttatatattttgaagtctgatacctttttgttttgttttgttttgtttgacacagagtcttgctctgttgcccaggctggagtgcagtggcaggatcttggctcactgcaacctctgcctcctgggttcaagtgattctcctacctcagcctcctggagtacctaagaccataggtgcccaccactaccatgcccagctaatttttgtatttttagtagagaca

SEQ ID NO: 514778 - DNA, 584 bp, Homo sapiens
gctgctgtgcacagagcaggagctccttgcaatttggtgtcttctggttagattttgtggctctgaccctcctctgctctcccattcctggtagtatctgctgggttgtgtggtttgttccactttttttcctgttagcctgttgtttaactgtatttcccagggtctttagggattctacccttactagactagtgactggacattggccaggtacttatcttgctagagcccccatgctcattctctccagtggagctgtgaagaattcaacttacttgtcagtcttctcattcggatattgctggactctttatgaatctgggaattgtgtctttggtctcatcaatrttatctcttttatatattttgaagtctgatacctttttgttttgttttgttttgtttgacacagagtcttgctctgttgcccaggctggagtgcagtggcaggatcttggctcactgcaacctctgcctcctgggttcaagtgattctcctacctcagcctcctggagtacctaagaccataggtgcccaccactaccatgcccagctaatttttgtatttttagtagagaca

SEQ ID NO: 514779 - DNA, 584 bp, Homo sapiens
gctgctgtgcacagagcaggagctccttgcaatttggtgtcttctggttagattttgtggctctgaccctcctctgctctcccattcctggtagtatctgctgggttgtgtggtttgttccactttttttcctgttagcctgttgtttaactgtatttcccagggtctttagggattctacccttactagactagtgactggacattggccaggtacttatcttgctagagcccccatgctcattctctccagtggagctgtgaagaattcaacttacttgtcagtcttctcattcggatattgctggactctttatgaatctgggaattgtgtctttggtctcatcaatatyatctcttttatatattttgaagtctgatacctttttgttttgttttgttttgtttgacacagagtcttgctctgttgcccaggctggagtgcagtggcaggatcttggctcactgcaacctctgcctcctgggttcaagtgattctcctacctcagcctcctggagtacctaagaccataggtgcccaccactaccatgcccagctaatttttgtatttttagtagagaca

SEQ ID NO: 514780 - DNA, 638 bp, Homo sapiens
aatgaagtcacatcacctacataatgaacccagaaataagtcacaatgctctttgtaggcaggtaccaggcaggggagtcacagcacctgggtggatgctggtcacagtgaaatgtaaaaatgcccttggcaggcagggcccaggaaggagtttcacgttacttaggtgggtggcccaggtatatgtcacaattttatstgtgggctgggcctaggaaacagtcagatcactcaggttctgggcaaaggtatatttcccaatcacacacttgggaatgtacagaaatgagtttcacagtttcacacgagtcctggcttcatgtatgagaggcaacccctcctgtgagtggggttcaagtaaaggagttacagtctcaacaatgcacaaatccatgcacaacagccccaatctcacctgcagattgtgttctgatagggaactcacagcctcacaggtctgctgaatcatggtttgagagtcaccaaaccacctggaaaccagatccacatatgagagtaacaaatccaacttgcaactgtgtttatgtgtgagattaagtgccacattcataggctctgtttatgtgtaagaatgaagagcctgtaggctgggtctgcatatgagagtcacaatctca

SEQ ID NO: 514781 - DNA, 304 bp, Homo sapiens
gaggtttgtgagtcaacacctcctgtgagttgagtctacacatgcaattcacaatctcaacagtggacaggatccatacataagagcctcaactccacctgcgcacagtgtcttagtagggcagacacaccctagcaggagtgctgaagttttgtccaagagctgaggcaggagaactgcttgaacctggaaggcgaaggttgcagcgkgctgagatcatgccactgcactccagcctgagtgacagagcgagactctgtctcaaaaaaaaaaaaaaaaaaaaaaaaaaaaagagttataattt

SEQ ID NO: 514782 - DNA, 531 bp, Homo sapiens
gctggatgtgcatatgacagtcacaatgtcacctttgttctgggtcctgttatgacactgtatcacatgcgggcttcatacaatatgcctcagtatcataatacactatgtcctttatttaagtaggagacccaggaccttgcctgttgccctaagcctagatatcagagttaaaatctgttctcttagctggatccaagtatgagagtcatcatctcacctttgagctgtgaccatgtatgtgtcacaatacacctgtgggcaggaaccagacataagagtcatatcacctgggtgctgggtaagtgatataccataattcttactttgagaagagtccagacaacagaggagagacacatcacytttatgattggccaagtgatgggtgaaaatcctctctgagagcagggcccattcaggagagtcatatcacctagctgcttggccaagcaatatatatcacaatgccccctttgcacagggccaacacagtacagttccatgaccagggagctggttccagctata

SEQ ID NO: 514783 - DNA, 645 bp, Homo sapiens
catgagaaaactgaggcaaaggagaacaaactagcccaaaatctagagaggcacttgcaggaagagacaagacatgagcacttgtctacttgaggcagatgtacctggacactgactaacaagcatcgggtcacaaataacaatggactaccactgggagagttgaaagagcatggagacagaccactctggggcccagtaccacaggaagaccaaaagatgggaatggcaaaggcctttggcaagccagctccaaccctaaayacaaggcatcactagaggaatttgaagtctgggggtacactgagaataaccagaggaatgagaaccctcaaacccagttcatcttctgactagattgatcaatcttcacactaaaggcctggtaaaaagagaacggcgtgcccattcccatgcataaagcctatctccatatctaatgtcctatataagatgtctagttatcaacaaaaaaaaattatagggcatgagaaaagcaagaaaagatcatactgcgaaaagacattgcaatgaatagaaccagacctagatgctgaagctatcagacaaagaattttaaataaccaaaattaattataaaagtccgtagtggaaagggtagacaatctgaaagattaaatggaa

SEQ ID NO: 514784 - DNA, 535 bp, Homo sapiens
tgttcctcccagggcctccctaatcggccattttgccagtgctcatatctctcttttcacattaatgtcagaaagttcaaaagacttaaccagatgtttccctgctcagagttacagcagacagatattaagggggagaaaataagcttcaaatatcccatggggagagaataaagtggggtggggaaacctgcaaacatcgaggaagttaggcatttgaatctgtgagagcagcaacatgaacatgtgtaaaaaagaagtgtgggaaaccatrtggaaagtgactccagtacttcactacacaatacctacatagaagacaggattttgcattactcaaacaggaagtcttcactggaataccatacaaccattgggataaatgaactctcactataggcaacaacatgggtgaagcctcatataatgttgacctaaagaagtcagacactaaaaagtacatactctagggctatatgatatttatttaattttttagctaaaaaaaattaaatgtgttttaaaatgtgtacat

SEQ ID NO: 514785 - DNA, 617 bp, Homo sapiens
ctgtaactcgggatcaggggatggacagatggggcaagaagcccttcctacaaaatggtgccttaaggggatctattcctccacatgctgccaatcaaatatggaatcctctgaggtgccctgtgaattattacagaggcatttgcaggttaatttaaaggaaggggttcaaccatttcacgtaatccaccaccttcctttctaggattctttccatggagacagtgagcttcttcttgccttctttctccccttctgcatagctgctccttacactcctccccacctaggattctgcacaaacagccttactaaggagacagtgccagasgtgtcttcttccaagagctgtcttcctttcttctggaaggcataggagacaggccgtgtgaccccttactgcttttcccaccagtaaaacagtaattctatgtaatttctattctctcatctccttgcacatcattttcctctcttcttatgtcttttctccctttcatttaacaagttatgttcctgaccactagtgtcagctattaacctcaggaaaatatatgtcccctctcttcattctatgtatgggttgaaaagttagtccaatctccatgatttaacaa

SEQ ID NO: 514786 - DNA, 614 bp, Homo sapiens
acctttataatgcctttttttagtgccatacccttctcatatatgaattcagataatatagaactacattttcttctagttctttgatttcaattttgcatttaaatatttaatttattttggcctaccatgtaaggtagaaattcaatcaagttattactcaatgattagagtatcattcctgaatagtctcacttttattatatatgccttttcccscagacctttaattcattgtcactgatttaactttctattcttgtactgtgttacatcattacttcaaccattataacttaataatacatattcacatctgatggttcaaatggtaacatgtattttgatgttagacttttaatttaacgtgttatatattaggttgcaagtagagtaaaaaaaatgttttgtacaattgtaatactcactttccatttgcatcagctcattactgcccaaatatctgtgagagtgagcaaacaaggcagataccaaaaaaatgcaaataataaaacatctgtttcctttagctacttggatgtttcaaaggcaagtagcatagaagtctgaattatgtcaattaaattgtgctttcatattctttgcagttatag

SEQ ID NO: 514787 - DNA, 626 bp, Homo sapiens
tcaaagggccatgcaggttaagagccgtgcaagatccaaggagagataagtaacgtgaagtaagaggaagaagatcttaatggaaggagggtccatgtagggttaagtatggagttaatgggtggggtagattatgggactgaaataaaatgtgcctccacacaacttgattaaacgaaataggttctaaaagttttggattaaaagtaagttgctcaaaatagcaaatcccatttgaatgctgttttggggaaaaaataatgaccttcctcagttactasacgtctgaatttattaatttctttatttgtcctttattcaatgcccactatgtgccagacccagttctgggccttgggacacatcagtagattaatagactacctgctctcaaagagtgtgaattctgggtagtatccactgcctagatcataaatatactttatgatctcctgaatgcataaattagagttagtgaataaaacgtctttgtatttgttactacatttatttatctgtgagatagaggaatcaagagaaatgaatgaatactcattacatgtgtaatgtataccaagaattatgactttatactatatatttcagttaataatcagaaaaaaatg

SEQ ID NO: 514788 - DNA, 669 bp, Homo sapiens
gccagactcatcagaacaggaagacttgaccaatgtaatacaaagaagcttcttcacccagacccaagggctctgtctgcaggatacctggagaggacttgggaagtagaaagagcccaggtttggggaccaggaggagattcatctctcaagcttagccctgctaccaactggccaggtgtccatgggtaaatacctttctctctctagatatttttagtttgttgttagtccataagatccataagatcaagagttcaaattatataaatcataagatctggatctcttgtatctgccttttttcttttcagcaaatagtgttgtgcctaccatgggggggatgaaaacttaacacagctgtgggctgagtatttactggatgtgtttattcatgatttaacttaatatcttctctttccctcccttcctctctttctttctcctctctttgtctctgtctctgttttgaaaacttaaaaatcttatacggaatacgtaccccatccataatgcttacatgttgggctatgtgggcttccagaaggcaactcataggrcaaataccaacaacctgattccaggtgtcaggcttgtctgaggatggcaaactgaaacaaaccacagggctgggctcctcctttcctgtcactgcaggaatcagagtaa

SEQ ID NO: 514789 - DNA, 600 bp, Homo sapiens
gttttgttggtgctgctaagcgcatcctcctgggcccatccacttagtatttatgggcatcaactaaggattgaagacgggagattagaataaatgtaaatcttagtggatataagatttttgatgaaaatgtttaaacggtacttgtatgccacacaagaccaatggcaattttcatgttggtcgtaatgtttataaatttaggtatataaatgaaggagaaacgtagagtagaagaaaaaaagatctctgtctttacatataaaagggctgaaacaaataattactctttatgctttgtcagatggtttatagtttattatgatcaatgtaatctcattttttcaagcttttttttagcaatcccgaagtgcaggaagatacacgctgttgcaaaactgttaaatgactgaatcaggactccaagscatgttttctgacttcaagacctgtatttaaattcctatagtattcttggaaaatactagactcagggatgttttcacagagtaatatgttttgaaaaatgtgtctgcgaaactgccttaaaacttgctatctcctgcaagtcatctggagttcaccagaagtctacctttt

SEQ ID NO: 514790 - DNA, 475 bp, Homo sapiens
tgaaaagacatattattagagcttttccttataaagaaagctctcattctattgtaaaaaatgagcgtataaaaatacaatattatttatagagttatttatataagcagcattttgatgtgccttcctgaggcttggagatattagaaagcagaatatctgagaaaacatatttcacttcgttgtttaaatgcaatagagatcaagagattatcttcatcatgataagattcaaagaaatttacactggtaattggagcttgtccataraatttattccttattacaatatagactataggttgttacatttttttccttaagggaggtaaggttagatttttcactatttaggttgagactctttagttgataactgaaagttttcttttagcattcaatttgttcttgaattattttttatttcagcatatctttctaaaaattatgcatgatcagctcttttttttttcca

SEQ ID NO: 514791 - DNA, 629 bp, Homo sapiens
agtttgtgtgaaatactctctttctgaggccctagtcacttagaatttatctcagctctgaagcaatgactgttaataacctgaataattgtggaggcattcccctgtactaaaaattatacgcagactaaatcaccacaaytcgattatgatggatgcaattaaaataaattatgtaaatgtactataagaataattagaactagaaatgttgatgagttaattgccatgtctatgtacttatgacacagaaatcgaagaaatttggaaaaaatttagattatcttaaagataaaacagatcaaaaagcatgaaaaataattcggtaatggggacaagagaagtctcttcttgacattcactcaggactttgcaaaagagatgaaggtcgcacaattcactacatggaatttagggacttgacaacctgaaggctgagtgacaaagaggcttcgtacaaactaaaggatgaattaggagacagaagtggctttactgctcaataattagaactttgagggaaatctaaggtcagaaagtaatggttaacgtggattaatatatattcaaaaaacaaacttttaaaagaataggaaacataacatcagtgtgaactcaggcttttgtcc

SEQ ID NO: 514792 - DNA, 629 bp, Homo sapiens
agtttgtgtgaaatactctctttctgaggccctagtcacttagaatttatctcagctctgaagcaatgactgttaataacctgaataattgtggaggcattcccctgtactaaaaattatacgcagactaaatcaccacaactcgattatgatggatgcaattaaaataaattatgtaaatgtactataagaataattagaactagaaatgttgatgagttaattgccatgtctatgtacttatgacacagaaatcgaagaaatttggaaaaaatttagattatcttaaagataaaacagatcaaaaagcatgaaaaataattcggtaatggggacaagagaagtctcttcttgacattcactcaggactttgcaaaagagatgaaggtcgcacaattcactacatggaatttagggacttgacaacctgaaggctgagtgacaaagaggcttsgtacaaactaaaggatgaattaggagacagaagtggctttactgctcaataattagaactttgagggaaatctaaggtcagaaagtaatggttaacgtggattaatatatattcaaaaaacaaacttttaaaagaataggaaacataacatcagtgtgaactcaggcttttgtcc

SEQ ID NO: 514793 - DNA, 382 bp, Homo sapiens
ttcccagggcctggagctcacgacaccttgacaaatgatgcagcccagcaaagcaaatcrctattccaacaggagagatgtaggcttccccaggagggccgaacgcattttcacatgtttgtctgtagagctggtacagtccccagtcacagattcctacagtaagcaacagcattttattttcttataataacacttaatatatcttttttttttttttgtctagagacaaggtctcactcttgcccaggctggagtatagtagtgagatcatagcccactgcagcctccaactcctgggctcaagtgatcctcccatctcagcctcccaaagcgctgggattacaggcatgagcccaccctgtctggcccagcattctca

SEQ ID NO: 514794 - DNA, 382 bp, Homo sapiens
ttcccagggcctggagctcacgacaccttgacaaatgatgcagcccagcaaagcaaatcgctattccaacaggagagatgtaggcttccccaggagggccgaacgcattttcacatgtttgtctgtagagctggtacagtccccagtcacagattcctayagtaagcaacagcattttattttcttataataacacttaatatatcttttttttttttttgtctagagacaaggtctcactcttgcccaggctggagtatagtagtgagatcatagcccactgcagcctccaactcctgggctcaagtgatcctcccatctcagcctcccaaagcgctgggattacaggcatgagcccaccctgtctggcccagcattctca

SEQ ID NO: 514795 - DNA, 382 bp, Homo sapiens
ttcccagggcctggagctcacgacaccttgacaaatgatgcagcccagcaaagcaaatcgctattccaacaggagagatgtaggcttccccaggagggccgaacgcattttcacatgtttgtctgtagagctggtacagtccccagtcacagattcctacagtaagcaacagcattttattttcttataataacacttaatatatcttttttttttttttgtctagagacaaggtctcactcttgcccaggctggagtatagtagtgagatcatagcccactgcagcctccaactcctgggctcaagtgatcctcccatctcagcctcccaaagygctgggattacaggcatgagcccaccctgtctggcccagcattctca

SEQ ID NO: 514796 - DNA, 468 bp, Homo sapiens
agctgtttctgactttagaaaattcttccttaattcaaggcaaaactctgcctcttgtcatttccatttattgatcctgattctgtcctctagataggaaacaaaacaaagcttttccccatgaaagcttaggatgaaatgttcagtgttcttcataatcttcmagagctaaacctttttttttttttttttctccagacagtgtctcactctgtcacccaggctggagtgcagtggtgcgatttcagtcactgcaacctccacttcccgggttcaagcaattctcatgcctcagcctcttgagtagctggaattacaggtgcacgccactatgcccagctaatttttgtatttttagtagaaacagggtttcaccatgtggccaggctggtcttgaactcctgacttcaaatgatccacctgccttggcctcccaaagtgctgggattacagcgtgagcaccgcccc

SEQ ID NO: 514797 - DNA, 616 bp, Homo sapiens
tggtgtgaagtagttcttcaagctaactttggaatgcccttggccgagaggaggggtcgattcagatggttgggagacttggaattttattttcggtttacagtgctgatgttctgtttctcaacctgagtgttggttactcaagtggctgctttgtgctaagcctttgatctgtccatttcttgatttgtcaacacttctgtaggtgtgtggttgtacataatgtttaaaaaatgttttaaaaagagataacttgtaatcccagcactttgggaggccaaagcaggcagatcacgaggtcaagagatcaagaccatcctggccaacatgatgaaaccctatctctactgaaaaaaaaaaaagtacaaaaattagctgggcatggtggtgcatgcctgtagtcccagctactcaggaggctgaggcaggagaatggtatgaacctgggaggcagagcttgcgktgagccaagatcgcgccactgcactccagcctgggcaacagagtaagactccgtctcaaaacaaacaaacaaacaaacaaaaaacaacaactctgatccccggatgcttggggagactgatttgagtaataataaaactccggtctcccacac

SEQ ID NO: 514798 - DNA, 606 bp, Homo sapiens
aagaacatactgtccatatttctctacagtcattctttttccattaatttatcatgttatttcctatgtggagtttccatatacccaaggctatgttcctgagatttctatscagcttcaccctgttgaatacttggatttccaaactgaagatcatttttaattcaattctagaaaatgcctattaattactttttttttttccaaaaatagattttccataactcccactattcttttgttctggggcttctagaattcctactggctgaatgttgaaagatctcaagtcttccatgtcttctaactgctctttcctgttttacacatctttgcctctccatgatgcattttgtgtgaatttctcaattctatcttttaattaagtaatcctccttttgtttccattttgtataatttccagtgaccatgatttttcttttctgaaattgtgctactttaattgtatttgtttttgtatttacctgttttattagctctgctttttaaatttttgtaatgtcttgtttttccaaattgaaaacatatcttcatttttctatttgagcatcctaataatataaattttaaagtatttgtccagct

SEQ ID NO: 514799 - DNA, 608 bp, Homo sapiens
gcccagggagctaaaggtggccacatgactacagctctagccaatggggaaataagccagacggttactagggaagatttctcctctctgatagaaaggaggacattgatgagaatggttctttctttcagcatctgggtgatcgcccctccttcctaacttggtaagtgaagctcagagctgcaaccagcatcttgcagtcatgaaaatccatctgagaatcacagaaactcagattcagcacctgacatgtttgaggtgttgatccagctccataaccgcgtacttcccgacttgggctgtgtgaggtcatttctaatgcttttgttatttaaactctaggagtttcatgcatacatgtgttcattgcrgcactattcccaaaagcaaagacatagaaacaacctaaatgctcatcagcggtagactaggtaaagaaaatctgatacaggggccaggcgcagtggctcaggcctgcctggaatcccagcactttaggaggctaaggtggtaggactgcctgagcccaagagttcaagaccagcctgagcaacatggtgagacccctatctctatacaaaatttaaaagatgaaccaggcatggtgg

SEQ ID NO: 514800 - DNA, 618 bp, Homo sapiens
gttcctcaatggacaagagaaattttcttaaagagcaaaatgaagggtagccaaattgactgatgatgagtcaccccactgccagagaagggaattgttccttttccactacagcagaacatgtgaccacagcatgttatttctcctctctttttctataaggggagactttattgtggttatacagtatagragttatctgtttccttcaagtagcaatgcaaagcagagacttaagcaatgaagacatttaattacctcacattgagggatgtctggaggaaatgagttccagttttcgaaagtagttcaaggatatgatcaagagcaaagcccttcctacctgtctgctctggcattctcagtagattcgctttttgtctttagttgtataggattgatatgtagtcttaggagagatattctctctctgctggggtttccatgctggcaagatgtgaatctgaggcctttggagaaaactttcttaccacatggaagacagtttctgcagggccaggtcagcagtcaggaaaaagtcaagactcaaaaagaggaactgtaccatgacagcaccatctgagctcctacgtccaagcggcccagagtccacctcca

SEQ ID NO: 514801 - DNA, 646 bp, Homo sapiens
ttcctgtccttgtaatactctcggtagcattaggagtggtattcccatcctgtcaaactgtgtgcacctcttttgctgaatattcattagatttcagttacacatgctatgggatttcaaagatctgtaatgattgaaaaaattcatatacctattttggataattcatgttgagtattaaataggaaatgaaataaaaakattatttctcttttattaactcattaagactattgtctaatacagtaaagaattttaaataaaatatgcaactgggggaaaactaaagcaaacagagttttgccatagctttataatggtgtgtaaactcagtttgtcacaaaaggcatttcattagaggagaatgtgcacatcaaatatattctaaaactgagaagtggaaattccccattttatacaaggcaatctaaaaatgtaaggaaatagagattttgagcaatataactgatatgtagatgagaaatatttcaaccttgtacttcataaaagatatacattttcaaattgaccattataaaaaccaattaccctgccatgaggaagcccaaacatcttgtaaaaagacccacatcaagaaaaatgggaactctcagtccatagctccatctgagctctcagaggccag

SEQ ID NO: 514802 - DNA, 650 bp, Homo sapiens
tgtaaggaaatagagattttgagcaatataactgatatgtagatgagaaatatttcaaccttgtacttcataaaagatatacattttcaaattgaccattataaaaaccaattaccctgccatgaggaagcccaaacatcttgtaaaaagacccacatcaagaaaaatgggaactctcagtccatagctccatctgagctctcagaggccagctgcccccatttgtcagtcataggagtaagccatcttgaaagaggattttccagcacccagtcaagctgcctacttcgggttaggctctccagaagcaaacactgagatggagtgggtaatacaagtgggtaggagaaatcaacatctgtgaaagaaagaggaaacgcaggaccgagcagaggaaaaatctaaatcgtaatgaaggtctgacaaagcccttgccaaccagctatgaagctctgcagtggattttgcccatcgaatttgttcagtgtcaggttagaatgagcagaactttgtattcctgccttgctcagtcatcagatgagagctgccctggaaaggatgtgacctccagatgaagcagctctctgcatctaagacagatcccgaaaggcgtgacagctagaagtgtctgctaaccayacaccccacac

SEQ ID NO: 514803 - DNA, 643 bp, Homo sapiens
cttttttaaaaaaactcaagaaattggcctttttcttgtttacaaatttgagtgttcagtttgataaagaaggtaggttaagggagtttggattaataatcagtggtgaaacaatctccaaaataaattcagggaaacttgattttaaatatgattttatgattatatgtatgtgtacatatatatgtgtctgtatatatatatatatatatgtaaatatttattatatcaaaatatattggcataatgtgtatgtataacatatgcatcatatgcataacataaatatcttatatgtctatcatatgttatatgtctatattattatcaatatttttttgaaaggtaattaatgacattatcctaaatatttttttacaaatgtaattaataattttctacccatggaatatgtttaacttaaaccttaagatgacattttcaatgttatatattgtaagatatataacaataaacttacaaaccrtagctagtgaaatcctaggtaccctagtagaaatgcataatgataaagctaagaaaattgatgctataagcattgtgtatttaaacacactaagtgaaattgttatactaaagtgaaatcacagactatatacatataacagataaattattgtgc

SEQ ID NO: 514804 - DNA, 532 bp, Homo sapiens
tctctgccatagagctgtgtataggatgggtgctccatgattgaacccacttgtgacaaggaaaaaagaacaggatgaagagcacaaactctattccaggaaaaaagtatgaacagagattttaaatctctttagcactctttcttcttatctttagcttgtgcctttcaatcttctcttctttactcgtttcttctattgcctttctttctccttttcttttcttctattcttttaatacacatgcattcaataaagtctatgcattcttctaggcacattgtctatcagaaaacaaaacaaacctgtaacttgtggagcttccatgatagtggaggaaaataaacaacaataaaaacatgataaataactgtattataatgaatattaaagaagataagtaaattgaaaaaacaggtcagggtaaaaaggtcagatttgctggtagaggtggtttgaagtttcaaaaagagtgggcaagrtaggcatcattgtgaagatgccgtttgagcaagcgtattaagcaggtgag

SEQ ID NO: 514805 - DNA, 478 bp, Homo sapiens
taaaaaatgcaaaatattcaaatgaatttagaactagtttcaaattctaggaatttaatataagtttatattcactgtagattacaaacagaataaaaatggtcttaggttatgtttctttcaagaacctcaaaatgtccaacattcaatattacattgccttataagcctttgaatacgacaaacaagcaattacaccagtatagcagatatttcccctacaggtaaattatgtttactgtaatctcctgttatttttgcacactattctactgacttatgcagcttttaaaatttacaatgatacagatattaaatttatatggcatgttttaaacattgataaacagtgtgatatattttgctaaaacagctgcgaaagctgaaaaaaaagtcatccttttaggtytgtttaggtaatcagaattgttaatcagatcatcctttctttatgttcctttaaagttacatgcctagt

SEQ ID NO: 514806 - DNA, 577 bp, Homo sapiens
actgaacagaatctagcaagaaacaatatgcttaatcctatagcagcacaatttatccactacctttttgacatttgattggagctattyacgggaagcacacttcattccctttatcaagacctccaggtttggatttattctctgagaagataatcctgccgtatgttcagtaattccacagttgaagtatttagtcactgatctgttgcaataatatgataggaataaagcgggtactccttgaaggaatggattttgcattatgaatatgtagtcataggacaaataaagaaggcattgagtgaaaatgtcaacatcctagaattaagtatgtattttatattgaagatttagaatgcatttaacgtgcccatcaggccaaatgcctccaggaatagaagaatggcaatataatatgtatttctgagcaaactcagaaaaagaaccagattttagactaggcagatggatccctttaattatggaaaaatgcttttataaaaccattacagcctgataaatttcaggttttctactttgtttttgctactgtcttgctgtcaattgtttctta

SEQ ID NO: 514807 - DNA, 623 bp, Homo sapiens
tctgactaagatatacattgtaaagcttcctattgatagtgggttattgaaatgccacatgatggaacaggcagaaaagataaacctattgcagcatataataatgttccatctgccaacactgacagcctttgttatctggccttttcctggcacaagagtttctcaataactttgataacattattgctattctrtcctagatacatttttcataagcagttattaacagctttatttttaacaggagcaccatgagcattacagccttcttgcatacatttgttggggaatttacatatgtgtggcttaatgactttgcaagtcatactgcattttattattgaaagatgtgattagaatttatgcctttaatttcctagagcttttacttccacctaaataggtaagcatcttatcactttaagttgttcattataaattcatgtgtggtaaattagttttcaaaccgaatccaggatcatccaattgataagcatagtaaattaatgcacaatgaaggaggttgccaacaaaaaatagtccctaactaatattttctgcacagatctttgcacatataaacagattgtttacccatttatcactttaactgctaaagc

SEQ ID NO: 514808 - DNA, 324 bp, Homo sapiens
atgtatttccagtttctgcaagccttcattctgaattctcgtttacagacaggagcagattaaagccctttgggtgctggtcttccaggcctcctctctascctgacccaaaacgggttcaccaggcagccttcactgctgcgcactgacagctccccacagaccggagagccagagtgctgcccctccctgcagccatctctacttcacagcattctttcatacacctactttcatttcatcctcatgccagcctggtgcaggaggtgctaatatctctatttaacagatgagaaagtgaggctcagcggggttagaaaccag

SEQ ID NO: 514809 - DNA, 590 bp, Homo sapiens
taatttttaacatcccatttgccaagttaagaagctgattattttggtattcctcagtttccaaggaagcttttgtcttcatatttagtactctatacccattcatccrttattatttcatatttatttcagcccattgtccacagaacacaaccgtttagtatattgctgtttgtcctagataaaatcattaaaatgttgagttctcctttcatttataatgcctttattactataaaatataggtcatcaagcaggactgcattaaaagtaataatcagtaaaactgatataattcattcttcctgtctagtaacttaaatctactgtacttatgagtaccactgggctttattttattatgaaatatgttaatttctttaaaaaacattttctcatgacactgctaaagctgagcttcttctttgatacttcttcgcgagatttatgttgaatcttctctgttgcacttttatagtcacagaaatacaactttctcaggcaggtcaagacaggcctcccacccctaccccagaataaggaaaatgagatgggaaggagagagaagtaaacgcgatcaatctaatgga

SEQ ID NO: 514810 - DNA, 590 bp, Homo sapiens
taatttttaacatcccatttgccaagttaagaagctgattattttggtattcctcagtttccaaggaagcttttgtcttcatatttagtactctatacccattcatccattattatttcatatttatttcagcccattgtccacagaacacaaccgtttagtatattgctgtttgtcctagataaaatcattaaaatgttgagttctcctttcatttataatgcctttattactataaaatataggtcatcaagcargactgcattaaaagtaataatcagtaaaactgatataattcattcttcctgtctagtaacttaaatctactgtacttatgagtaccactgggctttattttattatgaaatatgttaatttctttaaaaaacattttctcatgacactgctaaagctgagcttcttctttgatacttcttcgcgagatttatgttgaatcttctctgttgcacttttatagtcacagaaatacaactttctcaggcaggtcaagacaggcctcccacccctaccccagaataaggaaaatgagatgggaaggagagagaagtaaacgcgatcaatctaatgga

SEQ ID NO: 514811 - DNA, 552 bp, Homo sapiens
agagggggttcctgttctatctcaccctacccccgcaacacacaactatacatacacatacacaaagagccaagagagagacagcagtcaacatgagagaatgacatatttttggaagatgtgaagcagtttggaggaatagtagctgacctggcagtgtagagaaggcagaagcgtaaatccttgcagaggacttgcgaaggagaagcaagctgatttgctccacagaacacaagaaaagctggggaatttaaggcatcaggcacctgtgcggtgggggtgggggtagatctgaaagcagaaggtctggttgaatatttttacttcaggtccgtctcccctcacycctagctgtcaggcaactccccttcccatatccctacaggagacagggagtttagttctgaggggactgcaccacagatctggactcaggagccccaagcactgtgaggatgtgggcctttactgaaaactggaattaagtgaacttctacacactgaatgatgagaccacaggcccctccctccactcagctcccagaacactga

SEQ ID NO: 514812 - DNA, 612 bp, Homo sapiens
ccctgggcagagacatctgtatctcttttgtgctcaccatgatggctgacatatagtagatgtgaaatgtgtgtccgctgaaaaactggaaccgaggtgggtctgtgacctgtgaagcaatggggtctggcgggggtggaagccttgttggtcttctcagacccagaacacatatgcctgctgacctcattgagaaaaaaaggtcagtgtctgcatcctcctgtggctaggaaaccaggaatggggaggcagcctctctcctgcagcctaatcagccatctgggtacacccagccatgaaattagagtctacatcctaagcaccacggccatatccagttttccatcgatgaaatatttagscgctctacagccccagtctgttctgtgtctgaaagggaggggctcctccccctcctccctgcagatgccacctctcagttccctgaccaggccttttgctaccctactgctgtgcctttactaatacgatgtgtgtcccactccctcaaatcaggaatgccttcctcctcctagttgactatccaactccccttccccaaggcccatctcctccgtgaaacctttgctagaagtgatttttccttcccta

SEQ ID NO: 514813 - DNA, 612 bp, Homo sapiens
ccctgggcagagacatctgtatctcttttgtgctcaccatgatggctgacatatagtagatgtgaaatgtgtgtccgctgaaaaactggaaccgaggtgggtctgtgacctgtgaagcaatggggtctggcgggggtggaagccttgttggtcttctcagacccagaacacatatgcctgctgacctcattgagaaaaaaaggtcagtgtctgcatcctcctgtggctaggaaaccaggaatggggaggcagcctctctcctgcagcctaatcagccatctgggtacacccagccatgaaattagagtctacatcctaagcaccacggccatatccagttttccatcgatgaaatatttagccgctctacagccccagtctgttctgtgtctgaaagggaggggctcctccccctcctccctgcagatgccacctctcagttccctgaccaggccttttgctaccctactgctgtgcctttactaatacgatgtgtgtcccactccctcaaatcaggaatgccttcctcctcctagttgactrtccaactccccttccccaaggcccatctcctccgtgaaacctttgctagaagtgatttttccttcccta

SEQ ID NO: 514814 - DNA, 622 bp, Homo sapiens
tgaaataagtaaagttttacttgggagagatgaactatgctgtaactgtaccagcatcagttgttttagttatctatttatcactgcacacagagcaaattactccaaaacttactggcttcaaacaataataaacatttatgatagcataaatttcctgaaggtgaagaatccgggggcacattaggtcattctggctcaggatctctcatgaggttaacagtcaagatgccagctggggcatttgagaggggctggaggacttgcttcaagatggccgactcacatggctggtaagttgatgctggctgttggcaggaggcctctggtccttaccacatggccctctccacagagctgcttgagtgtcctcacaacacggtggttggcatccactagagtgagtgacccaagagaaagcaaggtagcagctgcaatgcattttatgacctagccttagaggccatactacatcattttcccagtatccyattggctacacaggttagccttactgaatatgggaaggaaactacacaagggccatcttggggattagctgctacacttgtcattataaacttcattgcccaagctcttttaaaaatgtaaatagaaggaa

SEQ ID NO: 514815 - DNA, 622 bp, Homo sapiens
tgaaataagtaaagttttacttgggagagatgaactatgctgtaactgtaccagcatcagttgttttagttatctatttatcactgcacacagagcaaattactccaaaacttactggcttcaaacaataataaacatttatgatagcataaatttcctgaaggtgaagaatccgggggcacattaggtcattctggctcaggatctctcatgaggttaacagtcaagatgccagctggggcatttgagaggggctggaggacttgcttcaagatggccgactcacatggctggtaagttgatgctggctgttggcaggaggcctctggtccttaccacatggccctctccacagagctgcttgagtgtcctcacaacacggtggttggcatccactagagtgagtgacccaagagaaagcaaggtagcagctgcaatgcattttatgacctagccttagaggccatactacatcattttcccagtatcccattggctacacaggttagccttmctgaatatgggaaggaaactacacaagggccatcttggggattagctgctacacttgtcattataaacttcattgcccaagctcttttaaaaatgtaaatagaaggaa

SEQ ID NO: 514816 - DNA, 595 bp, Homo sapiens
ttttagtaacaaacagaaatgctgggcagagcggacagacagcaagtgctaacagacaaagatcccagagaaaatggaagcagtaagaaatgggcctgacagtctatgcttttctcctcaaggcattttccaagttgcatgcaataaactaaaggtaaattggctgagcacaacttttggcagtcttagaggactaagggacaaaagccgagttcagcgtasagcagtagatacctagggattcaggagcaggaatgaaccatgaacagaccagtcctcacaaagactgaaggctaaattcctatttagcctttaggaagctcaacaattcctgacagaatgaagatacctcctacaccttatctgcccaaaagaaggacaagtcaactctggagagaaaaataacaccatccagccctcaaaatatcgctacagttttttcatacccaatgcctagcactcaataaaaaattccaggctatcagccagacagaccagaaagcaatggaatgattcctgcaaagtactgaacaacaagcacagcctactttagacctaggacaaacatccttcaaactgaaggcccaattaagat

SEQ ID NO: 514817 - DNA, 588 bp, Homo sapiens
ttctatgtgtagactcttttaaaattgtttttgtaattagaatcttttcttatctggaaataaagaaagtgaaacactgtaaacagaaattaacaatacacctaaggtggcacatcccattagtgggagatcagtaatgagaactcaagttctctgccttggccctctgttaattagaagtttgggaaagctttgggcaggtctctgactttctaagtctgaaatcctgtagagaagctagaattmtttttcagaaaatacacatgactgccacagtcatagacagacttttagttagcatgaggtactggtctgacccattatagcagcataatcatgctcatattgctttctgttgattcacctgaaatttcaagcattagaagagatctggttataaaaattttttattatctgtcatctatcaattttgtgttttgatttaaaaatgcaaccaaaaagataacaggaaaagcactgaaaatataccattgttatggttattcaaagaacttttttacagttttgtaaaattgctagctctctacttgggtttttctctaatgattccacacaattcacagaggc

SEQ ID NO: 514818 - DNA, 454 bp, Homo sapiens
tctccattgctaatcttcaaaacaaatgaaatcaatttaattcagatttccataattgctcatgctcctccttaaccttctggaataataaaatttcccaataccattgccccctgccacccacacccccctagttcccraaaatatatgtgcttctttttgttacaaaaagtttaaattgcctgaggctctgggaaaattctatcactatggcaattccaagaagaaacaaggcacagtcctaaatgaagatttgttctgtctctaccacatatatgccttcacacaaatagtaggtttcagaaggagttactggtgtagaagaaatccactactatattcaaggcaaacttcctctcagaaaaatgaagaaatgaggacgccttgtgtatgttgctgctacctgagagcaagtctttgaaaccaaaatcaggagatggttaagagtaaaaaa

SEQ ID NO: 514819 - DNA, 632 bp, Homo sapiens
cttaggggatattttacttctattgtttactatttattgcctagtttgttttcttctgtgcctctcgcataaatttcatgaggacagtgattttatttgacttgatttttggttgggggaattattttttcaagttctttttaaaacgggctttatttttttagagtagttacaggtttacagaaaaaatacacggtgattatagggaatttccatataccccgcttccccgcagtttctcctrttaacatcatgcattagtgtggtgtatttgttacaactgatgaaccgattttgattcattattaaccaaggttcatagtttaacattcattctttgtgttgtacattctgtgtatttggaaaaatgcacagtggcatgtctcccccattacagtatcatgcagaatagtttcaatgccctaaaactcccttgtgctcctccgcctcatccctcctttcccttctccccaaccctttgcaaccactgttatctttttctcttttcttttttttttttttggaatggagtcttgctatgttgtctgagctggttttgatatcctgggactcaagcagtccttccgccttggcctctcaagtagctgggattacaggcatgcaccaccatg

SEQ ID NO: 514820 - DNA, 651 bp, Homo sapiens
tctctcctttgacttagttgctatttttccaaacactagccaattcaaaatggctgtgaatttctctatttgtgtattttattgtctttggcattcacaaaagagtgaaccacaatgtaaccaaaataaaatgtaactgtgattcacttccatatgtggttaatggcccatggcaaaattttgatgataattcatctttattgaattatattaggttattatggaatcaggaagacatctagaactatcatcattctttaagaatagcatttttttcttctcaaagttgacgtcagcagaaggcatcctggacagaaaatgaatcaccaaagagtttatgcttcattttataaagaacttcaataccagatttttaaaaataaattttattatttagggtgatagtataaatatacttttaagtgctgtaatggaaaaaataagawtgcatttccgtggaagagagtggcaatattttcccatttaatctaggggctccctgttctcaaataaatgtttccgtaggtgacacaaagtaagtgatttggtcctttctacacaagatttttcacatcaagtttttatgaaggaatattactacaaggaattttactgaaccggaaagtgtaaatgaaggatcattgatgaaat

SEQ ID NO: 514821 - DNA, 648 bp, Homo sapiens
ccaggattacatgtgagatcgtgtggcatcagcagcctgtgagacaagatagccacagaccacacatgacaacaggctggtgtacaaggttctactgataagccttttcctgagtctcttgcctacctgagcagcaacagtgtcagcagttttgaataggcttatatgacaataatcaatgaaatataaaattaaccaatgaaatggtgtattgagttcctgtttgcacctttcaaatgctgatttttgtttgctgttgcaatgtaatttagttaacaaaaggagactaattcataatgacattattcacattttattaatttttaaatctttaaacatagagtaaataccactcaccaattgtattttcaagaggaataaattaaataatgtaaattttaaaaatytgtcatggtgttagacacagagcaggtgctttttatgtaatatccttcttgacccctgataattattccttgtcctgaagttggcttcttaaaaaattaacatagctactccacttttcctttgattagggttagcatggcatatctttctccaatcctcaacttttaacctgagtctatatttaaacacataagtcttgtcttttttttatccaccctcacagtcagtcttttaattggt

SEQ ID NO: 514822 - DNA, 545 bp, Homo sapiens
gctgtttgggaggctggggtaggagaattgctgaggtggaggttgcagtgagccaagactgcgtcattgcactccagccmgggcaacaggaatgaaactccgtctcaaaaaaaacaaaaacaacaacaacaaaaaaactatgtattttataaattgtgtgtacaaaatacataaaccactctatttatgagcagattcagtttatttgaacccatattcagctactctaagaattttaaatttcatttattagtggcagcctgtagggagtaaggagtgcaaagaaagactgagttacttgagggaggatgtgatacaggatatcaaagatatatctatatattcattatttctcagtttggcctcaatgccatctgatgtttccttggaccattaactgctcacttctatagggaatgcttaattcaaacatgtatgcccgtgttggcagaagattctttgtcttaggagcatttgagacagtagcaatgaatcgtgctgcctctaagtaatttttttttcagagatgagccatggagccaacc

SEQ ID NO: 514823 - DNA, 545 bp, Homo sapiens
gctgtttgggaggctggggtaggagaattgctgaggtggaggttgcagtgagccaagactgcgtcattgcactccagcccgggcaacaggaatgaaactccgtctcaaaaaaaacaaaaacaacaacaacaaaaaaactatgtattttataaattgtgtgtacaaaatacataaaccactctatttatgagcagattcagtttatttkaacccatattcagctactctaagaattttaaatttcatttattagtggcagcctgtagggagtaaggagtgcaaagaaagactgagttacttgagggaggatgtgatacaggatatcaaagatatatctatatattcattatttctcagtttggcctcaatgccatctgatgtttccttggaccattaactgctcacttctatagggaatgcttaattcaaacatgtatgcccgtgttggcagaagattctttgtcttaggagcatttgagacagtagcaatgaatcgtgctgcctctaagtaatttttttttcagagatgagccatggagccaacc

SEQ ID NO: 514824 - DNA, 560 bp, Homo sapiens
ccttttcaggttgcagttactgctttcccagcactttcttctctccacccccatacctctcctccacatctgagaaaatcaggaaaatagcttcacttaaagaacctttggaaacccagagctcgcccctctttactgtagggggcgtggtgagagaaggtggcaaggagcaactggggcctgccctagtcctctcccacaatctttcattcaaacaagagacgtctaaccaattttatgtcatgttctactttaaaaaagcttccctsctagaaaccattacttcttacttggcccctcatccacttgcccatccccaaaacaaaattctgtagctgtagccagatggagcctacaggcagccttttttttttttttaaatttgtactattttactttggttgtacttgtgtaatctatgtattgttgcaatttttattttaattttgattctctccaattacccagtttccctcctcggcaaaggagtgtgacaggtgggtcttttgcctcatcaagagccagttctaaagtagcagctccaaagaggcatgtgcaca

SEQ ID NO: 514825 - DNA, 560 bp, Homo sapiens
ccttttcaggttgcagttactgctttcccagcactttcttctctccacccccatacctctcctccacatctgagaaaatcaggaaaatagcttcacttaaagaacctttggaaacccagagctcgcccctctttactgtagggggcgtggtgagagaaggtggcaaggagcaactggggcctgccctagtcctctcccacaatctttcattcaaacaagagacgtctaaccaattttatgtcatgttctactttaaaaaagcttccctgctagaaacmattacttcttacttggcccctcatccacttgcccatccccaaaacaaaattctgtagctgtagccagatggagcctacaggcagccttttttttttttttaaatttgtactattttactttggttgtacttgtgtaatctatgtattgttgcaatttttattttaattttgattctctccaattacccagtttccctcctcggcaaaggagtgtgacaggtgggtcttttgcctcatcaagagccagttctaaagtagcagctccaaagaggcatgtgcaca

SEQ ID NO: 514826 - DNA, 604 bp, Homo sapiens
atatgccacattgctgcttatcaaatttcatctgaggaaggtttggcacctgggtcactgattgctctaccccaaggcctgccatccttgataacttcagtgtctaaataggccaaggatctgactgcaatcaaacaccaaatcccatcccttccttcttcttagtgtgtcctaccacgcttgtttccacctaaggatcttaactcatgttgtccccatacctgaatacgctccttccctctttcyctttatagccttcaggtttgtgtcacttccccagaaacgtgcactcaaggccatcttatctagtggttccctctgctattctctatcaatgacccttcatagcgcttcttcctcctagcatctctcacagtgtgtgtgtgtgtgtgtgtgtgtgtgtgtgtgtgtgtgtgtgtgtatatatttgctggtttatttcattgtcatctgtcatttccagcaatctgtatgtccctcaaggacaggggccatgtcaatttcatttacttttggagtctcagcataagaacaatgcttggcacacagaccctccagaaatatttataaaataaataaataaatgagtggatagacttagctc

SEQ ID NO: 514827 - DNA, 604 bp, Homo sapiens
atatgccacattgctgcttatcaaatttcatctgaggaaggtttggcacctgggtcactgattgctctaccccaaggcctgccatccttgataacttcagtgtctaaataggccaaggatctgactgcaatcaaacaccaaatcccatcccttccttcttcttagtgtgtcctaccacgcttgtttccacctaaggatcttaactcatgttgtccccatacctgaatacgctccttccctctttccctttatagccttcaggtttgtgtcacttccccagaaacgtgcactcaaggccatcttatctagtggttccctctgctattctctatcaatgacccttcatagcgcttcttcctcctagcatctctcacagtgtgtgtgtgtgtgtgtgtgtgtgtgtgtgtgtgtgtgtgtgtrtatatatttgctggtttatttcattgtcatctgtcatttccagcaatctgtatgtccctcaaggacaggggccatgtcaatttcatttacttttggagtctcagcataagaacaatgcttggcacacagaccctccagaaatatttataaaataaataaataaatgagtggatagacttagctc

SEQ ID NO: 514828 - DNA, 627 bp, Homo sapiens
agtaaaaaagatacaaatttaaaaatacagcataataaccattcacattatgttaggtattataagtaatctagagatgatttaaaagtatacaggagaatgagcataggttatatattaatacaaatactatgccattttacataagggactgaaacattcatcgattttggtatccttggggggggtcctgaaaccaatgcccccttggatactgtacataaatgtgtgtgtgcatataacttacaaactatataagttctaattgtacttttatagtgtgtatacacataaccagaaattttaatatgcaaaaaaataataataaatagaagttctaggctggacacagcggctcacacctgtaatcccagcactttggaaggctgaagcaggaggatcacttgagcccagaagtttgagaccacactaggcaacatagtgagactccgtctcaatcgayagattagacagctagatgaatgtttcttcctgcttcccaatgaattgtcccagggacccctcaggaggcccaaaagcctgacatctgatatgcagtgaaagatgacatctttctccatcccattccccaccgtgcaaaggaaagaggagcaccagcaggggcca

SEQ ID NO: 514829 - DNA, 588 bp, Homo sapiens
gtcttccccttggggactaacatagcaacaatgagcacacggggacatacactgccccatgagcaccatcttccactgtaacccagctaaatgctacttaatctagaggaatgcrgttacagggccctttcttttgtagtcttgacaaatggttaagacttagctgtaggcatttcactgaaaatactttctataaccatgtgccctggctggtgctcaagaacaaaaccagaaattgaggagtgggataatctttgatgcctttaaataggagtaagcaggcagtcctgagaggttctctgggaaagggggctggaggcacgcatacgaagggtctattccacatcatgttgagaggttgtccagtggtaaccagtggcacccgattattaacgagcccctataaaactggcacttcaggctgggcacagtgtctcacgcctgtaatcccagcactttgggaggctgaggcaggcggatcacttgaggccaggagttcaagaccagcctggccatcatggtgaaacctcgtctctactaaaaatacacaaattagctaggcatggtggtgcgcacctgtagtcccag

SEQ ID NO: 514830 - DNA, 588 bp, Homo sapiens
gtcttccccttggggactaacatagcaacaatgagcacacggggacatacactgccccatgagcaccatcttccactgtaacccagctaaatgctacttaatctagaggaatgcggttacagggccctttcttttgtagtcttgacaaatggttaagacttagctgtaggcatttcactgaaaatactttctataaccatgtgccctggctggtgctcaagaacaaaaccagaaattgaggagygggataatctttgatgcctttaaataggagtaagcaggcagtcctgagaggttctctgggaaagggggctggaggcacgcatacgaagggtctattccacatcatgttgagaggttgtccagtggtaaccagtggcacccgattattaacgagcccctataaaactggcacttcaggctgggcacagtgtctcacgcctgtaatcccagcactttgggaggctgaggcaggcggatcacttgaggccaggagttcaagaccagcctggccatcatggtgaaacctcgtctctactaaaaatacacaaattagctaggcatggtggtgcgcacctgtagtcccag

SEQ ID NO: 514831 - DNA, 588 bp, Homo sapiens
gtcttccccttggggactaacatagcaacaatgagcacacggggacatacactgccccatgagcaccatcttccactgtaacccagctaaatgctacttaatctagaggaatgcggttacagggccctttcttttgtagtcttgacaaatggttaagacttagctgtaggcatttcactgaaaatactttctataaccatgtgccctggctggtgctcaagaacaaaaccagaaattgaggagtrggataatctttgatgcctttaaataggagtaagcaggcagtcctgagaggttctctgggaaagggggctggaggcacgcatacgaagggtctattccacatcatgttgagaggttgtccagtggtaaccagtggcacccgattattaacgagcccctataaaactggcacttcaggctgggcacagtgtctcacgcctgtaatcccagcactttgggaggctgaggcaggcggatcacttgaggccaggagttcaagaccagcctggccatcatggtgaaacctcgtctctactaaaaatacacaaattagctaggcatggtggtgcgcacctgtagtcccag

SEQ ID NO: 514832 - DNA, 588 bp, Homo sapiens
gtcttccccttggggactaacatagcaacaatgagcacacggggacatacactgccccatgagcaccatcttccactgtaacccagctaaatgctacttaatctagaggaatgcggttacagggccctttcttttgtagtcttgacaaatggttaagacttagctgtaggcatttcactgaaaatactttctataaccatgtgccctggctggtgctcaagaacaaaaccagaaattgaggagtgggataatctttgatgcctttaaataggagtaagcaggcagtcctgagaggttctctgggaaagggggctggaggcacgcatacgaagggtctattccacatcatgttgagaggttgtccagtggtaaccagtggcacccgatyattaacgagcccctataaaactggcacttcaggctgggcacagtgtctcacgcctgtaatcccagcactttgggaggctgaggcaggcggatcacttgaggccaggagttcaagaccagcctggccatcatggtgaaacctcgtctctactaaaaatacacaaattagctaggcatggtggtgcgcacctgtagtcccag

SEQ ID NO: 514833 - DNA, 671 bp, Homo sapiens
ctataaatgatagccttaagcagggagtcaacattcaaaataaatgctgctcaaagacactataaagaacattaaaaaaagaaaagaaagaaagcccattaggggagggaagcgccgttaataccgtccacatcctccaactgcctgcttcaaggtcaccttcccagcagtgacactagaagcactggagtcagggctaaagccacagctttatcctgctctcctatcctccagtgcagaatctcccaaactcaggtggccatagaacatttttgaaattataatgcactgacagacagtaatagaataggagataacgtggattcaaattagaaaggtaaaatgatctcagatgaaccactgaaatgaccaaggtctgagttacattaatacatgataaacattaaatcatattaacaagggttaaaattgtaagataaatagatcagcaagcaaataaattagcagcctctgtcacttttcagatcacgcattctatcaaacaactttttgggtatgtacaaatatatactttacttataakttatacacatgtcccaatatatacagcttttatataaagtacagaatagaaataaagagcaaaagatgaaataattatccttttgataatttttagtttttccagtatgacagctttgtactatctt

SEQ ID NO: 514834 - DNA, 628 bp, Homo sapiens
catccctccgtagagagtcccttcactcagttcttactgraattccagccaaggtcaaccttctgctcccaggcagagcctggctggtacagcatcaaagcccatcccttctctgtccatcctgctctggccccaaccccgccaggcttcctacatagtccatgctgtcaggcagacagctgcactgtacccactctgattttatagccacccacagtcccataaaaatcaatggaacaaaaactcagagaacttttatcacacctgagaaacttcccataactgccctgaaatcatcctggatcttctctggtaaaaaaaaaaaaaagagagagaagagaaaaaaaggaggggaaagggataagaggaaacaaggaggtttggcatccaggtgtaaactagtggtaattcccatcttttccctgactggatgaaaaatgaagtgcccacaagaagcatagcctgtctgaagacagagataacaccttgtgtgctgccagttctaagggctgaactgttggcataaacattttcaaagccccagttcccaagtgcacaggaaggagcccatggaataaatcaaagcgaggtccagatgaaaagttagggggacaggcacccatgtcaa

SEQ ID NO: 514835 - DNA, 628 bp, Homo sapiens
catccctccgtagagagtcccttcactcagttcttactgaaattccagccaaggtcaaccttctgctcccaggcagagcctggctggtacagcatcaaagcccatcccttctctgtccatcctgctctggccccaaccccgccaggcttcctacatagtccatgctgtcaggcagacagctgcactgtacccactctgattttatagccacccacagtcccataaaaatcaatggaacaaaaactcagagaacttttatcacacctgagaaacttcccataactgccctgaaatcatcctggatcttctctggtaaaaaaaaaaaaaagagagagaagagaaaaaaaggaggggaaagggataagaggaaacaaggaggtttgrcatccaggtgtaaactagtggtaattcccatcttttccctgactggatgaaaaatgaagtgcccacaagaagcatagcctgtctgaagacagagataacaccttgtgtgctgccagttctaagggctgaactgttggcataaacattttcaaagccccagttcccaagtgcacaggaaggagcccatggaataaatcaaagcgaggtccagatgaaaagttagggggacaggcacccatgtcaa

SEQ ID NO: 514836 - DNA, 628 bp, Homo sapiens
catccctccgtagagagtcccttcactcagttcttactgaaattccagccaaggtcaaccttctgctcccaggcagagcctggctggtacagcatcaaagcccatcccttctctgtccatcctgctctggccccaaccccgccaggcttcctacatagtccatgctgtcaggcagacagctgcactgtacccactctgattttatagccacccacagtcccataaaaatcaatggaacaaaaactcagagaacttttatcacacctgagaaacttcccataactgccctgaaatcatcctggatcttctctggtaaaaaaaaaaaaaagagagagaagagaaaaaaaggaggggaaagggataagaggaaacaaggaggtttggcatccaggtgtaaactagtggtaattcccatcttttccctgactggatgaaaaatgaagtgcccacaagaagcmtagcctgtctgaagacagagataacaccttgtgtgctgccagttctaagggctgaactgttggcataaacattttcaaagccccagttcccaagtgcacaggaaggagcccatggaataaatcaaagcgaggtccagatgaaaagttagggggacaggcacccatgtcaa

SEQ ID NO: 514837 - DNA, 628 bp, Homo sapiens
catccctccgtagagagtcccttcactcagttcttactgaaattccagccaaggtcaaccttctgctcccaggcagagcctggctggtacagcatcaaagcccatcccttctctgtccatcctgctctggccccaaccccgccaggcttcctacatagtccatgctgtcaggcagacagctgcactgtacccactctgattttatagccacccacagtcccataaaaatcaatggaacaaaaactcagagaacttttatcacacctgagaaacttcccataactgccctgaaatcatcctggatcttctctggtaaaaaaaaaaaaaagagagagaagagaaaaaaaggaggggaaagggataagaggaaacaaggaggtttggcatccaggtgtaaactagtggtaattcccatcttttccctgactggatgaaaaatgaagtgcccacaagaagcatagcctgtctgaagacagagataacaccttgtgtgctgccagttctaagggctgaactgttggcayaaacattttcaaagccccagttcccaagtgcacaggaaggagcccatggaataaatcaaagcgaggtccagatgaaaagttagggggacaggcacccatgtcaa

SEQ ID NO: 514838 - DNA, 638 bp, Homo sapiens
gggaccgcagacaatctcaggctaccacctcccagaggtaagttgaacctcagcacagtttcatccatcctgctgtccccattcctgctacatctgccctcccatatcaccacaccaaatgacctcagagttcagagggagcaaggccttctattcctctaggacttagaaattccactaaagaaacataaacctattaattccatataaaaagaagcatgctctgatgcctctgctcccttgggccacatgtgatgggttcttaggcagaagaagaggagaaagataatgttcagttaacttcatacccacagggaggtggggagaggcacagaaatgagactctgagacatggaaatacgctctgccagtggaagcagcttctggttttgtttgaaaccatggaatcagcaagactaccaacctacgggcaacttcatgtcaaagcaggagatgggttktattgtttacaaagagttttgtgtgccctgcctcctcatgaaagctcctgtgatggtctgactacgacaaagtgcttatcgaacaattttgtcttctgctgatagcagggaaataggctagctccagcacacccacacacagcatgcagagagaaagagagaaaggacatgagccag

SEQ ID NO: 514839 - DNA, 610 bp, Homo sapiens
ggagaaatatgtatttttggaggctctaagatgtaaactttagaaaatgtacaagcagagtttcccttgatccaaggaactagactcttagaaagagtatgaaaagaattcctgcagattcttcatgtccaccttcaagcccatcaaatggatgtgtcatttgaagtcagaatacaagccagagggcccatctggagtcacctagagagtgactctttagttttgaagttgtaagaggggctgaactcactcaaggaatgaggactaaagaaaaagaagagagccaggctttagtcaataacactgctgcgaagaggcgaagaggccgcatggtcacatgtgtctgttctttctatttgattcaacctcctcctggctyctgatgtgtggaaaagagcctacaggcatgtccagcaatggctggcagagggatgtgggatgggtgtttactctcaaaatttccctgagtggggtaggagacaaagtacttccctgtatgtctcaggaccctgatgctactgggagaagaggggaatggtggtctggccttggcagccaaacaatgatgcagcactggggcagaggagtgctgctggggttgctgaaagca

SEQ ID NO: 514840 - DNA, 588 bp, Homo sapiens
aaaataagtaaaaaaaaaaaaaagtcacaagacaatgtagaccattcaggaagctggtatggtaggaattctgctctgttcctcacagttatgtggcctcaggcaggttgcttgactttttgttgcacagaaattttcttttcagtaaattggagacattgtgtctcccctgcaggttgctataaagattggtgagatgtttgtatagcacttggtcctgtgtctgacaggtagtagatgttcagttagcagtgaatattattacctgatttctgtaaaaaaaaaaaarcaccctcatatttatattagcacagtaaaagaaaggtcactggaaattacagcaaatgttagcagtgttgtctctaactggtgacattgcagtcatttttatttccttctttgagtttttcccttttactaatgaacatagattaatattacaaccagaaattaaatactgtacttagaaaagaaaaggtgctaggcttgtattaaaaatgaaagaattaaagagatgagttactgattcctttcttttagaatgataaccttacctgggttatcaaagataaccttatcttagggatg

SEQ ID NO: 514841 - DNA, 510 bp, Homo sapiens
gtgatcctgcatttgaagccatatgtattctctcttccttgagacttgatcactacctgatttgactgtgaaacaaaatgctggatatttaagcagttttcacaggaacccttagcaaacgcatcataggaactgaaaaagggaagaatcaggctgacctttgggtaagtcaatatacttccttgggccaaggttgtcccatctataaaatcgggataagatatcaactgaccaaagtgagtatgactttcttgtacttccttcaagctctgaaatacatgatgcattgaaggcttgtgatttcatgccaaagtaacttgcaaataaatgtcaggattaaccaggtggcgtggctcacrcttataatcccagcactggaggccaaggtagggggatcacttcaggtcaggagttcgagaccagcctggccaacatagtgaaactctgtctctactaaaaatagggcaacatggtgaaaccccgtctctactaaaatacaaaaaaattagc

SEQ ID NO: 514842 - DNA, 645 bp, Homo sapiens
tggagctcccatcatgagattagtgtccttatgagaagagtaaaagactctctctctctctctcccacctgctcccctaccctcactccccattatggaaagatagagcaagaaggcacccatctacaaaccaggacagccctcatcagattctgctgggatcttgatcttggacctcccaacctccagaactgtgagaaatgtctgttgtttaagcaacccagcctgtggtattttattatagcagaccaagcacacaaagataatgcactaaaggtgtgggcgacagaatcagacacatggactcattccagttctgccacttcccagttgtgtttcccagggctaagttcataacacctctaagcctcagttcctcatctgggataataaaagcatgaacctcacacagttgccatgaagattaaatgagatcatatatgtaaagctcttagcaaagtgcctggcacatggtctaaacattcagcaatgggtgtcttcactcttacttgaattactgccatagaactgaaacagagtcttagagatcatctacagttgacccttggccaacacaagggccaggagtgcygacccctgcccccacacagttgaaaatccacatataacttttgactccctcaa

SEQ ID NO: 514843 - DNA, 655 bp, Homo sapiens
ctcacacttgtaatcctagcattttgggaggctgaggtgggcaggtggatcacctgaggtcaggagttcgagaccagcctggccaacatggcaaaaccatgtctctactaaaaatacaaaaattagccagcatggtggcacgtscctgtaatcccagctacttgggaggctgagggaggagaattgcttgaacccaggaggcagaggttgcagtgagccgagattgtgccactgcactccagcctgggcaacagagagaaaccccatctcaaaacaaacaaaacaaaaacccagatggtctattggaggagatggactagtacacagtcttttacaacatgctgtatgaagtgctatcatgcacaggatgggcttctgaaagattgcgctggcttggctgacttctgaatgatgggaaagttttcgccaggtgagaaaaggaggaatccatattgctagcatatgcaaaggtaagcagtcatgagaagttctttggttagagtttatttggatgtaagttacacaaatacaaataatagtctagtttatttttgtgatttaaattcaaagcaggctgtttctgaacattggatgagagaatcagtgatactggagctgatgctttaggctttcttttggcctttccttttcagca

SEQ ID NO: 514844 - DNA, 655 bp, Homo sapiens
ctcacacttgtaatcctagcattttgggaggctgaggtgggcaggtggatcacctgaggtcaggagttcgagaccagcctggccaacatggcaaaaccatgtctctactaaaaatacaaaaattagccagcatggtggcacgtccctgtaatcccagctacttgggaggctgagggaggagaattgcttgaacccaggaggcagaggttgcagtgagccgagattgtgccactgcactccagcctgggcaacagagagaaaccccatctcaaaayaaacaaaacaaaaacccagatggtctattggaggagatggactagtacacagtcttttacaacatgctgtatgaagtgctatcatgcacaggatgggcttctgaaagattgcgctggcttggctgacttctgaatgatgggaaagttttcgccaggtgagaaaaggaggaatccatattgctagcatatgcaaaggtaagcagtcatgagaagttctttggttagagtttatttggatgtaagttacacaaatacaaataatagtctagtttatttttgtgatttaaattcaaagcaggctgtttctgaacattggatgagagaatcagtgatactggagctgatgctttaggctttcttttggcctttccttttcagca

SEQ ID NO: 514845 - DNA, 638 bp, Homo sapiens
gctggtgggaattcattgatttttgagtagagaaataaaatagaataccaagggaagattaatctagtggcaggggcatatttcaatttccagttcctcattcatgataaaaccttgctccagacctcaatgataattcattttatagcttttcagttgaaattttaccaaaggaaaaaaatgatttgtgtcaccatgcttatttactcattttcagatagatcctaggtagattaatgcaccccatttctccttatagaaaccttggtacctttctccaaatcattatgttggtataattgcatagtgagctctctttgataaatcttacacaattgcagagaagcaaagggattctcatttttctcctactcatagctgtcccagcagcttttctcaccctgtatagtgggcatgtgaggaatgtttgcaggaaagcatgttgaggtctcattctgtacaaacacagcagtacatggtatttttagtatttccaaaacgattgcttctgtttctgctaactttgaattcaaacatatgrgtgcatttggggatgtggtgctatatttgtaaaaactgttttattcaaattttaatatctaaaaattagaaaatgtgaatatttgctgggcttcatc

SEQ ID NO: 514846 - DNA, 621 bp, Homo sapiens
actttggcaacccttgcatctctgaagaaaggcagttcctctgtccccgagtcacttgattattgcaccgaaactcttaatccatttgagccaagactgtgcagagtcttggatgtaagtgacccatgcaacttgtccccatcaactggctccactgcccaggcactcctgccagggtccacctcaagtgatgttccagaagaccctagaatttgtatattttaattccactggactgtcttccttatttctatctctaccttcctactctcactgttctccatttcttctttgcctggcctctccatattttcatagcagaaaatgtcttcccaggttatgaccttggctctcagtgctgctcgttggtttcatggagacttttyttctcttgttgactccccagattgcattttgggtgtcagctctcatcagcactacctggggctgtccccagcctggattcagtctttacagatacctcgtgatattgaggggctcatcctcacatgcagcaccaaagtgaagttctttagacacagcagtttgaccatgaggatgagattgatgcagtttcaaatgttctgaactgggagtttgggaagtctgaattctgatcaa

SEQ ID NO: 514847 - DNA, 596 bp, Homo sapiens
aacacatttcaggttaatgtgccaatttttagcctttatttgccacaaaatataccccttggtctgcagcagcattgaatagggatgccatattcgtagaacttagatttcataagtccttakatggtagggttggttgaggcactgtaggcagagaaacaaacaatatgcaaatatgtacatgttcattccaataaggacaaatcactaatcacttcaggatggaaaaggccatgacgcgggctagtctgatcaaagaatggtgccaaggcctggcttatgctctttgcaggttggaaagtcaacagcagtgtcaccatgctagtgtcaccatttggttagagaggcagcccatgtgtgactctatcccagtcaccatgactgctctgtgaatggtgagcccacagtgcagcactaggcaggccaaggagaaaggctttactgcatgcacaggactagccatctgcccatctggttgttgaaaggctcctctggtgtagatggccactgttggccattaatggaatacattaaaaatgtacttgtttcttccctaatttcacttttctgttcatatactaacttcccctgcccta

SEQ ID NO: 514848 - DNA, 584 bp, Homo sapiens
ccaacacatttcaggttaatgtgccaatttttagcctttatttgccacaaaatataccccttggtctgcagcagcattgaatagggatgccatattcgtagaacttagatttcataagtccttagatggtagggttggttgaggcactgtaggcagagaaacaaacaatatgcaaatatgtacatgttcattccaataaggacaaatcactaatcacttcargatggaaaaggccatgacgcgggctagtctgatcaaagaatggtgccaaggcctggcttatgctctttgcaggttggaaagtcaacagcagtgtcaccatgctagtgtcaccatttggttagagaggcagcccatgtgtgactctatcccagtcaccatgactgctctgtgaatggtgagcccacagtgcagcactaggcaggccaaggagaaaggctttactgcatgcacaggactagccatctgcccatctggttgttgaaaggctcctctggtgtagatggccactgttggccattaatggaatacattaaaaatgtacttgtttcttccctaatttcacttttctgttcatatactaa

SEQ ID NO: 514849 - DNA, 648 bp, Homo sapiens
ctgcttttttcagtagggtccctgggatctaacctgcaaggtgtgtgcttctcgtatgactttgkcttgagaacatggaataaataagtctagatgtgcatttcagggcccacgtaatacaagatattacttcaagttcacatttgctgctgcacaattatgttcaaataggacttcctaggtaagatgttctccaacacagcacacattgaactgaggagagaaaggtaaatatgttggatgcaggccaggaactgtcataaagctgatggctctgaccacctcttttttgtgtggcacctatgggaagcgattgggtcaaatagtttccccaacatagagaaggggacacaggctttgaaacatgtcagcagcttcctcattgttctaccttacagcatgcttatttgtgtggctgaaaggagtggaggtctcggatggaaatagctctgctgttacctgattatcctctctaggactgtccttgccttcaggattcctgtatagtacagttctctgctcaacatccacaatagactgtgttcaaatcccagctccaccccttccgagcaatgactttgggcatattagagaacctctttgtgccacagcttcccccaaatataaaagggatgagtaagaaaaaga

SEQ ID NO: 514850 - DNA, 648 bp, Homo sapiens
ctgcttttttcagtagggtccctgggatctaacctgcaaggtgtgtgcttctcgtatgactttgtcttgagaacatggaataaataagtctagatktgcatttcagggcccacgtaatacaagatattacttcaagttcacatttgctgctgcacaattatgttcaaataggacttcctaggtaagatgttctccaacacagcacacattgaactgaggagagaaaggtaaatatgttggatgcaggccaggaactgtcataaagctgatggctctgaccacctcttttttgtgtggcacctatgggaagcgattgggtcaaatagtttccccaacatagagaaggggacacaggctttgaaacatgtcagcagcttcctcattgttctaccttacagcatgcttatttgtgtggctgaaaggagtggaggtctcggatggaaatagctctgctgttacctgattatcctctctaggactgtccttgccttcaggattcctgtatagtacagttctctgctcaacatccacaatagactgtgttcaaatcccagctccaccccttccgagcaatgactttgggcatattagagaacctctttgtgccacagcttcccccaaatataaaagggatgagtaagaaaaaga

SEQ ID NO: 514851 - DNA, 648 bp, Homo sapiens
ctgcttttttcagtagggtccctgggatctaacctgcaaggtgtgtgcttctcgtatgactttgtcttgagaacatggaataaataagtctagatgtgcatttcagggcycacgtaatacaagatattacttcaagttcacatttgctgctgcacaattatgttcaaataggacttcctaggtaagatgttctccaacacagcacacattgaactgaggagagaaaggtaaatatgttggatgcaggccaggaactgtcataaagctgatggctctgaccacctcttttttgtgtggcacctatgggaagcgattgggtcaaatagtttccccaacatagagaaggggacacaggctttgaaacatgtcagcagcttcctcattgttctaccttacagcatgcttatttgtgtggctgaaaggagtggaggtctcggatggaaatagctctgctgttacctgattatcctctctaggactgtccttgccttcaggattcctgtatagtacagttctctgctcaacatccacaatagactgtgttcaaatcccagctccaccccttccgagcaatgactttgggcatattagagaacctctttgtgccacagcttcccccaaatataaaagggatgagtaagaaaaaga

SEQ ID NO: 514852 - DNA, 648 bp, Homo sapiens
ctgcttttttcagtagggtccctgggatctaacctgcaaggtgtgtgcttctcgtatgactttgtcttgagaacatggaataaataagtctagatgtgcatttcagggcccacgtaatacaagatattacttcaagttcacatttgctgctgcacaattatgttcaaataggacttcctaggtaagatgttctccaacacagcacacattgaactgaggagagaaaggtaaatatgttggatgcaggccaggaactgtcataaagctgatggctctgaccacctcttttttgtgtggcacctatgggaagcgattgggtcaaatagtttccccaacatagagaaggggacacaggctttgaaacatgtcagcagcttcctcattgttctaccttacagcatgcttatttgtgtggctgaaaggagtggaggtctcggatggaaatagctctgctgttacctsattatcctctctaggactgtccttgccttcaggattcctgtatagtacagttctctgctcaacatccacaatagactgtgttcaaatcccagctccaccccttccgagcaatgactttgggcatattagagaacctctttgtgccacagcttcccccaaatataaaagggatgagtaagaaaaaga

SEQ ID NO: 514853 - DNA, 209 bp, Homo sapiens
gacctaaccaattcaacaactaaacagatgtaatagaacttattttaaaatatttcagcaaaaatacagcacttaygtaaaaaaatatcaattcttaaatctgcatatgagtgtgtacattattatactctctatttttctatgtgcttaacattttcataataaaagtcaaaagactggcaaataataaatgatacttcctttataac

SEQ ID NO: 514854 - DNA, 638 bp, Homo sapiens
attttaaagcagctgttataaatataatgaaggattatataaatataatctttatcttacataagataaagataagataaaagatggttataataaatgaaaaagtgaatcttaaaaataaatcaaaactaaaatatctgaaaaatctaraagtaaaaaatataatgtctaaaatgaaaactatcctgaatagaatcaatagcagaatggatatagctaaagaaatggtcagcgagtttaaaacaagtcaataaaaaatacctaatctcaagaacagagaaaaaatggaaatatactaacaacagtaatgacataaaacagtatcaagcacatttttggagtccagaaaaagagaagatgattcagaaaatgaattcagaaaataggaagtttcataaaaaataaaattgaagaaatcaggagaaaaaaccagccacatttgttaaaacagtctttcccaaattcaagaagctcatcaaacctcatgcagaaagaaaagaaaagaaaagaaaagaaaagaaaagaaaagaaaagaaaagaaaacccaccttgatctatcacagctaagctgataaaaaacagtgataaagagaaaatctggaaagaagccagagggagaaatattcatgttatggagg

SEQ ID NO: 514855 - DNA, 568 bp, Homo sapiens
ttttaggatatttcaggccttcccagcacctatcagattgcaggagagctgccaatctgctctttcatgatgctagtcatggcctcggagtttcattttaccatctggcacatcaggatcacctccccagatagtaatcatcatgccaacaataatacagtgaaatcagagttggaggattgcaaagaattttaaaggttattgcatacgctaccagagttttcaggactgcttggtrcttgtcaatttcataaccccatatctgatgactggctaagttttctctgctttgtcctcagaagcctaacacccatgccactgatatgtactcatgaaggcggtttcattagtgacccactgctgttccatactaggcagagagtgagttacccagaagtatccacctatatgctaacatttcccctacaccgctgaataaaatgtatttccccatacttgtatttgagggccaataataattgatggcttctgttgttgccataatccacttttctaagaaccttttatatcactccaaatttcatttccgctttggtacatttatgct

SEQ ID NO: 514856 - DNA, 596 bp, Homo sapiens
aaaaggtaatttaacattaatagcaaaatgcaaacatacactccactttgattctttctatttttcgctggtttgaagcacttacagtcacccagtcaactggacttaattgagtgtgccatcatgcattgccctgcactaggtaccatgcagaggaaggcagagtcatagtccctgtctggggaaatccataatggaatatccataagagtaccaccgctgtaggattttatatatacgtgtgtgtatttgtgtgtgtgtgtgtgtatatacgcacatatatacatatatataatacgatatatgtatatacatatatatatcaagcttcccaacccagtattataaggcaatttcttaaagttgatttgtgattgagtacaagatttaacacttccccttcctgtaagcatcatggttcctaagccttgtatgttcaagacacctgtctatggtgaaggmtgcaggctgtgaacttcaaagtggaatgatctctgccacctcacactcacaaaactcctggacttctgagccctgatgtacctctgcttgcggtggtgatctcatattctcatggatgcctctcacatgggaag

SEQ ID NO: 514857 - DNA, 628 bp, Homo sapiens
cttgttttgtggaaaactaacaatctccttattttgtctcaactgtgacataaccatgtaattatgctagaaagtaggatttctacataaggcagatgacaaataattcttcgttctaacctaaaaggcttattttctgcattctgcttcttaccctatggtacgcttcccatgaaactcagatatctccactacaatgagaaagtagcaaaagaaaatgagctgatggtttttgtttttgatttagaggattataatctccaggaggtcagtgacattctttagtgagttctctaaaacagataggacattgcagagtgcttaataaatctaatcattgaacagatttttgacaagatttgcattgtacagccaagctctgyacatgagagcaagacagacttgtaaatcacctatcatcagtgccaaggtttgtatccatcttcaaattcttattttccagatttgaaagactcaactatagcctacagaaaagatgctcaatgccttaggaaaatgtttattttttaaaaaagaatgatactggctaagagtaaagagttgaaaggagaaagcctccattactctagttttccatactaaatatcttgactaaaagattaagcag

SEQ ID NO: 514858 - DNA, 606 bp, Homo sapiens
acggagaaaccctgtctctactaaaaatacaaaaattagctgggcgtggtggcgggcgcttctagtcccagctactcgagaggctgaggcaggagaatcgcttgaacccaggaggtggaggttgtagtgagccaagattgtgccactgcactccagtctggcaatagagggagactctgtcaaaacaaagaaacatacaggagataaatgattctgaacttcgaaaaagttactttaagttacatatcaggttttgaaggaatctacaacttttctggtggttgrttttttccttctactacccgccatagtttaatcatccgatttaatgcctgataggtcattctgtgacactttctatgtctcctacatggctgctctgagtcaaaagtgtgaaggaaatcttgagtttcttcttcattgtctcagttgattttctcctctttattgtcctgtcttccccattgcctttttcaacaacttgtctctcaaaaaatggccctcacaaacacacaaaaacattttggtaccttctcagccttgtctgtttcaaaatgatttctccttgtcacattcttaacctctttccctcaacaacattgctgt

SEQ ID NO: 514859 - DNA, 606 bp, Homo sapiens
acggagaaaccctgtctctactaaaaatacaaaaattagctgggcgtggtggcgggcgcttctagtcccagctactcgagaggctgaggcaggagaatcgcttgaacccaggaggtggaggttgtagtgagccaagattgtgccactgcactccagtctggcaatagagggagactctgtcaaaacaaagaaacatacaggagataaatgattctgaacttcgaaaaagttactttaagttacatatcaggttttgaaggaatctacaacttttctggtggttggttttttccttctactacccgccatagtttaatcatccgatttaatgcctgataggtcattctgtgacactttctatgtctcctacatggctgctctgagtcaaaagtgtgaaggaaatcttgagtttcttcttcattgtctcagttgattttctcctctttattgtcctgtcttccccattgcctttttcaacaacttgtctctcaaaaaayggccctcacaaacacacaaaaacattttggtaccttctcagccttgtctgtttcaaaatgatttctccttgtcacattcttaacctctttccctcaacaacattgctgt

SEQ ID NO: 514860 - DNA, 592 bp, Homo sapiens
atgcaaaggtggtttaatgtcgtttgggcagaaaataaaggagcagcagaccccttcaactgtttaccaccgtaattcccccaccattagtatcaggattgaaaattaggcctaactcaaagaaggctgacactcttggttttggtaagatcctaaaatcaccatacatttattcatttatataagtatttattgataacctgtgtccaggctttattatatacctttttatayacttagataaacaggtaacatcctgttttactcagaccctactgaataatttgctgtatttgttctttattatttttgaaaaagataccaactttggagtaattcaaacaagttatagttttaatttgcatatagtccaacttcccaaatctacttcccacctgtatttccagactatgttattaaaccttctttaatggacagcaggaaaaatgaaagtgtaatttcctaaaaacgtgctgtgtcatgaagtaagatgatcacgatggaaagccagatgctgccattagctaactcttcaaggcttactctgaggcctgtacgttgttggcagtctctggtgttggggaccttcatt

SEQ ID NO: 514861 - DNA, 592 bp, Homo sapiens
atgcaaaggtggtttaatgtcgtttgggcagaaaataaaggagcagcagaccccttcaactgtttaccaccgtaattcccccaccattagtatcaggattgaaaattaggcctaactcaaagaaggctgacactcttggttttggtaagatcctaaaatcaccatacatttattcatttatataagtatttattgataacctgtgtccaggctttattatatacctttttatacacttagataaacaggtaacatcctgttttactcagaccctactgaataatttgctgtatttgttctttattatttttgaaaaagataccaactttggagtaattcaaacaagttatagttttaatttgcatatagtccaacttcccaaatctacttcccacctgtatttccagactatgttattaaaccttctttartggacagcaggaaaaatgaaagtgtaatttcctaaaaacgtgctgtgtcatgaagtaagatgatcacgatggaaagccagatgctgccattagctaactcttcaaggcttactctgaggcctgtacgttgttggcagtctctggtgttggggaccttcatt

SEQ ID NO: 514862 - DNA, 599 bp, Homo sapiens
ttcaaagctggatgagcatcaaagtcacctgggaagattttaaaattcagatttttaggctccatccttggagtttcaaacctaatagatgtgaagagcagttgataaattctgttaaaaaaacaaacaaaaatacctcacrtaattggacaaatttgagaactaccagcttagctgatctgactacccaagtttattcagtattaccctatgaagtgcagagcagggtcctaagaaaatagaatattgataagcattttggtagtaaaagaaatatgaatatatctgaaacttagtagaacatgcttggaaatatggaatataaacttcttttgtgcatacattttatttgtctcaagatcaaggaatggatttggggcatttataaccctacctcttcagagactctttaccttcttgatttttaatcctctctccacatcaaaacaggcagaatttgatgtaatttactttagcaataaaactaatttatatacatgtgttaattccaaagtcatttgaagtttagccttttatttttaatattcaaatataagatttgagttctagtaaaagattagttggagaaccagtctgag

SEQ ID NO: 514863 - DNA, 599 bp, Homo sapiens
ttcaaagctggatgagcatcaaagtcacctgggaagattttaaaattcagatttttaggctccatccttggagtttcaaacctaatagatgtgaagagcagttgataaattctgttaaaaaaacaaacaaaaatacctcacgtaattggacaaatttgagaactaccagcttagctgatctgactacccaagtttattcagtattaccctatgaagtgcagagcagggtcctaagaaaatagaatattgataagcattttggtagtaaaagaaatatgaatatatctgaaacttagtagaacatgcttggaaatatggaatataaacttcttttgtgcatacattttatttgtctcaagatcaaggaatggatttggggcatttataaccctacctcttcagagactctttaccttcttgatttttaatcctctctccacatcaaaacaggcagaatttgatgtaatttactttagcaataaaactaatttatatrcatgtgttaattccaaagtcatttgaagtttagccttttatttttaatattcaaatataagatttgagttctagtaaaagattagttggagaaccagtctgag

SEQ ID NO: 514864 - DNA, 651 bp, Homo sapiens
tgtgggtattggctgtggtgagaatgggctctgggcgggccagttcttgggcccctacgttgggtgtgtgggcactgatggtagtgacaacagaacctgtgctggctggtcctcagcaccctgggtgtggtgcacaggcacrggtagtggcagccatagtctggcttgtctgttccttgggctgctccttcggaccctgggcagggcatgcaggtgtcggtggtggtggcatggagacacctggtgggctggtccttgagttccaaggtagtgtgtgtgggtgccaatagtaacagtggtgacccaagaaggcttatctttgagccatcccaggaggtgcacacatgtactggctgtggtagtagaggtctttgggccccttcgtgaagcatgtgggtgttggtagttattgtgggaggcaaggtgggctaggttttaggtacccaggcagtgtgcttgggtatacaatggctgctgaggtaggggcaggatcactgtttgttgtggaggcttgggcaggtggctctcaggctataaggagcatgtgctttggctccctatgtcttcggggcagcctccttgatgtgctggactgtctattccctgtgttgtagggtgttgcatgggcttgggtatcagagacatggccca

SEQ ID NO: 514865 - DNA, 597 bp, Homo sapiens
ttaaattcagccccaaagaaccctttctgctctcaggggccatgtctgttttgttccttttcctttttgcctgaaagataacctattactatrgttttaaaaaagttctcatagatattttaagtactttttagttatatataaagttttcttcacagacatatgcagatttcagagtcactgtccagaatattagagcactcaagggcttgcctttgaagcttcccacttatcatctgaagggcgagatttcccttgtggatgaattggaggaaatatagatcaagatttttgattctatttagagaaaattctattttgaaaaagtcaatgcaagatggggaattggagtggggttaatggcaagggcaggcaaggtgaagcagagagagaaaggaaagaaaagcagaaagaaagtggagaggagaaaaggaggcgaaacagggaaaagggaggtggtgagctgtggactttgaaatgagaggtaaccaggaaaggagagagattgagaaagctgagaagggaaaggaaagagaaagaggaactgaaaatgcaaaggagaaacagagaaaaccagcagagaaggaaagaaacagg

SEQ ID NO: 514866 - DNA, 605 bp, Homo sapiens
ctgttatcttcctgtgaatagtaccacattttttatagcagacagattagttataggccaattgcctcgaacctgagtagcactgcttttaaatgttgtttggcatgtatgcaggatgcccaaagtgtttcccaggcccctctaatttggtgggtctgaaactccaaacgctattttcctgttgccactctttctaccctatggaacatttctttgcaacaactagaaggacttacacattaaaacacaaaagagaccacaacactttcctgcttaaaactctcgggtgtcctctagtggctgcgagaatagaatccacctattaatggtctataagctttgagtgatttggtttcctctacctcttcaacttcaactcctcgattctctcattcattttctactctccagcatttctcttagttctttaaaaagttgaacctcacttctgcttcaaatgtttttcacatatatttccttcagtcacttgcatggttaragtcttagcattcagatttcaacaacattgtctgcaagatattgtctaacatgccaaagctcacttctaaacattctcagatatatccccctgtttaatttttcat

SEQ ID NO: 514867 - DNA, 586 bp, Homo sapiens
ctgcatttctcaagatgccttatcatacaactgtgttcacactgaacatttctttttatcctgtgtgtaacgatctcatgagaaggcaattactattcaggctcattgtcttcaagatgactattactcttcacaaattcctttgatttgataagctgtgtttcttcccttcatcccacaatgattttcagcaagtctcttccaggttagcagttatacagatgcctggggccatccccccataactctgtgataaacagtttcattctccaaaatgccacttgctgttctgacacctttaaaatgayaattacactatgcagtcctctctttatatctttgtttataattatgatttcaaaagtggtggagatgcatatttcttacttttgaaacaaatcacagcttagtttatactcaatgctcttgcctgacatggagcagaagtgagtgaatagggtgcaaggacatcgcagattggaaagacacatgtgggtgggaacagaaagacagccattgaaaagcttggttattatagggaaacaccagaaagtacaaaatagccaacatgggaaatcatagtatt

SEQ ID NO: 514868 - DNA, 576 bp, Homo sapiens
aagcttgtctcaggccttatagatgacttttaaaacctactttaaaagattcggagtttaatatgaaatggtaaaatgtgatagtgagggcttcttaatgtgatagtaagggcttcctaatgtccccagtaagaaacatcattgaatagaggaccaaacatgccatctttgtcaggagtgggcacgatcagaggctcctgaggagagggcagcgggatccaccttgtactgaaaaatcacagtgggtctgaatgttcgtgttcctacaaaactcataggttgacatcctgaccctcaaggtgacggtattagaagatgagatctttasggagtgattagatcatggggatgacaacctcatgaatagaattagtgttttcataaaagatgcccaggacagaccattacctcctccaccgtgtgaggatacagccagaagcagccactcatgaatcaggaagcggtccctcaccagacaccaaatctgccggcacctagatcttggaattctagcctccagaattgtgagaaataaatttctgtagtttataagccacccagtatttttgctgtagc

SEQ ID NO: 514869 - DNA, 621 bp, Homo sapiens
tagtgacagaatagaaagcattgaattgttgttttaaatacactaaaaaattgttattgaattaattatatggcttgaatttataaaataccactcaaggcaacaaaaaattaagtaatacttctagtttctaataaaatttatttttaattattccccatttgtttataaaaatattccctccattatgcactctcattataattttattgcctctcagtttagaaaatggtttgattctttttcttgacatccccaatacatacatttattacagtgaaactaccgaggcatcacagtggaattttctatttcttttattctccatctcgcttctcttgctacatacacacacacacacacacacacagagagagagagacacacatacactttcactctttcactcaactaaaaacagaaacaatsagaaacaataatttttttggaaaaataaaaaaaataagatgagaccaaggtttatttttttctccttaattccctgttgcctctccttatatgcagtgtggtttgggaaaataaaacaaacaaaacaaaaacatgggctgaagtctctgatagatttgggttcaactttcagatatattttcaatgacatag

SEQ ID NO: 514870 - DNA, 646 bp, Homo sapiens
gcacaatccaaggtaggccctgccaggatatgttagcaggaaggaggcccgcaggtgccaggacctgctttggagtgccatgatcaccagtggcccaacttgttgattaatgggaatgccgttgggttcactgtctcaggaattttttgacatgaccaagtgtcacctcactctctgtaggaaataaagcaagaaactcaaagaaaggcagtcccttgtcaagcagtcattagtgcttaaaattcctggaacttccgagaaaagggccacatccctgagtcctgcaggtggtcagtggagggatraggggcaggcatggagtttaccagaaacatcctacatgcacagcttcagcaggacagcatgtaggtggagtcagcagatatgcacccagcgagactgaccagaggccgtgtggctcatgtgcacactctggtgtgaggctgactgtatctgagtatagtttttctgcttactgggggtgggatttcagttgcttgatcttttcagagtctcagtttcctcatctataaaatagaactggcactaatatctaaccgtagggcctggcacagtgattggcacatagcagtggctcagtatacaccagccgctgttggtgtgcctggaggtcgccccattcaca

SEQ ID NO: 514871 - DNA, 646 bp, Homo sapiens
gcacaatccaaggtaggccctgccaggatatgttagcaggaaggaggcccgcaggtgccaggacctgctttggagtgccatgatcaccagtggcccaacttgttgattaatgggaatgccgttgggttcactgtctcaggaattttttgacatgaccaagtgtcacctcactctctgtaggaaataaagcaagaaactcaaagaaaggcagtcccttgtcaagcagtcattagtgcttaaaattcctggaacttccgagaaaagggccacatccctgagtcctgcaggtggtcagtggagggataaggggcaggcatggagtttaccagaaacatcctacatgcacagcttcagcaggacagcatgtaggtggagtcagcagatatgcacccagcgagactgaccagaggccgtgtggctcatgtgcacactctggtgtgaggctgactgtatctgagtatagtttttctgcttactgggggtgggatttcagttgcttgatcttttcagagtctcagtttcctcatctataaaatagaactggcactaatatctaaccgtagggcctggcacagtgattrgcacatagcagtggctcagtatacaccagccgctgttggtgtgcctggaggtcgccccattcaca

SEQ ID NO: 514872 - DNA, 664 bp, Homo sapiens
gatgcagcccagttttatgatatatgtgtggggtttgttctacaccttggatgtttagactagagactgcttcttcagtcttattaataactcggttacttattctagtagatagtctctatctactatagaaacaaagatgtttctcccaaagaatcacacctactggtatacatatcccgtgtagttccctctcacataggacataagctgaccctgcgtgaccatcaggatgtggcagaaatgacgcatgatgtctgagaaaagatcatgagaagccctacaaggttccaccttggtctcttggtattttgctgtagaacacttctcagaatctacatgatctgaggagcgaaagccacagagagaggctacatgtaggtgcctccagttgaaagccacatctgaactctccagccaacaggttgcatcaatagccagacattttaatgagctattttttttgtaatccagtcaagccttcagatgactacagacttaatcaacatctgactataaatgcatgaaaaacccaagcaagaactgtccaggtgagcccagtcaaccaacagaaccaaaagatatagtaataaattattttaactttctaactttgtttcacagcaataaatattcagaacatctctcyttataaaaataaaca

SEQ ID NO: 514873 - DNA, 524 bp, Homo sapiens
gctgccgtggagagaaacctgcaatccatagttaaaatttatttgtttgttttttgagacagagctcgctctgtcacccaggctggagtgcagtggtgtgatctcggctcaccccaacttctgcctcccaggctcaagcgattctcctgcctcagcctcccgagtagctcagattacagaggcgcgccaccatgcctggctaatttttgtatttttagtagagatgggtttcaccatgttggccaggctggtcacraactcccaacctcaggtgatctacacaccttggcctcccaaagtgctgggattacaggcatgagccactgtgcccagccggtagttaaactttaaatatgaattgtctttgatctattatacctcacacatgcaaaaagacatatggataaggttgtccagtgcagcatcactagtagcaaaaaaaaaaaaaaaagtgcaatatggcatatccacccaatacatttttggatgactgttaaaagtgctgatgtagaaatgtctgctat

SEQ ID NO: 514874 - DNA, 381 bp, Homo sapiens
aaaggtatttttactctatgtagaatttgttttatttttgccttgtaggcatattccctttttctaagcgtgctgtcttggctcttctaaaatggttgtcttagctaaaactcctggttgcaagctagaarctcagtctgaactacttaagaaaaaaaggattttattgtaggagtcctggggtatcacagtataattaggagaatttctttacatttggcaagtttagtattcacttccacctagggaataactagagccacatgctcaaaagctcccgggtactgtccttttggccatcatctctcagtttgcttctgtgtctgtgctggcatcattctggattcactggaaattgctttctttttgtggctgaaaccc

SEQ ID NO: 514875 - DNA, 381 bp, Homo sapiens
aaaggtatttttactctatgtagaatttgttttatttttgccttgtaggcatattccctttttctaagcgtgctgtcttggctcttctaaaatggttgtcttagctaaaactcctggttgcaagctagaaactcagtctgaactacttaagaaaaaaaggattttattgtaggagtcctggggtatcacagtataaytaggagaatttctttacatttggcaagtttagtattcacttccacctagggaataactagagccacatgctcaaaagctcccgggtactgtccttttggccatcatctctcagtttgcttctgtgtctgtgctggcatcattctggattcactggaaattgctttctttttgtggctgaaaccc

SEQ ID NO: 514876 - DNA, 626 bp, Homo sapiens
aacaatcacaataggttttaactacaaatgtgaggatattctaaatgtcagggtggaaaaatttttaaaataattttatagtaatttttttcatcatagtgacagtgtgctaaattttttaagtcaaatattactgtagacatttaagtcaagattctaggaagttgttctaaagtccaaaatttagtttcatatacaatgatattatatatatatttgtatataaaattaatatatgtgacccatgtttgaaatagttgagagattattatatcaaagattcttgattatataaaaggccaattacttataggcacacatgctttaaataattacaaaggcagttgtggttgattcaactcttgctactggcatktatatggatataatattatggtctgaacaatatttaggtaaatttatccctcatatgatcagaagaacaatgcaagatagtttatatctgaaaggaaaaaaaatctttatatggttctgaaagtctaaatcattaacaacttggataataattagaataaaaatacacaaatatgccctcttcctagcaataagtacacagtgacaacagaatcaaagcatgtggctatgtgcatgtttatatttcaaga

SEQ ID NO: 514877 - DNA, 542 bp, Homo sapiens
aaatgcattgctgtattattttttaatttaatagatggaaagatataccatactcatggattaaagtgtttaatacctttaagattccttaattttcctcaaatttatctataatttcaaggtgaggccaactaaaatctcagtatgcatttwttatatagacaagcagataacaacatttatatatataaaaagagacctaaaatatccaaaacaactttgataaataacaatgatgaggagcatacactaccatattttaatacttattgtaaaagtacagtaagcacaacggtatggttttgttatacagatagtcatgctgataagcgaacagaataaagaattcagaaatagactccaacacagatttccaattaattttcaacaaagatgacaaggcaatttaataagtaaaattatatttttatcaacaaatcctgctgtgacaatgtataccaaataaaaagcttgtttttcatcaaaatgcatcacagactaaactcaagagcagaaatatactaaaaagaaactaaagagaa

SEQ ID NO: 514878 - DNA, 542 bp, Homo sapiens
aaatgcattgctgtattattttttaatttaatagatggaaagatataccatactcatggattaaagtgtttaatacctttaagattccttaattttcctcaaatttatctataatttcaaggtgaggccaactaaaatctcagtatgcatttttwatatagacaagcagataacaacatttatatatataaaaagagacctaaaatatccaaaacaactttgataaataacaatgatgaggagcatacactaccatattttaatacttattgtaaaagtacagtaagcacaacggtatggttttgttatacagatagtcatgctgataagcgaacagaataaagaattcagaaatagactccaacacagatttccaattaattttcaacaaagatgacaaggcaatttaataagtaaaattatatttttatcaacaaatcctgctgtgacaatgtataccaaataaaaagcttgtttttcatcaaaatgcatcacagactaaactcaagagcagaaatatactaaaaagaaactaaagagaa

SEQ ID NO: 514879 - DNA, 542 bp, Homo sapiens
aaatgcattgctgtattattttttaatttaatagatggaaagatataccatactcatggattaaagtgtttaatacctttaagattccttaattttcctcaaatttatctataatttcaaggtgaggccaactaaaatctcagtatgcattttttatatagacaagcagataacaacatttatatatataaaaagagacctaaaatatccaaaacaactttgataaataacaatgatgaggagcatacactaccatattttaatacttattgtaaaagtacagtaagcacaacggtatggttttgttatacagatagtcatgctgataagcraacagaataaagaattcagaaatagactccaacacagatttccaattaattttcaacaaagatgacaaggcaatttaataagtaaaattatatttttatcaacaaatcctgctgtgacaatgtataccaaataaaaagcttgtttttcatcaaaatgcatcacagactaaactcaagagcagaaatatactaaaaagaaactaaagagaa

SEQ ID NO: 514880 - DNA, 542 bp, Homo sapiens
aaatgcattgctgtattattttttaatttaatagatggaaagatataccatactcatggattaaagtgtttaatacctttaagattccttaattttcctcaaatttatctataatttcaaggtgaggccaactaaaatctcagtatgcattttttatatagacaagcagataacaacatttatatatataaaaagagacctaaaatatccaaaacaactttgataaataacaatgatgaggagcatacactaccatattttaatacttattgtaaaagtacagtaagcacaacggtatggttttgttatacagatagtcatgctgataagcgaacagaataaagaattcagaaatagactccaacacagatttccaattaattttcaacaaagatgacaaggcaatttaataagtaaaattatatttttatcaacaaatcctgctgtgacaatgtataccaaataaaaagcttgtttttcatcaaaatgcatcayagactaaactcaagagcagaaatatactaaaaagaaactaaagagaa

SEQ ID NO: 514881 - DNA, 551 bp, Homo sapiens
aagaccttcctacagattgtcaacaaaagctaaaaaagatcctagaagtactacatctggcagttaggcagaggaaatcattggaaatattgcctgctatgaaactacagaaatactaaatattctatcataaacttaagattaaatgcattgttgacctcatgagaaagtgccaatatttgccaaggaacaaataaagtaagttcggagatcagaagagcaaggaaaggaagactgaagtttaagggctgcttcagagcaaacactgcatccagatccaacaatctttgggactaatgaccacagacatgtggatgggaaacaaagccttgccaaggtgtccctaaggtagtgacatagagacaggaggcaaataaattctaggcagaaaagggcgggtctcggacaaaaccccactctcragcctgaaactgtggcccaaagtgaaaacttccatccctgttttcctgtgccaatattgccttttccaaaacacccatggccccaccccaccccatcccatcctatttctataaaaacctcagactcag

SEQ ID NO: 514882 - DNA, 551 bp, Homo sapiens
aagaccttcctacagattgtcaacaaaagctaaaaaagatcctagaagtactacatctggcagttaggcagaggaaatcattggaaatattgcctgctatgaaactacagaaatactaaatattctatcataaacttaagattaaatgcattgttgacctcatgagaaagtgccaatatttgccaaggaacaaataaagtaagttcggagatcagaagagcaaggaaaggaagactgaagtttaagggctgcttcagagcaaacactgcatccagatccaacaatctttgggactaatgaccacagacatgtggatgggaaacaaagccttgccaaggtgtccctaaggtagtgacatagagacaggaggcaaataaattctaggcagaaaagggcgggtctcggacaaaaccccactctcgagcctgaaactgtggcccaaagtgaaaacttccatccctgttttcctgtgccaatattgccttttccaaaacacccatggccccaccccaccccatcccatcctayttctataaaaacctcagactcag

SEQ ID NO: 514883 - DNA, 591 bp, Homo sapiens
ggtcccaagataaaaaatgccaacaggtagcagaggctgctacaaggaaaggttctcctggtgcctcccgagagatgtgggccctgcaggcttctcagtctctacccaggaacaccgaagctgtgagcagattgatcttctgtttcaagccactaagtctgaggtggtttgttgcagcgaccatctgaaaattgtgctccattgtgaatgaacaggctaaaaactgttaagtgctaccctgtgaataaggaaaaatggaaaaatcacatgattataccacgccactacccttcttaataagatggaaacaaatacctgaagaactaaataaaataaacagcaaaactkcttatgagtcattttatattacttattagaaaatactttttatctaaatgcaaaaatatatgcttttaagattatatattatctacaatttcagaaatgtgagccagtatttaatgataaaaatagtatatgctgaaaacatgaaacaaataagaatgtgaaattaggatgaaattgtcatcatccgtatcacatccccattccactcacccagcctctgttattacagacaattttagtcaa

SEQ ID NO: 514884 - DNA, 591 bp, Homo sapiens
ggtcccaagataaaaaatgccaacaggtagcagaggctgctacaaggaaaggttctcctggtgcctcccgagagatgtgggccctgcaggcttctcagtctctacccaggaacaccgaagctgtgagcagattgatcttctgtttcaagccactaagtctgaggtggtttgttgcagcgaccatctgaaaattgtgctccattgtgaatgaacaggctaaaaactgttaagtgctaccctgtgaataaggaaaaatggaaaaatcacatgattataccacgccactacccttcttaataagatggaaacaaatacctgaagaactaaataaaataaacagcaaaactgcttatgagtcattttatattacttattagaaaatactttttatctaaatgcaaaaatatatrcttttaagattatatattatctacaatttcagaaatgtgagccagtatttaatgataaaaatagtatatgctgaaaacatgaaacaaataagaatgtgaaattaggatgaaattgtcatcatccgtatcacatccccattccactcacccagcctctgttattacagacaattttagtcaa

SEQ ID NO: 514885 - DNA, 652 bp, Homo sapiens
ataagcgttaaaataacacttcatgagctcaggagtgaagagcaaatcaagatagtttcagacaaaagcgaacgaagacaatttgattccagcggacctaccctgaatagctcttcatgtaaagtgtgcaccccgtgtctgggtgtcataaagtctccgtacatttcacacatgagattgtgaccccatgttctcccccagatatgcaatctcagaaaaaatgtatctttcacaattatatatattttcttgatttctttcaaaaagcctgtgcttaaaatatttgatcctctggtgcatgttcctaagactaatttgtggcaaaaaaaataaagccttctccgttatcaaattcttcaattttcaataaatcgaaagtttaaaatagatagtctccatttttcctgccaaagcatattctatgattacattaaattacactgcattttaaagagattttccatttcttttttgaatatttaatcactcacatctcataacaaccaggtgacaaccatttatttagcacgtttttatacatatttacagccattaaggtggaaggagtaagagytggaaaaaaatggaaaagagaaataatgaagtaaagctgcatttttatgcttgcactcaacctgggagaccaagattt

SEQ ID NO: 514886 - DNA, 542 bp, Homo sapiens
tttgcatccatttttataagatattactaagccatcctacttattttatttgacaatttcaaaaacttctacattaaatatacaaattratatgcatatgtgctaagatatgtaattattcatagaaaaaagactaaacacacccaaatgtaagtactaattgtatctacttctaagaagtaagttttaaataattttttaacataactgcccctcaatttctctcttttacattttccaaaataacatacacattgatagacaaaagagccatttaaaactatcatataaaattatatatttctagcattatacttaagacatacattcaataaaatgattagaatgaatactttcagtagataggacaatacgtgcttctcaatctccgtatcttttgcacattcaataatttctacatgtattctttggcaatgaaaaacataaactttattataaaataaaaggtggcagcactgatgccactttatacttattatcctggattctctgaggtgtagctgcagcagatcataataatg

SEQ ID NO: 514887 - DNA, 542 bp, Homo sapiens
tttgcatccatttttataagatattactaagccatcctacttattttatttgacaatttcaaaaacttctacattaaatatacaaattaatatgcatatgtgctaagatatgtaattattcatagaaaaaagactaaacacacccaaatgtaagtactaattgtatctacttctaagaagtaagttttaaataattttttaacataactgcccctcaatttctctcttttacattttccaaaataacatayacattgatagacaaaagagccatttaaaactatcatataaaattatatatttctagcattatacttaagacatacattcaataaaatgattagaatgaatactttcagtagataggacaatacgtgcttctcaatctccgtatcttttgcacattcaataatttctacatgtattctttggcaatgaaaaacataaactttattataaaataaaaggtggcagcactgatgccactttatacttattatcctggattctctgaggtgtagctgcagcagatcataataatg

SEQ ID NO: 514888 - DNA, 542 bp, Homo sapiens
tttgcatccatttttataagatattactaagccatcctacttattttatttgacaatttcaaaaacttctacattaaatatacaaattaatatgcatatgtgctaagatatgtaattattcatagaaaaaagactaaacacacccaaatgtaagtactaattgtatctacttctaagaagtaagttttaaataattttttaacataactgcccctcaatttctctcttttacattttccaaaataacatacacattgatagacaaaagagccatttaaaactatcatataaaattatatatttctagcattatacttaagacatacattcaataaaatgattagaatgaatactttcagtagataggacaataygtgcttctcaatctccgtatcttttgcacattcaataatttctacatgtattctttggcaatgaaaaacataaactttattataaaataaaaggtggcagcactgatgccactttatacttattatcctggattctctgaggtgtagctgcagcagatcataataatg

SEQ ID NO: 514889 - DNA, 526 bp, Homo sapiens
tgtttatcaaaagagaatgtttgtgaggccggtcctgtgttcaaccagaattgtagtagtctaggttgtaaatcagagttaggagacatctggtagctcttattgttagggagtttaccaagtgtggtttttcttgtaattgtaggaatttaggcaattgccttcccagccaggtcctgaacccttgacatgtaggtaactgcatccttaagcttagggtctgccttagttgatataggggcatctattttggtgtctcagatcacaagcacatactctaaggatttacaggtaaaagttatacaattaatctaatagcaacgtacagattggttaattccactttattaggaaataatgtgcccatggaagaaggaatacctaatgaagaccttcagagatgttagtccaagttttgttgaagagggaagaaaatgtaaaaaayacagaggctggaattttaggatgggtttggaaattgaatatagtctattatttctaagttatatttgtatacctggcttaa

SEQ ID NO: 514890 - DNA, 618 bp, Homo sapiens
ccaaccttatatcagacaattaggcctggtaataagatacaaatcatcgcatttgttcccaacagagttccttctacagagaacctaatgatatatctcattttctacatccactcaggagattgtagcttctggtaacaatagtctcaaaggaacaagggagcagaaagtactatattaaatagtggtgtgtaaggtgcaatcaggaatatgagaaatgcgagagtcttccaggcataactattggcaaaaacagtaatgcagtctatttaatgccatcrtaaacaaacatagcacaacattcagtggacaaattcgaatgaaatgtgaaaaacagtgtttagccaaaggcatataaaaggaatacttatcccaccaatggtgctcacatttaaaagcccaagaataaatgaattacaagtttaactaagagggtttaaaattctaaaataaaatgaactttgaaaagtcagaaaaataagaaaattaaaaggaactatttttaaattaggaaactgaaatctggtgtaaatgaatgatcaaatcaaagtttaaaaaattgcttaaaaataaataaataaataaataaataaataaataaataggcagagccaaaac

SEQ ID NO: 514891 - DNA, 622 bp, Homo sapiens
gccctcttgtcttcagaatgtcacctattaatgtccatgatttttgctgttgtttttgagacagggtcttgctctgtcacccaggctgtagtacagtggtacaatcatggctcattgcagcctcaacctcctggactcatacagttctcccacctcagcctctcaagtagctgggaccacaggtgtgtgccacygcacccagctaattaaaaaaaaaatctgtacatacagggtcttactttgttgcctagactggtcttgaactcctggcctcaagagattctcccgcctcagtctcccaaagttctgggattccaggcatgagcctttgcacccagctaatgtccatgatttttaggactcatttgactttaaaaaaatacctaggattgggtctatatattcgggaacttcatgagtagattttaggggatttataaaagctcagaaattatacatgatgctttttattgatgtgcgtttttttccctgtgtcagaaagttagaggttttcttgactctcaaggtggtcttcaagaggaatgccaagacctcacatttctctgagtgtttctttatctcccatcctgtgtaacttgcattgatatggtagcttagatgg

SEQ ID NO: 514892 - DNA, 541 bp, Homo sapiens
aaagggaactgacaccaatctgctgatgaccatcctgcttgttgtgccatgagtaataaaatcttttatatctgatccacaagtcttgtgtcttctaccagaattcatggaacaaaaacaggcaaacttgtaagcttgaaagtatgataaaaatctcagtccttaaccattcttgatctttcattttattcatcattttagattattggtaactatgatgcatactatgacactatctttacttgtccatgtcttcattgtatcaaagataaaataactgaatgtcatagrgtgatgatctgtatcccctgacccattgagagtgacagtttgcattggataatggaaggaaaccactatgttttaatatattctgtttattctggaaaataagacccttatatgcactctacatatctctttgaatacaacatcaaggtattttgttctgagtgagaatggcttgtgtattcaccctccttgacctaacagctaaggagaaatctggaatgaaaatgaggttgagaaatatcagcctcag

SEQ ID NO: 514893 - DNA, 564 bp, Homo sapiens
aatttacaaattcttctttccacatgtgaagactactaaaaaagttaaacaactgcttaaagattaaagctgaatcctcagagggccttcccaattaatgtaaacgtgcacccacatataatctcaacctaaaatgtgcaattaactcgtaaaggcaaatgcaagtaaaataaattaggtttgaaaatagatgctagtaaattccagtgaaaacctgaccctcagttgtagcaccttcaactcctaattaccagcagaaacatttctaatcataggctttgcatgtttttaaatccaaattttaatattatttttaatgtgtaacagtagccataaccctaacagagattgttcatgaagctgaaatgtaaaaacaaaaaaaatgattgcagcatcttctggtaggatgaaacctttgggaatctgggctattccaatgacaaaagcaaaatawggccagtatgaattttgtaataaaactagaaatgagttgaatctatatttatttatagtatattgtcaaatagggtgagtgctttttaaaaaattgcactccttgtcgtt

SEQ ID NO: 514894 - DNA, 564 bp, Homo sapiens
aatttacaaattcttctttccacatgtgaagactactaaaaaagttaaacaactgcttaaagattaaagctgaatcctcagagggccttcccaattaatgtaaacgtgcacccacatataatctcaacctaaaatgtgcaattaactcgtaaaggcaaatgcaagtaaaataaattaggtttgaaaatagatgctagtaaattccagtgaaaacctgaccctcagttgtagcaccttcaactcctaattaccagcagaaacatttctaatcataggctttgcatgtttttaaatccaaattttaatattatttttaatgtgtaacagtagccataaccctaacagagattgttcatgaagctgaaatgtaaaaacaaaaaaaatgattgcagcatcttctggtaggatgaaacctttgggaatctgggctattccaatgacaaaagcaaaatatggccagtatgaattttrtaataaaactagaaatgagttgaatctatatttatttatagtatattgtcaaatagggtgagtgctttttaaaaaattgcactccttgtcgtt

SEQ ID NO: 514895 - DNA, 477 bp, Homo sapiens
ctttatataagctcgcctataccggaagactgtgtgaaaaatgctgcgataggttttgatttttctcctttagatcatagcaggatgacctttcattacataaagtggtcttctgagcagccaacctaagtggtacataatcttctgtgagttcctatgcacagagggccataaatattcatctggatgggcttctaaactttttactgccttaaactttttactacacattagattgcatatatcctagaacataaggcttgtcacagccaagcagataaatggttcaccatagtgaagtcctgtttcttgacagaggaatatatctggggctccagaaggtgataaagatcacagagtaccattgacacataattgtgcaatgctgtcccttggawaaccaatgtttttgcaatgttcaagttgctctcctgggagtaaggcacattgaaaaattctgtcttatttttaggccac

SEQ ID NO: 514896 - DNA, 627 bp, Homo sapiens
gtccttcatttcccttttttaaaaattaatatacaaatgaagttttaaagatcttttttaagaatgggcaaagttagtctgggcatccattttattcaaacatcgatgcttcaggacaaaaatctcaagaatatgaactttaaaaaatattttcaaattgtatattaatacataacacataaattataataaatgcgtaaatataggactgcattttctcttgatttccaaattcaggccctgacttcaacattatgtacttcttattttcagacccattaatatctgtcctgcaaagtttgaacccacaaaaaaaatttaaatactaaattgctataattagtcaagatttttggagaggaacctttcgtctgagggtaaagggtatttttgtcctaatttacataaatgagtattatttagtgattaattgtctcacttcttgactcacaatcagaactgttatttatttattattacttttaagactaatcagtcaagtgcaataattaaaaagaaggaaggagtagaacaaggagtttgattwgtaactaagtgtgaagagtcagttgagttaactcattacctttgggccagcctatttgtggttgtgatgaatgctcccta

SEQ ID NO: 514897 - DNA, 488 bp, Homo sapiens
cttggattacaggtgtaagccaccacgcccggcctaattttgtatttttagtagcgtcagggtttcaccatattggccaggttgctctcaaactcctgacctcaggtgatccgcccaccttggcctcctaaagtgctaggattacaggcgtaagccaccatgcctagccagtattagtttcttgatcaaaaaaaggtgtgtgatttggcttattttatggtcttaaattctgagattttgttaatttttgattcctaggtcaagaccttgttaatagtttataagacagaaattcggggccaggtttggcggctcaggcctgtactcccaaccctctgggaggctgtggcagcataattgcttgaggccaggagttcgagaccwgcctgggcaacatagcaagactttgtctacacacacacacacacacacacacacacacacacacacacgggtaggggtgcaaacttggcaggaaaaaaaagcag

SEQ ID NO: 514898 - DNA, 652 bp, Homo sapiens
ggtggtcaggtccttagtcttccttctagtctgttaaycccacactcctttaacagaaccatgcttgctgcccttaccctgtccacatccctgaaaggaaacgggtctctctcagccagatgcagatagttgacactcactgcctttgctatggcagggggctccttatgattaacccagaacaggaaaaacttagtgtcagctgaccgaaaggaactcagccttaatttttcaaaaagtcactctcattccagctatctccaggaaggcgctggagtatcttcagcatgagcacagagattcccactgccgaaatattcggaatactttccttgatttctcagagagactctgtaggtagaaaagcttattattagtgattacgttcttttatagagacaaaggatagatcatttgtcccacaatgatctggatatgtctaggactaagtaaaaattcattttgtagtatgctatacataatgtatacctaaagtcagactaaagatcgaggggccaacgttctactgtcagactcctgttaacacactctgagcctctaagacacggctcatatcctcccttcaggcatctgtatctgtcctcatctttgtacttgaggatgacacttctgacttgccgttagtacagca

SEQ ID NO: 514899 - DNA, 555 bp, Homo sapiens
tgtgaactgcacatgagagggatctagacttcgggctccttatgagagtctgacacctcatgatctgtcactgtttcccgtcacccccagatgagatcatctagttgcaggaaaacaagctgcrggttcccactgactctatattatggtgagttgtacaattatttcattatatattacaatataataataatagaaataaagtacacaatacatgtaatgtgctcgtatcatcccgaaaccatcctcccaaccgtggtccgtggaaaaatggtcttccatgaaaacggtccctggtgccaaaaaggttggggaccgctgccagatcaggtttgtccctgtatcacaccgttgttccatttgcctgaaatatctattatttctccagaatccactccaaaggaacaaaaaggagcaaaaaacatgactgacattttttccctttggtcatccaactttaaatttattcacatggtctactttttgcattggaccacggaagggctcctgcctgcttctccatgctgcctagggagggcccaatatgctgtttat

SEQ ID NO: 514900 - DNA, 564 bp, Homo sapiens
ggtgtggtagtatgtacctgtaatcccagctattggggaggctgaggcaggagactcrcttgaacttgggaggcggaggttgcagtgagctgagatggtaccactgcactccagcctgggcaacacagcaagattctgtctcaaaagaaaaattctacctgaagagctcttatttcacaaagcacagtaaaaaaaaaaggataaaatatgaaagaagatgcaggaaagttatacatttttataaagggatataggaatttgaaagacattccaacatcagcaaaggaagaatgaagactggaaaacaaaattcagatacaaatattaaaggagccatgattatctagaataaaagtaatggttaaataaataatcatcatatccaaaatgttgatcaatttatagccaatgaacaaaaaggaaatggatctaaatattttatcaaaatcaagatttaatgcaagaaataatggtagaaggatggttaaaataccttccctttcctgagcaattcagtcttaaagccattaggttgtgaacaaggaagatgtcagagccaggagg

SEQ ID NO: 514901 - DNA, 506 bp, Homo sapiens
gccctgagtttctttctttctggaatcaggccttcagatccaatttctgctcattccggctactggctgctacaaatcccagacacaatgcccttttctcctgctggaatctctcrtactccttcacgtaataattttaaagcatgaacagggatcttgagatcaaaaagtttaagaattgctgtgttggacaagtatgcttggaggaaaacatttattttcttcttgacagattcttcaaaaacattaatttgttaataaattgggagtctcctagggtgagaattgttaaatcaaactaaatttggcctgaggctgcctctgtaccttgagtttctagtgaactgcaggttttccaaaattttagtgttcattaaaaaccttgaattttctcattggcaactagagttattttctttaaagcaacaggcccagtttgttcatttctgagcacatgtctgcctaacatccaagtgtaaataacatatttgtctgtcattcattct

SEQ ID NO: 514902 - DNA, 512 bp, Homo sapiens
ctgctcatctccacatcctaaatgttcactttctatgtctttccctttctagctctagtgggtataactccctccccttagagacagcactggcctctcccatgctggtatccaccccaaaaggctggaaacaggcaattactggcatctacccagcactagtttcttgacacgcatgaygagtgagtgctcttggtgagcctggagcatgggtattgtttttggtattttttggatgaagaaatggaggcataaagaaattggctgacccttatatggctgggatagggtttaagccccttgttatttctgactctgaaacttgcattcaattcactccaccaagttatctcatctttgaaatggctttttttaaaggtgcctagaatatgatggcgtgcagtctataaactgttgcccaccttctgtactttctctcagaataattcacattcttctccagtgtctgttgattgttactttgtggaataagttcttggaaaattccacaa

SEQ ID NO: 514903 - DNA, 533 bp, Homo sapiens
tccatacccctggacaaagcgagtcctcattgtggtgtttccgagagagcatttggaggtacccaggagatgcagttatgttcactgcaaaattatttataatagtggagacaggggaaaggcttccaaaggtctatcaacagggaaatagctgtgtaaaaaaagttatagtcacactgtagagtactatgtgatatttacaaagaacaacctagagttttatgttgtaaacaaaggtctccaaggcagtgctgagggaaaacagcaagatgcagaattatgatggagtaggtgtccctctccaccaaaagaagatccagtagcatctatgacattgcagttgttaagaagaaggctgtatccttgtacagcctatgttacatggatgtgcatatccaagactgtaggcgagactgcagcatttaggacagtacagagtggcaggaggagggtgtcctgccactggggatgggtgtagggtactgatgggwaaatgaggtggtcctgatgctgctcaacagacggagacagga

SEQ ID NO: 514904 - DNA, 612 bp, Homo sapiens
cttcccaggaacagggacggccagggcagggtttagggcaaggaaagygtgtgagcatatttgtattttagtaaatatttacagtttgccctccatgtctgcagtttcatatccatggattcaatcaaccacaatgaaaaactttggggaaaaaaattgcatcggtactgaacatatacggactttttttcttgtcattattccctaaacaatacagcataacaattattcacatagcatttgcattgtattaggtactataggtaatcaggagatgctgtagatgggaggatgtctgtagattacacacaaatgctgtgccactttatatcaggggcttgagcatcctcacattttgatatttaagggaggtcctggaaccaattccccagatactgagggtccactgtctgtgtcccctcgccccaccttgcctttgtctcctgtctcctatctccaccctgcctcccgccagcctgttgctcctgacctgcccgggcaccctggagcagcaccctatctcagagcctggctcagtgtgttcacttctgcagagaaactaacttgcccaagtccacactcaaaacataggcattgctgagatgtgaaaag

SEQ ID NO: 514905 - DNA, 612 bp, Homo sapiens
cttcccaggaacagggacggccagggcagggtttagggcaaggaaagtgtgtgagcatatttgtattttagtaaatatttacagtttgccctccatgtctgcagtttcatatccatggattcaatcaaccacaatgaaaaackttggggaaaaaaattgcatcggtactgaacatatacggactttttttcttgtcattattccctaaacaatacagcataacaattattcacatagcatttgcattgtattaggtactataggtaatcaggagatgctgtagatgggaggatgtctgtagattacacacaaatgctgtgccactttatatcaggggcttgagcatcctcacattttgatatttaagggaggtcctggaaccaattccccagatactgagggtccactgtctgtgtcccctcgccccaccttgcctttgtctcctgtctcctatctccaccctgcctcccgccagcctgttgctcctgacctgcccgggcaccctggagcagcaccctatctcagagcctggctcagtgtgttcacttctgcagagaaactaacttgcccaagtccacactcaaaacataggcattgctgagatgtgaaaag

SEQ ID NO: 514906 - DNA, 612 bp, Homo sapiens
cttcccaggaacagggacggccagggcagggtttagggcaaggaaagtgtgtgagcatatttgtattttagtaaatatttacagtttgccctccatgtctgcagtttcatatccatggattcaatcaaccacaatgaaaaactttggggaaaaaaattgcatcggtactgaacatatacggactttttttcttgtcattattccctaaacaatacagcataacaattattcacatagcatttgcaytgtattaggtactataggtaatcaggagatgctgtagatgggaggatgtctgtagattacacacaaatgctgtgccactttatatcaggggcttgagcatcctcacattttgatatttaagggaggtcctggaaccaattccccagatactgagggtccactgtctgtgtcccctcgccccaccttgcctttgtctcctgtctcctatctccaccctgcctcccgccagcctgttgctcctgacctgcccgggcaccctggagcagcaccctatctcagagcctggctcagtgtgttcacttctgcagagaaactaacttgcccaagtccacactcaaaacataggcattgctgagatgtgaaaag

SEQ ID NO: 514907 - DNA, 612 bp, Homo sapiens
cttcccaggaacagggacggccagggcagggtttagggcaaggaaagtgtgtgagcatatttgtattttagtaaatatttacagtttgccctccatgtctgcagtttcatatccatggattcaatcaaccacaatgaaaaactttggggaaaaaaattgcatcggtactgaacatatacggactttttttcttgtcattattccctaaacaatacagcataacaattattcacatagcatttgcattgtattaggtactataggtaatcaggagatgctgtagatgggaggatgtctgtagrttacacacaaatgctgtgccactttatatcaggggcttgagcatcctcacattttgatatttaagggaggtcctggaaccaattccccagatactgagggtccactgtctgtgtcccctcgccccaccttgcctttgtctcctgtctcctatctccaccctgcctcccgccagcctgttgctcctgacctgcccgggcaccctggagcagcaccctatctcagagcctggctcagtgtgttcacttctgcagagaaactaacttgcccaagtccacactcaaaacataggcattgctgagatgtgaaaag

SEQ ID NO: 514908 - DNA, 572 bp, Homo sapiens
tgtccctggagggaaatgaaaacagtgattccccaaattgtgacaatagaaatttgctcttgggttacttacaatgtatctgagtattaaaaaattttctttttaaacgtttgaagtaaaactacccagaaacacttagtggctgaccagaaactaaactcctggcatcctcaaaatgggatttattggcttataaatgtcctgtgttgaytcacaaaggcacaaactatctaggtaagttttcttctaaatgttgatgggagagctggccactgttatgcaagtttcattgtcctgactaaactgccaaagagattacataaaattatatcaactagacaaaaggaaaaaggaaaaaaaacagaggtgtcttgggaggaatccatatgagaccagtagaccatgagagagacatcccttgccatctacaaggaaaatggattttgttctccatatgcaaaaccatctcaggagcttgcggagacaccacttgcttactagccagaaagagcaggtgcctcctaaattccccacacaggagctcacagtggctttcatgcactgggattaag

SEQ ID NO: 514909 - DNA, 604 bp, Homo sapiens
gaatgggaggccccttgcccatgctgggacccacttaattcctctgatttttagcagaatcagggcaaacttctaattattttggtactctgaagaaataaaacctgggcttgccatagaaaaatctgttccatcagggaattccctcttggctctgtgaaggagaaaaactatgaagagatctttggaatgaggggtctcaagggcactggaaggctctggcatgtgaagagcttgagttggaatgcatctgagagcccgaggggctggcccagacacaggaggaagcctccgagctggcttggattttttttccattaaaaagttctctggttcctgaggtgcgatggtgatggtgggagaggctggttagcgacagggggggctctctgaactttctgcttagttttgctgtgaacctaaaactgctctaaaaataatttattgattttttaaaaaagttatcaggaaagaacacctacagttggttagatatgattaataactagtaccaacatggcattgttaacaaagaatacattattattattataaggtactcakgagtaaagaacaatgaataatatacatctaattttttaat

SEQ ID NO: 514910 - DNA, 547 bp, Homo sapiens
ctaaaagaactaagacaggacagtcagacaaggaggaggaaagagaatgacaaaagaaaaaagaggagaaaagggaagggagaagaaagagtgtctcccttgtctttacaaagcctcggtaaacctcccttcagatgcccttaagaaggccctgcagtgagaaagaccaagctgaaaatcacaggaggtgtcagaaccctcatgttgagggcatccagatttgcatcacagccgtggaacccctacttcagcaaactaaaatcttttatttattaatctcttcttttcctttccttctttctttctttcctcctccttcccctccctcctcytccttcccctcccctgctcctcctcctcctccttcttctttcttcttctttttctttttttttctctctctcactctctccttgtttcttttgatttattatacaggctgctagcaaacctatctgacctttgccttaaaggaaacattatcattctggacaggtaatcaaactattctgtgctccagagtgagacaccatcactgtcttccaca

SEQ ID NO: 514911 - DNA, 547 bp, Homo sapiens
ctaaaagaactaagacaggacagtcagacaaggaggaggaaagagaatgacaaaagaaaaaagaggagaaaagggaagggagaagaaagagtgtctcccttgtctttacaaagcctcggtaaacctcccttcagatgcccttaagaaggccctgcagtgagaaagaccaagctgaaaatcacaggaggtgtcagaaccctcatgttgagggcatccagatttgcatcacagccgtggaacccctacttcagcaaactaaaatcttttatttattaatctcttcttttcctttccttctttctttctttcctcctccttcccctccctcctcttccttcccctcccctgctcctcctcctcctccttcttctttcttcttctttttctttttttttctctctctcactctctccttgtttcttttgatttattatacaggctgctagcaaacctatctgacctttgccttaaaggaaacaytatcattctggacaggtaatcaaactattctgtgctccagagtgagacaccatcactgtcttccaca

SEQ ID NO: 514912 - DNA, 560 bp, Homo sapiens
ggtgggactggttcttgctcctgtttatccttcatcgtctgtctgctcagggaactgtggtgttcacgggctcagagaggcggctgcacrcctggcctgtttggctgcaggctaggggaaggggttgtggatctggaattcatgaaggaagagtgagcatgacttgctgctgaattccagcaagaatttcagcatgtatgggaaagacagcagttaataaagattcctcgggttttgctttgagacaatggggaaaatataggtgtaatctgctgaaatggggttggctgagggaacaagcttaaggtatttggtaagaggttgttttgatttttctgaatttgagacacctactagacatctaagtaggcattgggatatttgagtttggatttcagggaagatgttggggctgggaatagacatttagtgatctgaacatttggctcttattcacatcaggggtgggtggtggatgagagagaggggagggccggcaaagggtcctgcagggagctgccacggagggtgcagcagctcaggggggcatggtctagaaa

SEQ ID NO: 514913 - DNA, 642 bp, Homo sapiens
cattctctattggtggctcacttttgtcactacacctttagttccttaaaatgtgattcaccattatctttttttttgagacagagtcrcgctctgtcgcccaggttggagtgcaatggcgtgatctcagctcactgcaacctccatctcccgggttcaagccattctcccacctcagcctccaaagtagctgggattacaggcacccgccaccacgcccagctaatttttgcatttttagtagagaggggttttaccatgttgactaggctggtcttgaactcctgacctcaggtgatctgcccgccttggcctcccaaagtgctgggattacaggtgtgacccaatgcgcccggcgtcaccattatcttattattcgctatctgataattacaacatctggggtctttgaagatctaaatttatcatttgcttttctgctggctgtcactgtcagtagtttgttcccttatatctttgatgatctctagtttgtttatcttaatctgtggagtactgggggcataaattttggatgctttcccacagagagtatttaggcttctactgatagccaagggtacttctgatctgattctctaggcagagtctttcctttcttccctccctcttccctttctt

SEQ ID NO: 514914 - DNA, 642 bp, Homo sapiens
cattctctattggtggctcacttttgtcactacacctttagttccttaaaatgtgattcaccattatctttttttttgagacagagtcacgctctgtcgcccaggttggagtgcaatggcgtgatctcagctcactgcaacctccatctcccgggttcaagccattctcccacctcagcctccaaagtagctgggattacaggcacccgccaccacgcccagctaatttttgyatttttagtagagaggggttttaccatgttgactaggctggtcttgaactcctgacctcaggtgatctgcccgccttggcctcccaaagtgctgggattacaggtgtgacccaatgcgcccggcgtcaccattatcttattattcgctatctgataattacaacatctggggtctttgaagatctaaatttatcatttgcttttctgctggctgtcactgtcagtagtttgttcccttatatctttgatgatctctagtttgtttatcttaatctgtggagtactgggggcataaattttggatgctttcccacagagagtatttaggcttctactgatagccaagggtacttctgatctgattctctaggcagagtctttcctttcttccctccctcttccctttctt

SEQ ID NO: 514915 - DNA, 531 bp, Homo sapiens
gtgctgggcaaaagcctcccagtctgttgcaggcttctctcaatgcagtgcacatgtgagataaatacaatccgtggcttcatcaaacaatagttgtgtgtggtttatttctggtrtctctcactccttttaaaatcccctgcctctaaaattgtgggcctccatctcttagataaataggtctatacatcacagaacataatttcaacttaagaattaaaacattaggcccaaaagtcaccacaccaatgccctgtccacactgggtcttctctggcaaaggctgtatatccctggggcagacacagggctgagccggctcacccttcacaaccgccccaggtcagagtgggtccattctctgctcttggccaagggggaagctacctccctgcaggtggctacagtgaccacaatgcccagctcacagcccacagcttgtggccttgtgggggccatgccacaggctccgactgccggggtctccccttgtccctgagctgcagctccatctgcaggaaaccccagcag

SEQ ID NO: 514916 - DNA, 497 bp, Homo sapiens
ttttacatcattttgacttttggaagcataataaggttctatacattcaaaaaactaagagaaatcaacaagaagggaaagttgtaagaaactaaaaccagaagcaagtggaaaccaatgaaccstgcagtatttcaaataagcaccaaaacttacagcggattagggacagatgacaactaattctagaaacttctgaaagcagcattgcactatagagccacactgttggaagggacatggaagggagtgtgattgcccaaggggttcttcttgccagcagcccagaaaagccaatacactgacaacagcaggagttacagtagagaaagagtttaataatcacaaggcaagccaagagaggagacatgagatatttctcaaatttgcctccctgaaaattcagaagctatgggttttaaggtattttgatgggcagggggctagggaactgaaacaattgattgactgagaatgaaatcacagaggtgttgaaa

SEQ ID NO: 514917 - DNA, 595 bp, Homo sapiens
tttaaaaaacaggaagaataaactagaaaagaaaaacaaaagcagagtaggggaaggaatgagatgtctgaggccgagatatttctctgagtgtgcctttttacatcattttgacttttggaagcataataaggttctatacattcaaaaaactaagagaaatcaacaagaagggaaagttgtaagaaactaaaaccagaagcaagtggaaaccaatgaaccctgcagtatttcaaataagcaccaaaacttacagcggattagggacagatgacaactaattctagaaacttctgaaagcagcattgcactatagagccacactgttggaagggacatggaagggagtgtgattgcccaaggggttcttcttgccagcagcccagaaaagccaatacactgacaacagcmggagttacagtagagaaagagtttaataatcacaaggcaagccaagagaggagacatgagatatttctcaaatttgcctccctgaaaattcagaagctatgggttttaaggtattttgatgggcagggggctagggaactgaaacaattgattgactgagaatgaaatcacagaggtgttgaaa

SEQ ID NO: 514918 - DNA, 603 bp, Homo sapiens
gtgatgaaagtggtttaaattccatttttattaaaaacaaaatacaaagaaatgcagctttctgcatgaaatgtcacagacactcactttcaaatcttcatttaagtcgtctcttcccgaaataccctgttcatactgctacctgcattgcagtattatgtttctggaagagcaaattccataaagatacgcagtctttctgaattagcatagagatttaatgcaattgcactccaatggaattcatttgaactaaaaaatrtgctcctaaaattcatctgaaagactaaataatgagattgctgagaaacttttaaaaatgaaaagtaataagagagctcgtcctttacaataactttaaatgattagttaaaaaacagaaaagacctttttttaaaaaaaaaaaaaaatagcatttaaagactctcagttatgtccagaagggtgctgcaaacctctgcctcaggaagcaggtgtgcatctggactccctcctctgcgtctgcctggttgtaagtcctgcctctttagcccccaatggcggatgtcctctgagtggtcatggatgccggagtgtccagatgtgccccatagacaagataca

SEQ ID NO: 514919 - DNA, 648 bp, Homo sapiens
tcagaggcctctgggggctctgcctgctgccactatgtgtacagaaggtagggtccctcctccttagcactgattgttacaaggaaaggaaaaacccctgcctcagagaaagggttctccttgagtttgtgttggaatgatacaaaaactatgaagggatgacatgaatagggtggggctcagaggcaataccaaggtgtagaagccaagattgagactggtacatgcactagaatgagatgatgacaaaagactctgccctcctttctgtaaaggtagcacatctcaaaaagaaaccttagcatttcacaatgctgaagttgtgatctatagggtacttaaggtgaacttaacttgtgacagggtctgtatgattccagggcaataggcactgaacatmtatgaggaagcatagatgttcccaatcccattggcatgtcgactgttatctcagaagattaatttctgtcgatccatttcaataactgtagactgagcacatgctctggggcagccactgtgttgagcattcagggatgcaagatgcataagacacaccctgttctaatgaaaaactctggattccaggcttagcctgagggctacaactgtgcccactacagtagccccaaagccaagcctctggca

SEQ ID NO: 514920 - DNA, 553 bp, Homo sapiens
ccaccacactgccacacataaacacatactgccttttcctttgtgytttggaaggtaggtgtatatttagatcttctctgttctattttctcttctgcttctttgatctgtctgtgatcacactagtagcccatccattcattgattaaatgattatatctttatatattatggaaggcaacccaccccacataccatcactcctctttctaaaaaatttcattggtcaactcaattacttattgttttcctagcaaacttttagacgaccttgctaacaacttaaaaaatctcagtgtcattttctttgaattgattaaacttacatgtgaaattaatccaaggaacagcatgtgggaaaagataaactgtatagtaaattgtgttggaacatgggctagccatattatacagttggaatccatgtcttacaacatcactacagatttcatagggataaagattcaaatgtaaaaataatgaaaaaaaagttgtgttccagttataggtaagtggaggaagcatactctggttgtctcttccactgaatgca

SEQ ID NO: 514921 - DNA, 639 bp, Homo sapiens
tacacacttaattgctacagaaagtgctgcgagaatcagaactatatttggattggaatgacttattggcaaaatattgcagcagatgtgggaaggaggcttaattggaggagtctgcctgctcagttcccagaggttctgagtctgatgcaatttaatttttgcaaaatataacatcttttaaaaggttgaaagcgacaatataagccatttatagttgttagagcagcatttttcttcttaagataatttgaaataatctctaatgactggaaaagaaaagtggtttctgggagaggggcgaaggcaaaagaatgactagaaatgacgtgctccatgttattatttaatttacccttcacactgaaacccctgaaaattaaataattttgctttccctttcaaaatgaattagacatcacagagatccagtgaagaaaattgagtctatcatttctaatgagaagaaaacattgcactagagagccataaaactctccaagcacatttgcatgcatctttacaggatrtggcagtaaagagtgggttgtctgccctgccccaattctttaagaattgcctcatcatcctgaaagatggacccccagagattttgcttcctgaccccaatcccagctg

SEQ ID NO: 514922 - DNA, 564 bp, Homo sapiens
tgtggaaatctattgaaagggctctctttctaatgcatttgtcagaatgctaattggaaaaatgacttcatgttatgagtcatacagtcacctctatggacctcattagacttaaatgagcatactcaagtccagcgcaatcattcagttcagccatatgttggtaaagaagatctctcagtarttgggctcctggccaactgtgaacgttgtccagtgaagaaatggggggaaaattgaatggagatatttatggcagatataggtataaggcattatacttcccggagtaatccaaaatatgtgtttggaactataagaagttcaaacaagctaagccaaagacattagaccaaattttatggcacacataaaacgtgctctgatgcagagggaaactcaaaattaactaagacaaggacttagcgtctcacaatttagaaaggcagataaccacaaacataggtaaacgataggagggctatgaaaaatgtttaacaataatgtgccacttaagatcctagaggaaagtctggaagtaagggatcaattatgattgtgtta

SEQ ID NO: 514923 - DNA, 564 bp, Homo sapiens
tgtggaaatctattgaaagggctctctttctaatgcatttgtcagaatgctaattggaaaaatgacttcatgttatgagtcatacagtcacctctatggacctcattagacttaaatgagcatactcaagtccagcgcaatcattcagttcagccatatgttggtaaagaagatctctcagtagttgggctcctggccaactgtgaacgttgtccagtgaagaaatggggggaaaattgaatggagatatttatggcagatataggtataaggcattatacttccyggagtaatccaaaatatgtgtttggaactataagaagttcaaacaagctaagccaaagacattagaccaaattttatggcacacataaaacgtgctctgatgcagagggaaactcaaaattaactaagacaaggacttagcgtctcacaatttagaaaggcagataaccacaaacataggtaaacgataggagggctatgaaaaatgtttaacaataatgtgccacttaagatcctagaggaaagtctggaagtaagggatcaattatgattgtgtta

SEQ ID NO: 514924 - DNA, 564 bp, Homo sapiens
tgtggaaatctattgaaagggctctctttctaatgcatttgtcagaatgctaattggaaaaatgacttcatgttatgagtcatacagtcacctctatggacctcattagacttaaatgagcatactcaagtccagcgcaatcattcagttcagccatatgttggtaaagaagatctctcagtagttgggctcctggccaactgtgaacgttgtccagtgaagaaatggggggaaaattgaatggagatatttatggcagatataggtataaggcattatacttcccggagtaatccaaaatatgtgtttggaactataagaagttcaaacaagctaagccaaagacattagaccaaattttatggcacacataaaacgtgctctgatgcagagggaaactcaaaattaactaagacaaggacttagcgtctcacaatttagaaaggcagataaccacaaacataggtaaaygataggagggctatgaaaaatgtttaacaataatgtgccacttaagatcctagaggaaagtctggaagtaagggatcaattatgattgtgtta

SEQ ID NO: 514925 - DNA, 588 bp, Homo sapiens
cctgtaatcccacttacttgggaggctgaggcagagaatccttgaacctgggaagyggaggtttcagtgagccgagattgcaccattgcactccagcctggacaacaagagtgaaactccgtctcagaaaaaaaaaaaaaagaataaataaataaaattacttggcccctagaatgactggatacagagctctgagtttgaagaggaccaattgttttagtcaattttgtgctgctataacagaatacctgaccctgggtagaaatttattggctcacaattctggaggcccagaagtccaggatcaaggggcagcatctgaccaaggacttcttgctgcatcatcttatggggaaagatggaagggtaaagagagagtaagatggaaagagagcaagaggggatgaagctatttcagtcacaatgaacccactcctttgataatggcattgatccattcatgacctaaacacctcttaaagatgagtgggctcaacaccatgtgggagccctaccttccaataccatcacaatgttgactaaattttaacttaggttttggaggtgatgaacattcaaaccataata

SEQ ID NO: 514926 - DNA, 588 bp, Homo sapiens
cctgtaatcccacttacttgggaggctgaggcagagaatccttgaacctgggaagcggaggtttcagtgagccgagattgcaccattgcactccagcctggacaacaagagtgaaactccrtctcagaaaaaaaaaaaaaagaataaataaataaaattacttggcccctagaatgactggatacagagctctgagtttgaagaggaccaattgttttagtcaattttgtgctgctataacagaatacctgaccctgggtagaaatttattggctcacaattctggaggcccagaagtccaggatcaaggggcagcatctgaccaaggacttcttgctgcatcatcttatggggaaagatggaagggtaaagagagagtaagatggaaagagagcaagaggggatgaagctatttcagtcacaatgaacccactcctttgataatggcattgatccattcatgacctaaacacctcttaaagatgagtgggctcaacaccatgtgggagccctaccttccaataccatcacaatgttgactaaattttaacttaggttttggaggtgatgaacattcaaaccataata

SEQ ID NO: 514927 - DNA, 588 bp, Homo sapiens
cctgtaatcccacttacttgggaggctgaggcagagaatccttgaacctgggaagcggaggtttcagtgagccgagattgcaccattgcactccagcctggacaacaagagtgaaactccgtctcagaaaaaaaaaaaaaagaataaataaataaaattacttggcccctagaatgactggatacagagctctgagtttgaagaggaccaattgttttagtcaattttgtgctgctataacagaatacctgaccctgggtagaaatttattggctcacaattctggaggcccagaagtccaggatcaaggggcagcatctgaccaaggacttcttgctgcatcatcttatggggaaagatggaagggtaaagagagagtaagatggaaagagagcaagaggggrtgaagctatttcagtcacaatgaacccactcctttgataatggcattgatccattcatgacctaaacacctcttaaagatgagtgggctcaacaccatgtgggagccctaccttccaataccatcacaatgttgactaaattttaacttaggttttggaggtgatgaacattcaaaccataata

SEQ ID NO: 514928 - DNA, 481 bp, Homo sapiens
aaaaatagagttcaggctttacaagcaaacttattttgatagaggtggggggcaggggaggaaatctrcctctgtttacagagagattgtgttggaaggacagaagcaggagccacatcaggtgaaccaaagactcctgaaccggaatgagcctatagccaattggataataattgtatcatttattaccttattgtctaaatcatgtcttgagtttcctgactcttaatccaagaaatctcctctcagtgctcaggtggtaaattatttatctgcctttcttcctctttctttaaccttgtctccctatgggaatgcagcagttactagcaacttgccccagacagagcacggtggagcagagccaggagaggttaaccccgagccctcccagggatttcaaggcatggtgatgagtttcagggaggcagtgctgaatgggaggtcagagcccagctttcagaaccagaatgtgtaggtt

SEQ ID NO: 514929 - DNA, 628 bp, Homo sapiens
caatggagaatttattctagggagaaggcagtgaagaacaacaagatcagttttgcgttttaaaaactygctttggttgcagtggagagaatgaattgcagtagaacatgaacgaaagcagaaggaccaaacgtagcagtccaataatggggcataggagtctgcattaggatagcagcagaggggcataaagagaagtggatagattcagaatattgaagagtaaataatgcaggagagtacagagaaaacagcaccaatttgaaagtcagaagttctgggtatctgtccagagttgtgtgaccttggataagtccctttatcgtaaagttatgtctcaatttgcttatgtaaaaaataatggcttataactagataattttctcagctattttttcagctataaatatctgcacaaaaaagaattgagggttagatttgggtgatggcaatgaaaatggttttaattttatttgctcaagttatttgtgataaaatgcataaaaatcaaagatacaaaaatcaattccaggttcacattcaggtgtacaaaagttcttcgtaagagaaatctagaagacagattgctagaaaaattagatttgaccatattgaaaaagttttaatt

SEQ ID NO: 514930 - DNA, 278 bp, Homo sapiens
tgctggcaaatccaaggcgtaattggcatttgcaggtagggtccaaaggaaaaagcacatttttttgctttcagtttgaagtcatgtgctcagygacatcaagcattgagaagggagccagccccgggcaaggcagagacaaagggggttggggagcttgggtggagggccacaaggcccagcccatgcccacacacatggtgtgactggcctcctgtctattaaactctctctactacaatactgtggtctttctttatgcagtgggcaggaagaac

SEQ ID NO: 514931 - DNA, 580 bp, Homo sapiens
ttcagccagatgggaaaggcagccttcagggatgtcagttgtgcattattgagaacataagaaaactcatgtgttgccatgggcagcttaggtttatgggcctttcttacctagaggtggattttatatcctgagctgttgtttctataagaattctcccaagcctcttttttatatgttttagtcaggttaggttagaccatgctgcagtaacaaaccaaccttgaactctcattggcattatttatttatttatttatttgtttagaaacaaagttttgccctgtcacccaggctggcgtgaagtggcactatctcagctcactgcaacctccacctcccgggttcaastgattcttgtgcctcagcctcctgagtagctggattataggcgtgcgccatcatgcctggctaacttttctatctttagtagagacgaggtttcaccatgttagccaggctggtctccaactcctgacctcaagtgatctgcccacctcagcctcccaaagtgctgggattataggcatgaaccaccgtgcacaacctctcattggctttatatattaaaatgtatttt

SEQ ID NO: 514932 - DNA, 692 bp, Homo sapiens
gccacatgtattaaaaagcttgataatgacagtcatagtttcttctccactcatatcccaagcaaataatctgaaataaggacaaagatttgagagtaaaattgttcagctcagacatgttatttttgaggaaatttttttttaatttaacttggagattagttgaatgtaatgcattcatggttggggatattttatagctgttataaatggtgcgtacaaaagtttaatgacatgagaaaaatattgataccataatgcttaagaggaaaaaactcaggatgataaaactgaaatcgctgctattttagattggaagcaagtgtgataatagcattgggaaatggagaagatacttataattaccttgggtagtaagtaggactttgggcagttttgcaagtgrgtactttgtcatgcttttccagctttcactaatgtcaggtgatactttcatcattagaagaaaaatagttactaaaaaggaaataataaacatgatgaccagcctgtgccccccaggctggagtgcagtggcacaatcttggctcactgtagccttgaactcctggactcaagctattctcccacctcagccttccaagtagctgggactacaggtacatatcatcacatctggctaattttgtgtttttgtttttgtttttatagaggtctcactgttttgccag

SEQ ID NO: 514933 - DNA, 504 bp, Homo sapiens
gctgctttggaaaatagtttggcagttccgtagaaagttaaacatagagttaccatatggcccaaggatgagtaattctactcctaggtgtatacctcagagaattgaaaacatatgttcatatgaaaattgtacatgaatatccacagcagcatcattcataatagccaaagaatggaaacaaccccaatgtccatcagcttgaaaatgaataaacaaaatggtcaaaatgaggagaccacaccttgaagagacacattaaagcagcacatacatccagttgctccaaagacctgaaaggagaggtctgggggctggaagacattgtgcaggagagagaatcacactgaagcctaggaaagttgaagccagaacattctagaggaaggccaatcagtagcatctccaggcagagaaatacacctagacaaagacttagaggcaggaaagcctaytgaacgtgcagaggacaggaagaagagacgctcaaggaaggagcatgag

SEQ ID NO: 514934 - DNA, 504 bp, Homo sapiens
gctgctttggaaaatagtttggcagttccgtagaaagttaaacatagagttaccatatggcccaaggatgagtaattctactcctaggtgtatacctcagagaattgaaaacatatgttcatatgaaaattgtacatgaatatccacagcagcatcattcataatagccaaagaatggaaacaaccccaatgtccatcagcttgaaaatgaataaacaaaatggtcaaaatgaggagaccacaccttgaagagacacattaaagcagcacatacatccagttgctccaaagacctgaaaggagaggtctgggggctggaagacattgtgcaggagagagaatcacactgaagcctaggaaagttgaagccagaacattctagaggaaggccaatcagtagcatctccaggcagagaaatacacctagacaaagacttagaggcaggaaagcctactgaaygtgcagaggacaggaagaagagacgctcaaggaaggagcatgag

SEQ ID NO: 514935 - DNA, 471 bp, Homo sapiens
aaccctggcgatcaatgggatgacagawgttgcagccagatcaccctcacatccaagtgagcatctatttaggataatgctgtgaattaggccatataggtggtgatcatatgtccctatctgcccaggacagacgctgtttaggcctagtgtcccagcttgattttttgtttttaatttataacactatcttagttttttatataattgaggttcttgggtttttttttttttttcttttcaaggcaattactattttttttttttttttttttttttgagacagagtctcactctgtcacccaggctggagtgcagtggtgcgatcttggctcactgcaacctccgcctcctgcgttcaagcgattctcctgcctcagcctcccgagtagctgggattacaggcacctgccaccacacctggttaatttttatatttttagtagagatggggtttcaccatgttagcca

SEQ ID NO: 514936 - DNA, 471 bp, Homo sapiens
aaccctggcgatcaatgggatgacagaagttgcagccagatcaccctcacatccaagtgagcatctatttaggataatgctgtgaattaggccatataggtggtgatcatatgtccctatctgcccaggacagacsctgtttaggcctagtgtcccagcttgattttttgtttttaatttataacactatcttagttttttatataattgaggttcttgggtttttttttttttttcttttcaaggcaattactattttttttttttttttttttttttgagacagagtctcactctgtcacccaggctggagtgcagtggtgcgatcttggctcactgcaacctccgcctcctgcgttcaagcgattctcctgcctcagcctcccgagtagctgggattacaggcacctgccaccacacctggttaatttttatatttttagtagagatggggtttcaccatgttagcca

SEQ ID NO: 514937 - DNA, 627 bp, Homo sapiens
tttcatactaatgtcttctgttcaaatttgtaattaccaggtatttacttcttatattttatatttacttttcactgaaagtcttggttcttattgacatcatttcttatttgacttatcctacaatatataaataatagtttcaaaataagaatactaacaagttgattgratgaggtttaatatttctttatggtttgttttgtccctaggatatattccattatagatgtacaaccaatgtctttaaaattatttgacataattttctctgtgtgattataccacctccttgatatagactattagagctatatggcattgaacaattaagttcacttttgttttttcttttctaccgaggctacaagtcagttaactaaactcagttgacctaaaattttagcattctttaggtattgctgtgtagtcacagccacatgcaccaaacactctgcttttaggttgattctacccagcactctcttgggccttcagttctacaatgtcggacaacccatactcccagagaagctgccaatctggacttctgcttaacatggatttgttttgtgtggtaatttgtgccagtccaccatcactgtggctggtctcatgaatccagct

SEQ ID NO: 514938 - DNA, 471 bp, Homo sapiens
aaccctggcgatcaatgggatgacagaagttgcagccagatcaccctcacatccaagtgagcatctatttaggataatgctgtgaattaggccatataggtggtgatcatatgtccctatctgcccaggacagacgctgtttaggcctagtgtcccagcttgattttttgtttttaatttataacactatcttagttttttatataattgaggttcttgggtttttttttttttttcttttcaaggcaattactattttttttttttttttttttttttgagacagagtctcactctgtcacccaggctggagtgcagtggtgcgatcttggctcactgcaacctccgcctcctgcgttcaagcgatyctcctgcctcagcctcccgagtagctgggattacaggcacctgccaccacacctggttaatttttatatttttagtagagatggggtttcaccatgttagcca

SEQ ID NO: 514939 - DNA, 523 bp, Homo sapiens
ggaaccatggatttagaacatgacttcccaagagggtaatacgccccccacctcaaggagatagaacattagttttggggggcccaaaatcttagatgttatagtggtttgtagttgaccaaaggagccacagtgtataagcagatgtacagcagatccatggtattgaaatttcatgggaaggaaggcaattagggaaggaaaaaaaaaaaaagtctaaaggctcctgggcaggaatagggggatgataataaaaaaaaaataagaaagattgatttagaccaagagagagccagtttttcctggaggataggaaactggatattgaactggggaaccagagggtacattgggaggatcaggcaggggattagcaaggcacggaaaaccagagactcatggtcataatgacacctaactgtaatcaytccccacgtgcccggtaccgtgcccagtggtctgagtgctcacagcaacaccatgatgcagctgctcttatttatctccaactttatagatagga

SEQ ID NO: 514940 - DNA, 369 bp, Homo sapiens
tagtatattaattactataatatgcaatgacaattaactgtattaactgtaatttgttacataatatactattatatagtagtatattaatagtaatatactatttattctgtaggataatagtataaataatattcatattatttatagagggatacaggattcaaattgtagaaaatcagaaatgagactctcacttgagagygttctgaacgtaagaggggttttcagaagacactgagtggcaaaaggcaaaacaaatgtccattagagcggagaagctattagatttttcccacttagttgttagttctgtgaaatttctttcatatttgtcacattactcataaagtttgaaattagtccatt

SEQ ID NO: 514941 - DNA, 577 bp, Homo sapiens
tcaaagggctttgctcacacaaaatgcaaatacattttgtaaagactttacataatatgtgttgacacagggaaataaaataattctgttaagaaaaaggggtttcaaagtttatagttaagcatgtcttagttgaatgtggtttactttgtagccttaaatacagttatgtgtcgcttaatgccagtgatccattctgggaaatgtgtagtcaggagattttgttgtgatgtggacattatagggtagagtgcacgtgcacaaacctgcrtgatgtagcctaccccacacctaagctgtatagtatagtctattgctcctgggctacaagcctgcacagcatgtgactatactaaatactgtgggcaactgtaatacaatggtaagtatttgtgtatctaaacatagctaaccattgaaaagcaccataaaaatatggcataaaactggtacatctgtacaggacagctccattaaaatcatatgggaccactgttgtataggcggtccttcactgactgcagtgctattatgtggtgcattactgtagtggtattatttaatgctctaagttagt

SEQ ID NO: 514942 - DNA, 503 bp, Homo sapiens
catgtgcttaatgcaatgctccttttcaaccccacattctcactacctgtttctttgtttgaacaccaagaaatagtctgggcttccagagctcagggccttcgcagcctccatacttgcgttggcccccctggacccactttctctctcatactgacttttctcattcctttgactccgccggactttgttgcccccatgacctggtgttgggtctgatcaccccaacagatatagtagagtgttgtgaaatcaatttagaaagctgcaactagcatttttatgcaagaaataatatgacagaataaagtagattgaaagataaaatatcagagtccatcacatgcagtaagtgtaagtgttttgtggatgttttgtgaaacttcattgtcatgacctatgtcttacagtgggtggtcatcaaaatgtgtgaragccactagtttaagctgattctgcatctttactgatggaacaaatggattccagagaagctaaggaaa

SEQ ID NO: 514943 - DNA, 512 bp, Homo sapiens
ttcagttaaagagatttcttttgcgcagagagcctaacactgaaaaatacgtgttgtaaaatttctaaataaaaactggcttatttctctcattttaggtgtttcagtaaatatttgtaaaatcatgctcaagatagcttttacttgggaaataaaacgcatagtatccgtcaatgatcaatcatgtgattttctagagtttacgtgttctcattacccatgccgaaatgcatacatgtttatatatacatgaacagtgatttgaaaaaggagttacatgaaaatcaggacctttgcagaaaacaagttctcatacttaactattaataagctctattccacatcacttttcttattttcttataatttgggtcaatgaatatgaatgaagcttattgaaatgttaacgtatgtatagacaagctcaagttaaattattgtttggcaaaatctrtaaaagattaagcttaaggactcagattgaatgccaattaccagaaactgtgaattcc

SEQ ID NO: 514944 - DNA, 550 bp, Homo sapiens
acaaatcaatgttatttttgacttaatattttgtaktctagcctttgttaataaatgtagtttagagaattgatcagtattaacttagctgaataaaaatgaaatcacaatataatgtagttttataactaaagtaattttactacaacctatttgttgatattcatgttcaacaattttttaaaaagcatagaaatatgctatcctggttttttagaaaaggtttattagacattcagtttcatgaggaaattgataggaaaattttccaagttttgattcattgtaattttgactaattgctctcttgctgtgaagatgtgaaaatctccagctttactcacctcagcattggggtgaattaatatgcttatatttagatggttctacattctacaatctgattttttagagggatatatgagccatttgagaccataatttttttctgacaaaaaataattgacaaattcctttagtatcatggattaacttctagaaattattaagaacacccccctcataacccccctgaagctcatagagtttt

SEQ ID NO: 514945 - DNA, 578 bp, Homo sapiens
acaaatcaatgttatttttgacttaatattttgtattctagcctttgttaataaatgtagtttagagaattgatcagtattaacttagctgaataaaaatgaaatcacaatataatgtagttttataactaaagtaattttactacaacctatttgttgatattcatgttcaacaattttttaaaaagcatagaaatatgctatcctggttttttagaaaaggtttattagacattcagtttcatgaggaaattgataggaaaattttccaagttttgattcattgtaattttgactaattgctctcttgctgtgaagatgtgaaaatctccagctttactcacctcagcattggggtgaattaatatgcttatatttagatggttctacattctacaatctgattttttagagggatatatgagccatttgagaccataatttttttctgacaaaaaataattgacaaattcctttagtatcatggattaacttctagaaattattaagaacacccccctcataacccccctgaagctcatagagttttgctaaakagcaagaaattattgagacat

SEQ ID NO: 514946 - DNA, 586 bp, Homo sapiens
tgttgcccaggctggtcttgaactcctggcctcaactgagtctctcacctcagccttccaaggtgctgggcatgagccgatattcccagcccaaccagagttcttttagggaagaagtaactcctgacacttggaagataccacagtcaaagcaatagaaatgatagcgcaaagaagtaaaaacttccaacckcacggcaggctccttgttcttcacaaagttccagctctccacttaggaagctacataatgacatactgttttcatcacacatgcctgctcagagataaacaaaccagtcctgatgtgcattcatggaaagatcgccgtattttcaatttggtcttttctgcttagtgttaagaagattaatgagatgtgtgttggttggtttctgttggaagttttgtgaggcaagtgcaaagaagtgtgcagctacacttcctataacccacgagcaccaaagcaaattaaattaatatcaggaagtattcgaacaaagatatttttctaaatgaagtgttctgaaataacattatcatgttccaaaaatcattacgctgagccctaatctgacattttacc

SEQ ID NO: 514947 - DNA, 586 bp, Homo sapiens
tgttgcccaggctggtcttgaactcctggcctcaactgagtctctcacctcagccttccaaggtgctgggcatgagccgatattcccagcccaaccagagttcttttagggaagaagtaactcctgacacttggaagataccacagtcaaagcaatagaaatgatagcgcaaagaagtaaaaacttccaacctcacggcaggctccttgttcttcacaaagttccagctctccacttaggaagctacataatgacatactgttttcatcacacatgcctgctcagagataaacaaaccagtcctgatgtgcattcatggaaagatcgccgtattytcaatttggtcttttctgcttagtgttaagaagattaatgagatgtgtgttggttggtttctgttggaagttttgtgaggcaagtgcaaagaagtgtgcagctacacttcctataacccacgagcaccaaagcaaattaaattaatatcaggaagtattcgaacaaagatatttttctaaatgaagtgttctgaaataacattatcatgttccaaaaatcattacgctgagccctaatctgacattttacc

SEQ ID NO: 514948 - DNA, 492 bp, Homo sapiens
taactatcctatggcacatcctatgcacctctgagcacttatcccagagaaatgaaaattatgttcacatagaaacttgtacataaatgttcataatagcattatttgtaatagtttcaaatggaaaacaactcagatgcccttcaattggaatggttaaacaaactctgtgaaatactactctgtaatagccaagaataaactgttaatacatgcaacaccttgaataaaccttcagagaattatgagtgaaaaaaatcctaaaaatrtacacagtatatgattccacttatataacattactgaaataacaaaattatagaaatgaatagatgaatgcaatgaagagcagtgattttaatttttttttgaaaaagcaaaacttgcataggttgttcacaagattactggccagccattaaaggagggaggacaattaggaagtcattatgacacactgcatgagggattaaaagagtctaaatctggaag

SEQ ID NO: 514949 - DNA, 656 bp, Homo sapiens
aatcataatttaaagaaaaccagcagttaaaatatttctgcagctagcaacaattaccaggagatctgtttctgcrgttacctctagatcatctgacccaggatggatggacttaaatagaatcaccagaggccaatcaagtgctacctggcttatttaaatacactggctgcttcagactaatgcctgaaaagggaagtaaaaatttcagaccctaacactgataaacattcacccagtagtaaatgatgactactcgaaggtccatcctttataatcttcaacttatcttcaaaactaggaaaaacactctcttttggaataaacatcattattcatttgcacctaagtttctaaattcaaatccattgttgagtaggaggtcatctgaactagttttccaatctctgatctggaactacaactaggaccccgggggaaggtaactagttagcagaaggccaccctcatctgctgctggggacagctttatagaaggccaagaattttttagacgctaaagtatatagaaagtcctttgggttagaaacactcccaggtcttccaatccataccctactttttcgtgtgtgttgttctgtttgatactttcagagctctcaaaatctcgcagacaccaatcaacaccatcagtc

SEQ ID NO: 514950 - DNA, 631 bp, Homo sapiens
actgtcaccagaaccatgaagaagaaatgctcctggtggcaaatcagtcctgtcagtggttcaatctaactgtcctgaatgccacccttgttgttgttttcacccatgtctgcaaaacttgagcctgactctacatattttggatatatttcttttttttaaagtaaaattaaatagattttaaaaatttaaaaactaaataagttaaaaaccatctaacaaatatcagaacctattataatggccaggcacagtggctcatgcgtgtaatcctagcactttgggaagccaaggcgggatgatcacttgaggtcaggagttcgagaccagcctggccaacatagtgaaacccygtctctactagaaatacaaaaatcagccagaaatagcttgaacccaggaggcagagtttgcagtgagccaagatcacgccactgcactccaccctgggtgacagagcaagactctgtctcaaaaaaaataaaataagagatatgacaaatacctcattttaatggttcagtcgttaaagcaggtaactgatacagatctaaataagccagcagcatagtctttgagagaggcaaaattctaagtcagcagagaaagagtagactttaataagtagcct

SEQ ID NO: 514951 - DNA, 377 bp, Homo sapiens
cctttcttgatttgagtgcatggtgatggcatgtactgagagaagcatttatggggctgggtactttgggaggccaaggcgggcagatcacctgaggtcaggagttcaagaccagcctggcgaacatggtgaaaccytgtctctactaaaaatacagaaaaattagccaggcgtggtggcaggaacctgtaatctcagttacctgggaggctgaggcaggagaatcgcttgaacccgggaggcggaggttgcagtgagctgataccatgccattgcactccagcctggacaacaagaatgaaactctgtctcaaaaaaaaaaaaaagatttatgggaaaagcaacagttttagcagatggagaaatgttgcaatcat

SEQ ID NO: 514952 - DNA, 573 bp, Homo sapiens
attatttcacgataatcagttttatttcctttatcagatattttaatttttacccctataaattcagtgcagactttagctttggtaatagcagagcagcttgtataagactaacactcttgtacatacagcaatgattaactctggatatggggacatttcttttttctttcgtgttttttgttttttattttgagacagggtcttgctctattgctcaggctggagtgcagtggtgtgatctcrgctcactgctgcctcgaccccctgggccaagcaatccacccagctcaacctcccaagtagttgggactaccacgctgggttaatttctgtgtttttttgtagagacagggtttcgtcatgttgcccaagcaggtctcaattgctgggctcaagaaatcagcctgccttgccttggcctcccaaaagcgctgggaatacaggcctgtgcaaccacacacagcccacgagggacagttctttacatacaaaaagtcaacagataatgaagacataatgatcctaaatatgtatacacttactaacataacttcaaaatacaagaagtaa

SEQ ID NO: 514953 - DNA, 573 bp, Homo sapiens
attatttcacgataatcagttttatttcctttatcagatattttaatttttacccctataaattcagtgcagactttagctttggtaatagcagagcagcttgtataagactaacactcttgtacatacagcaatgattaactctggatatggggacatttcttttttctttcgtgttttttgttttttattttgagacagggtcttgctctattgctcaggctggagtgcagtggtgtgatctcagctcactgctgcctcgaccccctgggccaagcaatccacccagctcaacctcccaagtagttgggactaccacgctgggttaatttctgtgtttttttgtagagacagggtttcgtcatgttgcccaagcaggtctcaattgctgggctcaagaaatcagcctgccttgccttggcctcccaaaagcgctgggaatacaggcctgtgcaaccacacacagcccacgagggacagttctttacatamaaaaagtcaacagataatgaagacataatgatcctaaatatgtatacacttactaacataacttcaaaatacaagaagtaa

SEQ ID NO: 514954 - DNA, 513 bp, Homo sapiens
ttgcgatgacatcacctctggaaaactagaacccacaggcctccagggaaccgagctgggcggaagatgtgtgcacttcacacaaacgcccagctcccaagtgagaatcatttcagtggtaaatcatctctttacttggggttccaagagcccasgactaaagggaaacacttgcagaatgtgtcggatggagtcagcgacgccagaaacagagaatagccccaccctcccctgtcaagccacactcaacatggccgccagcgtccatgtggaggagggagcgcgcctcctctcgcagccccagaggggcgggccctgggaaccgaacgagcttcagcagaccaatggggagaggcaaggggcggggttggcctgggtcttcggccagagggcggtgaggttgacttgaactggcgggtcttgttgtgccggggctgccacgttatttccagcttttgaggtggattttgcccgctggtgtgccaccgtcagcgcttccgggttgaactccag

SEQ ID NO: 514955 - DNA, 404 bp, Homo sapiens
cccaataatgagaaaatgtacataaatgttttgtgaatgatatacacaaatgatatacatttgtgtatagacacaaatgtaaggacatattttttattattcacttagaaagtttttttgttttttttktttttttttaagacagggacttgttctgtcacccagatttcagtgtagtggtgccatacctcagcctccaactcctggactcaagcaatccttctgcttcaggctcctgagtagccggaactacaggagcacaccacgatattcggctattttattttttgtagagatagtgtcttgctttgttgcccagcctggtctcgaactcctgggctcaagcgattctaccgcctcggcctcccaaagtgctgggattacagacgtgagccaccgcgccc

SEQ ID NO: 514956 - DNA, 440 bp, Homo sapiens
ttttttgttgttgttgtttgtttgttttttgagatggagtctcgctctgtcgcccaggctggagtgcagtggtgtgatcttggctcactgcaatctccatcttccagggtcaagtgattctcctgcctcagcctcccgagtagctgggactacagacacgtgccaccactcccggctaattttttgtatttttagtagagacggggtttcaccgtgttagccaggatggtctccatctcctgacatcgtgatccggcagccttggcctccccaagtgttgagattacaggtgtaagccagtatctgatagttttatgtttacatttagttctgatataaaatatatwttttttgagatggagttttgctcttgtcacccaggctggagtgtagtggcagaatcttggctcactgcaacctctgcctcctaggttcaagag

SEQ ID NO: 514957 - DNA, 610 bp, Homo sapiens
ccactgctccaaggtagtgatttaaagcaagctccttgtcagctggccttaagtcagagaggattgtaggtgrttgaagaaggatttggaggagtaggtacctggggactggatcagtttcctaaggctgtcctaacaaggtcccacagaccgggcagcttaaaacaacagaaatagattgtctcacaggtctggaggccagaagtccgagatgaaggtgggggcagggcggcagctctttcagcttctggtgggggccatcagtccgcggcttgtccttcctttccctgcctctgacgtcgcacagcagcgtctgcctcccgtgtctgtctcttctcctcttcttggaaggccacccctcgtatcagatccggggtccatcctactccagtatggcctcactttaattagttacatctacaatgatcctatttcctgggcattaggactttaacacattttgtggggaaataagtcacaaaagggagctagaggtaggtcttagggtccactgctctaaggtgatgtcagaagagctccatttggtgcacactgaccctatacgtctaagtcattctcattctccctttcccttacatatcatacttag

SEQ ID NO: 514958 - DNA, 610 bp, Homo sapiens
ccactgctccaaggtagtgatttaaagcaagctccttgtcagctggccttaagtcagagaggattgtaggtggttgaagaaggatttggaggagtaggtacctggggactggatcagtttcctaaggctgtcctaacaargtcccacagaccgggcagcttaaaacaacagaaatagattgtctcacaggtctggaggccagaagtccgagatgaaggtgggggcagggcggcagctctttcagcttctggtgggggccatcagtccgcggcttgtccttcctttccctgcctctgacgtcgcacagcagcgtctgcctcccgtgtctgtctcttctcctcttcttggaaggccacccctcgtatcagatccggggtccatcctactccagtatggcctcactttaattagttacatctacaatgatcctatttcctgggcattaggactttaacacattttgtggggaaataagtcacaaaagggagctagaggtaggtcttagggtccactgctctaaggtgatgtcagaagagctccatttggtgcacactgaccctatacgtctaagtcattctcattctccctttcccttacatatcatacttag

SEQ ID NO: 514959 - DNA, 510 bp, Homo sapiens
gactggggatgcccaggacaggggaaggctgggtggtctcaccttctagtcctggataaacccaattccatctttaaagaaaaaaagcactcacctcctggactcatcttctaggacagctaacaaattaccgcaatctggatggtttaaaccaacagaaatttagtctctcacagttctggaggccggaaatccaaaatcaagctgttagccagtgtggtttctcttggaggctgtgagggagaatctgttccacgtttctctcgagcttctggtggttgccagcagtccttggcattttttgacttaccaatgtattgctttcatctttgccttcatcttcatgtggtcttccccctctgtctctgcatccaaatttcccrcttcttatgtggatgccaatcattggatgaggacccacctaatccagcgtagcttcatcttaacttgactacacctgcaaagacctcgtttccaaataaggtcacattcacaggaaccgagggtcag

SEQ ID NO: 514960 - DNA, 599 bp, Homo sapiens
gagtcgcaaaacaagttttcataagctcgacctgtcacaagccaggcaggggctcatgctgacaactccacagtaagattaaacagcatgcttcgtcatgctaaatactagatactaacacagctccgacgtcagggggacaatgattaaaactgatgtcgataatttatgaaacacaatatggtcttcagatgctcttttgaaaaaagggaagggcggggaggggggaaggggcctagcaacccaggtggtttacaactgttcatgcattttgccttgaatgtacacacagccccaccatgcatgggtacttctttacacaatgaatgtgaatgcacatgtgtayaaaagcatgtgaacactgctgatacatatgggcggaagaaagtatttagttattccactgagagctgtcaaggccgtaacattatacatcgtcttgtctttcatattgttttgagggttgtttgttccccccccccggaagaaatccaaaactgcatttaaagtataactgggctttatgaacgttcacattttattccatagaaagcttgaccttgaaacaacaccgaaaagaaaactggaccaaagaaaac

SEQ ID NO: 514961 - DNA, 541 bp, Homo sapiens
gtcggagaattttcctcccataaacaaaacaaacatgagccgaaggggcggaggccccaggggcaggctgggtggccctttctttcaacctctctgcatttgtttctccgggggcagattgtggcagcttcttagagccccagaaagccgcctgtgggtgtygtcatcttgcttggttaaccgaacacattgcctcttggtcctagccagggctctgctgttcctggaggagcggctgtgggccagctagacccttgtccacagaggcgagtggctctgcagaacattccacgggggtggcagaacaggtgcctcttggcatgggcaggcggcatggtggggtaggcagagccccgggaaggtcaggaagcagccacagagttttgagccacccacccacccacccaccagcttgctgtgtggccttcaccacgtctttctcatccctgggccttagctccccatcttttgctccagaagtcgagctgggtgatttctagagtctctactcgctgtttgtttttgtgacccggggagggca

SEQ ID NO: 514962 - DNA, 507 bp, Homo sapiens
taaccacaaaccactgaggccggagcactgaagagtccagctctttttcacctctgtcagcggtcatgagggagcctgctctctstggggacagatctatttttggtgtaacacggatcgtgtgaacactgataacctcagacagagtgattttcttccatgtttctcaagcatttaaagggaagcctctggaaccaccgtgttaagctcctgacacggtccacagcttgctctaagcctgttttgatcacttttctaatacaatgatatcgtttcacattctcagtaattagactctgtaatccctccattctactctgtgtgacctttatcttaaatgacatttttaaaatatgaagtttaaaaattaaaaaaaaaaaccataaaacaatgtttgcaaaaaatgtactaaaatgaattatagtttctaagccctaggctgtcatgcctggtggaagccaaaggacttggctcagacccacccctggggccagtcctacagctgca

SEQ ID NO: 514963 - DNA, 435 bp, Homo sapiens
tatttataagggaatgagggaagcaggattgggcagaagaagaagttggaataagatgcaattgcartagaaaaatctgccaatcccactgggagctcaggagttgtcctggttgtagcaagggagctgagcattgatagtcattgtttactggttggttccaactaccctgtgagatgaatattgttattgttattcctattttacgattgggaagccaggtcgaagtgaagttaagaaacttgcctagtggcaaatgactagtaagtagcaaaggcagattttgaatacagagctcaagtaaagggcccataattgtaacacctttctctacttgtcttgtatttagtctcctggagacaatcactttcttttaaaaaattctgtatattaaagtggtgatttttttaagttaaatttttttaaatctccata

SEQ ID NO: 514964 - DNA, 599 bp, Homo sapiens
gatcaagctcctgtcttcccccaacgtggctgtgtgtgaacaggcaatgtgggctcttggtaatatacccagtgacggcctggagttcagagataatgtcatctcaagcaatgccatcccacatctgcgggccttgatttcacccaccctaccaatcacatttatgcggaacatcacgtggacctggtcgaacctatgccgaaaaaagaccccgtacccttgcgaaactgcagtgaagcagatgcygcgtgccctctcactcctgcagcgccaccacagcgaggttctctcagaagcctgctggtcactgtcctacctcacctacggctgcaaagagctcatcggccaagtggatgacacaggggtcctgctcaggctagtagccctcatgaccatctcagaactcaatgtctggaccccttctctcccgtaccatggggaacattatcacaggcacaaatgaacagaagcagatggccattgacgcgggcatgctgaacgtgctgccccagttcctgcagcacaacaagtcctccatccaggaggcggcctgggccctgagcaacgtggcggcagggccctctcaccacacccagcag

SEQ ID NO: 514965 - DNA, 434 bp, Homo sapiens
gctgcattgttatagcatcatcaaatgtctcccatgtcagaatagcctaaccaaacccaaaagtcaaaatagttctctgtctttgtggctacagtggctgcgtgaatgctgtgggccacatttctgtgagaagtagctccttsgatttgctctctgcattgaagagaatgccttgaactgtcctccagagagagctgtgtccatgacgttggcctttctctttccctcactgggctgtcacctgcaggtagagatggtccttgctgtatagtcacccacaatagggatgtcactgcagccaccttgacagctaagggtgtgatggaatgagaatccggtgcctcatgcttctgactccttactcccacacaggtgaagagaccttgaagatggtcctgaactcaggatgggggtgaggatgttgggggagtgtc

SEQ ID NO: 514966 - DNA, 590 bp, Homo sapiens
ctgttgctggtatccttaaacagctaaaaagaacccacaaaaagctgaccattaacccctgtgaaatcagtgagtactaccagaagtaattaatagtgctttccaataaaactcagaaaattttcttgacatgtataaattctagttcttgacctcaaatattgttctatggatattaacacaaaatataaataatattatgaaggaaacagttgacttagtaaaagctagtgataactatttacaaaaatagattgactctttctgccttcatatttatctcacctactaagcaattatactaattattttatcaactgtatttcaaagacttaaattgctgttattaatttgttaaatgtttctctttgggtggtgggattagggacaaggtgaattttcttcctcataccttattgtattaccagaatttttcagaagaaaaaaccatttttttctggtctccaatccaggattaaaacattrcatttaaattgtatggtatctttagtttcctttaatgcaatgtttaatcctggattggattatagtccagaagaaaatgttttaatttttttcatataaagtac

SEQ ID NO: 514967 - DNA, 535 bp, Homo sapiens
ggattaaattggtttcctaagtaagtatttccatttaaagcacttatttgggagtacttggggttttttaggggggtgatcatgattgaaaaatattgagttgtttgaaagaaacaagcagatattttaatgtgcctrtttctgtgtaatttgactcctgaaacaattcattgccctctataaactgtatctgaggctgcatctctcttgcagatcattgacttcttgcacctacatcctgcctctttgatagctaatttttggttttatattttattctgagtttatataataaaatatcatctgcccttttttggttaatagtgatttcatactagactgacaggtatcatttctgtccagttgtggtctagctttaaattttctcagttttagcacgtttggcttatcattcttttttttctgagatggtgtctcactctgacgctcaggctggagtgcagtggtgtgatctcagctcactgcaacctccacttcccgggttcaagtgattcgcgttcctcagcctcccgag

SEQ ID NO: 514968 - DNA, 643 bp, Homo sapiens
ggggcagcaagaggcggctggcgggttccagtggcctgagggacacagagtctgaatgccaagcaggttagagccagcaacaggtagaagaccaggaggagatggcaggctggagaacgccagcccagggtggcctggaggccattgggaacactcccaagggctgcaggtgggacactgaggaaaggaggccaccgcctccttcacccactcacggcccctctcygccctgccccaccctgttcctgggcctgcctcatttatcaagtgccaaacccacacctccaccacaccccttccaagtcccacccacaccgcccactcaaagcctcattccaactgctacaacagagatgcatgtaatgtctactcagaccacacgcttgggctgcggtgcccactacagggtgggacaggataagacgcagcaccatggggagagggcctatggggtgggtggggtgctgggggctcttccagagggaagaggcagtggctgccccaaagactaagccacagtctggtccgatagaggaaagtgacctggtgatgccgcagggtcacatcgatgcagtttcatcctctgccaggcgctgtcctgggagacttatgtgactgagtacatttaatccttacaaacctg

SEQ ID NO: 514969 - DNA, 632 bp, Homo sapiens
atttttgtatttttagtagaaacagggttttgtcatgttggccaggctggtctcgaattcctggcctcaagtgatctgcctgcctcggcctcccaaagtgctgagatcacaggcatgagccactgtatcaggcctcttcactgagcattttacaactcagttataacattttttttttttaccttgggctttaggtattaatgccaacaattagtgagtaaatagaatgaaaacccgagaatcatactgtggacatgcagcaatgagacctgtgtcagatcctgctcttactatttctcaatggaatgagtagagcttaattcctctggaatcccatgctctcaattataaagcgaaaggggtcatttagatgatttctaaggcscttgtagatctgaaactttataattctataagctccctgaagatagaatctatcttgttaatttttggttgtttctccactaaccaaaatagtcctttgtgctttaattatatttcttatttaaatatggaagaggtatcctatggggaaaatgtagaggaaggcacatatgaaaatgtaacaagaaaaagtcagccgggcatggtggcttatgcctgtaatcctagcactctgggaggccgagaca

SEQ ID NO: 514970 - DNA, 572 bp, Homo sapiens
gcatattttgtggatgtgctgtgagccaggtactgagctatgtaagcccttaaatgcataatctcatttaaccatcacaagcaccttatgaagtaggtacaaggactattttcattttatattgaggaaactgagatggagggatgccatttaacttctttaacttcacgttactagtaaatggtgaagtcagaatttgactccaaagttagggctcttaattactattattttcctccaggatgagaagcacacctatgtgtcttttaatcctcgtcctgcagtcctggctcttaaaggagtaaaacagactgcatgagagaaagaggggcagcagcagctcacggaaaaggaagagtcaaaggccaacacggattctgttctgctatcctgcatgacccaagaatggtaagaagwaagaagaaaggaggcaagcatggaagtgtaggtaaacagggaagtatatggaacaagtgaaaagaacaaagagtgaaagaaaggagataaaataagaaggacaggaaaaagacagatcaaaaatccgtaactggaatgagtaaccaaaaaaaggg

SEQ ID NO: 514971 - DNA, 607 bp, Homo sapiens
accctgtctcaaaaaaaaaaaatgggcaaaggatttgaatagatatcttttcaaagaagataytcaaatggccaataagcacatgaaaaaaatgctcagcatcattagtcattagggaaacacaaatcaaaaacacaaggagataccatttcttacccactaggatggcaaaaataaggaagatgatgacaagtgttgacaaggctatggagaaactggaaccctcatacaccactggtgggaacacaaaatggttcagtcactttggaaaacagttcctcaaaaagttaatgagaaagtagggagagggaatagagagaaagtgggcatagggtagtgatgggattattttaagagaaggtttcagtaagaaggtaacatctgagtggagtatttgttgaaataatgactggagaaagcacataaactttgctctgctcccagttttctcttcttttgtttgtaaatagcctttctttgatacataaacattagattgtatccttccctactccagttctacaaatttttgtaaaagtcactctcaggaaataaaagtcatcattctttgatgacaatgttggcctacagtgcttcctggcagaat

SEQ ID NO: 514972 - DNA, 557 bp, Homo sapiens
ctgtcatgatgattgacgaatatagtaggtcctcatcaatgctaaatttatgcaaatgaattttcgaggccatggaagccattgtttcattgcgctgtatgtagtgtgcacttgtctgccttgattatcttatgttcctatggcagtgaatacacattctccatcccctagggaaaactgaaaggttgggtgcttcttcagagaagtaggacaatccaaaacacagacaggagttaataaccaaggaatcaaacattcagaaagttggtgagaaatagaacatgtgtttgattagatacttgtgaaaattatatcttcaattttctttggtttgtgcctgaattaaaacatcctttcctaaaatatacttccttacagtcaagcatgattttcccagatattagagcatcagttgcttgctaatttggggcattttagaaactattctggagccatctctattgtcctttatggcttggccaggatttaaaatacactaacagcacttctattatctcttgctcattttcargatgtcttgggtatttttaaggctt

SEQ ID NO: 514973 - DNA, 629 bp, Homo sapiens
aattatgaatttttgcatcaaaactgagcaattctaccattttaatgtggtgtaaaaaaagtttctgagggaattagaaaactcacagatgctgacatgcccacagttgacaataacaacaaaaaatttcagcagtaaacagttcttagtatatcctgcaatttccatttaaaacatttataagagaatattaacaaacatgaaaatgatatatttttgcatagaaaaataaactcacaaggttttagaaccataaataacccacaattctggttaccatctaccttgattaatgtctttagccagtatttgaaacatcaccatttatcatcttagcttctttcttttctttttaatatgaaattaatgcaaactgcttttgttttaataataataatacagtctatgctacatatggcatgaaataatgaaacccagtaaatttatccaatagtgaatacacagaagtgaagagttttggctctgtttgcaactgtcctacagtaatcccaggtgcaacccaactcattatgacacagtttagctgaaaaatgtaatctgtatggttataaatcagtttcattgtacttacaatasaagtaaattttggaggccaaaccaagttttca

SEQ ID NO: 514974 - DNA, 499 bp, Homo sapiens
ctaaatatcatctaaatcagatatgggtgagactctaggcacaattcatgcggaggtaaattgctttcaagttgtgaacctgtgaagtcaaacaggttatgtactttaaaatacaatgatgggacaggcacatgatagacatttccattttaaaaggaaggaacaggaaagaagaaaggggtagcagataccaagtaagttcaaaacccagtaaggcaaatcatagtaagtcttgaggcttgagaatcatcttcttttttgattctgtgccctgcctatcttacacttgagggtggaggwtaggcccataaggctccaagtggatgaatatgtaacaaaaatgtacattctggagatctatttgacagcatagtggctacagttagtaatcatgtattgtatacttgaaaaatgctgagaacagatcttaaatattctcaccacaaaaaaattagtatgtgaggtgatggatatattaattagcatgatttaataattt

SEQ ID NO: 514975 - DNA, 633 bp, Homo sapiens
gtattatctgtgggtgcttttacattaaagtggcagaattgagtagttggaacagagattatatgtcatgcaaagcctaaaatacttattatctctccttgagcagaaaagttcgttgacccccacctaatcccacttcctcattttgcagatgaggaaactgactcttagagggactgactagccaaggcacaccactaatcagaaaatcgaggttaaagcatgattaacacatgtttgagaaatgaggatgatgaatatcagaccactgacaagctatgttctaacagcaaaatgaagagawataaatatattctataacttgatttaccaaagacgaaaaaacaaaacaaaactggcttgatggatttacttcttccctgaatagatcagttgtctttatgtcatgcagatagagccgaagcaggacttcagtcaaatgacatcacaattttatgcagctaggtggctgttttccaaagaatagcagaatatttgttggtcagcctcctgtgtctcagcattatattcctcaaaagttgaattattgatggtaagtcagagaagacactttggtaattgctgaaatcttgactgtattaagactgactgtccctgtgttctgctgtggca

SEQ ID NO: 514976 - DNA, 552 bp, Homo sapiens
ttcatccccggtcctcctgggtcrgtgtaatagggcggccccggctgctgggctcctgaaagacagacaaacataggtgagcacagaagggaaagccccatcacaccgcaagtatgtgcaggctgcagggccagcagaccacgccccgtcattcactcagcgacagtgtatgaaggacccaacatgcccggtgagggggcacctgggctgtggtgacaagcaacacaataggcaggtccctgccctctcggggctttgattctactggactacattccacgttaccagttcacacattagggtggaggaaactgggccacagtaaggtgaggctgtctgcggtgaactatcggaagagctgcaaagaccacccaggcttcgcgactcagcctggcattatcgcaggagctccacaacccctctgggcacgccattggctggtgaccatttctgaagtaaggtctccattctccctgccgggctagtgtgccctcagggcaggagttactcacaggcagggaggccgtgcacctgggcacacatagccaggct

SEQ ID NO: 514977 - DNA, 591 bp, Homo sapiens
acatcccttcagaccccttgctgtgtaggaagcggtacagtggcacacgctctgggtggagacagtgaggtggaggccaccatgttttcaggtgctggtggtcagagttggaaatgagagacttctgagcagcacaccctgtgtcccttcttcagctgtgggaaggcaaaaggcagtggctgaattggcattttyttgtcttttttctttctttctttttacattgacatagaatttatctagagtgatatacacaaaggttaaagaagttttacatacgttcatactcgtaaccaccgcctagcttaagatacagacatttccagtactgaggaaatggaattgaaaacaaattctcctgctaacccagaaagcctctccacaagtttagaagagaaagaaaacagttttatcactgaatacacactaagctcatgtgacacatatcacaggcaatccatgaaagagattgcaaagatagaaaaaaaaagccacgtatataacctggcagatacaactcattgcatacttgttctcaagaaaaataactagtccttaagtaagagaacttggcagcaccgtttgtcacat

SEQ ID NO: 514978 - DNA, 591 bp, Homo sapiens
acatcccttcagaccccttgctgtgtaggaagcggtacagtggcacacgctctgggtggagacagtgaggtggaggccaccatgttttcaggtgctggtggtcagagttggaaatgagagacttctgagcagcacaccctgtgtcccttcttcagctgtgggaaggcaaaaggcagtggctgaattggcattttcttgtcttttttctttctttctttttamattgacatagaatttatctagagtgatatacacaaaggttaaagaagttttacatacgttcatactcgtaaccaccgcctagcttaagatacagacatttccagtactgaggaaatggaattgaaaacaaattctcctgctaacccagaaagcctctccacaagtttagaagagaaagaaaacagttttatcactgaatacacactaagctcatgtgacacatatcacaggcaatccatgaaagagattgcaaagatagaaaaaaaaagccacgtatataacctggcagatacaactcattgcatacttgttctcaagaaaaataactagtccttaagtaagagaacttggcagcaccgtttgtcacat

SEQ ID NO: 514979 - DNA, 591 bp, Homo sapiens
acatcccttcagaccccttgctgtgtaggaagcggtacagtggcacacgctctgggtggagacagtgaggtggaggccaccatgttttcaggtgctggtggtcagagttggaaatgagagacttctgagcagcacaccctgtgtcccttcttcagctgtgggaaggcaaaaggcagtggctgaattggcattttcttgtcttttttctttctttctttttacattgacatagaatttatctagagtgatatacacaaaggttaaagaagttttacrtacgttcatactcgtaaccaccgcctagcttaagatacagacatttccagtactgaggaaatggaattgaaaacaaattctcctgctaacccagaaagcctctccacaagtttagaagagaaagaaaacagttttatcactgaatacacactaagctcatgtgacacatatcacaggcaatccatgaaagagattgcaaagatagaaaaaaaaagccacgtatataacctggcagatacaactcattgcatacttgttctcaagaaaaataactagtccttaagtaagagaacttggcagcaccgtttgtcacat

SEQ ID NO: 514980 - DNA, 636 bp, Homo sapiens
ctgaaggaagaattgtgatttttctgtaagtcttgactttgtagaaattggcaacaaaaggtgaactctgaatttctagagttttccacaaagactcagtttcttttaaaatgtgtcttcagttttctgttgatgtaagagaatactacaaactacataatttataaagaacaggagtgtatttgsctctcgtttctggaggctgagaagtccaagagaatggcaccagcatctggcaagagtcatgccatggtataagggcatcccactgtgagagagagagaaaacggtgggccaaacttatccttttgtcaggagcccactcctgtgataacagcattagtccattcatgagagtggagatttcatggcctagtcatctcttaaaggccttacctcttaatcgtgttacaatggcaattaagtttcaaaacagaaatttttgggggatacattcaaacaacagcaggtgggaaataaactttttcatgatcaggttttaaaaaagtttatcccccaactaactggaaggattagttttattttatttgtagacccttaaatagcagggccagtcttccaagccttttctttccctgaacagtgggcaggagctcagaggggagcattcacagg

SEQ ID NO: 514981 - DNA, 636 bp, Homo sapiens
ctgaaggaagaattgtgatttttctgtaagtcttgactttgtagaaattggcaacaaaaggtgaactctgaatttctagagttttccacaaagactcagtttcttttaaaatgtgtcttcagttttctgttgatgtaagagaatactacaaactacataatttataaagaacaggagtgtatttggctcwcgtttctggaggctgagaagtccaagagaatggcaccagcatctggcaagagtcatgccatggtataagggcatcccactgtgagagagagagaaaacggtgggccaaacttatccttttgtcaggagcccactcctgtgataacagcattagtccattcatgagagtggagatttcatggcctagtcatctcttaaaggccttacctcttaatcgtgttacaatggcaattaagtttcaaaacagaaatttttgggggatacattcaaacaacagcaggtgggaaataaactttttcatgatcaggttttaaaaaagtttatcccccaactaactggaaggattagttttattttatttgtagacccttaaatagcagggccagtcttccaagccttttctttccctgaacagtgggcaggagctcagaggggagcattcacagg

SEQ ID NO: 514982 - DNA, 636 bp, Homo sapiens
ctgaaggaagaattgtgatttttctgtaagtcttgactttgtagaaattggcaacaaaaggtgaactctgaatttctagagttttccacaaagactcagtttcttttaaaatgtgtcttcagttttctgttgatgtaagagaatactacaaactacataatttataaagaacaggagtgtatttggctctcgtttctggaggctgagaagtccaagagaatggcaccagcatctggcaagagtcatgccatggtataagggcatcccactgtgagagagagagaaaacggtgggccaaacttatccttttgtcaggagcccactcctgtgataacagcattagtccattcatgagagtggagatttcatggcctagtcatctcttaaaggccttacctcttaatcgtgttacaatggcaattaagtttcaaaacagaaatttttgggggatacattcaaacaacagcaggtgggaaataaactttttcatgatcaggttttaaaaaagtttatcccccaamtaactggaaggattagttttattttatttgtagacccttaaatagcagggccagtcttccaagccttttctttccctgaacagtgggcaggagctcagaggggagcattcacagg

SEQ ID NO: 514983 - DNA, 619 bp, Homo sapiens
caaactgtatcacccagtggtaaagattttagaatgggccaccattagtacacaaataggtacagagtatggaggaaaagatgagctatgttgtactgaattgaactctaacgtgggcaaagagtgtagcaaggaggttggttaagtatgtgttaagaaaatgtgttaaaatgtatttaaatttttacaaaatgtgttaagagtgttaacactaagtggaaaacttgggtagaaaatactagaaataaagttgcatctgttttatagtggcaaagaaagaaggttgccctgtcacattaaagacaaagtgccagatttgagcagtctgaggctctgtataccaaccagtccgtgtcctgtctgaggaaggctattcttcgagagccacaggaccagctgatgaggtcagggtatatattggcctccaggaccatccttccaaagcctggctagcagtccttggcctggcaatcaacgatgagscatgccaatctgattatatcccagtgatgttgaaattcagacagaaactcagtttcttggggaaattggactaagattcatttattcttgggtgctgaaatggccatttttaggcattcggaagtggaagaagcag

SEQ ID NO: 514984 - DNA, 298 bp, Homo sapiens
cctgaggcagtaccttatggcacttgttaaggaaaaatacttttgkatgttttagaggaaagatctgaccgctgcagctgctctttgtgccaggtaaagcagatcccactaacctgtgtatactgtgaacagtagcatagtaactcatattgcactggctcattgcctgcaaaccagtctcctcccaaatcttaagagttgtcctggtatgtgtcttatgttcatgaacaggtctactccctgagtgctgccactgctcttcagggtgccatactgtctctgtcatgctgacaggcat

SEQ ID NO: 514985 - DNA, 298 bp, Homo sapiens
cctgaggcagtaccttatggcacttgttaaggaaaaatacttttggatgttttagagraaagatctgaccgctgcagctgctctttgtgccaggtaaagcagatcccactaacctgtgtatactgtgaacagtagcatagtaactcatattgcactggctcattgcctgcaaaccagtctcctcccaaatcttaagagttgtcctggtatgtgtcttatgttcatgaacaggtctactccctgagtgctgccactgctcttcagggtgccatactgtctctgtcatgctgacaggcat

SEQ ID NO: 514986 - DNA, 532 bp, Homo sapiens
tgtagcatttacctttgatctcagtggactcaacattttgtcattccaaagtatcctgccatttgtttcagcactttatgtcatgggaaacagaaaccagtgtctgcaaaagcacctagaagccagaaataaagatgtatgtgttattatttctcttgccttttgaaaaagaaaccaagagttggcagtttacttctagaggcactatgttatatcggggaacagaaagagctgtgttgggtaaatgtaacagacttttctctctcttctgtgtggctctttgcattgtgcaaacctggggcaytgcacacacttaactcatttattctccacagatatgttttggtatgtttttgttacatttatatgtctataaaggaattagaacctgtggtattttgctatgccatcttgcttatgtagtttgtatgattttataggttagatttgtaaagtatattcatctgagtctagcaggtggagtaatttgttattttttgtttctttcagctctgtgttctcgttttgccca

SEQ ID NO: 514987 - DNA, 470 bp, Homo sapiens
ccagggcttgggtttggagctgaactttttgtttcagtcttgcctgtcgttgtacctcagccgcctcctctcgggaattaaaaactttgaacgccagctttactaagtcctggataggggtttgggggccctccgctgcctcatccaggattagcggatatcactgcccgcagcgaatgtgttaggagttgtagatgtagtggactggtatggcactacagggaggtggaaataagaatgggggtaagatggaagccaaggagttaggtgggcagggttaaaagaacaaatgggaactaacaggaattaaaatggcggccaaatggcggcagaagaactaaaatggtggcagagaaaaaaggaagtaagatggcggcggtgaggaagcaggtagtaagatggcagtggtgcagaaggagatggcggyggagagactaagatgggggccgtggacaagattaatggcaaga

SEQ ID NO: 514988 - DNA, 625 bp, Homo sapiens
gcttgctttccattggtgttaagtgaagaaggtgttgaaatagagaagaaaggtgatataaattgaatacttatataaaatactatttttaataaaaagtagcatttgatgtacaactacaggtaagacttgtatgaagtaataatgttattctattgacagaataactttattcacaatattcttatttcaaacaatatcccttttttggctaaatatatgccagccttttggtgaaatattacctgagctcaagagaaatcagcaaaatgaggccgggygcggtggctcacgcctgtaataccagcactttgggaggccgaggcgggaggattacgaggtcaggagatcgagaccatcctggctaacacggtgaaaccctgtctctactaaaaaatacaaaaaattagccgggcgtggtggcaggcgcctgtagtcccagctactcgggaggctgagacgggagactgagacgggagactggcgtgaacccaggaggcagagcttgcagtgagcagagaccgtgccactgcactccagactgggcgacagagcaagactccgtctcagaaaaaaaaaaaaaaaaagaaatcaacaaaatgaacctttattttaccagaagcat

SEQ ID NO: 514989 - DNA, 625 bp, Homo sapiens
gcttgctttccattggtgttaagtgaagaaggtgttgaaatagagaagaaaggtgatataaattgaatacttatataaaatactatttttaataaaaagtagcatttgatgtacaactacaggtaagacttgtatgaagtaataatgttattctattgacagaataactttattcacaatattcttatttcaaacaatatcccttttttggctaaatatatgccagccttttggtgaaatattacctgagctcaagagaaatcagcaaaatgaggccgggtgcggtggctcacgcctgtaataccagcactttgggaggccgaggcgggaggattacgaggtcaggagatcgagaccatcctggctaacacggtgaaaccctgtctctactaaaaaatacaaaaaattagccgggcgtggtggcaggygcctgtagtcccagctactcgggaggctgagacgggagactgagacgggagactggcgtgaacccaggaggcagagcttgcagtgagcagagaccgtgccactgcactccagactgggcgacagagcaagactccgtctcagaaaaaaaaaaaaaaaaagaaatcaacaaaatgaacctttattttaccagaagcat

SEQ ID NO: 514990 - DNA, 586 bp, Homo sapiens
ccggcattcacccttccaagcttccagcttgcttatctatgtttgcagctccatttttcaggctgatctttgttagtaaagaaaaaaaaaaatttgtcttccttttgctaaagggaagctctgccaagtactcttttatgctcactgtctgtcaaatattttttttctactttctgtatcattaagactcatcatcactcagagacaaccaaacactgtgacattttgatataaccctttccaaaagtgtatatttttcacagttttgagcacgcattgcataccattttttcactgaacacaatctatcatgaacatctttccataacttaaaagaagctgcatgccagaacagtccatcatgttctgttttctttcagaaatctttagagatggatcattttccttacaagaatagataccaggtaagagaagcagcctttaaagcagcgaatagcagctcatgcatgctaattatttgcttacttmtctggctcccctattgatggcatcttgagggccggtatgaacatgtcatgcagtctccaagcaacccacagtaggcccaccataaacagatgttgtg

SEQ ID NO: 514991 - DNA, 677 bp, Homo sapiens
cacccattgctctctgaaccgtccactctgcccttggaaattgcaaagaaaaaattagaaggcaatgattatcacaaattatccttccagactagatgttttcatgccctcccaatgctcttccagtagtaggactttcagactgcttgttatcagttttattagtaagttcttctcatagtacccagtaaagcaggtttctgttcactagttgtcatctgaaataactggtcttttaaaaacatcaatgtggtctgaatttctctgctcctctgaggtcagtctraggacactgacgaccccactgactatcagtgtccccgtaagaggagcgcttagctttgctgtggtgagtggcccccagtcaaacctgagaaacaacgtgaacagaacgcaggacatggaagctattccgtgaatatttaggaatacagtagctcacatatacaggaaagtgactctctatgcacctgatccactgccttggatttgctgttttgcagaaatttgcattttcttctatacacatttatgccaaactgttatatctgaggaaagatgctaggcacagggtgataataaggttatttgaagattaataattctcttttgtgcaaaggaaaaggaaagagattaaatgacttgagaaaagtgtataaaattataccttacttaaa

SEQ ID NO: 514992 - DNA, 517 bp, Homo sapiens
gggcataactctagggcatatttcttttccacaaataacacaaatggagcaatgcaatgtatacagtttatgtggtttatgccttgtgcaaaggtgcctgacaaaaggctgatgaggctgamatccaagctaagttctgaaccctagcatgaggctgcatctgcctggaacaaaaggcaaagttttataatttacacaaagactgcatatgtgctggcggaagggctggcaactttggaattgtgtcctccctatgctccaagtactgtgtaataaactcctcatatgagcccttctctagttttgatttcttttctgggtttgagattaatagaggtttccatgacaatgaatatccacttggcaggtaatttttccattcttttttggccccctgtctagggttttaggaacaaagccttcctggattgacacatttattagaacccttctgcgtgcaacgaatgctaatgtgattgccgtggactggatttatgggtctacaggagtctacttc

SEQ ID NO: 514993 - DNA, 517 bp, Homo sapiens
gggcataactctagggcatatttcttttccacaaataacacaaatggagcaatgcaatgtatacagtttatgtggtttatgccttgtgcaaaggtgcctgacaaaaggctgatgaggctgacatccaagctaagttctgaaccctagcatgaggctgcatctgcctggaacaaaaggcaaagttttataatttacacaaagactgcatatgtgctggcggaagggctggcaactttggaattgtgtcctccctatgctccaagtactgtgtaataaastcctcatatgagcccttctctagttttgatttcttttctgggtttgagattaatagaggtttccatgacaatgaatatccacttggcaggtaatttttccattcttttttggccccctgtctagggttttaggaacaaagccttcctggattgacacatttattagaacccttctgcgtgcaacgaatgctaatgtgattgccgtggactggatttatgggtctacaggagtctacttc

SEQ ID NO: 514994 - DNA, 517 bp, Homo sapiens
gggcataactctagggcatatttcttttccacaaataacacaaatggagcaatgcaatgtatacagtttatgtggtttatgccttgtgcaaaggtgcctgacaaaaggctgatgaggctgacatccaagctaagttctgaaccctagcatgaggctgcatctgcctggaacaaaaggcaaagttttataatttacacaaagactgcatatgtgctggcggaagggctggcaactttggaattgtgtcctccctatgctccaagtactgtgtaataaactcctcatatgagcccttctctagttttgatttcttttctgggtttgagattaatagaggtttccatgacaatgaatatccacttggcaggtaatttttccattcttttttggccccctgtctagggttttaggaacaaagccttcctggattgacacattyattagaacccttctgcgtgcaacgaatgctaatgtgattgccgtggactggatttatgggtctacaggagtctacttc

SEQ ID NO: 514995 - DNA, 507 bp, Homo sapiens
tgggattacaggcggatgccaccacacccggctagtttttgtgtttttttagtagagacagggtttcaccatgttagccaggctggtcttgaactcttgacctcaggtgatccacccgcctcagcctcccagttttctaaagggatttttcatgctaaaaggaaccaaagagattctgttggtaagatgctcatatttgcctaagaaaatcaagaamaatatcctgtaacacaagtttttgtaactcagtaaatgttataaacttggtaagtttcctcattgagtagttttggttttcctttgagtaatagttcagataaatgtgtatggggtcacatttccacagtctccccaaaaacatatcttttgtgctctcctgactgagtggaaatagaacatggctccagagcggagataagagagcatcctctgccctctttctgtccctgtgaccaattcctggaccctctgctgtggcagacttgagccctcagactggctcaggcc

SEQ ID NO: 514996 - DNA, 507 bp, Homo sapiens
tgggattacaggcggatgccaccacacccggctagtttttgtgtttttttagtagagacagggtttcaccatgttagccaggctggtcttgaactcttgacctcaggtgatccacccgcctcagcctcccagttttctaaagggatttttcatgctaaaaggaaccaaagagattctgttggtaagatgctcatatttgcctaagaaaatcaagaacaatatcctgtaacacaagtttttgtaactcagtaaatgttataaacttggtaartttcctcattgagtagttttggttttcctttgagtaatagttcagataaatgtgtatggggtcacatttccacagtctccccaaaaacatatcttttgtgctctcctgactgagtggaaatagaacatggctccagagcggagataagagagcatcctctgccctctttctgtccctgtgaccaattcctggaccctctgctgtggcagacttgagccctcagactggctcaggcc

SEQ ID NO: 514997 - DNA, 566 bp, Homo sapiens
caggggctccagaatcctacaaagggacacacaggggtgggtggcaacctagttggaaatgggagtgatgggcatgactaaagtcttcctcatcccaccagaggcgcactcaactgtggctagggtgaccagaattcactgtccagcgtggctggcaggagcccactctctgaagatggtgggattcagaggtgggagtagagttgggtggtcytgtgagctgagcactctcccaaaagtgtcccctacatatgaggttgacagcttattcctgcagggactcaggagtaactctgggtgctaaaacaaaacttgagaccagcacagaaacagccagcccatgaagctggcctcccatcacacagcaaggctagccagatgcccctcactcttctcgggcaccattcttctcctcccctaggccgcctggtgctcgtggtgtttcatgtttgttagtccatgcacggtggtgagggaggctgctgtgtgatttgccccagccacagcctctacaaaagcaactagaagaagacggcagcagagggcgcttcttcaaacaccctgtc

SEQ ID NO: 514998 - DNA, 617 bp, Homo sapiens
gagaggttcaggaagtctaggacagggcaggtcagcctgagattccaagggcctatgattctgcagtcatgacgaagaataagggagggagatgaggtcaactaagaagaaaaaagagggccatactttaaataggtagggaatataatcaatcttcattattcatgaattctcacttacagaaggcctccttcttggatctgttgcctggtcacttgattaggtaattttcagctactactgccttgagaaataaggaagaatttcactgtaaagacctagtctctgatgctcactgccttttcccttgygtttctcctacagcccctctccccacaatcacgtgatgcaacaacacacacacacacacacacacacagatatgcacatgtacacgcattcatttaaactacagaactgcatttaaccgtgggaaaaatctaagaataaattttatccagattaagtgagctaaagacaatccatttcatgtgacttcagtggcgtggcacaggaataaaaccttcatctgtcaccttaatacacatcctgattcctccccttttcacttgagtgacttaggatttaaagctctcaggactgcctacttccctacc

SEQ ID NO: 514999 - DNA, 499 bp, Homo sapiens
tgacaccaaggtcagtgacttctctaagtggcgtgagccactgcttctggccttctttggttctttatgatttttaaattcatccatctccctaacagtcccctcatctcaagctcaaattcaactataataatatttataagtgtcacatgatacatattaatagcatcattcatttyttcatttaataagtatttattgaggctgggtgcagtggttcacacctgtaatcccagcactttgaaaacctgaggcaggcagatcacctgaggtcaggagttctagaccagttctaaacctcgtctctactaaaaatacaaaaattagccaggcctggtggcgaacacctgtaatcacagctacttgggaggctgaggcaggagaattgcttgaacccaggaggcggaggttgcagtgagccgagattgtgccactgcactccagccttggccacagagccagactctgtcacagaataaataaataaataaataaataa

SEQ ID NO: 515000 - DNA, 499 bp, Homo sapiens
tgacaccaaggtcagtgacttctctaagtggcgtgagccactgcttctggccttctttggttctttatgatttttaaattcatccatctccctaacagtcccctcatctcaagctcaaattcaactataataatatttataagtgtcacatgatacatattaatagcatcattcatttcttcatttaataagtatttattgaggctgggtgcagtggttcacacctgtaatcccagcactttgaraacctgaggcaggcagatcacctgaggtcaggagttctagaccagttctaaacctcgtctctactaaaaatacaaaaattagccaggcctggtggcgaacacctgtaatcacagctacttgggaggctgaggcaggagaattgcttgaacccaggaggcggaggttgcagtgagccgagattgtgccactgcactccagccttggccacagagccagactctgtcacagaataaataaataaataaataaataa

SEQ ID NO: 515001 - DNA, 639 bp, Homo sapiens
gtcaggtggcttagagtagtgggagtaggtggtccagagccacaggatagcgcgtctgtggctgttgctcgaagttgctaactttgtggttgctaagtggccaacattcattagcagtcttcaattctgtccagtttcaaaatgacactcaagaygcttaatctcctcttaaaacaggagcactttcaagctgtggctgaagattccatatatcaggatattctcagcaatgatttttttttttttttttttttttaccctcagaaccaatcatgcactaagttgctacctctttaaaaattttgatccactcctgcttcttcaaccctcctgccactgcctgggtgcccccatgattttatgtctatgttattgcaattgcctgggaattatttcactgccttcgttcttaggactctcaccccaaaatgaccagaatgcttttaaacatagatttgacctgttactcccatattcaaaacccttcattgattacaggatacagtccacatggcccttcattgattacaggatacagtccacatttcttagtctgaaattttagacgctttaaaatttctccccatccacatttccaacctcattttttttaaccactggtaatatgttttaactacc

SEQ ID NO: 515002 - DNA, 610 bp, Homo sapiens
tcaggtggcttagagtagtgggagtaggtggtccagagccacaggatagcgcgtctgtggctgttgctcgaagttgctaactttgtggttgctaagtggccaacattcattagcagtcttcaattctgtccagtttcaaaatgacactcaagatgcttaatctcctcttaaaacaggagcactttcaagctgtggctgaagattccatatatcaggatattctcagcaatgatttttttttttttttttttttttaccctcagarccaatcatgcactaagttgctacctctttaaaaattttgatccactcctgcttcttcaaccctcctgccactgcctgggtgcccccatgattttatgtctatgttattgcaattgcctgggaattatttcactgccttcgttcttaggactctcaccccaaaatgaccagaatgcttttaaacatagatttgacctgttactcccatattcaaaacccttcattgattacaggatacagtccacatggcccttcattgattacaggatacagtccacatttcttagtctgaaattttagacgctttaaaatttctccccatccacatttccaacctcattttttt

SEQ ID NO: 515003 - DNA, 367 bp, Homo sapiens
tgggggcttttctgagcctgtacaaagtgtgcatcttggagggcagagtccttaggtgaaactgaaagtctttggggtctgaagctgccttgagcctggacaggtcatggaagcccttggtgcatcctctcagccgtctttctgctgaggtttattgactggagctttgtgaacctgtgagttacattagcgctctgaggctggaagtcttcctgtaaatgctccatgtaattaattataaacaaagcagcaagccaggagcacaatacccaaakaaatccttagcgagcctcaacatgtgctctttatttctcctctgcctttccatccatccaagagcttcaaagtgtaatcctccttaacgaca

SEQ ID NO: 515004 - DNA, 478 bp, Homo sapiens
ttttggacctacttttcagcatggcaagaattagagctaaaaagcagcagttgccttaaggtggggaatgggctctccattttcccgttgtccttcccactctctcccagcctacttcacttatctatctaccttagccctgtaggaatctaagtttacaaattcctgaagaggctggagataaaggtggtagtgattcaatgaagggctaggaattatttgttaagaactttcaacctgatcctgagacgccaggcagccactggcctctggcctgacaagactggtcttttagagaacaagactgatagcaccataaagaatggactayaggagagagagtccagaggcaatgggatcacttaagaggcttttgaataagtccagagaggattgagggagatcataaagtgggatcaaagtgaaggtaaagagaaaatggatcctaagaatatttgcatgacagccaagaacacag

SEQ ID NO: 515005 - DNA, 514 bp, Homo sapiens
aaatttagaatatctctgatgtaggtacccttggggaagattttaaggcactaggtaaagtgccagcagatttcagtccataagttcccagatacaagacctggaaaacattccccacctggattgattttccagtttctccctttccagtcttaatatatcctacttttcttaatccaaactgcatgaccttctggttacctttttctactctcagtgactgctagggattgtatttctgktttttaatcaaaaaaaggcaattgattattctcaaacaccactcagccatgtttgaagtcaaagggatggaggtgggattgtcagtgtttttatcatgcacccataataaatctctgcccacaaagccttacatttcaaaaaaaagggcttaaacaaatataaatatcagcaacagaaatatgactctagaaatgtgacagtggagttaatgtaaaaagaataattttcctcatttaaaagttattagaaatcccctacatgtataccaaaa

SEQ ID NO: 515006 - DNA, 561 bp, Homo sapiens
ctgaaaaatctctaactagatggcatggggtaaattctcaaaaaatgtttaagtgtcataaagtacaacagagtaaggaaaagactgaaaattacctaactgtctagtaacaggggattattaaaataacctttatatatcgtaaaattgatcactgctaacggcctaaaagaatgagatagctctatgtacgttgtaatggaaaaatcccccaagaaatattgttaaatcaaagtacaaamagattatttgtgtaaagtaaaagggatacatttgtaaattcttgtagcagcattgaatatctccgaatgctataaaagaagctgataaccacagatgtatctagaaatgggtccggatggctggaagaggagcctttcaagtatgaaatatgggggtggaactctcagggtcctggaagaagataacttaaacaactgggctcagaaggatcccctgatctcaagggctctgacaagtcctagggtcactagggcacctggcaactagatttgtttgtactttaaacaaagtatgaaggagacttggttttcacattgt

SEQ ID NO: 515007 - DNA, 493 bp, Homo sapiens
ttgtaagtatataaattagttttttatttgcatgaggatgtttgtcttaagacaacattccaagctttcaaaataaagggtcagttcgtcttttwttctaaataaaaatgtgattctattttttcagttactgattttgaatgatgataacatgattaccagctatcaaccaatggattctggagtgactattgtcgcttaaaatccctttagtactctctgaaatgatgtgtcatattgttatttttgtgtctgtaaggctgtctttcaagtagattcttaagtcccttttctcattgctctctagaaacttcaatggtaactcatctgttgtctcagtttgttaatgtctgggcataaggacagaaactagaaaagtaagtagttggtttactttaataatagatgtcacagaaaccaaggacaggaaatacagccaggcctcatgaaaaaggaagcttaaactgtagtcagtgtaaatgatgttgagtgg

SEQ ID NO: 515008 - DNA, 493 bp, Homo sapiens
ttgtaagtatataaattagttttttatttgcatgaggatgtttgtcttaagacaacattccaagctttcaaaataaagggtcagttcgtctttttttctaaataaaaatgtgattctattttttcagttactgattttgaatgatgataacatgattaccagctatcaaccaatggattctggagtgactattgtcgcttaaaatccctttagtactctctgaaatgatgtgtcatattgttatttttgtgtctgtaaggctgtctttcaagtagattcttaagtcccttttctcattgctctctrgaaacttcaatggtaactcatctgttgtctcagtttgttaatgtctgggcataaggacagaaactagaaaagtaagtagttggtttactttaataatagatgtcacagaaaccaaggacaggaaatacagccaggcctcatgaaaaaggaagcttaaactgtagtcagtgtaaatgatgttgagtgg

SEQ ID NO: 515009 - DNA, 493 bp, Homo sapiens
ttgtaagtatataaattagttttttatttgcatgaggatgtttgtcttaagacaacattccaagctttcaaaataaagggtcagttcgtctttttttctaaataaaaatgtgattctattttttcagttactgattttgaatgatgataacatgattaccagctatcaaccaatggattctggagtgactattgtcgcttaaaatccctttagtactctctgaaatgatgtgtcatattgttatttttgtgtctgtaaggctgtctttcaagtagattcttaagtcccttttctcattgctctctagaaacttcaatggtaactcatctgttgtctcagtttgttaatgtctgggcataaggacagaaactagaaaagtaagtagttggtttactttaataatagatgtcacagaaaccaaggacaggaaatacagccaggcctcatgaaaaaggmagcttaaactgtagtcagtgtaaatgatgttgagtgg

SEQ ID NO: 515010 - DNA, 598 bp, Homo sapiens
ctgcaacagacttagttctgaagtctgacttggtattcatttatttttgtgcatgcatgtgtgtgtatgaatgatctcatgtattattttgatttcttactattaagttacatataatgcttcttgttagtgtcccattgaaaacagtgagactcttggttggttggtgttcttggcagtggcaagggggtgacaaagggggcccccaggcctgtgcagtgggtcccattagtatggatcaaagcctcatctcctccccatgtcattcaagttcctcaaaatctcgccctacctccatgttcagcgtcgtctcccattgcctactgcttgtcccccatcctgtggtccagccgacttccctgctcctactgcccttggagtgacactgttaygcctccacactttgactcatgtcattgcctctgccggaatgccctttcctctcttctctgctgcgagaattctctggatgcatcaaggcccagagcacatgtttggtctgagcagcgaggccctttcatcctctgtcccctccgtgaccatctttcctatagcatcatcctcagggctggtttagcctctcaactgtgcagtagct

SEQ ID NO: 515011 - DNA, 653 bp, Homo sapiens
  misc_feature (1)...(653): n = A,T,C or G
atagggtctctacagaagtaaaatgagattattagggtggccctagttcaatatgactggtgtccttataagaagaggagatgaggacattgacattcacagagaaagacartgtgaggacacaggaagggacagccatctgtaagccagggagggcctctcaagaagccaattgtgcctacacctcagtctcagactccagcctccagagctgtgaggagatgactgtagttgaacgccatnccagtctgtgggactttggtatgccaggcctaggaaacaaatacaggtctcttcctttaaaaacatgttaagaattatatttttacagctacattggtatagagatgaatgtaattcaggctggattcattataattatagtcatttcttctcctgattttaagagaaattaaaatggaaacattttccttggcccttaagtgtcttacgggcactgggctctgtgcccctcgtgcctggtgggtgagttggccccagtgactgggactgtggaaggcccgagggcgggttgggatccctgggtaggaagggtgcgccatggagggttcctgacccagacactgatgggatcaaagataaggagtttgtgggaggcaggcctggaggggctgggccgggaccaggggtgg

SEQ ID NO: 515012 - DNA, 653 bp, Homo sapiens
  misc_feature (1)...(653): n = A,T,C or G
atagggtctctacagaagtaaaatgagattattagggtggccctagttcaatatgactggtgtccttataagaagaggagatgaggacattgacattcacagagaaagacagtgtgaggacacaggaagggacagccatctgtaagccagggagggcctctcaagaagccaattgtgcctacacctcagtctcagactccagcctccagagctgtgaggagatgactgtagttgaacgccatnccagtctgtgggactttggtatgccaggcctaggaaacaaatacaggtctcttcctttaaaaamatgttaagaattatatttttacagctacattggtatagagatgaatgtaattcaggctggattcattataattatagtcatttcttctcctgattttaagagaaattaaaatggaaacattttccttggcccttaagtgtcttacgggcactgggctctgtgcccctcgtgcctggtgggtgagttggccccagtgactgggactgtggaaggcccgagggcgggttgggatccctgggtaggaagggtgcgccatggagggttcctgacccagacactgatgggatcaaagataaggagtttgtgggaggcaggcctggaggggctgggccgggaccaggggtgg

SEQ ID NO: 515013 - DNA, 653 bp, Homo sapiens
  misc_feature (1)...(653): n = A,T,C or G
atagggtctctacagaagtaaaatgagattattagggtggccctagttcaatatgactggtgtccttataagaagaggagatgaggacattgacattcacagagaaagacagtgtgaggacacaggaagggacagccatctgtaagccagggagggcctctcaagaagccaattgtgcctacacctcagtctcagactccagcctccagagctgtgaggagatgactgtagttgaacgccatnccagtctgtgggactttggtatgccaggcctaggaaacaaatacaggtctcttcctttaaaaacatgttaagaattayatttttacagctacattggtatagagatgaatgtaattcaggctggattcattataattatagtcatttcttctcctgattttaagagaaattaaaatggaaacattttccttggcccttaagtgtcttacgggcactgggctctgtgcccctcgtgcctggtgggtgagttggccccagtgactgggactgtggaaggcccgagggcgggttgggatccctgggtaggaagggtgcgccatggagggttcctgacccagacactgatgggatcaaagataaggagtttgtgggaggcaggcctggaggggctgggccgggaccaggggtgg

SEQ ID NO: 515014 - DNA, 542 bp, Homo sapiens
tgggagataaaccagtgtgagtatagcaaagtaggagtactgtatgagtataagcaaaaatgtgaaaacagtaacaagtactcataaactaataaygtaatataagaacttacaatttttcatagagcatattactcttactgggatctccaatctttataacaaagtacacttttatcatttccacccttaatctaattatttaaatatttatcttccagacatataatttacttgttccaactccgtcagcatttgtgtcaattcctgagcccctactgagcaaatctacgatgcaccctaataagttctattcaccatgccaggctgccattcctgaatataaggtcaaggcctggaatggtgaataaagtttatattcagtgtaaacgtggctgtgctcaacaataagactcttagatgtggcctggtacatgcagcagaccatcatttcttacatgttctacattatccacagccaaccatacccacagttcagaagcaggcaatcagtatcctgcacagatttaacacaattccag

SEQ ID NO: 515015 - DNA, 480 bp, Homo sapiens
aggaagcaagcctgagtgtgaatcctaactgtaacttacatgctgtgtgacactgggcaaaccagactacctctctgaacctcagtttcagcatctaggtktctcttcaggttggggctggtttgtgggtgatgcgcaatggtcccacagatcagtggggagcctcaggagctgttcagggctgggtagagaaggtgggcgggacaaggagggggcatctgtctgaaggggggagctgtcttgagtagactgaaccacgttgagatcatatccccagtgacagagacttccctgcagtggagactctgcctgtgttcatgaaacccataaacatgctcgctgtaaagaagggcaaagtcgctgtttctcactccccaccccacagcatcactctgtgcacacccctttggtatcttcctgctattctggaagaagaagtagatggttagagccagacgggggttccaaaccatagggttc

SEQ ID NO: 515016 - DNA, 240 bp, Homo sapiens
ttttgtcttgccaccgatgatctcatcaggtcaggatgaaagggtacagggagacagcactagatgttaggagaaggtgcaggttggaggagtgttgcatggctgggtaccttggccagtagctcactggcccttctttggagggatcacttatagagacgggaagggctgtgacttgggagtctcctctcctttcagagctttcttcarccccaagctggatatggtctcctaagagag

SEQ ID NO: 515017 - DNA, 611 bp, Homo sapiens
gcccagagaaaaactggtttggaaggctgggccacaaacaacacagcccagctttgacctcttccagcctcctctggtccctctgtttcccccaaccctggggcaggcaggaggaggaccattttggctcaggattggagagctgcaactttggcctgtgcaccagagacaagtccctagagataaggaaaacctttctctctgggagtggctgtgctaattctgagaaaggaagagaaaatgttcttttctgaccctgtctgtgagtggggggaataaacactgcatagactaaacagtaagtgaggcacttagaacacatttcttgtttctttcccctgttcagtaaaagaggagggctaagagggcaaacaggggaagcaaggggcactggggaagagagatccatagaagtgctgagaccgaagggagaggctcacagacactgcttcctaccagacacagatgggggcttgttggccatgcacagggcccttgggagccagggtgggtcaaggtccgggcagggtgctgtccatcccagggtcctaaccaaatttaatkaaaggctggaggttcccatggagccactgatgagtatgggggcacag

SEQ ID NO: 515018 - DNA, 655 bp, Homo sapiens
cagctgaaccaccttcttcctgtccctaggaaaaaaccctgatccatgggctaagaatctgaatgaaaaagactatgagttgctgtgccttgatggtaccaggaaacctgtggaggagtatgcgaactgccacctggccagagccccgaatcacgctgtggtcacacggaaagataaggaagcttgcgtccacaagatattacgtcaacagcaggtatggaccagccaggtcctcccaccttttcttcctagatggccataggctattcggggggagtttamaacaaagtgcagccatgactccagcactttctttttgaaaactagaattccatgcattgtgcatttcatgccatgcattgtggactagagtatcagggttcaaatcacagctccacagcttcctagttgtgccatcttgggtatgttacataacctctctatgcctcagcttcctcatatataaaattgtaataataatatttttacctacttctcagttaacatgagtattaagtgaagacatgcacccaaacggcataggaaaattccatttcctataggacgtgctcaaaatatgttagctgtgtaattatggaaccagacctctcaggcccagctctgcttctagctcctggtcactggtgattagatc

SEQ ID NO: 515019 - DNA, 469 bp, Homo sapiens
gaaaattggtctcttacagcaccttatatacttgaattttaaatctaaccaattccccaaaacaatgggaatttatcttttaactccagaggttaccaattcaaactcacctgcctctggtgtatcctcacaattatcgctctctgcaggagaaaagaaaatgaaraaggcattaaaccctgatttatagattgggaaaccatgccttttttttatgctgcagctaagaataaagaaagtcagagaaaattatctatacatgtcatcaattcccaacaagtccagactctctggatcatgcaagtccatttcacctcctggcctctagaatttatccacaaactgcgaatgtcaagtttcctgctctgtctgcactgagaccacagaggcgtgctagccaactatatttaaatcctagcaacagggcagtgagagaagtgtgagttttggaacctggaagactgccaga

SEQ ID NO: 515020 - DNA, 243 bp, Homo sapiens
tgccttgctgcaagaaggtgaatgcgaactgatgtgggcyacatcctacggagacagacatcaggacatccgtgactcctgcaagcctgaagaatagtctttccatacgtttggcctctctcaccttcctcttctgaggggaggtaggccaaaggcggaattacttacaggttttccaggacttcgaatgtagcttaggcattaggggcaggtaaaagaggggcaagagaatgatccaatgcc

SEQ ID NO: 515021 - DNA, 380 bp, Homo sapiens
ccaccccagatctattaatcagaatctaactttttactttttcataatttatatatcattttcatgtattttaatttaaatttttaacccatgtgatattgtttaaacagtcaatattcatttatatttaccaatatacacttatttatacttattcctttctgtatttctgaccttgccattgtgtgcccactgtttctaggccttttcaatggacaaagacggttgaaaaattttttttaatatgtggatgtgtctrttgagagacagagagatgagagagagacagagagggagggaggggggagagggagagagagagagagagagggagatacataaggtcatttgaaatagttcatttctgtatgagcattaac

SEQ ID NO: 515022 - DNA, 579 bp, Homo sapiens
tgatcattagtatcagaaaacatctgcttttatgcccaacagtttaacagcagcctaaactttcaagctggggaggtatgtaggggttctgaatttatattagcatcaaatgagtgtgacatataatcccatggtcagagaaatgcatttctcccagcactttaatgtactttacgggcatgaaaaatcataaaagtgtttcagtcagcagttcaagagtcagacttctgttacatacatatatatatatggctaactgaaggaaagtgatacaaataaacyagaaatgaactcattaagaattttaaaacttaggcgtaattttatccatatctagttttacagatgataaaactgtaacccttaaaaggaaagtgacttgcctcaagtcacccagcttttaggtgggaaagctgaggctctgaggatacattatgtagctttataaaatgtcttactataacacttacatctttacaccgtgaaccttaagagtttaagtagccttgtcacacttactacacaaaagaaattgctccagtcacccctagtagagagtcctctattctatgatttgcc

SEQ ID NO: 515023 - DNA, 579 bp, Homo sapiens
tgatcattagtatcagaaaacatctgcttttatgcccaacagtttaacagcagcctaaactttcaagctggggaggtatgtaggggttctgaatttatattagcatcaaatgagtgtgacatataatcccatggtcagagaaatgcatttctcccagcactttaatgtactttacgggcatgaaaaatcataaaagtgtttcagtcagcagttcaagagtcagacttctgttacatacatatatatatatggctaactgaaggaaagtgatacaaataaactagaaatgaactcattaagaattttaaaacttaggcgtaattttatccatatctagttttayagatgataaaactgtaacccttaaaaggaaagtgacttgcctcaagtcacccagcttttaggtgggaaagctgaggctctgaggatacattatgtagctttataaaatgtcttactataacacttacatctttacaccgtgaaccttaagagtttaagtagccttgtcacacttactacacaaaagaaattgctccagtcacccctagtagagagtcctctattctatgatttgcc

SEQ ID NO: 515024 - DNA, 495 bp, Homo sapiens
ttattaaaatagagacaatcataccaaactcttatgttcttatgaggactatgtgagataatatatgtaaagkgtttagcacaaatctgaaaaagaataaatgctcagtaaattgtagcagcataaacttttatcatctcttttattaaatttcagcctctgtagagtgaacttcttcatattaatctatttctgccctataaagtcagagaagttaagaaataataccaacatggttgctgtagagagtagattcctgaattataagcacatgttatatagataaagcacttgttaattaccctctatcaaggctagtctctctgtctgagtgaatatcgattatggagaagttctcgacctttcctgttggttcattggtttgtttgcttcttgcgttttgctctggtacatctgatagatgaggttgtgcaacacctaagagttgctctaactttgtctcccatataagatagtaaacggaaaggcaagaga

SEQ ID NO: 515025 - DNA, 520 bp, Homo sapiens
tggcacctgcgagtctcctgggctttgcagcttgactccagcaccacttacaagagatctaggagcctcttctccatctgtaaaagggagctactcatcgtattgacttcaccagtgcaatggcagttgtgaaagggttttgagactgcatccatagtggggtgttcctgtcaaccagggagagcaaagcacatctaataaggactcccagggaggcaccattagagcccaacacagtcaggtttgttaccttgrtgcaatgagagagactgcacagtgcacacccgggagcatggggcatcccccaagaggagtaacaggcgactacaggatgggggaagggtggagcacagggacagatttacataaaacagggctgtagggaagggctctgctgagagatggaccttggctcctgtgcccctggaagctacaaagttaagatcaatgtggcagattgtgtctgaggtcccttacctggagttctgcagccgggttggaaatggaggctgtttctctg

SEQ ID NO: 515026 - DNA, 636 bp, Homo sapiens
ttagcgcggcgggggctgctctgggcgcgccccgggcgaagtgcgcccagtctccggccccggcccctcggcgcgcccgacttcccggccgcccctgagcccagcagccgcgggtcccgggatcggctaagagtagctgcaacgcctcgccggacggagtcctttcctttcccgggacgctgggccatgagctccgcggccacctgaggcacaggggagtctgctcggccaggacagcctccccgaagtcccgtgccctcgcctctgcactgcgggacgccagcgctcggccctggcggaggcgtcytcggaagagcatcggggtgggggcatggaatccgcggaacctgcgggccaggcccgggcggcggccaccaagctgtcggaggctgtgggcgcggcgctgcaggagccccggcggcagaggcgcctggtgcttgttatcgtgtgcgtggcgctgttactggacaacatgctgtacatggtcatcgtgcccatagtgcccgactacatcgcccacatgcgcgggggcggcgagggccccacccggactcccgaggtgtgggagcccaccctgccgctgcccactccggccaatgccagcgcctacacggccaacacctcggcgtccccgac

SEQ ID NO: 515027 - DNA, 626 bp, Homo sapiens
atagagggtgggctggtggaaaacatgagtatgtgcctgtggaggcttaggttcagggggatctcagagggtagcaattgtgacccacagcctaataataacagtctttgccctcttggcctggctcacttctactgtaccttcaaaattaatctgcctctccccagactaaggcaggtggcccctaggggccctggctgcccagcctccctgcatacctccctgggcactcctatggcatctacactggcagcctgcagacccgagactgcctaggtcacaacgcctccagcaggcccagagtctccctgccctggccacaggccaggctcccaattagcccagatgcatcctggagcacagggccttaaaggcctccattcacccacgcatgcattcctttccctccaccaacggagtgagggaattcaccctactccacaccagagatgtggccggaatgcagaratgaagcactgagcacagtaggtatggtcttacccttgagaagctagtgggaaagagagagtttgattggcaaagcacttatctattgggttccaggcaggaacaaaggcagcactctgccagcaacccctggtggatttggattgccccagggtggt

SEQ ID NO: 515028 - DNA, 633 bp, Homo sapiens
cagagggatctcggtgagaggcaggtaggggacaaagacagggcagaaggagagatgagggacagggatgggggataggtgtgggaacaggcaggtggcatggattggaggacaggaagggacaaggatgagaaacaaacaagatgaggaatgggaaatacggatagagaaagaggcggacaaatcggggacaggaattgggacagatgaggacagagatcgcattaggaaagaagagagggtgaaaggcaggaagaagacacctgtaaggacaggcagaggacagcgatgtagcaccaagccaccaggatggggactgggacagaagaaaggagacaggagggcacaaaggtgaaggacaggcctggtggactgggaagctcctggcacatacctggggcttagcatatatttgtggaatgaatgaattaatgctctggtgaagtgtcccgattttctctcggggctgtcaggatgggactgtttggrgggatgtgacggccttccctgccctccccggcaggtgtctgagtactggctgaatgacatgtatctcaacaaccgcctggccctgcctgtcaactccagccctgccgtgatctttgctcggcagcacttccctggcaccgatga

SEQ ID NO: 515029 - DNA, 541 bp, Homo sapiens
ctcattgacatgagagacctctgcagtctgctgccgcctactgagagcaagccattggcaacaaaggaaaaagccacgaggcccagccagggacaccaaccttgactcctgccactaggtttcacctcccaaacccagcctctagaacagccagaccctgcagatccccactcccgtcccttaccccagctttccacagctccctgtcctcagggtccaactcacagaccatacagagacatcacacagagccggagtgttaggaggaaagggtcccctcttcatgcatgggaatcatcattttcaaggtggctttgggcctgcacactgggaaatgggacctgcctrgctcagaggcagcctggatgcactggggaaccacactaaggactccttctgtggtccttggaagcttagtgttcatgtctccttccctagcaggacctagtatgtccaggtgatgcttctgcccaaggaaaggatgagtcactctattacatgcaacgtacctaatgagttaggaaggaagaggctaactcca

SEQ ID NO: 515030 - DNA, 642 bp, Homo sapiens
gacaatttaatcaacagcctatcttcacaggtacaggacagayaggacttgtgtttgtccctctgcccacctgagacaaaggcatatatgactgcattttttactctatatttcctttattttatgtaaaaaatgcagattcactgagcacaagaccagtgcatagttgactgttcctctaccccctcttttcacatgtgcaatgtggattctgtgaacgctgaccaaagcctggcaagaatgcaaccatttggctcttttatctaccctcccctttttctctttcctctgtctgctcattgctctttcaatactgaagcctccaaaccctctttggaaaaaacatggatcacagatattcctgtgatttttgttccaattcccaggcacatcctcaaccttggtaaaataaacttctgaattgattgagactgacttcagtcattttctttgatttacatgaggaatcctccctaccatgctacctctgtgttcaggtcaggcctggacccctaccttcatggccacccagcccagacataacagcaggtgggagagtcaggaaaccctggtaaggaacactcttgggcttccttgagagggtgcgggggcacagaatgggggataggagcaggcagccag

SEQ ID NO: 515031 - DNA, 642 bp, Homo sapiens
gacaatttaatcaacagcctatcttcacaggtacaggacagacaggacttgtgtttgtccctctgcccacctgagacaaaggcatatatgactgcattttttactctatatttcctttattttatgtaaaaaatgcagattcactgagcacaagaccagtgcatagttgactgttcctctaccccctcttttcacatgtgcaatgtggattctgtgaacgctgaccaaagcctggcaagaatgcaaccatttggctcttttatctaccctcccctttttctctttcctctgyctgctcattgctctttcaatactgaagcctccaaaccctctttggaaaaaacatggatcacagatattcctgtgatttttgttccaattcccaggcacatcctcaaccttggtaaaataaacttctgaattgattgagactgacttcagtcattttctttgatttacatgaggaatcctccctaccatgctacctctgtgttcaggtcaggcctggacccctaccttcatggccacccagcccagacataacagcaggtgggagagtcaggaaaccctggtaaggaacactcttgggcttccttgagagggtgcgggggcacagaatgggggataggagcaggcagccag

SEQ ID NO: 515032 - DNA, 567 bp, Homo sapiens
atattttaatttttttttcatagaaatgggggtcttgccatgttgcccagtctggtcttgaattctggtctcaagcagttytccaccttggcctcccaaagtgctaagattatagggatgagacgccacacccagccaggactggctttcaaatgtgagtcagtgacatttcagaagcttcgtttgtatattttctgctcaggagcaggggatatttgccttggaagtggatacagtggtttgatttggtcctgactggagcagcaactgagttttacctctgattaaaagtgtacattcatggatttcaagtggtaaacaaatgagtaaggtagtaaagggatgagaagaggaagaaaaggagtcagcatttattgtatgctaaatgctgttagaactgagggcgccaggcatggtggctcatacccgttattccaggaactccggaagctaaggcaggaggatcacttgagtctaggtgtttgatgccagtctgggcaacatagtgagactgtacacacacagacacacacacacacacacacacacaccatagtgagactctgt

SEQ ID NO: 515033 - DNA, 580 bp, Homo sapiens
gtctgcggccgttgttcagctaaacacctctgtccacccacctccagacagtctcaatccctccacccccactccctctttgatgacttatgggcggagaacatccagagctgggtggggacagggggactctgtgctcctgctgctacccctcacctcaggtgggtgttacctgtgttaggccgttttgttttctataaagaaatgcctgagactagataatttataaagaaaagaggtttaattggctcacggttctgcaggctgtacaggatgcatggtgcaggcatctgctcctggtgaggcctcaggaagcttccagtcatgatggcaggcaaagggggagtaggcgcatcatagggtgagagcaggagcgagagagaggggaggtcccagactcttaaacaaccaggctcaggtgaactcactgagcaagagctcgctcatcaccaaggggatggcactaagccattcatgaggggtctgcctccatgatccaagcacttcccaccagaccccacttcccacactgggaatcamatttccagtgagatttagagggacccaacatccagacagt

SEQ ID NO: 515034 - DNA, 225 bp, Homo sapiens
tgttttttattctgtgtagggtgtccaattgtcttctgcttgtgacagtggtaygctggtacatatttaacaaaccctttctgggaaaaataaccccaatttgtggtgtttgttgatttctgtggtataaatactcaccatgttccctggtagctacatgtgtgaccatggaattggaaagagatgcatgcagtggctctcctgagctggtgtgagctggctccc

SEQ ID NO: 515035 - DNA, 492 bp, Homo sapiens
tttactcctatataaccccattccctcttcccctctttgtgctgttattgtcatgcacaaaattacgtatttgtgcatataaaagtatgtatatcaactcagttttataattagtattttatgcagttgtttttttaaataattgtttttaggagaaaaacaattattaaaatccaaaatatatttataatttgttctttatatttatcttcataattatctttaatggttctctttaatttttcatgtcactgtctagtgtattttcatttaagccttaaggactcccttagacaaggctttatggtasctctgctataaaacaaatttatctcagatttgtttattgcacagcctcttaatttcacctttatatttaaagaatagtgatacttgatatagaaaattcttagttgacagtctttttctttttagctgtcttaatgtcattttactatcttctgatttctatctatctccagatttctatct

SEQ ID NO: 515036 - DNA, 581 bp, Homo sapiens
ctggaaagtcacgtcttctgacagctcagcaaaagagctgtagactgctgaacatatcagaaagaaagtgtgcgtgagcaagctgtcttagaacttctacaagacaaattgatctaacagctttgctcctctgaatagtttataaccagaaactgtcagcaggttggatccaagacctgggaacattgccagtgctccatcactctgaagtccctcctagggtctcagattaggaatgctttaaggggaatgaaagttcttacttgataattagtgttactgatctgaaaaaacataatacctgatcagttgtatttaatgaaagctgactgaaatgctacatgggcaaggggaaggagagaggctcttgaaagattttacagaaaaagttataggctaggaaaaaaggaaatacatacagttaattattgttaagagtawtatgaattgttttgcccaattttcagcatgaaagcatatcattttcaattattgtctaaatatagtttctaagatatcattcatttgttcattcattcattcatgctttccatgtgcttattgagcacttactatatcaa

SEQ ID NO: 515037 - DNA, 636 bp, Homo sapiens
tagtctattttctttgggttgggggtttcctcagtattgtcccttccgtggttcacctgaaagatgttaccagaaaggggtcccaatccagaccacaagagaaggttctttttttttttgaaatgtagtctcactcttgtcaccyaggctgaagtgcaatcgcatgatctcagctcattgcaatctcaaccttccaggttcaagtgattctcctgcatcagcctccagagtagttgggattacaggcacctaccaccaagcctaactaatttttgtatttttagtagagacggagtttcatcattttagtcaggctgatcttgaactcctgacctcaggtgatccacccacctcagcctcccgaagtgctgtgattacaggcatgagccaccgtgcccagccaggttcttggatcttgcacaagaaagaattcaaggcgagtccataaagtgaaagcaagtttattaagaaagtaaaggaataaagagtgactactccataggcagagcaggcagccccgaattctatcccttgacagcattaacctctacctcctggagtgtcatttgctttccattctgttatcagatcctggcctgtttctccctagagtataagccccttgggaacagggac

SEQ ID NO: 515038 - DNA, 623 bp, Homo sapiens
ctgtcccaactactccgttagaaaggtactattttggcctcattttatagatggggaaactgaggcacagagaaggtaaatattctgcccgggtcactcagctagtccatggtggagatgggatatgagtccagactgtctgaccatgakgcctggaagagcctgcccacttattcacactggacccatggggtcggtgaagtttaaatgaggtggagcacatggagggcacagagtcccgcacacagtagggttccaacccttgccctcactccttccagggccagagagagcccatgcaaatggccagcatcatctgggacacctaccaccagaagcactggcctccagggccactgtgctaccatggagtggggcctggatgacccgtaccctggctcccacagtcacattggtgatggggacagcgcaaccggaggggcgcagtgccttgcccaaagtcccatagcttggttgtgatgagtgtggactaggaaccagctcagactcctatcaggccttttctgtaaccacagcctctgatccaggaacagctcccgctgggatgcagggacaggctctgacatcttgggtctgggtgttgtcagacactggctcaccac

SEQ ID NO: 515039 - DNA, 547 bp, Homo sapiens
cctgctcttcttttgctcactgactcattcagcagcctctgggctgggcgtttactctcctgtcaggcaacacactcctgattgggtggccttggccttcccaagctgtctctggctgtccccaagtgaaacggaatctgggctggacaggccaccggatggacaagctcttctcatctaaaaccaaggcagttgacattgtgggctaaatgataagaacaaaattaaaaaataaaaaccaggcaggctggcataggagctccatttccctgccctactgtgccagtggcctgggggctcccctgccgcctctctccactctgcagattctgagaaaactcacaaaagagcccactccaaggtgtttggcaacaaggtgggggcagcctcccagcacccagcacacatggagctttcccrcagtgggtttcagcgctcccactctgcctcggagctactctgtcaccagctcttgccctcccttggctcctctttcccatgcagctcctcctccagctcgtgggaaaggccgagaggccgggccagc

SEQ ID NO: 515040 - DNA, 531 bp, Homo sapiens
acctaccagtatgcaaggagtgactaatttttgaatgtgttacatgggggaatcatcatggtaaatatctgaaacacaaattcaagtctcaattttatcacttaagttcaatgtcactgttttcatttctacaaattaagctttgtgtcattaacgtatctgtagaggtagtggtaaggataaaaacaggacaaatttaaggttggtagcagaggttataaaatagcactaatatctcttttcttttttattttttcattcatgtgtagagatggggtctcactctgttgagcaagctggtctcaaactttggggcttaagcaatcctcctgcctcagcctcccaaaaggctggattacaggcaggagcctagccagcagtaatatcttctgaatacctaatatggtccacacacratgttggggttttgtatatgctgtatcatctcattagggaggtggcttcatctccattttatacatgagtaaaccaaaggcaaaacaggtgcacatgactgaacaatgtgaaatc

SEQ ID NO: 515041 - DNA, 581 bp, Homo sapiens
acatagcttgaagtgaaactatacagctccatgttacccctgaaaaggggggtgtccgtgtgtccaacaatgaaccaatggtgcagaggtcttgtctgtttcactgcttgagctgtggccaggccatgctgtttaacctcattgggcctgggtttcctcctgtttagcataagaaggctttctggagtttttttctgtttaatggatgctgatagctaaaccttggttccccaaccaggctataggaaaccagtagctttgaggtttgagttgtgtcactgtgaggaattacacagacctatcttgatgctcccaagccctgggggatgctgtgtcctcaagacgaagggcttatcactaccctggcactcagatcccrgcctcctctcagaaactctgcaaattgtaatgcagctctgtgggcagagctgctaatacttacccttaaccctatgtaaggttcagcattttaggccaaatgtagtttcctgatgaaaatatcttccccagaaaagccagagcttgacgtgcaacggaccaaccagaggctgctgggattcccatgttgtgcctggctgcag

SEQ ID NO: 515042 - DNA, 581 bp, Homo sapiens
acatagcttgaagtgaaactatacagctccatgttacccctgaaaaggggggtgtccgtgtgtccaacaatgaaccaatggtgcagaggtcttgtctgtttcactgcttgagctgtggccaggccatgctgtttaacctcattgggcctgggtttcctcctgtttagcataagaaggctttctggagtttttttctgtttaatggatgctgatagctaaaccttggttccccaaccaggctataggaaaccagtagctttgaggtttgagttgtgtcactgtgaggaattacacagacctatcttgatgctcccaagccctgggggatgctgtgtcctcaagacgaagggcttatcactaccctggcactcagatcccggcctcctctcagaaactctgcaaattgtaatgcagctctgtgggcagagctgctaatacttaccctyaaccctatgtaaggttcagcattttaggccaaatgtagtttcctgatgaaaatatcttccccagaaaagccagagcttgacgtgcaacggaccaaccagaggctgctgggattcccatgttgtgcctggctgcag

SEQ ID NO: 515043 - DNA, 653 bp, Homo sapiens
tggcccagctaggaagaaaggtaagaaggtgcctcaggccaacccaccagcaacaaaaatgtctggacctctggggcttacggaggggttcaggacctaggattcctaggtgtgcagctctgtaggaaacagctttctccctgatgtcaagatttgggaacttggagtggtgctatttctctcaaaaataatatctttttaaaaacaaaatgttgctttctcccatttaaaaataaccttttcccacccctgctacctcattacaaaagaaaacaatgcaagctcatcatggagaacatggaaaatatgaaaagatacaggaaaaaaataaaacatgaattgtaatcacatcacctaatgatagccactgctaggaatttgatggttttcctttcagtcttttatcaatgcatagagctatataatyagcagtaatatgtcataagcattttactaaatattatttgacactaccacttttattagtgtatatattctaatatgtggacaaggctttctttattgaggtaatctatggttgaatatttaggttgcatgtaactttgctactatgaacaatgctttaataaatatctttctgcctacatctgcctgagtttctgaatatttcttcagaatatatttaaaggaga

SEQ ID NO: 515044 - DNA, 492 bp, Homo sapiens
ggccggagtggcctcagtgagtcaatgcagggatattcactgagcatgtagcttgggccagggactgcttaaaaggaagctgctgggggaacaccgaccatggtcctcagcagagcaggaagctgggatcccaggagccatggcaagctccagatgagaagtgagtacaaacttgcagaacagacaaagagtgaggaagtggaggctaggtcaaaaagcggagagtaaagcaggcttctgtccttcaaggcccagcccagaagaccctatgcccagtgatataagatcctyatcactctgccccaggaacaactggtatgatccatgagcagtcttgggcagggcaaatacctgggctttgagtactgaataaggtgtgatgcacagtccctaagaatcatgatgacatccttagagtgttatcttaaggtagccctgtttagtccttgcctcttatccacccgctacaaagagcagtcagtttaaaaaatg

SEQ ID NO: 515045 - DNA, 492 bp, Homo sapiens
ggccggagtggcctcagtgagtcaatgcagggatattcactgagcatgtagcttgggccagggactgcttaaaaggaagctgctgggggaacaccgaccatggtcctcagcagagcaggaagctgggatcccaggagccatggcaagctccagatgagaagtgagtacaaacttgcagaacagacaaagagtgaggaagtggaggctaggtcaaaaagcggagagtaaagcaggcttctgtccttcaaggcccagcccagaagaccctatgcccagtgatataagatccttatcactctgccccaggaacaactggtatgatccatgagcagtcytgggcagggcaaatacctgggctttgagtactgaataaggtgtgatgcacagtccctaagaatcatgatgacatccttagagtgttatcttaaggtagccctgtttagtccttgcctcttatccacccgctacaaagagcagtcagtttaaaaaatg

SEQ ID NO: 515046 - DNA, 496 bp, Homo sapiens
gctgggccggagtggcctcagtgagtcaatgcagggatattcactgagcatgtagcttgggccagggactgcttaaaaggaagctgctgggggaacaccgaccatggtcctcagcagagcaggaagctgggatcccaggagccatggcaagctccagatgagaagtgagtacaaacttgcagaacagacaaagagtgaggaagtggaggctaggtcaaaaagcggagagtaaagcaggcttctgtccttcaaggcccagcccagaagaccctatgcccagtgatataagatccttatcactctgccccaggaacaactggtatgatccatgagcagtcttgggcagggcaaatacctgggctttgagtactgaataaggtgygatgcacagtccctaagaatcatgatgacatccttagagtgttatcttaaggtagccctgtttagtccttgcctcttatccacccgctacaaagagcagtcagtttaaaaaatg

SEQ ID NO: 515047 - DNA, 674 bp, Homo sapiens
cttagagtctgtacccaagaattaccgggcaaatgaatcccctgagggtgtcattgtccctattatatccaccaagaagctgagggtcctgagggctgggtgatatgttttgtgtccccagtgagttagaggtggtgcctaggctaaagtccaagttgggtaattcctggcattcctgtttgctatggaacacgaattagatgcctcgtggaacacagagactggggtgtatttgaggttatgcrtgttggtgctggggcttccttcccctcttagaagcagagttgtcttgaagttaaaaaaccatgtgatgtggccccattgcccagtattctctgtattggagcggaagtacaggataagagtctccactttatcaatgcttatggacttcagagtgaagagatcaaccaggaccagattaaaggaaatacagttaaaggaataaagttatgtcaactcctttaattaatgtgtacatttatagtctcaagtatacagacactttctatttaaaaaataagatgaaattatgaaagggataaaataaaagtcaaaagacatgcttcaaggaggaactaaataaaatagtaagagctgcctgtggtggcaaaaggaaacacaaaagagggaaagaaatatacaactcaaatgaggatttgactatatacagc

SEQ ID NO: 515048 - DNA, 289 bp, Homo sapiens
aattgatttccttgcaactgcgtggatgtcgatgtggtctgtggggtgaatctcttgctgcaaagtgttgggcttatgatggcctggcagatggtgtttgaggtccagcccatatttcaattctgtgggcattcattgagcacctattgtgcccagcactgcagatggtgccaggcatggagatggagacaagtgtctagtccctccctcgggcctgtttctgcagtctcctgataaatattgagcgccactggctggccgytgtgctgggcactttgcatatgttata

SEQ ID NO: 515049 - DNA, 621 bp, Homo sapiens
ctgccctctgccactcttgttcacattgcctttgctctttcctgcctctgtgcctcagcccatgctgttccttccaactgggatacccttccctcatttctccatgtggcagttctaaattacattccagtctccactccagagacttctgagaagccttccctgatcctsccggcagaattaattgttccctcctctgtgctcagagaacacttggcttgctctgccatttatttctgggtttgttttcatgacaacctcctttcacgagggcagaccctgtgtctttttaagttcttatcctgagcacttgtacagactggacaccgaggcaatgcctgtagaggcaatgagtgccctccgtcttatgtggacatctctgtggacaccagcgtgctaggcagacaggccctgcctgcatgtgggcaactgaaccctagccctggggcaggaccctggggcttagttctataagccagactgcacagccaaaaaagggcagtcttggaagcaggaatccgctctgctaagcctctgatatttaccagactgacagtttcccagccaaagcagcccagagacagggaatagctggagaaagtgggtcatcttgactcttat

SEQ ID NO: 515050 - DNA, 560 bp, Homo sapiens
tttggtctttacaatctctgaccccctttaaaagcctagccctgtgtatgctcatagggagagattgtacaggggcccaaatcttgagggcattgtaaaattctgctcccacacttgctttcccctcagcatcccttgatgactggccagctttctgtttgacacctcctttctttagctgtgttaatatatccagtctttgggagtccaggcttggttggatatttcacatctctgaagtgactacatagttcttctcacattcagtatgtattgatttttaaaatttaaatttgtgaacttaatcacacctttatttctgtgatcctcccccctttagtaactggggaatgggatgaggaggaatttcttcatcttagtttcagaagtcttcacagcagtggcctctatttgtagtttgatggtctaaggagtttagattrttagagaacttctaccttcactagaattttgaagacgtaacttaaaattacacttactagatgtagaaactggggagacaaaatgagttatttgcacagttaaattattagctagtg

SEQ ID NO: 515051 - DNA, 453 bp, Homo sapiens
ttgaatgggccagaaagatcatcccctgggcccgttaggggaagcgcggccctgcccacaccctgacttaggacttctggtctctagaactgtgagccaacaaattcaattgtcttaagcctctgagtctgtagggtttgttcggcagctctaggaaatgaatgcatccaccttcgtcctgctttccccggggccagrcaaagtgaggagctggagaaaagcagaccctctctttttggatggccactgctgccacctcagttcaaggagaggctttcaaagtctctgtcaaggcaggtaccccagtgctgggtgttctgtggaccctcctctgtgacccccggggtgggtccccatcacagtgccagaaactgctcgccttctatggcctcttttcagccctggagaagctcacattctctttccagggcaaaggcgggcctgcaggctgct

SEQ ID NO: 515052 - DNA, 647 bp, Homo sapiens
aagctgaattactgggatatagaagatatcttttagggtcctgaaatatgttgcgaaaccattttccaaagcgttaccataatgcttgccttcccattggcctcatacaagaaaggccatttgttrttgggtgtaacaatgtctcacatttactggaacacatttgtgctcttggtactatactaactggtactttacattcatttgcttagtgaggccttacagcaatctgttagggttgaaaatattgcgtccatttaacaaaatttcttaaaagttacaaagaaagaataattttcccacagtcgtggaagaagtaaatagctggacttaggtcaaatctaagcatgcttgagtcttacagtccattctcccttttaataagcttcgacacctttcaactcattattgatatctataattcccatagaatataatgccagcattcattatcttgcctaggttttatttctataggaattttataaaatttgtatagacttttctggaatttgacttctcttaggaaaaccatctgtgaaagaaagaagaacagcaaaggttaggtgatgggagacaggcttagttacaggcaggtggcgtgtttacacagtaccctttatcttccctgttaccattacagaaca

SEQ ID NO: 515053 - DNA, 647 bp, Homo sapiens
aagctgaattactgggatatagaagatatcttttagggtcctgaaatatgttgcgaaaccattttccaaagcgttaccataatgcttgccttcccattggcctcatacaagaaaggccatttgttattgggtgtaacaatgtctcacatttactggaacacatttgtgctcttggtactatactaactggtactttacattcatttgcttagtgaggccttacagcaatctgttagggytgaaaatattgcgtccatttaacaaaatttcttaaaagttacaaagaaagaataattttcccacagtcgtggaagaagtaaatagctggacttaggtcaaatctaagcatgcttgagtcttacagtccattctcccttttaataagcttcgacacctttcaactcattattgatatctataattcccatagaatataatgccagcattcattatcttgcctaggttttatttctataggaattttataaaatttgtatagacttttctggaatttgacttctcttaggaaaaccatctgtgaaagaaagaagaacagcaaaggttaggtgatgggagacaggcttagttacaggcaggtggcgtgtttacacagtaccctttatcttccctgttaccattacagaaca

SEQ ID NO: 515054 - DNA, 608 bp, Homo sapiens
ctcatcctagaaatgagataggccctgttaacagagaaaggaaggcactgatctctcagaggatgattgtgaatattgaatgagatagagaatttaaaaatgcctagttcatgataggtattgggaagcattagttcacatttcccaataaggtgtatgtgtataaatatatgcacatatttagggtgtgggtattctgccatttatcactaaaaacagcaatagattgtgaaaacaccttagaaattttgactctcatttagaaaatacctatcaatttaatacaattcagctctttacattttgcatgcttcgaagaactttatataagccatcccatttgataatcaccatgactaagggagggctaatattgtctccattatatagaaatgaaaaataaagcttaagaaagcaacatagtttcaatctaagtgagcaaggaagaaaccatatacagagaccccagattaaggaaatgaaggaagaattaattccatgtttaacatttggatgaaactgattggcagtcatgaaactgggaatgattctatcacttacaggtcatgaytgataggacgtgctttagggctatttacttatcccaa

SEQ ID NO: 515055 - DNA, 507 bp, Homo sapiens
ttgaattttaaagtctaaatgtatctgactctaaagtttttgttctttctagtaatattccgtggatagattcatacatacatatatacacacatagatagtacatagagcaagctatggagacatgtccatatgccacatacaatagagttataggtctgtatacatataatatcaactcttgtcttttgaatatgaacataatgagagcatatacaattatacaaaatacacatatgtggtatatattttacatttatatagaataaacattcgtttttctctgacaagtacatgctttgttcacagacctcatattttgctatgataaaatagactgggtgaatcaatcagcaaatatgtatatgcaatttctaatatattttctacatatatatatatataactttatttatctttttaaaggctgcacatagaagatataaaatggattttccaggttaaaaaatctrtagcaactctccatcagtatgcttgctagccaca

SEQ ID NO: 515056 - DNA, 588 bp, Homo sapiens
gatttcatttcaaaaataaataaataaataaaaataaaaataaaaataagaggtcaacaagcctggaatggaatcccagctcctccacctacacattatgtggccttgggcctgtgatttaatctgtctgaacctcagtttccttatctgtaaaatggaggtaatacagtgggtggagagagtaaattagataatgcacataaagctcttagcactttggctggcatgttagggctaatgatttgtttttattaaatccggcctccccatctatattgcaagttcttcaaatggttggtggcacacaccttacctagcagatgttgacagaatgcaagtccactaggaatgtccaagtggggacagagcccaggaccgtggcagcgtaacctggtgtttaaatactgggcttcagattcagactgagaatcatctggccccttctcgtcttggctttgtgagcttggacaagtttctgaccttccctatgcttcatttttctcatctgtaatagcagtggtaacctagggcctgtgtcatagctgttgtgagactcaaatgcrtggagagcacgtagaaccatgttca

SEQ ID NO: 515057 - DNA, 499 bp, Homo sapiens
ggtgctgttgcatgtgtgtgatttttttttkgggggggggggagcggggggaactgtccagagctttccagcttctcaaagcatctaagttcccatgaaggcttcaaagccagtagtttatgagatctctcaggcttccctgccactctgtaagttttcttggtgtttcctttcccttcaaacatcctccttctacctctcaagtgatcaataaccacagagccctactcctcaaataaaatagcaggaaaggggatgttgggctgggcaatggtttcatttcttagagaagcagtttaatcccagggagcccgtggcaggatgttcatgagcagagaagggagttcttatgaagggtagtgtaggttagggtagcaagttaataaactatgtaatttcagaaggtaacagggtgcatgagcagttgccaacagagaaggcaagaaggaactgctgttgtctgaggtgtcaggctgagagcaaaaaattaaaacaaaca

SEQ ID NO: 515058 - DNA, 602 bp, Homo sapiens
ctgctcgagaggcttaggcaggagaatcacttgcaccagggaggtggaacttgcggtgagctgagatcatgctactgccctccagcctgggcaacagagtgagactctgtctcaaaaaaaaaaaaaaaaaaaaaagtactctttgtctgaaattcaaatttaaataagcatcttatattttstttggcaaccttacctactaacaatttaactccatctttcatttcctgtttcattttcttataagcagtatgggggggtgcagcagtgggggtgggtatggatgagatcagagagccatttaaagcttttggaggacatcactggggtggtttgatacgtaggttttaacgtcaggaagggctagattcaaaccccatgcctgtctcttactacgtgatcttcagcaagcgacttccccctcctaaaccttctttatgataaaatgagagtcttaatatccaacttatacagttgttgctgagttgaaatgaggtgacattaaagcatccagcacattgtagctcctggataaatgacagctcttaatatacaccctcaagcaggcagttccttctgcctgcaatgccctccctcaactc

SEQ ID NO: 515059 - DNA, 571 bp, Homo sapiens
tattttgagagtatctgggtcttctccttttacagaagccatagctctttgtgagtcagcagataacatacaagaagacaaagattaatctgactctcagaatctagggccaatggatggatgtcatgggttgtagctccatgcccatgggagctgcactctagtggttgtttcaagcagcggtcacagattggtagttttcaagctaaattccatctctaggcatgtttgacttacacaattaaaaaattaattagtcgctgacatttaaaagagaaaaaaatctttatgtaagagattttgcataaagatttggatttccagctaatcktgaaaaatcagaagactgctccccaccccccgcacttggcaatattcagatggagatgggtagcagaagcctcctttacccagggtaggaattcttcagttggccacagtccccaccactgcttgtcatctaagcatctcacgtaggcatttggatttatttgtctttgtgtcacagttataggcataagctttgctcagcatcagacaacctgagtttaaatcccatttctgccttgta

SEQ ID NO: 515060 - DNA, 414 bp, Homo sapiens
gcaagggtctctagttcacgatgatcgttattcttaggccttctattcccatctctctgagcaacaggagctactgtgaagttattcacmtcaactaaagcccacgctacagcaacaggccctttgcctcttgtaagaaactttgtaggtttacttctgttattgcatcactccccttattccagcacccagtggacatcttaaacattaacatctaaggacattattacttcttactgacatctactacacacttaatccagatccgacctgtcctggggtagtcttttttaaaaactttgctcctcaaagtgtggtttgggcaccagcactccctgggagctggctagaaatatggaatctctggccccacctccggcctgctgaatcagaatttacattttaataagattc

SEQ ID NO: 515061 - DNA, 414 bp, Homo sapiens
gcaagggtctctagttcacgatgatcgttattcttaggccttctattcccatctctctgagcaacaggagctactgtgaagttattcacctcaactaaagcccacgctacagcaacaggccctttgcctcttgtaagaaactttgtaggtttacttctgttattgcatcactccccttattccagcacccagtggacatcttaaacattaacatctaaggacattattacttcttactgacatctactacacacttaatccagatcygacctgtcctggggtagtcttttttaaaaactttgctcctcaaagtgtggtttgggcaccagcactccctgggagctggctagaaatatggaatctctggccccacctccggcctgctgaatcagaatttacattttaataagattc

SEQ ID NO: 515062 - DNA, 577 bp, Homo sapiens
cattttactttattttttgagatagggtttcctcactctattgcccaggctggagtgcaggggcgtgataatggctgcactgcagcctttattttccaggtttaagcaattctctcaccttagtcttttgagtagctgtgactataggtgtgtggccaccacacccagctagttaaaattttttgtttttttgttttagagatgttacccaggctggtctggaactcctgggctcaagtgatcctccctcctcagcctgccaaagtgttgggattacaggcgtgagccacagtgcctggcccaaagtgtttttttaaactataatctccttttttttttyctagaaaatagtttttcttcagtcctgagaagtcagctccttacgtgggctttggtggagctcatgggtcagcactcgaaggtctaaatctgggtggggatgttatcaccttttgggctcggggagattgattactgactaccttgctatgaatggcacaattcatgtagtaacgtagctttacctacagcttaggaagcacataggcatcaaagaaatttacttcagaaatgtcct

SEQ ID NO: 515063 - DNA, 643 bp, Homo sapiens
ctgcatttgtagatgtcgaagcataaagactttctgtttttatggcacttctatcttatttacatggtttttactaatccaaataattatgtgctcatgtggatagaattgtttgctgcttaatcaagagagatgggtggggaagcacctgcttttagtcgttaaaatcttgttgcttttgtactgcatccaagaaactagttaacagacaaaaagtgatttgccttttcctgagaatgaaaaggaagacctctttggtttcaccctgtgaagaagagcagagagaaactccaaggtggattttctctacttgttgaaatggaaccatcagggacctcacaggaaaagtgattcttgggttttggttcttcctgccctttctctctgcctgtcatagaactcagcaattggaagaataccagtttttgttccttattggtgctgccacctgttcttactgctgaactaaatgttcttggctttctttggtgtgaacaggatctccctctgggaaaggtgggaggagggtgaaaaagagaatgggaggaggcccattccagtccctgtgctyatgtgagagggacacacagaggttagtgtgctgctctaacagaggggctttgtgctacagcttcttccagag

SEQ ID NO: 515064 - DNA, 537 bp, Homo sapiens
gaagctcatggggagatggagattgcacaggaccctcgtctgctaacctggataggaaagatgacagagcttgagagatgggctgggtactgacagctagagagatctggaagggatggagggaagaggtaagggggagggaagaggtaagggagagagaaggctgtcatacagttggaatgggtgggccgggaagagtggagatatgaagacaaactgggaggcaaatgtgcttgaagggctgtgagtggaaataggcttagaggaagatgtaatgaggaggaracaggccaggggttgaagtaggctcatcagtcaaatacccactgacatccccatcccttaattgcagatacattcaagccctctgggaggcagacacaaaccatctgcactccagcagaaacgcacgagcagaaataggtacctgttagttgctaaagccaggccagtgagacatagagctgagacaggcaatgggagccctggattaggggaagagaagaggagagaggtccataccgctgcacagtgagg

SEQ ID NO: 515065 - DNA, 180 bp, Homo sapiens
gtgatctacagcttttaaaaaggagcatctcagaataagatggtggtacaatttgcttattgagaaaggaaaaaaaaaacacaygagtatattacaaagggaaaagaaggaatgtgatttctcatgattgaaagcttgatttagattgcatacagcttttgctacccaagaccaagcggc

SEQ ID NO: 515066 - DNA, 416 bp, Homo sapiens
gttcgacaatattccttgatgacagcacagccagccagcattatcttacaatgacaataatatcgtgagtacaactatgctgccgagggacagattcctttattcggaaattatttcagccatttggttgtcctcttcagcaatcagcttaagaaattggagtcaaccatatattgatatccagattctsaatattaagtatcagtttctcttttaatcttagacgtcgtggtggaaggaaaaatcagttagcaaagaagcaaacccagaaacagtgtatctttttgatgcctttatgcctttagacaatgttgaacacagtgagaaggataggttccctttattgaatgttttttgtggaaacttagtttttcaatgcatcataggcccaaatcagtgtgcactactttggacat

SEQ ID NO: 515067 - DNA, 641 bp, Homo sapiens
aggacatggggatgcactcaggggacactgtgtcctctaccttcagtcggccttgggtttcagtcatgagtcatgaaccctgagactgaacagtggcccagtcccaggcattagcacaagggaaggactgcagggaggtgctgttcttcctcttgctcctggctgggggagtggggtctgcgtgagtgtagagtggataggggctctggccatgccccaaggagtaggggacagccccgctgggaggcttccaggcagagaccttgaggcagccctaggacagaggcagtacatgcagtgccccatttatcaaggacagtagagaggcttgcactcctctcggcctctgctgttgggtggaaggaggtgctgtgcttcgtacccagggaggaccctggggctcgggccacccgtcaccagcctccattgggatttgtctcttggtstccgatcttgttctcttgaagatgccacttgtctgagcctggtggcttaaggggagcacagggacaaggttcagtcgtttgagccccagcctgggtggtgggaggggtacagggccctggggtgtaaaccaagcccaggcggctagccatcccctcccaggggtctgtggcttgttcacctccccagtcaccgac

SEQ ID NO: 515068 - DNA, 626 bp, Homo sapiens
cccacaataacttcctcccaagaattctccaggcgcgttcctcctttccccagtcagctcggtttccagccaggaagccaagcagtaatgggatcaggatccctgcagtgcccagggtctcgggggccacgggaggctcatcccaaaggcactctgttatcttgaaaatgttgcatagccctgttcacagacacatggtacaggaaggctacaaayccacgcccgctttgcaaggagggtgtctgtcccctagctgcagaccacccccaacccccaaatctaaccccattaggtctgtgctagctctacggaagcagagtcaaagccatggcaaggggttattcccatctgccagttaacaacacagctcaggactcctacagcagaggatgcaaactggcaccccgagggcaaattcaactcatagacacatatatatacacacacatatatacatatataatacatatatacatatatatacacacacatatatacatatataatacatatatacatatatacacacacatatatacatataatacatatatacatatatatacacacacacacacttctttgactacacaacgtgctaaaaccttatgatgtaaaaccaacgt

SEQ ID NO: 515069 - DNA, 478 bp, Homo sapiens
ctgcctcctcagtgtctccacaagcatgtcaggtaccaaaactctctctctccaaactacctttttgggccaactcacttctcccaaagcctgttctctgtccataccaccagaaagtaggctagaaacggggctgtcctgtaacttctcctacttcyctcactgcccctgttcccactgtccaatccctcagtgagtcctgttaatatcacctcgacctctcaatccacttttcaacctctactgtccaccatgatctctcacctggattaacaaaacagccttccagatgcccttctggtctccactcttgaccccaattcatgatgtcacttcccacttaaaaccttgcaactggttttcactgcacttggagatccagtccaaacttgcacggccttacatgatttgatcccttctgcctctcgatttcacctcccacagctctcgacccctcacttgctggcttccaaccacg

SEQ ID NO: 515070 - DNA, 636 bp, Homo sapiens
ccagaaccaagcttcctgcttggggcctggccctaccatcactcacccagctcttgggggtgcaggtctggcaacagcgacccacaaaggggcgatacttscccaggaatggagtgacagcctccagcttcatcccaaagcctgacgaccacaggctagcctggaaagggcgatgaggagagatgagaggactcaaagtccttggcaggagagagggaaagatggagcaatggaggctctaggagtgaggggcacagcagaaggggtggcagggcagagaggatttgaggaatgggaggagccacattacctctcggccactggggctgctccttggctgagtttggcatctgccttccaacatggtggccatgagagcctagaagaaccacgaaccagtcacctctggcactctccttctccccacagaaacctgagccggggaaaggtgcaaggatggagccataagaatctgagccataatccagggcctcctgcggtaactgcaaccccccatcacaggacagacagacatcacttaggccattagtggtgaggagaacctaggctggaaactaggggctggctcaggtcaaggccctgccccacacccaactgatcccacaaaggagccag

SEQ ID NO: 515071 - DNA, 636 bp, Homo sapiens
ccagaaccaagcttcctgcttggggcctggccctaccatcactcacccagctcttgggggtgcaggtctggcaacagcgacccacaaaggggcgatacttccccaggaatggagtgacagcctccagcttcatcccaaagcctgacgaccacaggctagcctggaaagggcgatgaggagagatgagaggactcaaagtccttggcaggagagagggaaagatggagcaatggaggctctaggagtgaggggcacagcagaaggggtggcagggcagagaggatttgaggaatgggaggagmcacattacctctcggccactggggctgctccttggctgagtttggcatctgccttccaacatggtggccatgagagcctagaagaaccacgaaccagtcacctctggcactctccttctccccacagaaacctgagccggggaaaggtgcaaggatggagccataagaatctgagccataatccagggcctcctgcggtaactgcaaccccccatcacaggacagacagacatcacttaggccattagtggtgaggagaacctaggctggaaactaggggctggctcaggtcaaggccctgccccacacccaactgatcccacaaaggagccag

SEQ ID NO: 515072 - DNA, 550 bp, Homo sapiens
tggccggcccctctggctagctctgacctggagragttcagcctttggtttcagtaaaatctgctaccctgtggaatcctcccactggcctgttatctcccccttaatttctggggcaaattgcattaaatgctttccttcctcccacagtgggccaggcaggagagaggctgttagctgcaggctagggagtgtagccccggattctcacctggcaaccccagtaatgagcactgcagagacagccacagacacccttattgaccaggaagaagtcaggagcccaaaggcagagaaccaagggctgcgggcctggagggaacccagggaagcctagacagccagaggcaggcaggcaattaaaggagggggtggagttttcaattaacagctcttctgctagaagcaggtaattaacggattagcaaggctgttagcaaggctgcttgctgccagtgaggaacctggcaggtgctgccttggagaaggaggaccaggctccagattccacaggaaggaaaggactcttcggaggcaggatcctgagggc

SEQ ID NO: 515073 - DNA, 550 bp, Homo sapiens
tggccggcccctctggctagctctgacctggagaagttcagcctttggtttcagtaaaatctgctaccctgtggaatcctcccactggcctgttatctcccccttaatttctggggcaaattgcattaaatgctttccttcctcccacagtgggccaggcaggagagaggctgttagctgcaggctagggagtgtagccccggattctcacctggcaaccccagtaatgagcactgcagagacagccacagacacccttattgaccaggaagaagtcaggagcccaaaggcagagaaccaagggctgcgggcctggagggaacccagggaagcctagacagccagaggcaggcaggcaattaaaggagggggtggagttttcaattaacagctcttctgctagaagcaggtaattaayggattagcaaggctgttagcaaggctgcttgctgccagtgaggaacctggcaggtgctgccttggagaaggaggaccaggctccagattccacaggaaggaaaggactcttcggaggcaggatcctgagggc

SEQ ID NO: 515074 - DNA, 558 bp, Homo sapiens
agctgagagtcatgggactcagcagggacacagtgagcaggctggaagggcgggaggcaggccagaggggatggggcagtataatcccactgtcccctggcctcgcagggtccctggtttgcagagccctctttgcctgggatgggctaaggaggcagtgtatgagaatatctgggggtcatggtgttgacacccctggaattggcacattaccacasagctcacacgttttcacagtggtttaggggggaagctgcataaggcggggctgacagcaaggactttgacattagacacgcttcagttaagcctcgctcccacttcccaatctaggggactaggggatcctcagacagcccagatgttcctcagactactcagcacctttctagttaggcaggatcatgccaaattctaaagaagccagtacgcacctccatctgtgtcttcccctgccagggagttggcagaggccactgttccagacagcagagcctcaatcagcctgaatccctgagcgacctgcatggagcagattccctcgccagcccccatgag

SEQ ID NO: 515075 - DNA, 515 bp, Homo sapiens
ctttttcagctgatctcatttctcctgagtttctgatgctctgagtccaaagcctaaacaaccgtattcttttcactctccaaatacaaagccctctcaccctggctcggcggttggctccctgctctgagccagctcacctgatcctttagaggaagaatgttcgaagcacaggctttaaaaaygtccttcctagcttgtgcatattctatttgcacttccccactcactcaagaagatgccatttcccccacaaagctgggagccttaatgcccttctccagcacccatcctgcccaccgtggctgaggtcacagctctgggctttgaaatgcacaaacacaatcagaggtcaactcctgtcatttgaggatccctgattagaaaagagcttgatatacaagcagggtatgtatggaaataaaaaaattagaaaaaagagaaataaaactggacacacagatcagcaggggttagcggtctccttgtcattgtcacaaacaaacccctgttct

SEQ ID NO: 515076 - DNA, 424 bp, Homo sapiens
ctgtccctgacactaggaagcagtcagcctccttgctccctgacactgcctttcccttcacccacctttggctggctctggctactaacatgggataacagctttgagatcccttgccacaggtgttggtgtcacccrtgatctatcctcctgtatggccaaatcccctgcccccataggccacagatgccatggcccacgtggccggcttcactgtggctcatgacgtgagtgctcgtgactggctaacaagatgcaatgggaaacagtggctgctgggaaaaaccttcgacaccttctgccctctgggccctgccttggtgaccaaggacagtgtagcaggtaggttcctgatccctgcccccttgtacctaccattgcacagatgaacagccctccagggaggagcacgggttcaggtaca

SEQ ID NO: 515077 - DNA, 424 bp, Homo sapiens
ctgtccctgacactaggaagcagtcagcctccttgctccctgacactgcctttcccttcacccacctttggctggctctggctactaacatgggataacagctttgagatcccttgccacaggtgttggtgtcacccatgatctawcctcctgtatggccaaatcccctgcccccataggccacagatgccatggcccacgtggccggcttcactgtggctcatgacgtgagtgctcgtgactggctaacaagatgcaatgggaaacagtggctgctgggaaaaaccttcgacaccttctgccctctgggccctgccttggtgaccaaggacagtgtagcaggtaggttcctgatccctgcccccttgtacctaccattgcacagatgaacagccctccagggaggagcacgggttcaggtaca

SEQ ID NO: 515078 - DNA, 424 bp, Homo sapiens
ctgtccctgacactaggaagcagtcagcctccttgctccctgacactgcctttcccttcacccacctttggctggctctggctactaacatgggataacagctttgagatcccttgccacaggtgttggtgtcacccatgatctatcctcctgtatggccaaatcccctgcccccataggccacagatgccatggcccacgtggccggcttcactgtggctcatgacgtgagtgctcgtgactggctaacaagaygcaatgggaaacagtggctgctgggaaaaaccttcgacaccttctgccctctgggccctgccttggtgaccaaggacagtgtagcaggtaggttcctgatccctgcccccttgtacctaccattgcacagatgaacagccctccagggaggagcacgggttcaggtaca

SEQ ID NO: 515079 - DNA, 571 bp, Homo sapiens
cctcgtcggtgaagtgggtgtagtgatagtgtccactctaggaggtggtcactttgaggattcgatgaggtcatctgtgcagcacacctgctcagggcctgcgcktggcactccacagagcacaaggccagctctactcctccaggctgctgcaaagtgctgccagtgcaggggcctctccctgggtactcaggaaaggccagaatccatgaggctgttgctctggccctgctgcctgcatcgctgatccatcctcagcctgaacctcaagggctgcagctcagacacagctctgctgctgcttcctaggaacagagtgaggactcaaagggaggtgctgggagcaaccaaggacatcagtgcctccttctcaaccagacaccctgggctctgagccctaatggttctccctcccactgtggcctaagtgtcttcacattcaaggctctggcagtcatgaggattacatctcaacatgagatttggagggaccatccaaactatatcacacggtaagacatgatgcatgtttatacactttattggacaatttgtttactgacagccaaaa

SEQ ID NO: 515080 - DNA, 571 bp, Homo sapiens
cctcgtcggtgaagtgggtgtagtgatagtgtccactctaggaggtggtcactttgaggattcgatgaggtcatctgtgcagcacacctgctcagggcctgcgcttggcactccacagagcacaaggccagctctactcctccaggctgctgcaaagtgctgccagtgcaggggcctctccctgggkactcaggaaaggccagaatccatgaggctgttgctctggccctgctgcctgcatcgctgatccatcctcagcctgaacctcaagggctgcagctcagacacagctctgctgctgcttcctaggaacagagtgaggactcaaagggaggtgctgggagcaaccaaggacatcagtgcctccttctcaaccagacaccctgggctctgagccctaatggttctccctcccactgtggcctaagtgtcttcacattcaaggctctggcagtcatgaggattacatctcaacatgagatttggagggaccatccaaactatatcacacggtaagacatgatgcatgtttatacactttattggacaatttgtttactgacagccaaaa

SEQ ID NO: 515081 - DNA, 571 bp, Homo sapiens
cctcgtcggtgaagtgggtgtagtgatagtgtccactctaggaggtggtcactttgaggattcgatgaggtcatctgtgcagcacacctgctcagggcctgcgcttggcactccacagagcacaaggccagctctactcctccaggctgctgcaaagtgctgccagtgcaggggcctctccctgggtactcaggaaaggccagaatccatgaggctgttgctctggccctgctgcctgcatcgctgatccatcctcagcctgaacctcaagggctgcagctcagacacagctctgctgctgcttcctaggaacagagtgaggactcaaagggaggtgctgggagcaaccaaggacatcagtgcctccttctcaaccagacaccctgggctctgagccctaatggttctccctcccactgtggcctaagtgtcttcacattcaaggctctggcagtcatgaggattacatctcaacatgagatttggagggaccatccaaactatatcacacggtaagacatgatgyatgtttatacactttattggacaatttgtttactgacagccaaaa

SEQ ID NO: 515082 - DNA, 662 bp, Homo sapiens
gtcaccttcctgccatgccactcacctctcccacggggcctggggccacttgggctgcagccgtagagttkgaggacccgggtgatgtccgaggcactcaggttccatcgctggccgatgtggacactgggggcccaaagtggtgtgatggtgggcagcccacgccggctgaaggcaagcctggaacccagcgggagacccctgagtccagatcaccacgggagaggctgggggaagcagagggagaagaaggcagggtcctcacctcccatagtgcatcacagaggagtagtcatagggcgtcagcatgttgctgctccgagacttgatgaagttgatttcaaagcctaaaaatacaaaaacaatacaacttactgatatataaagagggcaggcaagaaagggcgggcaatggctgggagagtcttctgggagctcataactcacccaagctgaggggctgagcccacagccaccatgctgcttctggtaccagtcccactttcccagccctgggaggatccccaacctgtactagttgaggtagaggcacagggaccccatggctggccaaccatcacctcctagctgttccctccacccatccttcctccttgcatattcagtctgcacggggctggtctctgcataagccacagctg

SEQ ID NO: 515083 - DNA, 622 bp, Homo sapiens
tgttctattttgttgcaaatttttgaaatgtagaagtatttttagaatttagtttgtstgtgtgtgtatttaatcaggagttgaaggtaaaacagttataaatttaaggggtttatttttgttcacaaatcataaaactcagaacatgtcattagaaaatgataaacgattacaaatttttatttgagatatagagttaattctagttcattgtagttatttatttatttacttattttaggttaccttgaaaatactaattaagattttttgaaatgattaaaatcattccattttcatttgcttaattcttaatttataaaatgcatcttgttaatagaaataaattttttaagtgtaatgtaagctacttgggtgagggagaagtaaatattctttgtattctttcagaattttttttaagtcatataccacttcacaaaatcctccaggtagattttaatatgctgtgttttctttggcactgctgaattaatctacttatatttcttatttagaagctgaaagtgccattgagcataccaagatttgttttctaaatggcgatccggctggtgtgtgtgtgtgtgtgtgtgtgtgtgtgtgtgtgtgtgtttgttgt

SEQ ID NO: 515084 - DNA, 631 bp, Homo sapiens
accatgagggtttcaccttcagctcttccatctgaatttaagtttattatgtcttctgtcccagttattcattttctgttttggtttcaagcttagcgaaataaatatctaagatagttttctcacatttaatctagcatttgtatatgtgtgtgtgtgtgtgtgtgtgtgtgtgtgtgtgcgtgcgcacgcgcrcttggaaggtagatgggggaactcggttcaacctggtaaccagtaatgtcatccaaaaaaaaatgcaaactgtctttattaaattttactaaacagatttcttacaaaggacattgtcattatctcaaactggaataggaacagtgtggggaggggggcaatggaaggaaaaaaagagattagtgacagtgaatagactcaccaatatgtctagtttatttctgatctgatattttaatagctaaatgaagatggaagttgtatggttagctgaaaggacaaagatgatttcattactatatttatttgaagtaccagcaaatattaatttaacatggcttcaggctaatagtacttgtagcttcttcaagtttacaccaaaattcctgtggagatacagaaaaagtcacaaaacccatgaagttatgtaccatta

SEQ ID NO: 515085 - DNA, 631 bp, Homo sapiens
accatgagggtttcaccttcagctcttccatctgaatttaagtttattatgtcttctgtcccagttattcattttctgttttggtttcaagcttagcgaaataaatatctaagatagttttctcacatttaatctagcatttgtatatgtgtgtgtgtgtgtgtgtgtgtgtgtgtgtgtgcgtgcgcacgcgcacttggaaggtagatgggggaactcggttcaacctggtaaccagtaatgtcatccaaaaaaaaatgcaaactgtctttattaaattttactaaacagatttcttacaaaggacattgtcattatctcaaactggaataggaacagtgtggggaggggggcaatggaaggaaaaaaagagattagtgacagtgaatagaytcaccaatatgtctagtttatttctgatctgatattttaatagctaaatgaagatggaagttgtatggttagctgaaaggacaaagatgatttcattactatatttatttgaagtaccagcaaatattaatttaacatggcttcaggctaatagtacttgtagcttcttcaagtttacaccaaaattcctgtggagatacagaaaaagtcacaaaacccatgaagttatgtaccatta

SEQ ID NO: 515086 - DNA, 389 bp, Homo sapiens
aggaggtcatgactagtctgggcaacatgtgaaaccctgtttctacaaaaaatacaaaaattagctaggcatggcggcgtgtgcccgtaggcccagctacttgcagggctgaggcaggaagattgcttcagcccaggaggtcaaggcttcagtgagtcatgatcacaccattgcactccagcctggtgaacagagtgagactgtttaraaaaaaaaaaaaaagatgagtattaatacatgttgagtgagagattaagaagaaagcgcataatatatcatttaatgatgaaaaacttgcaaatcaactttatgtcttatggatacatatatagtataaatataaaaaatagctgggtgtggtggtgtgtgcctatagacccagctacttg

SEQ ID NO: 515087 - DNA, 472 bp, Homo sapiens
gtctcttccttctgttggtccttctcttacaaccctggtttattataccctttacccttcccttatgtaatcacatgtccctttgtaaacatcaaaggaaaataagcaggcccagggagctgatgaaaatgagaatgatgactcatagaaggatgtttttctatttttcacttatacaagcctcttctgaaaagagcctagatgccttttctttctgaaactagtttgtctcctctattgtagtgagtcctcactttggctctgattatcaaaatctactctcaaccattcactgctacgtgcctccagctcacctgggccctcagagtagtcaggcaatcatttcttatttccctaagcagcttttctcccccctttcacccttcatttaggctatttttaaaaatcttcatactccctaaagttccatgctcatatgccaccccaacratcacattcacccactatagac

SEQ ID NO: 515088 - DNA, 589 bp, Homo sapiens
ctggactttggggagcaccaaagctgggatggcctttcgaaattgtctcaaattgggatcaagactttacattttctacttggatcagtcattacacatggaccacctcaggcagggagcatgactttgggctagtggctctctttagacaaggccatccctaaagatgactactagttgatggacgtgtctgcaagcagcactccyagcagggggaataaattgtatatttgggaaaacaaatctaggtggcacaccacaacattcacatcagaggcacataccctaatcaaggggtttatttagcatctcatttggctctcacactaagctaagacctataccttagcttttttttcagcaataaatgttttagagcctgtcttccaatcatttgttttattgctttatttttccagaggcttaggctgggatgagggctgccatttaaacctaaaacatttctcaacatccttctctctgttccactaggtcaggccatccttgtctctttcctgaactacagcttcagtttcctatctggctgtcctatttccattagtaccactcttccgcttttcctccacag

SEQ ID NO: 515089 - DNA, 664 bp, Homo sapiens
ccaatggccactgaacagttttggccaatgtcctagatctggtttaggaaaatggaccgacgatttcccacagatgaatatttagtgatttgctcaagrtcaccacagcatgtcggtagctggaaaagaatagagatctcataactcaggttctttaatttttaagactcaaacttattaaaaacatattaattgcacaatgtcatttaagatagaaaggaggcaagggatatacctaataaaagtaatatgacagctctcactatgtaaattcttgtctgcttcaaaattgtcctaaattaggaataaaactggctttttaaatagcaaatgtattagaaaatcagaatatttgaattttagagttagacattaacagttcgggaaaaatacaaatggctgctgaatgcagttatttattactagctctgctatgaaaccctaaaggatacctttctgtcactcctattttgctgctatttgtatccgctttgaaaaaatatttccattcagattttgagttctcggtgggtatctttcgcctttaccttttgcttgtcacttggaattaaaaggaatgtgtattagaaagtaaatagaaatgcaaatggtaagttgagtaggagaaaacagttgaaggttgtttatttttgttttcttaaga

SEQ ID NO: 515090 - DNA, 664 bp, Homo sapiens
ccaatggccactgaacagttttggccaatgtcctagatctggtttaggaaaatggaccgacgatttcccacagatgaatatttagtgatttgctcaagatcaccacagcatgtcggtagctggaaaagaatagagatctcataactcaggttctttaatttttaagactcaaacttattaaaaacatattaattgcacaatgtcatttaagatagaaaggaggcaagggatatacctaataaaagtaatatgacagctctcactatgtaaattcttgtctgcttcaaaattgtcctaaattaggwataaaactggctttttaaatagcaaatgtattagaaaatcagaatatttgaattttagagttagacattaacagttcgggaaaaatacaaatggctgctgaatgcagttatttattactagctctgctatgaaaccctaaaggatacctttctgtcactcctattttgctgctatttgtatccgctttgaaaaaatatttccattcagattttgagttctcggtgggtatctttcgcctttaccttttgcttgtcacttggaattaaaaggaatgtgtattagaaagtaaatagaaatgcaaatggtaagttgagtaggagaaaacagttgaaggttgtttatttttgttttcttaaga

SEQ ID NO: 515091 - DNA, 644 bp, Homo sapiens
gtgaatagaagattttcttcttgttgcgctttcatagcatttttgtgtgaataatttagtctacgaataagkattttaatttctctattttctcactcctaattttatgtatcctatccctcataaatgactttcacaaatatttcctcattttgtcctttcatcaaccctatgagttgagcagtttttattattatcttttcacagagatagaaattgagacacaaagagggtgaacaatttggagaactgtaaaagggaaggttgagcttcacctagaatttcaaaggaacctgaaatggcaaaataacatttcccttatcaaacttaaaaaatctttaaagctacaattcacttacatttagctttgggtaatggattttataactattagtaaaattccctaaaaggcattgtttcatatcttactatacatacatttctttcaagcctcagaatagtacagattcttttacaaactatgattagtcaaatttattcttaaaactgcctgtactattgattaaattaattctccaaatttttcactgtctctgtttccaatagtattttttgttttttattccttttttcctaagtattaaaaattaccagtattttatttttacttattttttttttta

SEQ ID NO: 515092 - DNA, 588 bp, Homo sapiens
tgtgacttttccttttaatttcacatcccaaaccctcttttccagaggagtctatgttacaaatttatggtttcctgctgcagtagcagggaggaaaaccagttttggatcccagcagtactagtgactgtgtgagcttaagctagtcactttccctctaaaagccttgattttctcatagtaaaattaggayaataatacctatagagctgaagtcacaggattacagcaagggcaaaatgacatcatggttgtgaaagcagctacccgtgtgagccacgatgactattataagcagtagaggtaagtaatacttgtcagggtagtggttgtcaacaattagtgttgatattcatggcaatgcatgacttactgatttttttaatgttgtctattttatcttttatatattttatctttaccactccatatcatactcgtcatttaagaaacaactctagactaacttcctgccaaatacttcctgggtcacactagcctaccgaactgaactctgctgtcctcaaaaacctccaaaacatataccctttgcattcaggcatgtaccacatgtatcatttcatatca

SEQ ID NO: 515093 - DNA, 632 bp, Homo sapiens
aaactgaaaagagcaaggaaacagactttctcagagccccttaaagaaayaggcttgcaacaccttgattttagccttgtgaaacgagagtcaaactcctgacttaaagaactgtgacctaatacatctgttatgtttttagccactaagtttatggtaatttgttaacagcagcaataaggatcaaatacatagtttctaattgaagttgaatgctgctgtaagaaatacatacaaatgtggtcgtggctttagaatttcgcagtggaaagagcctggagaaatgttcaggagcatgatagaaaaagccttgactgacctgacatttctgatgttagtagaaatacagatgttaaaggcactgttggtgaggaatggaaaaaaaaatagagaagaataacgtttcagtaaacaaaacctttaaagcatattcccttcaagaatactgaaattattatgaactgactattgatagaaagaagtacattaatggcattgctggtgaaggcgcagaagaacataaagaaaatgttattgcaaattgaagaaaatattacctttgtgataaaatggcagaaagtttagcaaaaatgtgtagagccgaacttgtaaaaagggtgagattggacatt

SEQ ID NO: 515094 - DNA, 635 bp, Homo sapiens
tgcctcccacccccagagattctgatttaattggtttgaggtgtggcctgggcaacttgatctttaaaatcctccaggtgattcaaacatgtagtcagggtggctactacggagctagaagagcaagctgccttggagctggttcttaggactgaaggaattgaatgtgggttaaaatgcccttccacagggatgctgtacaaagaattcctgtacaaggtatgaacagacatctataaattcccttttaatgttaggattccaaatgtcctaaattctgacaaaactaaacctataarattagtgctttagttcagccttcttcctttttttctatttcttgtttttcttttccctgctttgtacattcagtgtaaacttttaatgaattacacaggtgaatcatatgattagcatgaattgttgtaagtgatggatttcattatggattgtccttaaatcagtatgactttgaacaaagccaaactcagtacattcattcaataattaaacacatattgatggagagcctactgcagggtcacgttgggaatatcatggtgagcagaaataggtacagtccctgccataggggcttatagtccaatgtgggaaatatttattacataaccacc

SEQ ID NO: 515095 - DNA, 405 bp, Homo sapiens
tgaaataagcacatcacggagaatagggtatccatcctctgaaacatttatcctttgagttacaaacaatccaattacattctttaagttattttaaaatayacaattaagttcttattaacgattgtcactttattgtgctatcaaatagtaggtcttattcattctttctatttttttggacctattaaccatccccaccttctcccgctcttgattttcctttgcatgcatgtattcataaagtttattagtattttgcaaatctttgtaggataagtgctacctgtccaggtcacaattatagggcacatatcttattttctgagagaagcagggattttattttattttttatttttcacttattttctccctttcatttgcctctgattcgttctcttt

SEQ ID NO: 515096 - DNA, 405 bp, Homo sapiens
tgaaataagcacatcacggagaatagggtatccatcctctgaaacatttatcctttgagttacaaacaatccaattacattctttaagttattttaaaatacacaattaagttcttattaacgattgtcactttattgtgctatcaaatagtaggtcttattcattctttctatttttttggaccyattaaccatccccaccttctcccgctcttgattttcctttgcatgcatgtattcataaagtttattagtattttgcaaatctttgtaggataagtgctacctgtccaggtcacaattatagggcacatatcttattttctgagagaagcagggattttattttattttttatttttcacttattttctccctttcatttgcctctgattcgttctcttt

SEQ ID NO: 515097 - DNA, 630 bp, Homo sapiens
cataatctgggtaggacttatccaatcagttgaaaggttttaagaacaaaaattaggtttttctggtttcccaagtcttcacaggaagaaattccacctgtgaactgcaatcttagctcttgcccaagatttctagcctgcgttttctgtggactttaaacttgcctagtcacccctacaacacataaaccaattctttgcaataaatctctctctctctcatacacagacacagacacttatatacatgtacgtgcatctgcaaatctgtgtgtgtgtgtgtgtgtgtgtgtgtgtgtgtgtgtgtgtgtrtatcctgcattctactggttctgtttctctggtagaatactaatatagattttagtatccttatatatagatattacactacagtaaataattgagacattgagtaagctctggaaagtaatgaaacccataatctgtttctaaaatggtttattaccattatctctaagtgctttgaacaagttgctaatggaggtgattcaaaaactgtcagggaatatggcaagatttgtaattttgtgtttttccaatcaactagagcataaaaaggtatagtatggtttgaaggtgctacaagcccacaaaacaatcagagcc

SEQ ID NO: 515098 - DNA, 517 bp, Homo sapiens
cagagcccaaactctgggtcactgtttsttcaacagcaattcatcaaaatgaggtatgtgatctactaaaaataagatgtccactcgataggcattgaacagccgcttattcactcttcctacaaatcttaattattaagtgcctgttctacaagggattgtgatattacttgtgtaggacacgtgccttttaagagcttagtcttattaaaatgtatggtattatctcagtaatggctgacagtacttggaatgtgcttcccctggtccagcacacactggaaacattgctaatggaccatgatgatctctcctgcttcctagacacggcctcacttctcttcccaacatgacgttctaagtcagcactggccaatagaaatttctgtgatgatggaaatgttcagtgtccgggcattgagcacttggaatatggctagtgtgactgaaggaatgaatttctaactttaacttaagtagcaacatgtggcaaatggttaacatattggacagtgca

SEQ ID NO: 515099 - DNA, 554 bp, Homo sapiens
aaatgatattacttctttaaaatcccacttaaaaatagtatgccacataaagatggtaattcacttatagaagatgaagcttacataggtattaggggaggagtgggggacaggttgttgaacaggaaggaaacagtatcttcaatcatgagtcaaccattgcctggagcaatctgacagcataatacccaattaggaaaaatcaaaacataaaaaaatatattttctagcaccatttaaaagcctgataaactttgcttagaaatataaaaataaattaccacttactcaaatgcatctttttctgctcaaatgtgtaaattttygtatgtaatacaatagtttgtcaggcaaattttacatctactggtacagtaaaccttacatatgtagagatacaagcaaaactgctacatgagtgtctatttgtactcatagaaaatatttttttgtatttttttgccaaagagacaaaacttgagaataaaaggaaccatctatagcataatataatcaaattagagagttatatggacttggtgggctccactgca

SEQ ID NO: 515100 - DNA, 617 bp, Homo sapiens
gccaacaaagttccaaccccactctaccacttccttctttggagcatttctgggagacaagaaatgaagtatgggcagaagaaccctgtactgattcctgcattcaattaactaaatgccaaccacatgccagggctgtgcgggcacacaggaaagccagaatgactgcgacattgcctttattgttcagaggattataagaaaaataaaaggcgtactgctcttttcaaygacttcttcactgacaaattcgagaaccaactctcggtccccatctccttgaaatggtttgcacttgacttctgagacaccaacctctctgcaattttcctcctacctgactggccattccttttcaggctcccttgctgaatgttcctcatctcctgaatctcttaatgtttgaaatgcactacttcaatccatggaccactgcccttctccatctaccctcactaacttgttggcaagtcctctcccctgaataacagtgtggttactgtaagtgctacctgacatttccacttgggtttctttagcatcacgtccaatactgaatcctctcattcatcccaaagtctgctccacctgccatcttctccatcctagttaacggc

SEQ ID NO: 515101 - DNA, 513 bp, Homo sapiens
caggttctgaaatgggtttgcatgggaggctacaggcagtatggaatgggggaaaataacggggtttttggtcaaytaagttcaggaaacacaggttagacaacaacaaacaatttcttttccctacgacttctctaaacctctgttgtgatttctaagattgggaaagtgcctcccaaattcatgtgaccacaggcggagctgcttgtggatttagggttctaaggaacatgctttaggaaagctacttgggtacaaagggaataagtggggtccaagagccctaggctgtgccacctggggtctagtcatctcttggacactaacagtgggtcaccatttacctgtcctggctcacccgcaggctgggtacatcagtggtggtagtatcatgggcacattcttcaaatttaagtcccccagatgtttaaaggtgtgacttactttcagtcggtgtggcattctctgagctcaaaattgggactctttaagaatgccagaatgcgagagaac

SEQ ID NO: 515102 - DNA, 513 bp, Homo sapiens
caggttctgaaatgggtttgcatgggaggctacaggcagtatggaatgggggaaaataacggggtttttggtcaattaagttcaggaaacacaggttagacaacaacaaacaatttcttttccctacgrcttctctaaacctctgttgtgatttctaagattgggaaagtgcctcccaaattcatgtgaccacaggcggagctgcttgtggatttagggttctaaggaacatgctttaggaaagctacttgggtacaaagggaataagtggggtccaagagccctaggctgtgccacctggggtctagtcatctcttggacactaacagtgggtcaccatttacctgtcctggctcacccgcaggctgggtacatcagtggtggtagtatcatgggcacattcttcaaatttaagtcccccagatgtttaaaggtgtgacttactttcagtcggtgtggcattctctgagctcaaaattgggactctttaagaatgccagaatgcgagagaac

SEQ ID NO: 515103 - DNA, 525 bp, Homo sapiens
tcctataccctaaattctcagcatctaaagatttttaccttttatggaatcccctttgtctccttctaaaagtactatttgatctttttattgcattaaagttactggtgctttaagacttggtccatctcatttgagatacctggaaacactctagggagaacaaaggtgaaagatctgggcaaaggtcagtaaaatattctacccaactacaggccagaggacagcttcagttttgtctctccaacatcatgggctggaataaacagaggaatggttctataattctagckcagagacttccagttctagtaatatggcgagctatatatgcaaaccatctcccctactggggaaaaaacctaattctagagtaaaatatattttttaagattcttaatatcatcaaaaaagtaaaaaaaaggaaaaggtaagcatctggaaaattgaggcaaattttcttccaagggcaatggtgagctagaccaacttgagtttcagttttgccaaaaattgagaggaaca

SEQ ID NO: 515104 - DNA, 624 bp, Homo sapiens
gcacacgcctcctgtcttcagctgtccccagctcccgccactctcctcgcaggcctccttgagcaccttcctacttacttctacatgtacagtgcctctagactatacgtccatgaagacagggatttgggctcattgtattcactgctgtacatccagtctctaagacagaatctgccacagggcagacactcaacaagtgtatgttgagtaaatggcccaacagaaagggtgttctaagaaagccagcacagcagttgtgacctctgcaactcaggtcctctgggccacaagcagaagagagtgaagaggcagacaaatcccagctgaagaagagctgctgacttaggatggaagagaccttcaactaatgctgaggatgaggaaaaatgatagtgtacygaggcaggtaggacccccctggaaccaggatgcagaactgaatgtggcactttgggaagaaaactgacacagcatctaccctgatctgtgcgttgggctggccattttacatatgttgttttttgtttgttttgattatttatttttttgagacagggttttgctctgttgtctaggctagagtgcggtggtgtgatcacggcttactatggcctcgatctg

SEQ ID NO: 515105 - DNA, 624 bp, Homo sapiens
gcacacgcctcctgtcttcagctgtccccagctcccgccactctcctcgcaggcctccttgagcaccttcctacttacttctacatgtacagtgcctctagactatacgtccatgaagacagggatttgggctcattgtattcactgctgtacatccagtctctaagacagaatctgccacagggcagacactcaacaagtgtatgttgagtaaatggcccaacagaaagggtgttctaagaaagccagcacagcagttgtgacctctgcaactcaggtcctctgggccacaagcagaagagagtgaagaggcagacaaatcccagctgaagaagagctgctgacttaggatggaagagaccttcaactaatgctgaggatgaggaaaaatgatagtgtactgaggcaggtaggamccccctggaaccaggatgcagaactgaatgtggcactttgggaagaaaactgacacagcatctaccctgatctgtgcgttgggctggccattttacatatgttgttttttgtttgttttgattatttatttttttgagacagggttttgctctgttgtctaggctagagtgcggtggtgtgatcacggcttactatggcctcgatctg

SEQ ID NO: 515106 - DNA, 505 bp, Homo sapiens
ctgcaccatggccaaccagtggacaaaggatctcaaagtgggtattttggcctggatggtttcaaataattaacagtgaatatctttttttttgagatggagtttcgctcttgttgcccaggctggagtgcagtggtacaatctcgcgtcaccgcaacctctgtctcctgggtccaagcgattctcctsgctcaggctctggagtagctggggttgcaggcatgcaccaccacacccagctaattttgtatttttagtagagatggggtttctccatgttggtcaggctggtctcgaattcccgacctcaggtgatccgcccgcttcagcctcccaaggtgctgggattacagacgtgagccaccatgcccagccaacagtgaatatcttgattttgcctctatgtagaaaatctttaagcaatggcccttttcaccaccttttcaatccatttgaagccagaggcttgggtcagtcttaagacactgaaatggacaggcctttt

SEQ ID NO: 515107 - DNA, 505 bp, Homo sapiens
ctgcaccatggccaaccagtggacaaaggatctcaaagtgggtattttggcctggatggtttcaaataattaacagtgaatatctttttttttgagatggagtttcgctcttgttgcccaggctggagtgcagtggtacaatctcgcgtcaccgcaacctctgtctcctgggtccaagcgattctcctcsctcaggctctggagtagctggggttgcaggcatgcaccaccacacccagctaattttgtatttttagtagagatggggtttctccatgttggtcaggctggtctcgaattcccgacctcaggtgatccgcccgcttcagcctcccaaggtgctgggattacagacgtgagccaccatgcccagccaacagtgaatatcttgattttgcctctatgtagaaaatctttaagcaatggcccttttcaccaccttttcaatccatttgaagccagaggcttgggtcagtcttaagacactgaaatggacaggcctttt

SEQ ID NO: 515108 - DNA, 461 bp, Homo sapiens
aaaggaagaatcttcacggaggctgggactgatggatggaccataacctctgatttggtgatacaactccaggagtgggacctgtatactcatagagggtgaggatgagtgtgtttctgaatgtttgaratatgtttaactccacaagggtagaccagggtacacacctttaaggagcatacatactcttagtatagtgttctatgcagatggcatcccttagtgaccttttccagagacaatgcaggtggtgcagttgtacaggaccaaggccttgtccactgcatatcattgttacacccgaatccccttacatcctaaagtcaagtttagggtttcatttgaacctgagtggaggagaaatgaattcagaatctgatggggaaacctctccttacttagatatgaacccaggaacctcaagatgtgagatggggtggacttttctgtagcacacctct

SEQ ID NO: 515109 - DNA, 485 bp, Homo sapiens
tatattatcctgtcatgattatttaaaaaagaagcttcattccattagagctggaacagcccccactctgcaggatgagcttgggcagcaattgacaggtgcccttcagaacttagaaaatgtagaggagaaaggagatgtgtctccttttcttgaccaattaggacagctttgtgacagctccaggggaaaggaacaggacgaagagggctgtgtatgagatgggagcatgccaagaarcataggctttatccagtccagcgcgtctcacactgcacactgtggcctcacagggggtgtagaacacttcagtttggatcgtgaccaacatttaaagcataataaaatagaaagtgtcagtgcattgagtttagtaagaattaaatattgtttatgaaaattgtatatcagtcatatttgtgtgtgttctagattgcaacgtgtattatattacttagtgcaggtctctatttaaaaaaaaaaaa

SEQ ID NO: 515110 - DNA, 485 bp, Homo sapiens
tatattatcctgtcatgattatttaaaaaagaagcttcattccattagagctggaacagcccccactctgcaggatgagcttgggcagcaattgacaggtgcccttcagaacttagaaaatgtagaggagaaaggagatgtgtctccttttcttgaccaattaggacagctttgtgacagctccaggggaaaggaacaggacgaagagggctgtgtatgagatgggagcatgccaagaagcataggctttatccagtccagcgygtctcacactgcacactgtggcctcacagggggtgtagaacacttcagtttggatcgtgaccaacatttaaagcataataaaatagaaagtgtcagtgcattgagtttagtaagaattaaatattgtttatgaaaattgtatatcagtcatatttgtgtgtgttctagattgcaacgtgtattatattacttagtgcaggtctctatttaaaaaaaaaaaa

SEQ ID NO: 515111 - DNA, 485 bp, Homo sapiens
tatattatcctgtcatgattatttaaaaaagaagcttcattccattagagctggaacagcccccactctgcaggatgagcttgggcagcaattgacaggtgcccttcagaacttagaaaatgtagaggagaaaggagatgtgtctccttttcttgaccaattaggacagctttgtgacagctccaggggaaaggaacaggacgaagagggctgtgtatgagatgggagcatgccaagaagcataggctttatccagtccagcgcgtctcacactgcacactgtggcctcacagggggtgtagaacacttcagtttggatcgtgaccaacatttaaagcataataaaatagaaagtgtcagtgcattgagtttagtaagrattaaatattgtttatgaaaattgtatatcagtcatatttgtgtgtgttctagattgcaacgtgtattatattacttagtgcaggtctctatttaaaaaaaaaaaa

SEQ ID NO: 515112 - DNA, 333 bp, Homo sapiens
agctttgtgacagctccaggggaaaggaacaggacgaagagggctgtgtatgagatgggagcatgccaagaagcataggctttatccagtccagcgcgtctcacactgcacactgtggcctcacagggggtgtagaacacttcagtttggatcgtgaccaacatttaaagcataataaaatagaaagtgtcagtgcattgagtttagtaagaattaaatattgtttatgaaaattgtatatcagtcatatttgtgtgtgttctagattgcaacgtgtattatattacttagygcaggtctctatttaaaaaaaaaaaaacagctgctttctta

SEQ ID NO: 515113 - DNA, 670 bp, Homo sapiens
cttttaacacacatagccatctagagaatgtggattaatttggtctcaggtgaggcttgggtggctgtaaaagctccccaggtaactctcacatgaagtaggtgagacatgctccctagacacatgtctctcaaactggaatgtgcacaggaatcacataggatcttgctaaaatgcagactccagtcctgtggttttcagtggggctggggattcttctcttcccatgtgctcctgggcaaactgatggtgtgggtccccagaacacactctgcacagccaaagtctggatggtctttaaggtccctgcagttccttactgagttttcttggtgaggagagggcagggaattaagtaaaagatatattttaatggtagcaaagaggacctcccttttatcactggggtaaagtcatgtcatttttgggaaaatgtgatgcagtatttggtgggtaggattcaatttgtatccattttcaacactggagtaagtttatttagggggaaaaagggaacagatgtagctgtgtgtgtgaagaatggggaagagagagaagcgygaaagaactgagtggatgtgtgtgtgctcacagggcgaggattccatgcaaacaaatacataggcttctccaggtccagttttggtgaggggacaggaaaagggacaga

SEQ ID NO: 515114 - DNA, 658 bp, Homo sapiens
ccttcatttgcatttttctgaaatcaaatctcattgtgataatttctattcatatttctaacctctttggatccatctgtgttattcctctttcctcaatgatgtctgcagcacctcctaatttagtaccaatcagaaatgttattaacaaaatgtgtaagccttgttcccagacattaatgaagatacgaaatgaaacagatctaacagacacagtgaggccttctgttagtggcctcttccccacccctttattagatattgaaytgtttttcatcattggtccttgtttatcaaagtccaggcttttcaatcatcctgttccaattcccattaatgccagccagcgctctcgtcacgggattatctcaggaatgctgcctcaatgccttatcacgctccaaagatacaatgtctacaggagtcattgaatcagcagttttaattaatgataatatttattgagtttcagatgccaaatggaaatttctagctttgcttttaaaaactctttcagaaggcagaagcatttgattatttttaccttcttccatttgaatatttcatagcttttcatgtaaatctgctgtttaattaccactacatttaaaagtgcataagccactatgtgcttatgaagaacacaagtaatatctaa

SEQ ID NO: 515115 - DNA, 591 bp, Homo sapiens
ctgccttcatttgcatttttctgaaatcaaatctcattgtgataatttctattcatatttctaacctctttggatccatctgtgttattcctctttcctcaatgatgtctgcagcacctcctaatttagtaccaatcagaaatgttattaacaaaatgtgtaagccttgttcccagacattaatgaagatacgaaatgaaacagatctaacagacacagtgaggccttctgttagtggcctcttccccacccctttattagatattgaattgtttttcatcattggtccttgtttatcaaagtccaggcttttcaatcatcctgttccaattcccattaatgccagccagcgctctcgtcacgggattatctcaggaatgctgcctcaatgccttatcacrctccaaagatacaatgtctacaggagtcattgaatcagcagttttaattaatgataatatttattgagtttcagatgccaaatggaaatttctagctttgcttttaaaaactctttcagaaggcagaagcatttgattatttttaccttcttccatttgaatatttcatagcttttcatgtaaatctgct

SEQ ID NO: 515116 - DNA, 615 bp, Homo sapiens
gtctggacatataaagatgcattgtttttttggagacagaatctcactggagtgcagtggcacaatctcagctcacggcaacctccacctctcaggttcaagcgattctcatgcctcagccaccttagtagctgggattacaggcattagccaccaagtccagccaatttttggaattttagtagaaacggaggttttccaagtttgcaggcctggtcttaacctcttgccccaaggtattcatccaacttgggcttccaaaggtgctggaattttgggtgtagggacaagtgccggcaagaaaggtgcatctttatttcaggtgttatctggggatttatttattctaagaccccagcaatcctgtgcccacctctagtttcttgctgctggggtctctctgcctctccagtaggtggccctgtgagacagracccggtcagacctcacaccagctctctcttctgagtggccacgtttggtccccagggcacactctactcaggaaaacccagaaaggcagactagctcctgcatgcccctctagcctgctgtcatggcccactctgggtgtcacaggcatgcctctgggacctgaatgtctgctggttccag

SEQ ID NO: 515117 - DNA, 635 bp, Homo sapiens
agctgtgagcggttcatctcgtctcctccaggctcccccagagcaggccaccaggttgcttaaccatctaggctgtctttgtagaacgtgcagtccacatcagcactgtttctctgtggttctatcttttcaggtaggggagttttgccccaatgatgcccatgctcactcccccacccagctcctccccagaggattcagcaaactagtagctgtaagtccatgaggtaacacttctgaggcagccctcaccagcccttcttcctccatggcctctgctggcataaaagaaatgaggaaatgcatgaacatcaagtttgtggaaacttactaaaacttactctgtgccaggcagtgtggccaccctatacctctattatcacatttaattccataagggcactatgggaaaagaattgttgtttttcccccttaaagagaaggaaattaaggttcagagaggcagaragcttcccaaggttacaagacaagctggagctgggccaggatccagccatgtttgacccagacccctgtttttggcctctccttgttggtttggattgaagagcaggggcggaacaggaaggaagttgaaactcacagagcgtccaactatctcccttcactgaagg

SEQ ID NO: 515118 - DNA, 536 bp, Homo sapiens
atatgccatatttagctggacttcgatcatcgtcacttaatttaaaagtattaaaaacttacatsagaccgtgcagctcagtatgtggcctggctagaatttcaaccctctgggaaggaaagaaaagaaagataaaaaggaaatgaggtttgagactgtgcagggtgcacagggtgcagtgatgaacaatggaatgatgagtttggtaatggaaggcatttccagaaaacatgaaatggagttggggggggcagcagaacgtaacgtccttgaacaatgatttcacctgacttctctcttctgttcttctgtttctctttccatcttttctttctcattcactctcttccatccataagcaggtttgtagcgacttgcatgttttaagctcagggctagtcctgagaatacaatggtacataaggcgggtgtgctccctgtcctaacttaatagcatgaaacagcccttcagtgcagcatgctcaggacatagaggagggataatggataattaacctaattttagagcatcaaag

SEQ ID NO: 515119 - DNA, 536 bp, Homo sapiens
atatgccatatttagctggacttcgatcatcgtcacttaatttaaaagtattaaaaacttacatcagaccgtgcagctcagtatgtggcctggytagaatttcaaccctctgggaaggaaagaaaagaaagataaaaaggaaatgaggtttgagactgtgcagggtgcacagggtgcagtgatgaacaatggaatgatgagtttggtaatggaaggcatttccagaaaacatgaaatggagttggggggggcagcagaacgtaacgtccttgaacaatgatttcacctgacttctctcttctgttcttctgtttctctttccatcttttctttctcattcactctcttccatccataagcaggtttgtagcgacttgcatgttttaagctcagggctagtcctgagaatacaatggtacataaggcgggtgtgctccctgtcctaacttaatagcatgaaacagcccttcagtgcagcatgctcaggacatagaggagggataatggataattaacctaattttagagcatcaaag

SEQ ID NO: 515120 - DNA, 480 bp, Homo sapiens
gaagacggagactcccaaggtcatttaagaaccgacctgaacttgactctttccttgttctagattatgtgtaacgatatgggcacactggagccaccccgctcctacgccgcaaagcagcacaattacagcctgggaggggcaagtcttgcggggcccgtcggtaactgccattatttgaatgcgatataggagatcccacatagaccctgctctaccgggttagaatctgtttctaatcacgtggaatttagatttaaaccacagttagatttgggatttaccatcgtttctactttcattcatttagtggcttccagccctctcgcggcccagtcttaatccatcgcacttcagagggaattacgagggagttgcggactggcgggggcgggggtctgtaactaacaccaggygcctgtgagagagccccaagggcgggggcagcacctcctggctgggttgggtccgcctggcctc

SEQ ID NO: 515121 - DNA, 402 bp, Homo sapiens
  misc_feature (1)...(402): n = A,T,C or G
tcgggcggacccggccaggcagcccccggtcgggccagcctcgccccttcctcgctttctcccccatcgacctcgagccaagggcaggcggcccgcatcccgcgccctctcgcacnggggctaggtcggcgactnccgcctacgcccggctgccaagaagagaaaggcgctcacctgagtcaccgaagccttcctttggggccctcccggagcttgttcgcagcccgcaggcacaaccttccttggagaaaaaaagtagcgcaagggcagagagaggtagggctgctcacaggtccctccgcaggggctctttccttcgaattctccgrggtccagtctcgggctcggcggcgggaaagagctcctggaggctggaaggggccgccagaccggcgctcctcc

SEQ ID NO: 515122 - DNA, 624 bp, Homo sapiens
ctgttttgcttattgagttatgttatgattctttagttccacrtctaaaaatctccctttgggattcacatggtgtgttttcttctgtgtgcacttttgggtcttctcatctcccctctcctcttaggaaacaataagtacctggatatttaccctgaaaaataatctaattttctcttccagtaataattggtagccagagcctaccccctttaaattgattatgagccaggtcttgtgaattttccatctgtctgggaccttgaaagccttctgaagataacactttatttgtgagatgatcaggaaatcctcagaaatctctcatcctaaaaatagcgaagtgcaagaacaacagggttttactcaattattttctcctccccaactctgttgcagtgtatgatgtgcgtgctcatgtgcctctccctctctttttccggactctttctgttgaggggtcttctcatttggggattgtttggttttcttatttgtttttttgcatgtatacgttgctagctgtatggtataatgcctactggtttggtcagtaagggattgctttcttaacaacaacaacaacacatctggtgtgcccgtcacactgtcatggcttacttt

SEQ ID NO: 515123 - DNA, 624 bp, Homo sapiens
ctgttttgcttattgagttatgttatgattctttagttccacgtctaaaaatctccctttgggattcacatggtgtgttttcttctgtgtgcacttttgggtcttctcatctcccctctcctcttaggaaacaataagtacctggatatttaccctgaaaaataatctaattttctcttccagtaataattggtagccagagcctaccccctttaaaytgattatgagccaggtcttgtgaattttccatctgtctgggaccttgaaagccttctgaagataacactttatttgtgagatgatcaggaaatcctcagaaatctctcatcctaaaaatagcgaagtgcaagaacaacagggttttactcaattattttctcctccccaactctgttgcagtgtatgatgtgcgtgctcatgtgcctctccctctctttttccggactctttctgttgaggggtcttctcatttggggattgtttggttttcttatttgtttttttgcatgtatacgttgctagctgtatggtataatgcctactggtttggtcagtaagggattgctttcttaacaacaacaacaacacatctggtgtgcccgtcacactgtcatggcttacttt

SEQ ID NO: 515124 - DNA, 624 bp, Homo sapiens
ctgttttgcttattgagttatgttatgattctttagttccacgtctaaaaatctccctttgggattcacatggtgtgttttcttctgtgtgcacttttgggtcttctcatctcccctctcctcttaggaaacaataagtacctggatatttaccctgaaaaataatctaattttctcttccagtaataattggtagccagagcctaccccctttaaattgattatgagccaggtcttgtgaattttccatctgtctgggaccttgaaagccttctgaagataacactttatttgtgagatgatcaggaaatcctcagaaatctctcatcctaaaaatagcgaagtgcaagaacaacagggttttactcaattattttctcctccccaactctgttgcagtgtatgatgtgcgtgctcatgtgcctctccctctctttttccggactctttctgttgaggggtcttctcatttggggattgtttggttttcttatttgtttttttgcatgtatasgttgctagctgtatggtataatgcctactggtttggtcagtaagggattgctttcttaacaacaacaacaacacatctggtgtgcccgtcacactgtcatggcttacttt

SEQ ID NO: 515125 - DNA, 624 bp, Homo sapiens
ctgttttgcttattgagttatgttatgattctttagttccacgtctaaaaatctccctttgggattcacatggtgtgttttcttctgtgtgcacttttgggtcttctcatctcccctctcctcttaggaaacaataagtacctggatatttaccctgaaaaataatctaattttctcttccagtaataattggtagccagagcctaccccctttaaattgattatgagccaggtcttgtgaattttccatctgtctgggaccttgaaagccttctgaagataacactttatttgtgagatgatcaggaaatcctcagaaatctctcatcctaaaaatagcgaagtgcaagaacaacagggttttactcaattattttctcctccccaactctgttgcagtgtatgatgtgcgtgctcatgtgcctctccctctctttttccggactctttctgttgaggggtcttctcatttggggattgtttggttttcttatttgtttttttgcatgtatacgttgctagctgtatggyataatgcctactggtttggtcagtaagggattgctttcttaacaacaacaacaacacatctggtgtgcccgtcacactgtcatggcttacttt

SEQ ID NO: 515126 - DNA, 594 bp, Homo sapiens
tgccttcaaatattaaaattattttataaaagaaatcatcaaaagaagaaacaagaccaacaggtagaaggcttgaagaatatttttattctatataaggaagtaccaagagccaaaccacctaaagatgcactgggctatcttgaaaagtaatgaatgtccatcactgaaaacgtccagtcataggcaatgcccacttactagaaacatgccaaaagtaactatatgggtgactagagcatcggcttttaattctatcaccactttcttaattggtggtggaaatgtaatttgatacaacctctttagggttagatatttggcaacagctctaaaaattataaatgcacagatatactttgatactgcaattctttcaggaattcatggcacaagttaatcattgctaaattacttgaagtagcattaaaaaaaaaaaaagtaaaagcmagctaatgtcctggttttaggaccctggttttaaaaactccaaaactacagtacatccatacaatggaataatatgcaagcatccaaactaatgagaatgccctttatatatactgacatggaaacatctccaagatacagtta

SEQ ID NO: 515127 - DNA, 323 bp, Homo sapiens
aattgatgtaggtactaagagacaaaattctaaacaaaggtgtatttgtgtcctattgctgccrtaacaaataccacaaacttaacatttaaacaacacaaattcattattttacacttctgtaggttcagaagtctaaaatgggtctcagccagccaaaatcaatgtatatacagagctgtgttcctttctggaggctaagggaggatccatttccttgcttattcaagttgcatgtggaatccagtttgctgcagttagagcactgagatttgtatgtcctttgtgactgtcagctgagggcaattcccagcttccagaag

SEQ ID NO: 515128 - DNA, 194 bp, Homo sapiens
caaatacctgaattcacttaagctgycaaatatcaagaactgatgcagggctgaaaacaggaacagtaagaccctaagagatgccacatcatctctatcttgcacagtaagatagagatgtaattgtaattgtccaaaacttaatatttgtggcctactttttcactatgcagttctaaattttttttttaatt

SEQ ID NO: 515129 - DNA, 194 bp, Homo sapiens
caaatacctgaattcacttaagctgccaaatatcaagaactgatgcagggctgaaaacaggaacagtaagaccctaagagatgccacatcatckctatcttgcacagtaagatagagatgtaattgtaattgtccaaaacttaatatttgtggcctactttttcactatgcagttctaaattttttttttaatt

SEQ ID NO: 515130 - DNA, 580 bp, Homo sapiens
  misc_feature (1)...(580): n = A,T,C or G
atggagccagctgctgcactccagcctgagcaagagagacagatatgtggctnaaaaaaaaaaaaagcctgactccctcttaatttcctgctttaatccactccmagtcaggaaatcagaatcaccaagcttcttatccctaggatagagccttagagcatcacatattgtgtcaattaaacatcttttatacaagctattctcctgccttacaattactggtttaattttttattcattgctattttccatctgattaaggtatcagatatctaaccaaaaacaaattaagatataggcatggtcctcttttactccaacagaagacaatttttagaaaaagtatttgaagccaaacaatttcttgcccttgctataaagcagcagcatgcagaaaacactaattacggtttcaatctcaatggaatctaggctggtccttagcatcagtctgagtgataaatcccttattccagaatacacttaggaagaactactaagaacatatttttacctatttcaaagaagaaaatgagaaaaggcattgattttaaaaaaaaaatacatgttacagtttgta

SEQ ID NO: 515131 - DNA, 580 bp, Homo sapiens
  misc_feature (1)...(580): n = A,T,C or G
atggagccagctgctgcactccagcctgagcaagagagacagatatgtggctnaaaaaaaaaaaaagcctgactccctcttaatttcctgctttaatccactccaagtcaggaaatcagaatcaccaagcttcttatccctaggatagagccttagagcatcacatattgtgtcaattaaasatcttttatacaagctattctcctgccttacaattactggtttaattttttattcattgctattttccatctgattaaggtatcagatatctaaccaaaaacaaattaagatataggcatggtcctcttttactccaacagaagacaatttttagaaaaagtatttgaagccaaacaatttcttgcccttgctataaagcagcagcatgcagaaaacactaattacggtttcaatctcaatggaatctaggctggtccttagcatcagtctgagtgataaatcccttattccagaatacacttaggaagaactactaagaacatatttttacctatttcaaagaagaaaatgagaaaaggcattgattttaaaaaaaaaatacatgttacagtttgta

SEQ ID NO: 515132 - DNA, 580 bp, Homo sapiens
  misc_feature (1)...(580): n = A,T,C or G
atggagccagctgctgcactccagcctgagcaagagagacagatatgtggctnaaaaaaaaaaaaagcctgactccctcttaatttcctgctttaatccactccaagtcaggaaatcagaatcaccaagcttcttatccctaggatagagccttagagcatcacatattgtgtcaattaaacatcttttatacaagctattctcctgccttacaattactggtttaattttttattcattgctattttccatctgattaaggtatcagatatctaaccaaaaacaaatkaagatataggcatggtcctcttttactccaacagaagacaatttttagaaaaagtatttgaagccaaacaatttcttgcccttgctataaagcagcagcatgcagaaaacactaattacggtttcaatctcaatggaatctaggctggtccttagcatcagtctgagtgataaatcccttattccagaatacacttaggaagaactactaagaacatatttttacctatttcaaagaagaaaatgagaaaaggcattgattttaaaaaaaaaatacatgttacagtttgta

SEQ ID NO: 515133 - DNA, 580 bp, Homo sapiens
  misc_feature (1)...(580): n = A,T,C or G
atggagccagctgctgcactccagcctgagcaagagagacagatatgtggctnaaaaaaaaaaaaagcctgactccctcttaatttcctgctttaatccactccaagtcaggaaatcagaatcaccaagcttcttatccctaggatagagccttagagcatcacatattgtgtcaattaaacatcttttatacaagctattctcctgccttacaattactggtttaattttttattcattgctattttccatctgattaaggtatcagatatctaaccaaaaacaaattaagatataggcatggtcctcttttactccaacagaagacaatttttagaaaaagtatttgaagccaaacaatttcttgcccttgstataaagcagcagcatgcagaaaacactaattacggtttcaatctcaatggaatctaggctggtccttagcatcagtctgagtgataaatcccttattccagaatacacttaggaagaactactaagaacatatttttacctatttcaaagaagaaaatgagaaaaggcattgattttaaaaaaaaaatacatgttacagtttgta

SEQ ID NO: 515134 - DNA, 669 bp, Homo sapiens
ccgccacagcaagttacatgaagtgggtttattattacagataagcagcaagggaacacaaaattcttggactcattatgggtcagtcccccaaggcacaggaaagctatgtggagctgatggagttgactatgtgtaccccacatacaccacagtgcaggaacycaggaaagcagccactctgggttttgtatcctggggtaaaaagacacacagggctgaagtgctaatggacattctattctatgggaaactggtatagaggacaggtaggttgttctgctcagttcctgtctatctcaggatgttacaattccagcacgttctgcaattgtacttgagaactcttaaaataagcaagaaagtggagagaactaagtcagtccagggtcattgcagaacggtcttgcagttatctcatcccccttagcaaagctagcatacttcatatgcccaccaacttcccctgaactggaggcagaggtttatcttttcagattgatgaagcaccttgacttacacaatctcaatgcagattatgaagccatagtgagagtacatttcactgggccatgaaaagctagtaccactggtaggaggataaaactccccaagcagtgactaagatgttaagaggtgaaagggggatcttttgatgtcctattgtct

SEQ ID NO: 515135 - DNA, 639 bp, Homo sapiens
tgggctgttggcaatggcccatgatttagtggaaatggagcaaaatatagtgttgggggcagcctgcatggctactatcatttcatgtagtttgtcccattgggcagaatgrccatgttcagtgtcagtcaaaagatgccatcccctggctggatggtggctgcacccagtggatccactggcatgtgttttgtacaatcatcagggccccatgccatactgacacaggcatgtctctgaatctttggctctatgtggccaaaggagaagctaaattgtcccctatgggccatttgttcccttctagcaagcttgccatttattcatggggcacatgggtcctgtgggatcctggttagggctgattctgactgtatcatttccacttaatgatttggatctgttgggcctgtccagttttattgattgtgtttgtaggtaccaaagtgagaatggttagttaaggtcgcagcgtcctgcctggtgctctagctctgagatactcagcccctatcagtttcctacagcaagcaaggagctgccattcaaaagaggcacaactgttggctgcttcaggaaattttgtgtccaaaatctgagtctggtgcacccagtgacactagaatcacctgacatcag

SEQ ID NO: 515136 - DNA, 639 bp, Homo sapiens
tgggctgttggcaatggcccatgatttagtggaaatggagcaaaatatagtgttgggggcagcctgcatggctactatcatttcatgtagtttgtcccattgggcagaatgaccatgttcagtgtcagtcaaaagatgccatcccctggctggatggtggctgcacccagtggatccactggcatgtgttttgtacaatcatcagggcccmatgccatactgacacaggcatgtctctgaatctttggctctatgtggccaaaggagaagctaaattgtcccctatgggccatttgttcccttctagcaagcttgccatttattcatggggcacatgggtcctgtgggatcctggttagggctgattctgactgtatcatttccacttaatgatttggatctgttgggcctgtccagttttattgattgtgtttgtaggtaccaaagtgagaatggttagttaaggtcgcagcgtcctgcctggtgctctagctctgagatactcagcccctatcagtttcctacagcaagcaaggagctgccattcaaaagaggcacaactgttggctgcttcaggaaattttgtgtccaaaatctgagtctggtgcacccagtgacactagaatcacctgacatcag

SEQ ID NO: 515137 - DNA, 639 bp, Homo sapiens
tgggctgttggcaatggcccatgatttagtggaaatggagcaaaatatagtgttgggggcagcctgcatggctactatcatttcatgtagtttgtcccattgggcagaatgaccatgttcagtgtcagtcaaaagatgccatcccctggctggatggtggctgcacccagtggatccactggcatgtgttttgtacaatcatcagggccccatgccatactgacacaggcatgtctctgaatctttggctctatgtggccaaaggagaagctaaattgtcccctatgggccatttsttcccttctagcaagcttgccatttattcatggggcacatgggtcctgtgggatcctggttagggctgattctgactgtatcatttccacttaatgatttggatctgttgggcctgtccagttttattgattgtgtttgtaggtaccaaagtgagaatggttagttaaggtcgcagcgtcctgcctggtgctctagctctgagatactcagcccctatcagtttcctacagcaagcaaggagctgccattcaaaagaggcacaactgttggctgcttcaggaaattttgtgtccaaaatctgagtctggtgcacccagtgacactagaatcacctgacatcag

SEQ ID NO: 515138 - DNA, 639 bp, Homo sapiens
tgggctgttggcaatggcccatgatttagtggaaatggagcaaaatatagtgttgggggcagcctgcatggctactatcatttcatgtagtttgtcccattgggcagaatgaccatgttcagtgtcagtcaaaagatgccatcccctggctggatggtggctgcacccagtggatccactggcatgtgttttgtacaatcatcagggccccatgccatactgacacaggcatgtctctgaatctttggctctatgtggccaaaggagaagctaaattgtcccctatgggccatttgttcccttctagcaagcttgccatttattcatggggcacatgggtcctgtgggatcctggttagggctgattctgactgtatcatttccayttaatgatttggatctgttgggcctgtccagttttattgattgtgtttgtaggtaccaaagtgagaatggttagttaaggtcgcagcgtcctgcctggtgctctagctctgagatactcagcccctatcagtttcctacagcaagcaaggagctgccattcaaaagaggcacaactgttggctgcttcaggaaattttgtgtccaaaatctgagtctggtgcacccagtgacactagaatcacctgacatcag

SEQ ID NO: 515139 - DNA, 386 bp, Homo sapiens
cagggctggctcatctcagtaactcagcaccagttcagtgtccccaggtgtcccaggtaagaccagggtagcacaaatttgtctccagagaatgtgtttctactgggaactattttattatgagagacattttttaggttttttttgacratttgaaatattcctcaggagttgatggagtaatgtatttcattggtgtatggggattatttaggagaatattcttgtttgtaggaaatatataataaaatgttagacggtatgattatcaggtctccaaaagactctcatatgatcccggttagggaaggggttactttgtcctatacttggaacatttctgtgattttaacattgttcctttctaaaaaaatcaaaaataaaat

SEQ ID NO: 515140 - DNA, 611 bp, Homo sapiens
gcagggctggctcatctcagtaactcagcaccagttcagtgtccccaggtgtcccaggtaagaccagggtagcacaaatttgtctccagagaatgtgtttctactgggaactattttattatgagagacattttttaggttttttttgacaatttgaaatattcctcaggagttgatggagtaatgtatttcattggtgtatggggattatttaggagaatattcttgtttgtaggaaatatataataaaatgttagacggtatgattatcaggtctccaaaagactctcatatgatcccggttagggaaggggttactttgycctatacttggaacatttctgtgattttaacattgttcctttctaaaaaaatcaaaaataaaatttattgacatgatgctatatatacctgtcagtattcggtaatggtgttatgccattgttcttaccactataagatcaagcaatttactacagatccacagagatgatgcctatgtacatggagaaagcagtttgatccagacaaaactggaaatgatttgcaatcattatatcgcacatatctaatgtgcccaaaactgtcccagcctagctcagtagcagggg

SEQ ID NO: 515141 - DNA, 611 bp, Homo sapiens
gcagggctggctcatctcagtaactcagcaccagttcagtgtccccaggtgtcccaggtaagaccagggtagcacaaatttgtctccagagaatgtgtttctactgggaactattttattatgagagacattttttaggttttttttgacaatttgaaatattcctcaggagttgatggagtaatgtatttcattggtgtatggggattatttaggagaatattcttgtttgtaggaaatatataataaaatgttagacggtatgattatcaggtctccaaaagactctcatatgatcccggttagggaaggggttactttgtcctatacttggaacatttctgtgattttaacattgttcctttctaaaaaaatcaaaaataaaatttattgacatgatgctatatatacmtgtcagtattcggtaatggtgttatgccattgttcttaccactataagatcaagcaatttactacagatccacagagatgatgcctatgtacatggagaaagcagtttgatccagacaaaactggaaatgatttgcaatcattatatcgcacatatctaatgtgcccaaaactgtcccagcctagctcagtagcagggg

SEQ ID NO: 515142 - DNA, 486 bp, Homo sapiens
ttagtctgatccttgatgtctggtacaatcttgggttattctccttggaaaagtggatgctcagaagtgccagtatccccrtgagtcccagttaactgaaattcatattgttaagcccatgcatggatagtcatgacatcagttcatgagattccctgggaaagctgggaaaggtaactgatgaagtccatgttttgaattattttaattattttgagctcctgcttctaatggcctttagataaatattcacttggaaaggatttattttttctactggtccttttttggaaggtccagtcatatctcctccagagtgactttgtgtccaatccttcagatgtgtttcttctaaggcctgatgatctgtcaaaaccactagtcaagattgtgatattgttggtaatatccagagcggggagaggacaatagtactcccaatattgcgggaggtgtacacccctctttgtgttattgttcttaata

SEQ ID NO: 515143 - DNA, 486 bp, Homo sapiens
ttagtctgatccttgatgtctggtacaatcttgggttattctccttggaaaagtggatgctcagaagtgccagtatccccgtgagtcccagttaactgaaattcatattgttaagcccatgcatggatagtcatgacatcagttcatgagattccctgggaaagctgggaaaggtaactgatgaagtccatgttttgaattattttaattattttgagctcctgcttctaatggcctttagataaatattcacttggaaaggatttattttttctactggtccttttttggaaggtccagtcatatctcctccagagtgactttgtgtccaatccttcagatgtgtttcttctaaggcctgatgatctgtcaaaaccactagtcaagatwgtgatattgttggtaatatccagagcggggagaggacaatagtactcccaatattgcgggaggtgtacacccctctttgtgttattgttcttaata

SEQ ID NO: 515144 - DNA, 605 bp, Homo sapiens
cactgctttggcttcttgtaacctgaaatcaaatttgtccacaacttctgagataacttgatataattctaggattcactttgtccaccactgcttcccagtctgagcttgccagctcccaacccttcctagtgccaatgaactttctcaaagagccataggtaatattttccctttttcatgaaacactaactttttctttgttcttgccacatattgaagaccactgagttttcytgtatgccccatttgggaaatatttctgtgtaaataaaacattacatttagagattcatctctacattttatttagacgtcagtagtttactttaattctctgtattaagacaattcctgcctagaatatctatagtggcttcttctctgttatataaagtccaactgaagccataaactagactcctcaggtgtcatgatctctgtctgtattaaattaggagaggcattgctatgtctgtgtagttggggctgagaaagagaaaagaattagggtgcagaggtgacttcatgtccccttctaccaacaccatcagagtgtggctgcatctgaggaacaatctcagccgatggaggcatcaggagga

SEQ ID NO: 515145 - DNA, 605 bp, Homo sapiens
cactgctttggcttcttgtaacctgaaatcaaatttgtccacaacttctgagataacttgatataattctaggattcactttgtccaccactgcttcccagtctgagcttgccagctcccaacccttcctagtgccaatgaactttctcaaagagccataggtaatattttccctttttcatgaaacactaactttttctttgttcttgccacatattgaagaccactgagttttcttgtatgccccatttgggaaatatttctgtgtaaataaaacattacatttagagattcatctctacattttatttagacgtcagtagtttactttaattctctgtattaagacaattcctgcctagaatatctatagtggcttcttctctgttatataaagtccaactgaagccataaactagactcctcaggtgtcatgatctctgtctgtattaaattmggagaggcattgctatgtctgtgtagttggggctgagaaagagaaaagaattagggtgcagaggtgacttcatgtccccttctaccaacaccatcagagtgtggctgcatctgaggaacaatctcagccgatggaggcatcaggagga

SEQ ID NO: 515146 - DNA, 550 bp, Homo sapiens
tcctgtgtaggatgactaaagagtctgctcgtactcctggcccttggcttcctgaaccattacttcattctactatggtcattgatttaaagattcagaacaccttgagggagagcatctaaaatctgcagaatattatacccttgtggatttctttgygtgatatatttggtagaaccaatggatgctataatcacgtggctattattttgtttctttccccacaatgtaggaacatggttctgaaatattcccatattaatacaaaaaatgctctcagagcactgagatagccaattgtctatgggcaggaaaggtaaacatacatctagaatacaggaggatcctagttaggatgcatcacagtcacctccaggggacagtgatctgatatcccaaataaccacccacttgttgaagatatttgtctctgctgctgagaagttggatacccagaagtggcaacagtgggatcaacacaagtggtgatggttgttgtgaggcatggttcatgtcattttactcattcatagccctgttcaggctatga

SEQ ID NO: 515147 - DNA, 519 bp, Homo sapiens
ggtgcaccagactcagcttttggatgcaaaagtttcctgaagtggccaccagttgtgcctcttttgaatggcaactcctcacttgctgtaggaaaatgatagggcctgagtatctcaagatttcatttttttttttcctcagatagtctcactctgtcactcaggatgcagtgcagtggcacgatctacactcactgcaacctatgccttccaggttcaagcgattctcctgcctcaacctccagagtagctaggactacaggtgcacaccaccatgcccggctatgttttgtacttttagtagagacagcgtttcaccatgttggccaggctggtctcaaactgctgacctccagtgatctgccytcctcagcctcccaaagtgctgggattataggcgtgagccactgtgcccagcctcccaaggtttctaaagtggaactctaacattcctgataagaacctgaccatcttccaaggttgctgatagagctggcatttccccaaagcaccaaatga

SEQ ID NO: 515148 - DNA, 609 bp, Homo sapiens
tctgcctctgaaattctacaaataagaaaagcaggaatttaggggctggtaggattataaggatgtcacctatgggctcagaggaaagataattgtttcttgatttcgatgagactccccactctacccctattcctcctttctctcatccagatggtacagtatagaaaacttgagttatatctatttaacacattaattgttcatatggaagacttatatttcctttacaatctggaaaatggagttaactcagtggcaaagaactttaaaattataaataagattcagctactgttctttatgccattggttsttaattcatttgatgcaggtaacatacctgcatctgtaacagagaagcatataaaatatctgagttactaaaaattctgatttatcagtgtatgggttaatgaagtttctctgtgataggaaagccattttgaatctggagaaatggcaaaggcattaatattgcaggtatatgctttcttgcaccaaaagatttaagtgttgtttttctaaatgggcaaagtgaacttctgtatatagtgaagacagcaagaacaatagaggctggagcctactggttaaggctgtgcaagc

SEQ ID NO: 515149 - DNA, 622 bp, Homo sapiens
gctgtttttctttccaggatattattccctgtatctacagcttagaggtggtacatggtcctggaggttgtaaaaccatgaaaccacattgaggacaaggcatgtaaccatgggtatctagagtggtgaaagaaagcctatgaatgacaagaaccaatactaatagctaatttgctttgtgtttttactatgtgatatacactgtcctaagcaaaaaactaaatgtaagttaatatttattttacttgtaattaaattttacttgatttaattatcacaagaagctgatgaggtaggaacaattaatatctcgatttttaaagatgaggttactgggatacacaaagtaaaatacttcacacgaagttacataggctaggattcaaactaagsttgttttgtttccatatccatgctattaaccattgtgacattaaaaaaaattcctgagtaccttctattctgtggattgatagctgctcaaattggtgtaggtccaggaagaaggaaatatgaacaggggccttccctagaccaaaataactactaggcaagtgagagttccttggaccataaatctgaggtgtgcacagccatgattctcccctcttcttcttggctt

SEQ ID NO: 515150 - DNA, 578 bp, Homo sapiens
gttcttttatttaatttttcccttgcattttccattcacttagaacagaatcccacattaaatgaggctccaggctcacttaagggtgcattttgcaaaccaaataaagtaaaatcatcagtaaattccaaatttattatgctcttctacacatgtacaaattccagtaaggctgtagttatgaacataattctaagacaaggattccagatgcaattaataattttttctaaccatgttgtttattttaagtgcatgagaaggatgtaatatattcaactttgaaggaaaaaatgttcagagacaacttggacagacagaagccaaaccatagcttgacataaattgcttggcatataagaaaatcctgaarcaaggacaaatcaggatctatcagagcaaatacagaagactggcgagaaaaaatggttttgtaacttccaaagctacatagtccaatgttctaccataaattgtactataggaaattgatttcagtgcttaacactgtcaaatatcctttcttttggaggtgaaaaaagactcaggcttagggacagtaactagctgcttaacaa

SEQ ID NO: 515151 - DNA, 665 bp, Homo sapiens
acagttatactctcaaaaatgttatgtgaaactatgtaaagattggaaacaatattattcrttttctttaaagtcagcgattgatatggtttggctctgtgaacccacccaaatctcatcttgaattgtaaccctcttaatccccaagtgccaagggtgaaacctggttgggggtgactggatcatagggatggttcccctatgctgttcaaatgatagtgagtgaattctcacaagatctggttgtttcctaagtgtggggatcctctcgcttcatgctcttctctctcatctgccaccatgtaagacgtgcctttgcttcccctttgccttctgccatgattgtaagttgtctgaggcctccccagccatgcagaactgtgagtcaattacacctcttccctttatcaattacccagtctctggtattcctttatagcagtgtgaaaacaaactaacacagcaataaacaatacactttgaaataaaggttatttagaaaattgcctcttcaaaatgcttgctgtttcaataacatacatatgtgttaaattatcaaagttatttttattagcaaaattctctaagctaaatataattgaattatcacaaactttaatactgacctaaattctttttaaaaaaattattaagaggcagagtct

SEQ ID NO: 515152 - DNA, 593 bp, Homo sapiens
ctgtcagagctcatttttggagccttttactaaaatactagaatctaccttgtgttctyagtacccactgagatggccctagattccacctctaggatggctgaactcatgtgataaattcctcttttgtcttttttcagtaacagctttatcgagatagaatgcgcacactgtacaatttatgcatttaaagtatacaatgtagtggtttctagttacaaagttgtgcagccgttaacataatcaatttcagaacacttgcccaaagaaacactgtgtccttaagcaatcataccccattttccctcaaattctaacccctggaaaccactactgtctattatggacgttgcatgtaatgggattatgtaatatgtggtcctctgtgactgcgatctttcacttagcgtagtgttttcaaggttcatctgtgttttagcatgtttcagtacttcattcctttttatggccaagtggtattccattatatggatatacaacattttacccattcatcggctgatagaaatttgagttgtttgcatgtttagggtattgagaatagtgctgctgtgaacgttcatgtatatgat

SEQ ID NO: 515153 - DNA, 663 bp, Homo sapiens
atgtggttaaattcctaaacatggtctcattgctctgamaattattttcccctatcaactgctagtttatattatatagggtggaatttaatggtagtgattctcatatgtctttaagtcataaatccctttggccaaaaaaaaaaaagaactatctctccagaaaaatgtatttacccaccagtttttgcatatacttttcagaagacttaaaaagaaatctaagattatctgcttgctcttgttttatgaactggacattttggtgcttttgactatattctaaattacagtgaatttatttcccctgatctgtggtttttgaaatatatcctctcttctatactgttatctctttttaaaactcatatacaatctttgaaatagctaaaattgtcattttgaaatgtatatttaaaatgtctttccctactcaaaaaggctccccttccccttttttccttcctctgtctatgatacagaaatcttcccactatcctctcttaaccctatattcagtcaaacagccaatcatagatggttggaaattccatccatcttttcttcccttcaacaagcattcactaagcatttactaagcccagtctagttccttagcatgcagagatgaatacaatctggtttctgcagctatatagacaa

SEQ ID NO: 515154 - DNA, 451 bp, Homo sapiens
tggtatagtgccttgttttttgattgaatgtattacctggatcacctatccccaacttttaaaaagttaataatggagctcagaaacaactttgatttaacttcttgttaaattttctcttggggtcccttttagctctaagatatgtgtgagatcaattcattcattcatccatctattctttcatatattatttaattcactctcattattcactctctatgaccagaattcttttatagcattattactgcattaatctcagttctccacagcagatcatgagtataggcctggcaaagattagatgtgtgaatgtttgctgaatgcataaatgaataaactagggaatgcatttactagaagaaaaccatattctatcccaaagatacatcagcgtgacttttttggttattcatrccaatgctctcttccaagcagcaaagataat

SEQ ID NO: 515155 - DNA, 474 bp, Homo sapiens
agctctagtatttgattatttgtgaggtccatatttcttcttctttttttggagacagaatctcactctgtcacccaaactggagttcagtggtgagatctcggctcactgcaatctccacctcttaggttcaagcaattctcagcctcccaagtaaatgggactacaggcgcgtgccaccacgcctggctratttttgtatttttagtagagacagggtttcacttgttggctaagctggtctcgaactcctgacctcaagtgatccacctgtcttggcctcctaaaatgctggaattacaggtatgagccaccgcgcctggactgtgagttccatatttctaatctcaacaactttcctaaatgattgttatgaggttccaataaaacaatgtattcatgaaagggcattgtaaattgtgaagttcaacagaaatattcattatattattatggagtggcctcaagtccctc

SEQ ID NO: 515156 - DNA, 544 bp, Homo sapiens
aattctcttgcctcagcctcctgagtagctgggattacaggtgcctgccaccacacctggctaattttttgtgcgtttttagtagagacagggtttcaccacgttggccaggctggtttcgaactcctcacctcaggtgatccacctgccttggcctcccaaagttctaggattacaggcatgagccaccactgcccagccctcattggcttttgaagatcattttatctttgagtttatttaaaaaatatgtatacccatatgagagattacattttaaatttaatatgastaacacttttaatgattatctgacgttgattaacatctagccacttactctgtgaccttgggtaatttgattaaccattctaagccttggtttcctcatcagtaaaatgggcatagcaacagtacttacctctaaggttaaggattaaataagatagtatatgcataatagttgtccagtgccttacacgtagtaagtgttccacaaatgttagatattttagctttaatgttgacacagtatttttttggt

SEQ ID NO: 515157 - DNA, 502 bp, Homo sapiens
tgagccaccgcgcctggcctccagtatattctttgagttaaagagctaaggcaggagaaggatacgaaaaaggtgaaggccaatcattctcacattggaagcatggtcttcaggtttgggggcctgcccagccagggtagatagmttttatatagggtatggcagggcaagtgaatcctaagcacttaaggctaaaagggttcacgaaagtctacagttgcttaatcaaattgcttttatgccgttggatcatcattacattactccacagggaatttaaacataacatgaacatgtatttaaatgaacttggaagaaagcttgttgtcccctctcctgttttaattagatatgtcttatataagaaatatataaatgcagactctgtggtttccctggcaaggctacggcactaagtaaatccactttaaaactattttgtttgcttttttttttcccccttaattaagttttttaagtttccttagctctctgtgtggct

SEQ ID NO: 515158 - DNA, 502 bp, Homo sapiens
tgagccaccgcgcctggcctccagtatattctttgagttaaagagctaaggcaggagaaggatacgaaaaaggtgaaggccaatcattctcacattggaagcatggtcttcaggtttgggggcctgcccagccagggtagatagattttatatagggtatggcagggcaagtgaatcctaagcacttaaggctaaaagkgttcacgaaagtctacagttgcttaatcaaattgcttttatgccgttggatcatcattacattactccacagggaatttaaacataacatgaacatgtatttaaatgaacttggaagaaagcttgttgtcccctctcctgttttaattagatatgtcttatataagaaatatataaatgcagactctgtggtttccctggcaaggctacggcactaagtaaatccactttaaaactattttgtttgcttttttttttcccccttaattaagttttttaagtttccttagctctctgtgtggct

SEQ ID NO: 515159 - DNA, 674 bp, Homo sapiens
gacactccggaaaagctaacactttggagacagtaaaaagattagtgattgtcaggggttaggggaagggagagatgaataggtagagcacagaggatttttatggcagtgaaaatactctgtatgatgctataatggtggatacatgtcattatrcatttgtcaaaacctattaaatgtataatgctgaatcctaatataaactatggattttgggtaataatgatatatcattgtaggttcattgattgtgacaaatgtgccactctggtgccagattttgatagtagggaatgctaaacaagttggggggcaggggaatggcaaggagtatagtggaaatctctgtacattctgctgttttgttgtgaacctaaaactgctctaaaaacagtctatttaaaaggcaggtgtgggggtgggggaattcctaagtgggttctacaaaggagcattccaattagagaagccaaagctgtatctctctaagtcccagcctcagatacagcttccccctgcttgctgaaacacttctgtgggagccctaggatgccaatgtagaaagccctcttaccctgaggctaccttgctgtgaggaagcccaaaccaagccccacagagagtccacatggaaaggccctgagctatgtaaagagatatgcctagccagctcc

SEQ ID NO: 515160 - DNA, 628 bp, Homo sapiens
cggaaggggcaggcagaggggtcacccagtgcgatgtcaagagtggggccggctggtccgggaatatgctggggagtggagcacgtttatattcgacgtaggaaaaacaatggagaggaagagaaggtggaagggagggcaagggagagaaacatcacatagayatttttagactttgctgaagatctgttatttttacatccttgggctcgggacggcagggagttaaattcccctgagagaatccccatgggggccagggaaagcccgctgcagactggtttaccagaatatttttgtccacggctcccagaccaagctaaaaaataaaaaccgcacgagagaaaaggcctttgcgagtggaagaagtgaggttggcacaagggaaggaatcctgaaaccaagtctgtgtccgcgcggcgttggtctgggccacctcgcaatgaggctttagtgatcttaacgacaagcagcctcaaagctagggtggaggagtggtcatttagaaagagcttccctctttctctagaagaatccgaaccctcccttccctcagctcggccgcggccggtgaatagggatgaggaagggatcccccttcttttccaccagtaatggggctggggag

SEQ ID NO: 515161 - DNA, 653 bp, Homo sapiens
ctggctagtttcttctctgctgtccctgtccgaccttccaggtgtaggagtcgccggctgtggatctccaccttcctctctatagcctgcacggcggccaccactgtccacagagagatagctgctgtctgcaggtgtgcctcatttgctgctgggggtgtaggaagaggaaggggctgcagggatgtaaggcactcggagtcccattcagatgtctgcatgcartggaaagatggaacaagacattgagtgttagaaggaaccctaactccaaactaaaatcagataaggactgcttaactgtccagcagagattaatttgaatatagttctagtactgcctgcgtatgcctcatctttctggagctcactggcatcaacagccaagagacctgatttggtggttctgggatagattgggtaagacagtgaattaatgaaattggctcttgaactagtctggtatatttcctccgctataaggcccagcttaggttgctgcagcatcctctatctctggaaaaggcaaatgtgcacaaggatcctttccaggcctcactgaacctagtgccctctgataaatccattatagacttatgctctagacctgtcaatcaccctgtttacaaactacaaccacaccattcagtaat

SEQ ID NO: 515162 - DNA, 552 bp, Homo sapiens
ctgaggccaaacactgagacaccggtgcttggagatgcaaaaaggtttcattgatttggccaaagcgagaaggcagcagagcaaatctctaaaatctgtcttaacaaaaggaagcagggagtttttatggggctagagagtaagggagggggagtttcagggaaccaagggggaaagtctgtgtttcttcagtctctgataacaccttgagcaatcaggcttctgggcgtcaggrgctggccacaacgaccctgaaggcattccccctgcaacaatttttcatgaccctgaagttatctccttctccttgacaatcaaacagtacatcagcagtatgtaattatattgtgagaacaaggaatattgggcaaaaagcaagtggttaaaacatgcaaacaagcaagggcctgatcagaattttcatttattcagtccttaagaactgcagaatgctgaagtctcaaggggcccggttacaaggctattggaagtttcatcaccctctaaaatgcccttaaatagcttttttgttttgttttttaaaaaattgtt

SEQ ID NO: 515163 - DNA, 544 bp, Homo sapiens
ttgccaaggctggagtgcagtggtgcaatcatggctcactgtagcctcggcttcctgggctcaggtaattcttcaacctcagcctgggactacaggcacgcaccaccaggccaagctaattttcgcatttttagtggagacgggtttcaccgtgttgcccaggctggtttcaaattcctgtgctcaagcagtctgcctgccttggcctcccaaagtgctgggattacaggcataaaccactgcgcccagccttcaatattcttaatagtgatttattaacagccagatcatagggtccaattttaaagcaagttggttatggcaaaaatgcggtcaaaaaggagtttttaaaayaatgctttaagttattattactattgttttagatagggtctcactctgtctctcaggctggaatgcagtggcatgatcacagcttactgcagcctcaacctcctgggctccagtgatctgcccacctcagcctcctgagtagctgggactacaggcaagagctaccacactggctaattttttttattag

SEQ ID NO: 515164 - DNA, 453 bp, Homo sapiens
ttttgtttcaatactgctcaattctacctgctctactctgacaaaattctaacaattaatggagctaagactattaactagattcaagatgttttctatcatgtaacttgtctaagaaaagtttattttcattccatccaactgaccattctcccatatgaaatgtggaaagaagcaggattgaggggcaggggaggaaacagagctacacagtgtttcttcagcagttagttgagacactcagaagtcaaggaaatgawgccctaaagtacccacagccagcagccaagagaatcttcaagaactctagacacccaggggttcccaagtcctgggaaccacatattgtcctagcaagctccaagtcttggagaggatgcagcgtgaaaatgaggagagtgaattctgatggaaacctggagatactattatacctaacgctgcatgcagcgg

SEQ ID NO: 515165 - DNA, 586 bp, Homo sapiens
aaacagtgctgtgacctcacacagcaaccatgggtcagaagcatgaaactcatgaaggcaagtttgatcaaaaatgacttaactgctcatatgatcccatgccatatgatcacagtttccaaatttttaatgctatttgaggcttggaagcttatcatgaatagtgcaggtatcttctcttctgtgtttgacaataagaccaaattattcctgtgtccttggtaaaatgtcccctttccaggtgcctgtaggcttacaggccccctagtaggcaagaaaagactccaggaaaatacaacacaattatttaaaaagaaagtgcaaatattaataataacaaatcctgcagtaaatagattagagaggttaaacaatgtaaggaaaggaaaataagcagagccacatagtgtctcaattcctcctggatacaccctgctttggtgtcttcatctcaccttattctccacagggtgwagcaaagccttacagtgaattcagaaacatcactaaccaaaatactaactaactgctaatacatcagtttgtatgtatcatgtctgattctttcgtaattgttggatgcacc

SEQ ID NO: 515166 - DNA, 509 bp, Homo sapiens
cccaagttaaaccccctcactttgtctcttctcacatgaaatatcttcttctccttctcttcttgagtttaaggccaactgacactgtaggcaaccacaggcatagctcagcattcagagactcagagaaggcaacttaactgtcctgtagtccgtttaggtggtttatgacaaataaagagttactgcccagttttattttccctcagctggcgacaagattctagtcaactagyagcacaggagaaaaaacccagtaggtagctcaaaaaataattgttctgggggcatgtggcactaaaatgaaaagttggctagacaagtaattttgaagtcaagagttttaacctacagaaaacaaattattacatgcaaatggcatttgctaatcagttattactctgtgagtcccgcaagtgacagtggaaagatctcctgctggaagctaaccattagttggaggcagaattatatgactctgaatttaataaaactttaatttctatact

SEQ ID NO: 515167 - DNA, 509 bp, Homo sapiens
cccaagttaaaccccctcactttgtctcttctcacatgaaatatcttcttctccttctcttcttgagtttaaggccaactgacactgtaggcaaccacaggcatagctcagcattcagagactcagagaaggcaacttaactgtcctgtagtccgtttaggtggtttatgacaaataaagagttactgcccagttttattttccctcagctggcgacaagattctagtcaactagtagcacaggagaaaaaacccagtaggtagctcaaaaamtaattgttctgggggcatgtggcactaaaatgaaaagttggctagacaagtaattttgaagtcaagagttttaacctacagaaaacaaattattacatgcaaatggcatttgctaatcagttattactctgtgagtcccgcaagtgacagtggaaagatctcctgctggaagctaaccattagttggaggcagaattatatgactctgaatttaataaaactttaatttctatact

SEQ ID NO: 515168 - DNA, 623 bp, Homo sapiens
tagcagatgggtaagaaaggcaacatcaaaattgcctkctctagatatattttttaaagagccccaaaaagtagcaatagctttggctaacaaagctatatcttcagttgaactctcattggtcacaggaatgaataatgtttctatcattctggagtaatcctcatttgcatattcctgaagccagttttttgtgaccaatagaaaatcttcaataatttctaatgtcttcaatgacggtgaatccaggatttccaggaaatgggcaaactgcaaagttatcttttgaagagccattgaatttatacttttgattcctttgttcatttcagaaagcaggtgtctgattctaaaatcttgggttaggtctttcatgatttgttgaaacttgggccatagttcttcaaagttgtaaggtgtttcacttttttcaataaaacttgataatgcttctaaactgctacctgtgacatttgcattctggagcatcatgaataaagagagtagattatgcgtacttttttctaggctccagtcttcagaaatcaattgtactgtcctttccaaatttgaggaaataatattttgaacagatgtctctgtgtcttcattaatgttaagga

SEQ ID NO: 515169 - DNA, 543 bp, Homo sapiens
ccctggcactttagcctaggattttgcctgctctgtgccaggccaggggattgaagccccaggaagctgtacttggctcttagtcctacagagatggggggaagctgaagactataccacactctaggtacaaagctaggatagcccacattcttctgcccccatataaaatttccacacattctcagtgccaggaagatgaggcccaaacactggctttgctgtccatctgctgtttttttttctttgttttgttttgttttgctttgagacagtcttgctctgttgcccaggctgaagtgcaatggcgcgatcttggctccccgcaacctccacctctcagactcaagcgattctcctgcttcagcctcctgagtagctgggattacaggctcacaccactactgcccagctaatttttgcatttttagtagagacagggtttcaccrtattggccaggctggtcttgaactcctggcatcaagtgatctgccctcctcggcctcccaaagtgccggaattccaggcgtgagccaccgcag

SEQ ID NO: 515170 - DNA, 482 bp, Homo sapiens
attcagttttgctccttttgtgaattgtgctagctaaaaaagggaacaatatgcaggtttttcaaaactttatgttgtgtttaaaatgtttatcattgcttattatatttgcagttcttgagcccatgaagagggtatctaagcctctttaaatgttactccttcccactcttattaatcttttagatgttggcgaagaatgctgtctgccygaatggtcgtttctctgagaaggaggtctttttgccgcctggaaactccagcatatggggtggtctccagggactgttgtgctattgtaactcctctgagacgagtgttttaaacaagctacttggttcagtagaggatgctgtaagtattctaccatcttagctcttctaagggcacaaatttaagattaaattcaccaaagatgctaatatttaacctggagtttcgatgaggaaagttttgccgtaagcccacacacttaaaggaag

SEQ ID NO: 515171 - DNA, 379 bp, Homo sapiens
cccactgtggaattctaaattgaaaagttttaaaagagactgagccttgaggtggatgtctggtgtgcagagggctcactgtctaggtcatatttgaagggaagaaaagggaattgggagtagactcatggaggaaggtaattgaactcagaaaagctgagtgatggtgagaatgtccycaccagtgggacagtattgagtcgttccttatcctgtgggtcaggggatgtttggctaagctggtggcttttaagaagaaattctttctaaagttcaatgaggtcaacttgaggctcagaggaaattaaaaaaaattgttttcctcaggggaccaggagattcaaatgctagagttggtaatcttttggaagtaccttgg

SEQ ID NO: 515172 - DNA, 600 bp, Homo sapiens
gagggtctgctggctgcaacccaaccatctaacccctgagactgagagcacagatccagagtctaaatactgaaagcaacagtctgaacacaaactagctgcactgaaatgtgaaaagtgctatctgggaagaccaggttgtggggaactcacaaaaaagtgagcaaaatctacataaccagcatggactgagatcctaatggaagagagtgggtcctctccaaacattcctaactcaacactgacctaggagctgcaccagaaatgctctaaccctggaggtggagtctatggaccaaagctccaggtcccgcatagttcttggacctgcaccatgcaaagcagaagtgcctacaaatgggctggagtgacaaaagggactctgtaactaaaagatatctcccagaacctcagcaataccaacagtgaactgggtcttggggatcgatcatccagtccaactcccttatttcacctagttarggaagaggctcaactttggtgaacccagcaggcatccataacgtacagctcctactcttctaatgaaaactatctctttacctggaaattcacccacttgtatccccactcactaca

SEQ ID NO: 515173 - DNA, 638 bp, Homo sapiens
ttggaacctagacaaactttaaacagaataaatactgcaagtgaaactctttaacaagaataagtttccttggcattttttaagattcttgataccaaattgctttcaattaaacttgtaccaacttacactctcatcatctaccctgagagcccatttcacctgaccctcatccaaaagagaaatcattatttaaaaaatcttcacaaatttaaaattagaaaatcgttctcattctctgtattatctgaaagcttagccattttatgtttataagccattttttaaatttatttaacacatattatacagcatgccctgcacacggtgcctggaataaatacatcagtgaacagtacggacatgatatgatctgtgcatgaggaggagacagagataattacggagaatgttttagttttttaattccatgcctttattttacaaattagagaacatagtsaaaatgaattaacagttgtcaacatgcatatctaccatgaaaaaataacaaagcttacatcacaaagagttacagtaaatctcttccacaaatattatcacttaattctcacaacctataatgaagtcagagcaggttcaacatttactgatgaataaaataaattcaatgcctt

SEQ ID NO: 515174 - DNA, 616 bp, Homo sapiens
gcctgtatcctgtaagagcctggcacccaaaccttttctgtttatacatacccacctgatggtttttctcctgctccatacaaggtattataagaagaggcaggtkcctcattagaacctgaaccctctgcacatccagaagcatcggcctgtccccagtgctctgctctatgagatgatgagacaccagggaaccgccagccttcttctccactttttgttttttctcaattttattattttattttgttttaaaatttttaatttaaattatttttaggatactgtggattgtctttacgttttaattgtgttctccttgaaatgtttctgtttttactaagcttttaaattttctggcataaggttgcatatagcagcctcttagggtttttaaataactgatcatgtcattatagccccatttttattccctgtctcttgttggtgccgcttttctcctgttttaatgattaatattattttataggcttattaaggaattgatctttgctgatcttctattgtttctttttcattttgttaatatctgcttttatatttgtcattttcttcttgtaacatttttaggctttagtaatttttctttttaaac

SEQ ID NO: 515175 - DNA, 609 bp, Homo sapiens
tggagcaggggacgttcagtaaagtaagtgcatgcacatcagacttccagactacttttctagatgaaatttgatgtagatagtaagttccttwtatgattccggttgatcatgagtgagacgtgattgtgcctttgacacccatggcgggaagacgcctgagcttgccacgagtcacccctatgtttctttgcatcataagctagatggcattcatctactctggaagagcagtgtttctggcaacatacaggcagccaaacttattcaggcctcactcccgtttcaattacactgttgttgaccactgacagagcccccctgggtccacagcactgccagtgagttctgccgggtatatgattcacccagcagccattgctgcccacagcaggcagaagctaaaggacaaggactctgctattggcattcccactatcagagcaggctacagtttttcaaggaattgtgttttaagttcaacgtgcattagggcagagaaaaacatagtgtgttcctgtaattagggatggtttctgctctgctgggaggctcacaagacttcattttacctaattatctccaggtgaccattggtgcgcagagaca

SEQ ID NO: 515176 - DNA, 480 bp, Homo sapiens
tgtctcactggttctctgcccacgaggttgctgggcactgcacctcaggtcttgttcagcccaagctcaagaagcccagaaattctgggatctaacactgacaccacctttgcaaaaatcatcacagtgagaaaattatggcagtgaaagagatttgacccaactgactccatcttgcttctaatctccaagctgcccttgttcattcctgggtgtaagctgacctaacttcaggaggaatttagtttacagtttaacgttgaaacaaagatgatatcacccctttcctgaaacaaacctccttcttgcctggggaccaggctacttgtgtaagacaaaaaaattagccgcaagattataaattatggtttaggagtcatgcagtcagaggccacaagattccaaacctcctaggaataatatcactattgtaaaacctactggwgcttgagatatttttcagaccgtgcattctaatgc

SEQ ID NO: 515177 - DNA, 580 bp, Homo sapiens
ctggtcctagcgtgtgtggcctggagcctgagggcctctcactaggtagggctctctctggggtctctccttcacctgcatctctctcccgacctggtccccatggatcatccaccctacatcttcatgccttttaggctgttccttacctccttgcctctatttattcaccagtcctcagacacagaygacaatcttattcaacaggcatttgctgagcactgtgtgccagggagcgttctcgatgctgtaggcccattggtgagcagagactgcgcacctgtgaggtttctgttcttgtgagggtgatggatgacagacaaaggaggcctgcagaagagtctattcttgcagcttggactaagtcatcaagctgtgctgaccagggtcagccacagagggccaggaggatgaccttggagagggtggaaggagcaggaatgtgaggagtcagggaggtgtgtctggggcagagggcatggcacgcaggaaggcagggaaggatgggcccgcagggttcaggaacagcagcggggtgcagaccagagagtgcccggaaagcacgaggaatttgcttgaa

SEQ ID NO: 515178 - DNA, 415 bp, Homo sapiens
aatggaagcagagacagcagttactgagcaggtgcaacacatcaggtgccttatgtgtgtcctcctgttgattctcacagcaatgctggagtggaacaattataccttccaccttccacaggaggtagctgaggccagtgcacttaggaaacttgcccaatattatgggctgccaattggtggagctgggatttgaacccaggaagcctggttcccaggcctgtgccaatgaaaggcaaccaaccrtgaagcaggcaccttctaaggcagtgaggatctcattgctggaaattttctagaagggggcgatatagtggacatttgtggctagctccccagcgcttgtataagtcagcacactccaatccctgtttccccagggcacccacatgatggaagagctggccagccccag

SEQ ID NO: 515179 - DNA, 478 bp, Homo sapiens
tggctgctgtactggcttcttggccggtcccctctcatactccaatatagagatgcagacagtgagtcaatgagttcccatcactgataagtcacatggtttgggtttgcctcgttttgtgtcttgcaaacaaaagcattctgatggatttggctgaggtcagtccgccctctctcagggttgctatggaaggaatctctccatcaggaggtgtgtggacgaggacctctgagatctctggctcaactctaagattctattactccttcgtrtgattcaaagttgcgtaggttcttcttctttcaggtgcaggtggaaaacatttaaagacacagagtttttaaattgttttatattttagattcaggggttacacgtgcaggtttgtttcaaggatatatcatgtgatgctgatgtttggacttctattgattccatcacccacatagtgagggtagtacccagtagaaagtcttca

SEQ ID NO: 515180 - DNA, 577 bp, Homo sapiens
gtggaattcaggtctcttggctctttacccaggcaagaactatgagaagcagctttggctgtgaagttggtaccatagtgttgcaaagtacaccagagccaaggtggccagtgsgagttggggaggtctcatgcatcagagagtgagtggctgcccacctgggtggatgcatcccctgcctccttgcagggtcccagagcctcatattctgccaggagccatctgttcctttggaaactgccatttcccccactcagtttcctcttttaaaatgcaaactcctaagagatgggctcaagggcacaggctggcagggaactctggctgggtcccccttggaaggagagggggagtggtggcagaggagccttacaacttcaccgtgtccactgccaaagtgcgcatttcctgattggcaggtggaccaaataaaagccagcccagggatctggggagaataaatctcaatgaaatgttttttatcagggttctgctgctctacaaggaagatgtgcaggttaagctggacaaatagcaggctgagtgcggctgggcttttcccagtctccagggagga

SEQ ID NO: 515181 - DNA, 577 bp, Homo sapiens
gtggaattcaggtctcttggctctttacccaggcaagaactatgagaagcagctttggctgtgaagttggtaccatagtgttgcaaagtacaccagagccaaggtggccagtgcsagttggggaggtctcatgcatcagagagtgagtggctgcccacctgggtggatgcatcccctgcctccttgcagggtcccagagcctcatattctgccaggagccatctgttcctttggaaactgccatttcccccactcagtttcctcttttaaaatgcaaactcctaagagatgggctcaagggcacaggctggcagggaactctggctgggtcccccttggaaggagagggggagtggtggcagaggagccttacaacttcaccgtgtccactgccaaagtgcgcatttcctgattggcaggtggaccaaataaaagccagcccagggatctggggagaataaatctcaatgaaatgttttttatcagggttctgctgctctacaaggaagatgtgcaggttaagctggacaaatagcaggctgagtgcggctgggcttttcccagtctccagggagga

SEQ ID NO: 515182 - DNA, 561 bp, Homo sapiens
ggtcctccaggcctttctgcccagggggctgcaggcaggatcaccctctgtgctcaactatgttattgttcagcaaatatttactgtcccctcctcactgggcagcttgagtggactgcctgatgatcctacagaccttggcttgggctgatggaatgtggagggcaggcatatgactaagggctcctccaagcagaggccttgagtgagttcatgtggaaagctggggctcttgggctccagtcctgcactctgagaagaggctgtgccccaaggaagtcactgttcctcacacctggatctgggatgagacacccatggggccaagccaggagcagtcaccacagccaacctgcaggctyatgagctcattggtgtaagacactgagatgtagagttgtttgtcataaggcatcgtcacagaaaagtcagcacaccctcccctccccaccacctccatgccctgttggaaaagcatctcctggccgcttatccaggcactttgttgtcaaattcatgccctttgaagggtacctgcttccctgccagacatgctccccg

SEQ ID NO: 515183 - DNA, 531 bp, Homo sapiens
cagatcttgagagaactcagtcaccatcacaaggacagcaccaagacattcatgagggatccactcccatgacccaaacacctctcagcmggccccacctccaacactggggattgcatttcaatatgagatttggagagaacaaacattcaacctatagcaccgtctcgtgcctactgccttaagtgagtggcagagagtggactgaggccttggggaaagcagtgaaaagactgggatcagagccacacccctcagggttggcgacctgctctgagcttcactgactttaggactttgcagcctgagttcccttgtctgcacagtgggtatgaatgatgcctacctgtggtaaggattatgtgaacgctgggtgcaaagcaacacagcaccattgtttagcaatgtatatgtggcacatagtagatgctcaagaaatgtgaactcctctttcttctccccttaaggttttgaagttggggggtccctcagtcaccccaacaccacccaggctgcctcctactcttctga

SEQ ID NO: 515184 - DNA, 491 bp, Homo sapiens
atctgagatttagataaggtacaatgtttgggcaagtgcttcgtatgttttcaagtattttttctttaatgccaattagttacgaaattcagccccataaaaattctttggggcatgcaaatgagattgcatttgctctagtttttgggtaaagagaggctttttttagagcaactttgttttccagataactactgagttgttcaatttttaaaatacgtaatccatcgtatccccagtgatttgaaacacawtctttaccacataccagattggtgtttctttctggtttcattctatactttttttttctgttccattgatctatctactcgtgttgttttaattgccatttctttatactgttttaaatatctggtaggtctgggccccctcactattcttttttagaatatgcctattcttgcttggttatttttctctataaactttagaatgggctttactaattccaaaaaggaagaaccggt

SEQ ID NO: 515185 - DNA, 498 bp, Homo sapiens
ccatgttgtgaggatactcaagcaacccagtggagagatggtgagaaactgaagcctcctgccaatagctagcraagaaacgaggccttttgccaagagctgtgggaataagccatcttggaagccgaaccaccatccccagtcaagccttcggagaactgcagcccaggccaatgttttgtctgcaacctcattagagaccctaagccagaaccacccagccaagctgctgctgaatctctgattcacagaagctgtgagataccaaacgtttgttgttttaagctactaagttgtgggtcattttttaaatgcaatgatgggaaactaatacacaagtcaggagccacagccttcatcgacaagctgagtgggtaggtgagaggactgaggcaggcgtggtacccaaagacctggacagagaaccagcatttgtcaggatggagtgcagtgcttggatgtgtgtccttccatttactgttagtgctattacccctg

SEQ ID NO: 515186 - DNA, 462 bp, Homo sapiens
ggaacttcaccggggcaggtaattgaactagtggagtgggctgaccaagaggaggggagcgttcccagcattggggtgatgagccatggaattggcattggagtggctgtagtcacaagtggaaggaattcatctgctggcacatccagcctgcagggagaggacccaggggcgcctgcacttgtggcctggagggagatggacaacttctggggtgccctctggttgttggagatggagggcattgaaggaggaggggayggcacatgcgaaggcatggagttgtgaaatgagtgcttggcagttagaatggtgaagtgaggtagtgctggtggccctaggatgtaggtggaatcaggacttgaccccagaaaagccacatgtggggaaagggtgagcgctgggctaggagccaggagacctgactttccactcccaggtctaccacgatccatgtatcct

SEQ ID NO: 515187 - DNA, 572 bp, Homo sapiens
tctctaggccaaaatatcctcccactgttcaggaggggcctggccagagactctgttgttattttcacacctgttcttataacaatccctgcggaagaaaagaaaaatgtcacctagataaagacaaaaagcataaaaaagaaaaaagaaaaaaaaagagtgacatttggaaaagtttagacaggaatggcctggccggggctgaaattgggaggagggagaaggtcagaggctgggggattagggacatctgagtgctgacttggaaacaggggactctgggtttctctttcataaggaccaaaggctgctcatatatgctaagcacctttcattcattgtctcaccaacaaccataggaggcagttactattattaactcagatagaaatagggaaactgaggttcagggaggttaagtaatttcccagggtctcatattcagcctggacaccrtctcatatctggctctaaatagtagcctctaaggctcattggattggcacttgcctcccaggacccctgtggttatgagattcagagtcctgagatgtctgagctggtcaaaagct

SEQ ID NO: 515188 - DNA, 641 bp, Homo sapiens
tgtggagtgaggttgccactcgcctctactggtagagagtgggtcgcttggtttaaaagcatgtcttcatcatctgctgaatgtcaaatactgtgttaaggagctggggaggaaggcaggggaagggacacataagaaacagacctagaaatgtcaccatcaccagcactttacaggaggcagctagaaagaggccaagaaggccaggtgtggtggctcatgcctgtaatcccagcactttgggaggccgaggcgggttgatcacctgaggtcaggagttcgagaccagcctggccaacatggtgaagccctgtctctactaaaaatacaaaaattagctaggcatggtggcgcgcacctataatcccagctactcgggaggctgaggcaggagaatcatttgaacccaggaggtggagttgtagtgagccaagattgtgccactgcactccagcctaggtgacagcgtaagactccaccaaaaaaaaaaaaaaaaaaaaaagagagagagaaaaagaagaggagaggagaggagaaaagaggccaagaagccaccaggtctaaaggctcaggggtgtcagggtycctgcattagagccccttccacacctggctgatcacccagtcacctggagagttta

SEQ ID NO: 515189 - DNA, 602 bp, Homo sapiens
gctccaggaaagttagacctcatgtggctgggaaagctgggactcatagacccaaggaagcaaccagagcctcaggtgctcaaaaccccaagacgctcccctagtctctcacgcctgcttgtctcttctttcgcaggggtctcaccctctctckcacatcccagatcccgccgcctccacgtgctgggcaccacctgcagcctacgcagtgcctacacgtgagcagctcgtgtttgcccaggggaggattctgattggccctgcttggggacacactctatcttttggccaatcaccttcacggggatggcagtcacgtgcgatctgagcgtgcagctcccaggaagcagggccagagacaacttggatgcaggtggttaaccggggaggcaaccatgtgaagcaatcagggggtgaggagggttaatgaggtggttcttaagtgggcctgaagcggtgtggagtacacatcagaatcgactccctgaaggccgggaggctgaagcacctatccccctcctcttgcctcccacttcctcctcccaccattgccattccaggttgcacctgtgcaaggactgagccgaaaagcgacagtgagg

SEQ ID NO: 515190 - DNA, 602 bp, Homo sapiens
gctccaggaaagttagacctcatgtggctgggaaagctgggactcatagacccaaggaagcaaccagagcctcaggtgctcaaaaccccaagacgctcccctagtctctcacgcctgcttgtctcttctttcgcaggggtctcaccctctctcgcacatcccagatcccgccgcctccacgygctgggcaccacctgcagcctacgcagtgcctacacgtgagcagctcgtgtttgcccaggggaggattctgattggccctgcttggggacacactctatcttttggccaatcaccttcacggggatggcagtcacgtgcgatctgagcgtgcagctcccaggaagcagggccagagacaacttggatgcaggtggttaaccggggaggcaaccatgtgaagcaatcagggggtgaggagggttaatgaggtggttcttaagtgggcctgaagcggtgtggagtacacatcagaatcgactccctgaaggccgggaggctgaagcacctatccccctcctcttgcctcccacttcctcctcccaccattgccattccaggttgcacctgtgcaaggactgagccgaaaagcgacagtgagg

SEQ ID NO: 515191 - DNA, 469 bp, Homo sapiens
cagggaggagacccctgtgaagccaggcaagagctgaggctcaactgggaagggcaaaggaccgtgatggggccaggcaggcgtgagggacagagaaggggagaaggtacaagttcaggggtatcagtaagtctatctcagggttgaagacattggaatacagtcaagggattagacagaggaagacagctcaggctactatgattatgctactgcactccagcctgggatggctctgggtttgaaggatttggggaaaccagactgcaatcctaactaagctagtcttgaagatttagcttcccaggctggccacggtactggcctgggcagggccatagmactgctcagtggctatttctggccacctgcacacatctaaagttactgtgcctctctgaacctcccaggtgtctcctgcacctcctgaggcctgagctacagccctggagaggcctgaacccccacc

SEQ ID NO: 515192 - DNA, 487 bp, Homo sapiens
gctaggaggggccttgagctctgtggtccaactccctcattaacagagagaaactgaggcctggagaagccagagacctgcccaggggtgggtgctggaatctaatctcatcccatggttctttctrtttgacacgctgcccagcatggaggaggcgctctgtatatacaggttgaaaaactgtatgacccaatggatgaatggatacatggctgggtggctgggcagatggtggatggataggctgcctcctatctttagaagaggagcaagtacctcctcctgatttcctgtggtgtggttagctctgcagaccataccttggaaatttatgaataaacaaaatgattagatgccacccagaagtgtataacacactacacagtggcgaccaaattggctttaggaacaggaaactctgccagaccaatttaattttctctcccgtgatagaatgatggacctcatcagtaagggatgggaaggc

SEQ ID NO: 515193 - DNA, 533 bp, Homo sapiens
gctgtgtgttttaccccctctcccatgttagtcaacctgacaaccttcctgtcactgtcactgccttctgcatggaggccgcagctcagtaacatgtcagaatgcttgtctcacctacttagctggaaatgtaaacccttcaaggtcgagacggtctcttttacgccttgctgtcctggctttgacattttgggtgttttgtttcctgaatcagcgctcctcgactggactcattggtcttctgcaccagatacccccagctcctcaacacatccttattgagtatcctggtccctggccctctggagtggaaagaggtcctagcacctcaccaccagagcccaggtgctggcccagatggaggtggaggatggagaggagcataccccaggggctgtggcatggcaggccttggagccctcggtgctggcrgccacctggatttatgcctctcttggggatatgtgccctatgtgtctacctggcccccaccgctgcatttcagtgttgttgtcctggccttacaatgcaaa

SEQ ID NO: 515194 - DNA, 626 bp, Homo sapiens
agcggggctgctgcctcatcctcccccagaggcgagatggcacagccccttcaatgacaatgtctctcctcccattaccgggaacagcctcactgactggctgtcatagaacttttgcagcctcaggggaacatgagctatctcccatctccccaagctgtgaaactgaaatacagaaataaaagcctttcctcaggggcccttcatctcttggcaaatcgtggttaaggagccctcttcccttgtcacaactgcccggctcaggtttaaagctgagggcacagcagacaaagagggtaggacgggcacagaccaagccaccatggtgcctgctgagtcctgcagttccggcctgacccatgataggggtagggaggcagacaggcctttagaggcatgcggggtctacgacactgtggttggcacaagttctatacattaagactcgttaacccacctgccagctcagcatagggctcctgggctaggggcacccatgctaagagrctggattgagagatggtggcagagagaacgaaacgtaacagaggaataaacactgggctttaacatcaggtgatactctccccgtcaattatcccggtggagctaggggatggagagga

SEQ ID NO: 515195 - DNA, 574 bp, Homo sapiens
agcttgatgttctgattttttaaatctttatacgcacatttgttttcacacagtatttgtgaacactgtcttgtgaatagtttaatcatctatcaaagtcaggtgtgaccacttgtttaatcagtcccacattgttgaatactcatgttcttccaatttttactattaaagataaactaaaataaatacctctgtaaatatactcatttttctgtcaaataatttaattatgatwaattatctaaacttgttttattagtcaatggaaacattttatggcactaactgcatatttctaaattgctttctaaaagagttctgagttttatttgcttttataggcacttcaaaaaaattttataggcattgcttttataggcatccactctgtgttactttttcacaacttcttacaacaatggtttttcacaacagcattgaatatcacaattttaattatttttgtagccattttaataagcacaactgagagcttactgttgttcagttttaaatttttcacttgtaagcttaaatattttctgatgggttcataatttaagtaggtattcac

SEQ ID NO: 515196 - DNA, 570 bp, Homo sapiens
aaactcagtgttcagttggtgcctcacacttagtgagggctaaataaatatttgttcaatgaatgactgaggaaattaatacgttaatcaatgagtacatttaagggaaatttctttaaaaagcttttcccaattatggatacaatttaatcagatgtaatatgtcagtatttttgtgatttcttctataaaatgcagtgtgttttacattaaaatagaaaatagtggatttcatgatgccataattcattaataaayatttgcttcgctgttttttttttttttttttgcaacagcaagtgaggagctttacttcctcagctacccctattctctcagcaatcccaatcgttcaactgtttattcttccttctcccaatattttcattcgctacaataataactggtatcaaactttatagtaacatgcctaaataaagtcgggagaaagtggttttaaagaaaatcttacttattttatttcaagccagcaggaaaaaacttccttcaactaactttttgtttccccctaaagaaacccaaaaataattacatgaagaaaagaaatat

SEQ ID NO: 515197 - DNA, 570 bp, Homo sapiens
aaactcagtgttcagttggtgcctcacacttagtgagggctaaataaatatttgttcaatgaatgactgaggaaattaatacgttaatcaatgagtacatttaagggaaatttctttaaaaagcttttcccaattatggatacaatttaatcagatgtaatatgtcagtatttttgtgatttcttctataaaatgcagtgtgttttacattaaaatagaaaatagtggatttcatgatgccataattcattaataaacatttgcttcgctgttttttttttttttttttgcaacagcragtgaggagctttacttcctcagctacccctattctctcagcaatcccaatcgttcaactgtttattcttccttctcccaatattttcattcgctacaataataactggtatcaaactttatagtaacatgcctaaataaagtcgggagaaagtggttttaaagaaaatcttacttattttatttcaagccagcaggaaaaaacttccttcaactaactttttgtttccccctaaagaaacccaaaaataattacatgaagaaaagaaatat

SEQ ID NO: 515198 - DNA, 682 bp, Homo sapiens
aaacacgcattctgtaatgacaacatttcccctcaaaaatttagttaacatttttctaacagtaagttaaaaataaaagaaacagaagtatgcaagttcccttaattggcactagccctcaaagagcagtactgcatgccgtattgtttgaggcatttttatgctataccaggagtattggtaatggccagcttctaaccaatgggggtagattttaatcacttcctctctttggagtcaatatctatgccacattttgggactcataggccagaaaagaaataaaatgatatgtatggaagccaagaaattagaggtagtaacttctgcagtcttgcatagcctttttattggatcttctgaagaagacagggtcattgtaatacttctttctgttatcagccttttatggattataatgtaattccagtttcagcttctgttatttcttgatgtgatgtctggcagagaatgataccagagtaatctcccttatctgggaagtttgggacatrgagcagatatctctaaacttggttgaagttttctcccaaaacttcacaagataggtaaactctcaacagaacattgaaacggacaccattctctgaccctatattaaacaatactgaatccaataaagataatttaactgcttgcttctggaatataaggccatgaa

SEQ ID NO: 515199 - DNA, 534 bp, Homo sapiens
gacttaatcacctcctaaagacccatttctgaatgctatcatattggagttaattcaacctatgaattctggagagacacatatgttcaaaccatagcagaaacaacagagaccacayctttcaatcttggttgaaaacagagagattagagactcatccttgattgcttttccaaatcttagaatttatatagaaatagtaatgaacaataattggcagaattcctatcctagtctcctaaatgattattttaaaatgatatgttaagtggaagaatattaattctgctccttctacctcaagcaagaagggtaagcagaaaagaaatataacatcccaagaagaattgtagaaatcagggtgtcacaatccaagactttgtgcaagagcaatgatttttaccatatcctcaattttatagctaattactttggacattgcaaaagaaaaatgaatcatagggaatattgtgtagtatttatatttaaattacaaatacatcctggaaagccaaacatagtttatgttcagca

SEQ ID NO: 515200 - DNA, 636 bp, Homo sapiens
ctgcttttcagggccagagacaaaatttcctagaaaccagaggccggttctccaattagtttttatttttgattgggtaaacctgaggtgatttaagaagtatggtggactaaaaatggtgacagatttatggcaatgcttaggtgtgaaaaggagaattaatcctgagaggaggaagtctggggaatttcttttaagactgcaaggtagataggattttgcagatcttgcataaaaatgtccataaactttccattcgtgaaagaaccaaagacttggcaggatcttcatggagaacagctattatgtgcacacaaggaaaccgacacacgtttggtctgtcaaataaggccagtactcttatatgtaagtctagaattaaacctcaaagctacctatacactttcagaggatcasgcctcagaagggcaccacgcttgattgaaagctgtcatgttatcctgaattcttaataattttatatttgaccttgtgttttgtgaatgaagtctatggagcatgtttcttgcaaccccattcacatacagcatttgtgatgccccatgaacacagatttcctatggactcatgaatgtgggagttcaagtaaggctcaaaatgagtttaagataaact

SEQ ID NO: 515201 - DNA, 636 bp, Homo sapiens
ctgcttttcagggccagagacaaaatttcctagaaaccagaggccggttctccaattagtttttatttttgattgggtaaacctgaggtgatttaagaagtatggtggactaaaaatggtgacagatttatggcaatgcttaggtgtgaaaaggagaattaatcctgagaggaggaagtctggggaatttcttttaagactgcaaggtagataggattttgcagatcttgcataaaaatgtccataaactttccattcgtgaaagaaccaaagacttggcaggatcttcatggagaacagctattatgtgcacacaaggaaaccgacacacgtttggtctgtcaaataaggccagtactcttatatgtaagtctagaattaaacctcaaagctacctatacactttcagaggatcacscctcagaagggcaccacgcttgattgaaagctgtcatgttatcctgaattcttaataattttatatttgaccttgtgttttgtgaatgaagtctatggagcatgtttcttgcaaccccattcacatacagcatttgtgatgccccatgaacacagatttcctatggactcatgaatgtgggagttcaagtaaggctcaaaatgagtttaagataaact

SEQ ID NO: 515202 - DNA, 606 bp, Homo sapiens
tccaaatttgtcccccatcctctccctaaagtcctccatccccgtcaagtacaccccccagcaacattccaagctggctctatctctgaggttttgctcacactatttaaacacacgtgcacccagtgtctgtgatgcacaaattcttctgtctgtcaatgtaaatcctgtccaaccttcaaagcctaacccaagtcccaaagactcctggaacacttcccatatcaaatttaccctcaacaataacccacttctgtgaattctgacagcaattgctgtgcttgccatgtattctgatgtttagccctattccattttacatcatcctgcaattgcttcattgtgtatttcttagatctttcatttgatcaaaatgtcataccatggagggtatatgtataaaccaaagaatgaaattcttcaggagagacccacatggtaactaagatctttgtatctttcccaattcttagatcatcaactttcagaagttttccaggtctaatctacaatgagcatagaaggtacagagagcttcatctccacccatctaccacaagagtcacccctcaaattktgtgcctcttggagtcatactcaaatgaa

SEQ ID NO: 515203 - DNA, 605 bp, Homo sapiens
gatttaccatcccagaatgacgatttagaacctagtgccaggattgctgccaagttgagaacaaggatttcatgtagaagagagcccacttggtactttatattaatgccaattgaaatatgcatgaatagaccagaggcaaagyggttgttcagaatcagactatcagtgaatgcttcttaggttcttttttttttctttttggtcctagagctaggattttgatgctgaataattttaattgaccagagacaacagacacaaactggctgaaaatgctgcatggtagaaacttaaacagacacccaaatagaattgtcattttaaatagacacctctgtaaatctgtacttaatctctctcatatgtattcagtatttcgtgatgtttcagcaagtattcatcttgcttgtctttttctttgcctcagttctctcatctgaaatacctaactaatgctttggagcagcaatgttaattgaggactgtgaagaataaaaattcggtaacagcaatggatgctcagctacagactacatttctcagcctctcttgtagctaggtgtactcatatgacgaagtttggtctcacaggatgtgagtgg

SEQ ID NO: 515204 - DNA, 613 bp, Homo sapiens
tacacctgaagcaaaacttggacaaatgtcttgggaatgtctttcctgatgattttctttcccatgcctccctaatcatggaagtcagcctttagtccaaagataagggtatataaaaaagctctayggcagtaatttgctagatgagaacagagaattattgctattttctaattctactctgaccttggtattctagaactgaataactctttctaaacttgtaccacattccacaagttgttggatttttctgaccctgaatcctaatatcccactaacttcattcctgatacctacatgtaaactatcctcatgtagcatttttaatgcttagatcaccatccatcatctttctttcattcttgcttctgcttgccacatcctgaactctggttagtccttggttaagaataccttcatccatttgggtctgtttgtttctttgtattttaaccctggaaagacttcctggtttcagatagtctttctggtttcatagtccatctgcccttccccaaaataacaaagagatgtcttatcttgcttcctcctggtcttcacctatctctaaaacaccttcactctctagatcccaggttttcctaggctg

SEQ ID NO: 515205 - DNA, 613 bp, Homo sapiens
tacacctgaagcaaaacttggacaaatgtcttgggaatgtctttcctgatgattttctttcccatgcctccctaatcatggaagtcagcctttagtccaaagataagggtatataaaaaagctctatggcagtaatttgctagatgagaacagagaattattgctattttctaattctactctgaccttggtattctagaactgaataactctttctaaacttgtaccacattccacaagttgttggatttttctgaccctgaatcctaatatcccactaacttcattcctgatacctacatgtaaactatcctcatgtagcatttttaatgcttagatcaccatccatcatctttctttcattcttgcttctgcttgccacatcctgaacyctggttagtccttggttaagaataccttcatccatttgggtctgtttgtttctttgtattttaaccctggaaagacttcctggtttcagatagtctttctggtttcatagtccatctgcccttccccaaaataacaaagagatgtcttatcttgcttcctcctggtcttcacctatctctaaaacaccttcactctctagatcccaggttttcctaggctg

SEQ ID NO: 515206 - DNA, 526 bp, Homo sapiens
tatacttaatttttttcttagtaaattgaaggtgtcacatacatgatggccctttactccaaacatcagtgcatatttcctaagaatgtagatattctcttacttagccccagcagttatatatatatatatttcatatatatatataactactatataacatatatatataaatatgtatgttaattttactttaagttctggggtacatgtgcagaacgtgcaggtttgttgcatagctatacgtgtgccatgatggtttgctccacctattaacccatcaactargttccctcccctggccccccaccccccaacaggcactggtgtgttgttcccctccctgtgtccatgtgttctcactgttcaactcccacttatgagtgagaacatcatattttgggtaccattataaactgtaagtcacgcctgataatctcatgtctgaatacccaaatatgtgatgtttggttttctgttcctgtgttagtttgctgaggatgatggcttccagcttctccatgtt

SEQ ID NO: 515207 - DNA, 526 bp, Homo sapiens
tatacttaatttttttcttagtaaattgaaggtgtcacatacatgatggccctttactccaaacatcagtgcatatttcctaagaatgtagatattctcttacttagccccagcagttatatatatatatatttcatatatatatataactactatataacatatatatataaatatgtatgttaattttactttaagttctggggtacatgtgcagaacgtgcaggtttgttgcatagctatacgtgtgccatgatggtttgctccacctattaacccatcaactaggttccctcccctggccccccaccccccaacaggcactggtgtgttgttcccctccctgtgtccatgtgttctcaytgttcaactcccacttatgagtgagaacatcatattttgggtaccattataaactgtaagtcacgcctgataatctcatgtctgaatacccaaatatgtgatgtttggttttctgttcctgtgttagtttgctgaggatgatggcttccagcttctccatgtt

SEQ ID NO: 515208 - DNA, 462 bp, Homo sapiens
gctgtttccttacctttccagatcctagagctgcatttcttgccttttttggctcctggtctcttccccatcttcatagccgagcaccaagaggagggggatattcttagggttctccctgatcttctctgtggcacccattgggatttttgggggaagagcctgcaagagggtgcaaacgcctttaccgctgtctacccaggggctcacggtctcaggctggcctgcgcctgtcccttagcaatgtgttgcacacttataaggtgaccggcttgggytctgtttctctctgcagatgctctcagtccccaggtttcaggttggatggttgtcctgggacctcagttccctaatggggtcaagggaagcctattatttgcagtttgctcctctgcccccctttttaagaatatgagtgactctctttggcactctacttctctgaactaacactgtttccac

SEQ ID NO: 515209 - DNA, 639 bp, Homo sapiens
aagtataattcatggaagccacatccaacaagatgctctaaggtcaaataagtctgggaagcttgcacactctttctaggaaaattgagatacatattagtacattaaagcctctgtgaagacctgcagtaaagaaatctgtttaacactctttattctagagaatttaatcacaaataggtgtttcattaaggaaacacctattcttatgccttgaaccactctgagaaagccttgttgaaccaagagccagtgaatgcratcacaggcatcaatgactagagtttgaaggggtcatagattactcagacatggtaaccacagttctcaccaaaagtggaccttaacttgccaagcaagtccaagtgaatatttttcaaatgggttatgttttataaagctagaataacattttcatcatatagcatgttaccttttgttatttcaagccagccacagagccaatatcatatccatctataaccatagtaactctagtacctttatgttaaaatctgaaatgcaaaatgttataacattccaactgagattatcacagcatcatagggcaaggaggataaaggcaagggaactagcttcagccctcctgagatcacttctaggctccaccagtcccca

SEQ ID NO: 515210 - DNA, 639 bp, Homo sapiens
aagtataattcatggaagccacatccaacaagatgctctaaggtcaaataagtctgggaagcttgcacactctttctaggaaaattgagatacatattagtacattaaagcctctgtgaagacctgcagtaaagaaatctgtttaacactctttattctagagaatttaatcacaaataggtgtttcattaaggaaacacctattcttatgccttgaaccactctgagaaagccttgttgaaccaagagccagtgaatgcaatcacaggcatcaatgactagagtttgaaggggtcatagrttactcagacatggtaaccacagttctcaccaaaagtggaccttaacttgccaagcaagtccaagtgaatatttttcaaatgggttatgttttataaagctagaataacattttcatcatatagcatgttaccttttgttatttcaagccagccacagagccaatatcatatccatctataaccatagtaactctagtacctttatgttaaaatctgaaatgcaaaatgttataacattccaactgagattatcacagcatcatagggcaaggaggataaaggcaagggaactagcttcagccctcctgagatcacttctaggctccaccagtcccca

SEQ ID NO: 515211 - DNA, 624 bp, Homo sapiens
agcactgtctcccttctctgttgcctccccctccccttggtcttgcatcttatccctctcaccttccagaaaagtctcaaggtcacttcttgcttattcaatctctgtctttactgggatttataaacacacccaagtctctcctgttttctaaacccctcctcgactgcattttcctccactcattgtcctgccatcctctttctcaccgcaggtcaactttaaaaagtgagctgcattcagggcttccattgcctgcccttcctcactctacactcacctcccccctccaagctattctctacgcagtagccacagtgcactttagaggcacagatcttaccaggtcatctctgtgaaacctttaagggcttcacatkgctgttgggataaagatccaaacactgatgtggtcaccatgaactgcatggcctgtgtccccaggtcacctcaccagagctgcttttcctctctgcagccctgccacgctgcctctcatttaggccttcagatacaccttttctcccaggactggtctctgtgcaagctgcttcctgtgccttgtatgttctcccaaaacaacactcttggctgatatttcactgcttaggtccgccttccctg

SEQ ID NO: 515212 - DNA, 490 bp, Homo sapiens
atacggagtgatttctggtactgcaaaagccgaagagaaaaagtggagtaattttagatctgggaggactctgtcctcttgagattccctgaggaaaaacagaagttcctccccaaaagaggaatccaccacatctttttctgttttccttaaggaatttcagtctgttagaaaaaaaattttcttgtcccctcatgtggcaccgatggtggcaagatgcaacaggggctgacagaaggaaaaggagaaacaggcagagggagcacatatgtgactgccatgggtgcaaggagagagaaatttagccaatggagaaattcttacaaagacagaacagaggacttaaagactcttatgcatacacacatgtgcacamgtgtatgcgcacacacacacaacgtacatataacctaaatagcagtttcaattaagttgacttttgactatccagctctttaaaaatcctttcaaacttattagagaattttaa

SEQ ID NO: 515213 - DNA, 603 bp, Homo sapiens
ctgtttagccagacgctggccccgtctgcagccatcacaggccctctgtctctctgctggtcatgtcatgctctcctcaaggtgccgtcctgctgttcatattgtttcattctttcccaccaggaagcatctggacgaacagtcctgccacgctctttgaagttcccgacacatggtaaccaagacctgagggcagcaaaccgctggtgctgtctctgtgagcaagagccgggtggcacatttggaagccatactgtatttaacttaatcaaatgtggtatgggaggggttggaaaccaagttgtctcctggggggaagaaaagacaggttttatttttgtggctgtgtttttttccctttttaatctaactgcctgttgatgttgacactcatcagggttgtaggctgtcatgaatgtgtaygtgcttaaccagtgaattccatgttgctcgtgtgaggcctttcctgtcatgacccactgtgcttaagaacctgcctgatggggagtgtcggctgtgaaatctgcaaaaagagctgacgttccggctgccgtgatcatgaattggggggtgtactctcctgcctgtgcatcttctcgcgct

SEQ ID NO: 515214 - DNA, 603 bp, Homo sapiens
ctgtttagccagacgctggccccgtctgcagccatcacaggccctctgtctctctgctggtcatgtcatgctctcctcaaggtgccgtcctgctgttcatattgtttcattctttcccaccaggaagcatctggacgaacagtcctgccacgctctttgaagttcccgacacatggtaaccaagacctgagggcagcaaaccgctggtgctgtctctgtgagcaagagccgggtggcacatttggaagccatactgtatttaacttaatcaaatgtggtatgggaggggttggaaaccaagttgtctcctggggggaagaaaagacaggttttatttttgtggctgtgtttttttccctttttaatctaactgcctgttgatgttgacactcatcagggttgtaggctgtcatgaatgtgtacgtgcttaaccagtgaattccatgttgctcgtgtgaggcctttcctgtcatgacccactgtgcttaagaacctgcctgatggggagtgtcggctgtgaaatctgcaaaaagagctgacgttccggctkccgtgatcatgaattggggggtgtactctcctgcctgtgcatcttctcgcgct

SEQ ID NO: 515215 - DNA, 586 bp, Homo sapiens
ccataaaacaaaacaagactaaatgagaaagaccaagaagaaaaacaatagaaacatacatagatatcagagtcctcaggtagaaactttttttttttttttgagatggaatctcgctctgtcatccaggctggaatgcggtggtgtgatcttggctcactgcagcctcctgagtagctgtgattacaggcgtgcacaaccacgcccggctaacttgtatttttagtagagacggggtttcatcatgttggccaggctggtcttgaactcctgacctcaggtgatccaccccctctaggtctcccaaagtgctgcggttgtaggtttcggccacaaggcctggctagtattttaccacaatttaaagtaaattttcttttctttttttttttttttttcaagtttgtgctcaaactatattcacacagtgacatggcggtttatgcttytgtaggccttgttgacagtgccaacttttaaatattgatgatcttcatctttctcttgtctcctcggtagaaaaatgggatgcaggaggtactgcctaatcctgggcactgctgggcgttcttcatcccacaaaaca

SEQ ID NO: 515216 - DNA, 447 bp, Homo sapiens
tgcagtgggtggctgctgattgcttctctctgtccagaacaatgagaacaagagcgtactacagttggagcagcaagtaaaggagctgcaggagaagctaggcaaggtgaaggagacggtaacctccaccccatccaagaaggtctgggaggtgggtgggcaccagcctctggggaggggaggtgccaggccagmggtagctccagcccaggggcaggtgaccccagcaccctccagggcagtcctgtggctgtttcttgcttcctgccctctgattttagaggtgggtagccctgggctcctcccaggtctggacatcatcattccagctagagacatggagcccccccaatcacaggggaagagacagagtggtataacagtcttcttatgccagatgcggtggcttacgcctatagtgccaacactttgggaggctgaggcagg

SEQ ID NO: 515217 - DNA, 494 bp, Homo sapiens
gattaatactttaaaaaaatcttaggactttcattaatttttttttctgcccaaaacattcwttttcactgaaaggctttggtctcaatctattctgaaaaactggggtttctttgtatgtgaactgattcaggagttcgcattcttccagggtgacataaatcctgcacccttggggaagggcaataatatagattgcattcttgccttcggtaggtggacacattatcctgggaccccagggagcactttctagacttttctcccagttatatccacgagggacaggctcgtgactgcaaggacttcagctccctgccaagccaaagacacaagagcaggggccccctaaagcctaaagggaaaccagaaggtttccctttatgacgctcattcactcaaaaagcaccgcatgtcccataaacctgacctcaactcctctcagggagaaaaaactgggttgaactagtgcacatttatttttttctatagga

SEQ ID NO: 515218 - DNA, 494 bp, Homo sapiens
gattaatactttaaaaaaatcttaggactttcattaatttttttttctgcccaaaacattcattttcactgaaaggctttggtctcaatctattctgaaaaactggggtttctttgtatgtgaactgattcaggagttcgcattcttcyagggtgacataaatcctgcacccttggggaagggcaataatatagattgcattcttgccttcggtaggtggacacattatcctgggaccccagggagcactttctagacttttctcccagttatatccacgagggacaggctcgtgactgcaaggacttcagctccctgccaagccaaagacacaagagcaggggccccctaaagcctaaagggaaaccagaaggtttccctttatgacgctcattcactcaaaaagcaccgcatgtcccataaacctgacctcaactcctctcagggagaaaaaactgggttgaactagtgcacatttatttttttctatagga

SEQ ID NO: 515219 - DNA, 611 bp, Homo sapiens
ctgccttatgccttttgcaggttagaatcttagaattgagaaataataattgyttaattttaataagtttctactaaatcctttacatacgttttctccttttatcctactacaacccaatgtaagagtagcattatcaccattttacagatgagaaaactgagatgctggaggctaaataacttgctgaaggttttaccgctaaaatgtagtaagactaagattagaaggcagtccatctggtcccagaaccgtaagttttaactcctgtggctaggttcttactattagccgcagatttatttcacatctgaactttcacatattatatgtgggcaaattgccaggaacctaagcttgatttgttggtacaacatcttccattccaaaatgcccgtagccagccctcctgaatccctcggcctatggggctaaaaagctggtttttttctatggccattcaactattttacattttgtcaacttgtcaaggtatcatacgctattcgtccatagatctccttaatgtccatatcacaccctgtggacttgcagaggttgcacattgaaatatgacttaccctggtaatccacatcttaatttcttaata

SEQ ID NO: 515220 - DNA, 611 bp, Homo sapiens
ctgccttatgccttttgcaggttagaatcttagaattgagaaataataattgcttaattttaataagtttctactaaatcctttacatacgttttctccttttatcctactacaacccaatgtaagagtagcattatcaccattttacagatgagaaaactgagatgctggaggctaaataacttgctgaaggttttaccgctaaaatgtagtaagactaagattagaaggcagtccatctggtcccagaaccgtaagttttaactcctgtggctaggttcttactattagccgcagatttatttcacatctgaactttcacatattatatgtgggcaaattgccaggaacctaagcttgatttgttggtacaacatcttcyattccaaaatgcccgtagccagccctcctgaatccctcggcctatggggctaaaaagctggtttttttctatggccattcaactattttacattttgtcaacttgtcaaggtatcatacgctattcgtccatagatctccttaatgtccatatcacaccctgtggacttgcagaggttgcacattgaaatatgacttaccctggtaatccacatcttaatttcttaata

SEQ ID NO: 515221 - DNA, 497 bp, Homo sapiens
ctttgccacctcacgactcttgtacatcgcacacctcattaagggaggaccctgaatggaatgctgatgaaatattacttgagtgtcaacagtatggaggtgctcagaaaatggctcagagactattgccaaaatacacccttgacacacatcctctcattttattctcaaaacaatatggatgggtggggtggggagagaataaggycttatctcaattttgtaaacaaagagaatgagaccatagagtctaaggggctggcccaccccagggccaatacacagactcagatctgctagggacactcccagtttggaatatcattatctttccatggaaagatattatcatggaaagataatgatattccaaatgtgctgacttccttgttggagttatttagaacataatcactataactaatgaacaaagaaaacatgtttgtcatcagccaacatttattgattacctattatgtacagtacattttaccaga

SEQ ID NO: 515222 - DNA, 472 bp, Homo sapiens
aattaaaaaaaaaaatcctatccatctggtgaggggtcataattatttttaaaaaaagtcttcgcgagatttgatgagcttcccgattggtgaacataytgaggtgctgagacggtggtgcacccaaagaaggcctagaagcttcatgcatattctgcatattcctcgcccctgccctagtcctgctgcaaccttacactgtgtacctgttccatgtcgctgctcctgagttgtatcctttataataaaccagagttattatgtttccttgagttctgtgagtcattctagcaaattatcaaacatgaagaggggttgtaggatttatagttgcttagtcagtttgaggcctagacttatgattggcctctgaagtaggaggagtctgatgtaactaaacactttaactcttgcgatctgatgttaactttaggtagataaatcttagaattgaattaaattgtagaaccgt

SEQ ID NO: 515223 - DNA, 594 bp, Homo sapiens
ttactgcaaaagacatgattctgttcttttttatggctgtgtaatattccacattgcatatatacagkgtcagcatttctatcctccatccatatctaacaagaatccagagtagcacccatgcagaaggtgaaattcttaaaaattacatgagcagttgtgagttggttcctgaaacccttattctaagaagatgggttaagggcccttctaatgctgttttcttatcagtgtcaaggcatcctgctgtaaggctgccaggagaaaaagcctcctccttctttcccttttgccttccgccatgggatgacacagcattcctcccctccagaggatgcagcctccaccagagaactgagcctgctggtgtgttgatcttggactccccatcctccagaacggtgaaaaataaatttctgctctttataaatttccccatctcagatattctgatgaatggactaagacattcactcaggcctgcagaagacagtcaagcccctactaaccacacttaattgtggagaaaacccatcagcctgaggtcctgcaaggaatcgccctcccattcctggcctccaggtggtgcccttc

SEQ ID NO: 515224 - DNA, 594 bp, Homo sapiens
ttactgcaaaagacatgattctgttcttttttatggctgtgtaatattccacattgcatatatacagggtcagcatttctatcctccatccatatctaacaagaatccagagtagcacccatgcagaaggtgaaattcttaaaaattacatgagcagttgtgagttggttcctgaaacccttattctaagaagatgggtyaagggcccttctaatgctgttttcttatcagtgtcaaggcatcctgctgtaaggctgccaggagaaaaagcctcctccttctttcccttttgccttccgccatgggatgacacagcattcctcccctccagaggatgcagcctccaccagagaactgagcctgctggtgtgttgatcttggactccccatcctccagaacggtgaaaaataaatttctgctctttataaatttccccatctcagatattctgatgaatggactaagacattcactcaggcctgcagaagacagtcaagcccctactaaccacacttaattgtggagaaaacccatcagcctgaggtcctgcaaggaatcgccctcccattcctggcctccaggtggtgcccttc

SEQ ID NO: 515225 - DNA, 493 bp, Homo sapiens
tgtgtgtcctgtgcagacaaagccactcaccctcctcctgcctttatggaaggaaggtcgtaggcaatgttactttgtttttggcaaacccccaaaagaagaaaccactccacatagtctgagaggtagtatagtaagtgttgtgcgtagagacctcattaatggccaacacctgttttatttgcaactcacaatctttctagttaagaagagttcagagcctgacctgcacactatattgggagataaaacaatgagatgctcattctcaatgtgcctggctttatggagtagcttcattcctacaagtgtattctgtagatcaatatcaatccccggtgcctattgactttacagcacagttcyagtattgctttatctttacagagcaaatttttattatcagaggcttctaatcctttagctttaaatgtctctattcctgcacttcagcttttctgaaatttttccaaagaaaaacattttatgagaa

SEQ ID NO: 515226 - DNA, 588 bp, Homo sapiens
cttaaatagcattccccttgaacttgtaaggtatactggaagagactatcagaagaatcttttccatagctttctctcaattattttatctaggttttataaaagcatagtgcacacctggtaagatagcttttatcaatcacaacagaaaatttaaagtgtgatttatatttttaaaacatttcatccacaagtgcttttttccctatccagaaagaatgtcaacatctttacaagtatattatctcccaattttctaatcaaaacaatccagactgggagacagtaggagctgtttaaaacaatgaatatcactgtaatgygtttttagttggatcatttgctagatgcagaaaacaaaacaaaacaaaaggtcatttcagtgaaatctgaactcatgtaatagacatgcatctttatattccacacactttgttaatcattgactgaacaacatcgtgcctggagccaactgacaagaattttaacctgattaaatgtcccagtatgccttaatacctttaaatggaatttttatggcctgttctgcacgcatattattaatacagtgccatcaagaaaaccaca

SEQ ID NO: 515227 - DNA, 588 bp, Homo sapiens
cttaaatagcattccccttgaacttgtaaggtatactggaagagactatcagaagaatcttttccatagctttctctcaattattttatctaggttttataaaagcatagtgcacacctggtaagatagcttttatcaatcacaacagaaaatttaaagtgtgatttatatttttaaaacatttcatccacaagtgcttttttccctatccagaaagaatgtcaacatctttacaagtatattatctcccaattttctaatcaaaacaatccagactgggagacagtaggagctgtttaaaacaatgaatatcactgtaatgtrtttttagttggatcatttgctagatgcagaaaacaaaacaaaacaaaaggtcatttcagtgaaatctgaactcatgtaatagacatgcatctttatattccacacactttgttaatcattgactgaacaacatcgtgcctggagccaactgacaagaattttaacctgattaaatgtcccagtatgccttaatacctttaaatggaatttttatggcctgttctgcacgcatattattaatacagtgccatcaagaaaaccaca

SEQ ID NO: 515228 - DNA, 514 bp, Homo sapiens
ttcaagtcacttcttatgccatacttactttgctttcaaattttataaatatttggtagcatattaaatatcacaaaaaggactggtgacagcctcacctatcagttttaagttctatcctgaaataagaccactgcatgaaatgttaggaacagagaggttttgttgatatcttcaaataccccgcatgaaggaaacacagtaaactgtctctgggactattaaaagggtataggcagtattgatggcaaaccagtggctcaaatggatctgaaaaccaggttagggaaaagcagttgagcatcactaaaagtgcaataggacaatggatatattgacaagagccactgtgggttggtgccaataattaaagtctgtgtgggctgactatttttcagggatgccaccataaaatgagtgtggactattttttcatgaaatatygcaatgccataaaagccacaggaatacaggttctacaacagaaataaaaaaagttgaggaggaaaaatct

SEQ ID NO: 515229 - DNA, 602 bp, Homo sapiens
gcaagagactattgagaacttgagaatgtctactgcagagtcagaattacattttaattttaattaatttaaatttaatacaaataactatatgtgactagtggctatcttattggacagaacagatttaatacttagacctccctagaaagtatattaagatttgtatttgtattgatttgtaaatctattacattgtttgccagaggcaattacttgccacctgtgttctaaccaagcttgcccatatttcacatgttgastttgttcattttaactgtcaattggcctaattttcccatttctagcattttaatttctccagagcttgcatactacattgaacaccaattcagtgacctggaacaattccactcgcatttgttccttttagaccatttcactgggagtatgtttccaatccacttatatatagattctcatcctcttcccaaagtgttactgtgaatccacttcccagcccaggaccacggtattacatttaacctgttctaaactctagtcccatatagaaactctttatatattgattggtttcagacacctttttagatagagaatatgggttatagtttgttctt

SEQ ID NO: 515230 - DNA, 602 bp, Homo sapiens
gcaagagactattgagaacttgagaatgtctactgcagagtcagaattacattttaattttaattaatttaaatttaatacaaataactatatgtgactagtggctatcttattggacagaacagatttaatacttagacctccctagaaagtatattaagatttgtatttgtattgatttgtaaatctattacattgtttgccagaggcaattacttgccacctgtgttctaaccaagcttgcccatatttcacatgttgagtttgttcattttaactgtcaattggcctaattttcccatttctagcattttaatttctccagagcttkcatactacattgaacaccaattcagtgacctggaacaattccactcgcatttgttccttttagaccatttcactgggagtatgtttccaatccacttatatatagattctcatcctcttcccaaagtgttactgtgaatccacttcccagcccaggaccacggtattacatttaacctgttctaaactctagtcccatatagaaactctttatatattgattggtttcagacacctttttagatagagaatatgggttatagtttgttctt

SEQ ID NO: 515231 - DNA, 621 bp, Homo sapiens
aatctattcaattctcaaatgagtctttaagaatcattttaaytttaaaactacagtctggagaggatcagttattatctcaaggtcattcagatggtaagggtggagttggtactcaaacctcaaatctcaggcgtcccactctcaaactgccacttcctctttatccttgaaactattatatttttatcctattccttgcaaccaaagctgagtatactgcaaatagccacccaattgccatattcaatagcctcttttcaaagatagtattacttaactcctctataggtttcaaacagtactggattcttttttatatattaatacatggtttattgatcattatttttaagaggtaatattttgtttgacaaaaattattgtcatttcccactttgtgttatttatagttctaatgattgaatttttagatcagattttaaaagatcaattacaagaagcttgaggtagtttggggcatttcacattttaaaaatctctaaaggtttaaaggaagtacagttttgcaccacataatgacattttgcccaatgacagaccgcatatacgatgatggtcccataagattataatggagctgaaaaattgctattgcct

SEQ ID NO: 515232 - DNA, 621 bp, Homo sapiens
aatctattcaattctcaaatgagtctttaagaatcattttaactttaaaactacagtctggagaggatcagttattatctcaaggtcattcagatggtaagggtggagttggtactcaaacctcaaatctcaggcrtcccactctcaaactgccacttcctctttatccttgaaactattatatttttatcctattccttgcaaccaaagctgagtatactgcaaatagccacccaattgccatattcaatagcctcttttcaaagatagtattacttaactcctctataggtttcaaacagtactggattcttttttatatattaatacatggtttattgatcattatttttaagaggtaatattttgtttgacaaaaattattgtcatttcccactttgtgttatttatagttctaatgattgaatttttagatcagattttaaaagatcaattacaagaagcttgaggtagtttggggcatttcacattttaaaaatctctaaaggtttaaaggaagtacagttttgcaccacataatgacattttgcccaatgacagaccgcatatacgatgatggtcccataagattataatggagctgaaaaattgctattgcct

SEQ ID NO: 515233 - DNA, 585 bp, Homo sapiens
aggaaccatgacatctgaattatctgagaaacttgtagtgctgaaatttataccatatgggattggtcatacattgtgtcttctctcaaggatttatcacttttgaaaaatacattccattccttttcagtctttgtactgtctcattggtgtctccaaacaaggtctatcctgagagagatttttttgtgcagagaatagcactgattctctctctctctctctctctctctctctcwcacttactcactttctctgtctctctgtgtgtgctaaaaatgtgtgcggttatatgaaaataatttaaattgtgaaggttagaatgaggtgctgcattttatagcataacctttaaaaataataattatttgaagtctgtttccagagttataatggtttgagccacactgttttctaaatactcaaatttggtatgcagctttatgacaggaagttggctttcagagcaggaatgtatgtaaacaaagaaatgtggctcacaggaaggtttagctaaatcaaatcccgaaggctgcctccattctgagcttctttctgtatcttgattatttgcagatgctttac

SEQ ID NO: 515234 - DNA, 610 bp, Homo sapiens
ggttatggtcactgtgggaactataatttcagattcacaatatacatttaacagctcaacatttatactgctttgaggtaaggttttctacataattatcttatattttttgtttcatttaatgaaaatggttacacttttaaaacaaactatgttctatacagatgaggatacattttttctrtgtatattttggccatttgttttataatgaatctgggcagaatcctcactaattgcatgaaggtgttctgagaccttagttgacttcccatttcctattgatttgccatcatcaagaaagtgacttagctgctcttagaaaacatactgtcattaaaattaatgatgacgttgcccacttttaaaataacaagaaaatatatttcaggtttttaaaaatagataattgttagagaattatgaatccagagccagattcagacacaaaaaattggtggtagaatttatttaaagataaatatccattatttatcattttcctgcttcctgcctcctgtccctagtctctctaattccatactcttctcatatacttatttctcatctaaggtaagaatggttaattactttttaaaacattattttt

SEQ ID NO: 515235 - DNA, 641 bp, Homo sapiens
atgatttaccaaaaaaaaacataactcttagttttcttcttgaatgtccattctgtttcacagatgttgaaaccagaaagtggctatgtttccaatgctaataaaaatatgtgataaattgaaggttagtatgaatatttttcartaggcagtatataaaatgcatggtgctaatcagaaggatagcttttgacatgctgtttcttccatcaaattatgggtgtgagaatctggagacattgcccgatgtaataaaaaacaagagtcaatttatggtcaggtctaaaaattcattattttaaaatcttctgaagtttttacagtttgctggtaattaaacacatcaaggcactatgtatgtatctcctaatagatttgtaataaaaggcattgcaataactattcaaattcatcatcgatgttagaatagccaaagccaaactttactattaagcataagacacaagaaataatgttgcatattattcccaggatattaatttatttctatttaacaaaataaaatatgtagctatatttatcaagtattctgtaaggtactgatatattgtttgtgtttttaaaatactgtctttccccagttttagcgcctttgctagaagtccaccagcttcattttg

SEQ ID NO: 515236 - DNA, 631 bp, Homo sapiens
tgttggaccgttaccgccatctgatagctctcactgtctcttccagctcctcctctggctctctcccatttttttcttcacgggtgttttctccaataaatcctttcttttattcaacctctaaccccaccttagtgtctgcttcttaaaggacttaaactaacatgtacccccatcatagcctttcaccttccacttgtttaccaaacctaycccagctactccggctgaaactggcccagttgtcctattgacatttatggtttctttttaataagcatagaaattgactgtcccagtcttaaaacttgagaaagttacttttgtcttgtctgagttcttttctcaggaaaccaaccaacaggctttccagatagtatctaggaactgaatttaccagatcactgtgtctagacaatgagacattagaccgagccctcacccttcacgattgcctaaccgaccacctgctacacccatcttctttatctctctccaattcctgtcttgccatacattgctacatttcttccttgctatataaactcctaattttagttggctgaagagatgggtttgagactgatctctcatctcctcatctgcccaactaaagcctcttctcgggcaa

SEQ ID NO: 515237 - DNA, 506 bp, Homo sapiens
atcttctaatgctcctcttgaatgtgtttaatacatccataagttatttgaaagagagataaattctgtcctctacatctcatggtactctgtgcagtgttgtgcaaactcttcatcagttaatcatcattaagtccccttttgttgaagacttattttatgtcagtcactgtgctaagcacttcaactgtattacatcatttaattctcatgacactcttttgrgggatgtggtgtgccccgaaaccagcttgcctccacttaagagaactgattggatacgtctcttcccatctcctttttcagagattccatgtttttagcttgaaatgggtcatggtccaagcagttacactatagaaattggaaaaatactgaaaaataggggactgtttgtttgttttgattagctgcattattagcactactggagatacgtatcattacctccattttcagatgagctatatgagttcaaaaaagctaaggaacggcccaaatgcact

SEQ ID NO: 515238 - DNA, 513 bp, Homo sapiens
tgcaaaaaaatacatagtattcctaggatgttctcaaaatgctagtactagctggtaatacagaagtgcccaagagtttcacaaagcataagggaaggtgagtggataatgatcaaatgaaggttctatgttatgttattgggggaaaaaataaagaagaagagtaagaagaaggagaaggaggaggaggaggtagaggaggagaaggagaaggaggagaaagaggaggaaaaacaaaactctggagtttgagctgcttcaaatatggcagagctggccaggagtggtggcttacgcctgtgatccaggcactttgggaggctgaggtggcagatcacctgagttcaggagtttgagaccagcctgggcaacaaggcaaaaccacatctctacaaaaaataaaattaaaaaattagcccgtcstggtagtgtgtgcctgtgaacctagctacttgggaggctgaggtcagaggatcacttgagcctggaagaggaggttgcagtgagccaaga

SEQ ID NO: 515239 - DNA, 617 bp, Homo sapiens
tagcatgaggagctctctgcaaatctcagggttctctttcttctctcttgtactctgtcttgtaaatgctagtggccttgttcttcctgaactatcagctctgtcccttcctggcagagtctgccaggctgcaaccagtattctcctcactgagtctggaaacactctcaaggcagtaaattaggttgattggaagactcctccccaaacccccaaaacaccatattgtttctcctcttycaaagaatattgggtttttgctatttgatattcagtatcttgaaaatcattgccaatttgtttgttctgtgtttcttattttaaggaggatgtaaatgtggtctatattatttcattttgccttgaagtggaagtctcaattttgccttgatttgaagagagcaagcaccaacctaatatatttgcacagaaaaatcctttactctagctttgtaaaacttcagcttttatcttaagtgaaatcaagaagtgttatagaattttgagcaaagaaataacatgacaacatgttgattttaagaggaaaaaattaaggaataagtccatttatctctgcagcctctgcacagaatgtgctcagtaatgttttttgataa

SEQ ID NO: 515240 - DNA, 518 bp, Homo sapiens
tagcatgaggagctctctgcaaatctcagggttctctttcttctctcttgtactctgtcttgtaaatgctagtggccttgttcttcctgaactatcagctctgtcccttcctggcagagtctgccaggctgcaaccagtattctcctcactgagtctggaaacactctcaaggcagtaaattaggttgattggaagactcctccccaaacccccaaaacaccatattgtttctcctctttcaaagaatattgggtttttgctatttgatattcagtatyttgaaaatcattgccaatttgtttgttctgtgtttcttattttaaggaggatgtaaatgtggtctatattatttcattttgccttgaagtggaagtctcaattttgccttgatttgaagagagcaagcaccaacctaatatatttgcacagaaaaatcctttactctagctttgtaaaacttcagcttttatcttaagtgaaatcaagaagtgttatagaattttgagcaaagaaataa

SEQ ID NO: 515241 - DNA, 533 bp, Homo sapiens
ctgccttagtccattcaggctggtataacaaaataccgtaaactgaaaatagcttataagcaacagagatttactcgtcatagttctggaggctggaaagtccaasatcaaagtactagcagatttgatgtcagtaaaggcctgcttcctgcttcatagatggcaccttctagatgtttcctcacatggtagaagaagcaagctagttctctggtgtcttttataaggccactaatccattataaaatgtaaaagtgaaaaaaatcatctctgaatggccctacctgctaatacactgatgatcagtatactgatgattagattttgatatatgaattttgaggggacacaaacattcagattgtagcaccaatttaaagttcttaatgtttgaacatgaacttaaaacacatttcaggtttttaatttaaatcacaaatctagaaagaaatagattttaaatttctctaagtgctcagccctaacatgaaatgtattattagctatcagtaagtgataaataataatatttt

SEQ ID NO: 515242 - DNA, 609 bp, Homo sapiens
taataatgtcagtcacgaacactcctagaatccagaagaatgagtgaatggcacattacgacatctactactggctatgcttacactattcacatctgcttgyttcgcataatacttgtttttctttcacccctgttgaccaggattttttccccacataatatattttagaagcagctactccaaaattacattgggcctcatttcctgggagaagcttacacatgggaagttagtgggataagataaaatctccactactacaactgatgtccaggctgaaactgatcctcataatcctcctccttcaccatacactttagtttctcctttcccttggttaacacctctgcttgattaacatcatatactttagattctgctttcccttggttaacatttcccttggtgaacacttctagcttttctagtaatgtgacccagaacctcatccttgagggtataagctccttgtcactacacccttaccaggccatctaaatagagcagggacatgccaagaaatgcaaatgtattacttgagtgcctacatattcagccctgtccccattgtgtaacagcagctctatctcctcctgatgatcagtg

SEQ ID NO: 515243 - DNA, 375 bp, Homo sapiens
ttaagctttgtattaaaatttgcattaaaataaatctaatgaatagattttttgcacatgttgttaacatcaaattttatttttaagtatggaaaaacaatcatcctaacrctatgtatttgatagcctatcctatttctgctacttttaatattacctctgccttttcttgtttctatgtttatatacatctgtttctaggctgtatattcttatttcattggtctataatatgaatgtcattttgtataaattactatgactttataaatgtctcaatctctttgactctataaatatctcaatctctaaggcaattaagaagaagcacaaaggagatatttcatgcttcttaattgtcttaattattcttaa

SEQ ID NO: 515244 - DNA, 585 bp, Homo sapiens
atccacggagtgagaggcacagatgctgagcctccaaggctggtcagaagggaaggggaaggggaaaccctgggtcagcagatcagctcaggagggatgcaccacagagggaataacgacgagctgcaaaccaagatcagaagctgttacaaacccactccatttcagctctgagtgccatcaattgcactatgcagagacctacagggaagaaggtgggcrgtctaaaaccagtacacatccttgcttttgtcctgaggctgcaaacctgaaaatagagagaagataaaagagagaggaggtggagagggagggaaagagagggagagggagagagagaagaagaaggagaaggagaaggaggagaacaaagaagaagaggaggaggaggaagacaaagggagggagaaagaaggaatgggggagggaaggcacaagatatttaaggaaagaaggacaaaacaccactgttttattgtgaaagtcacagacttcacctaaagttgggggcggggtggggaggggggcggtgactgaaagtaaaagcaaagcaaaccgaaaagtcaaatcacttgaggaaagggg

SEQ ID NO: 515245 - DNA, 276 bp, Homo sapiens
ggaggcacagcagaccttggcgyacaggccatgcgccgcaagcgcgggggcgcgcactccttcccaaagtccccagaggagacacgtacctggtggtagggggtgtaggcggctgcgaagtagggctgcggaggaccatagacttggtacataacatccagacagctcatgactctccgcagcggagacggttaagtgttttttcattaactctccttccccggagctcaggggtgctgcatgggcggcgcttggacccgcgctctggagtcatca

SEQ ID NO: 515246 - DNA, 519 bp, Homo sapiens
ctgcgtgtaaggaatgcattctttgcacggtggtgaaactactgttggtacacaacagccttttctggtggtaagccagcttccttctaagtaagtgtggttagagggtcatgctctcttcatgaaactaaattcttaggattgtattcagggttgcctttmttttcttccggctgtgctgctcttctttcttggtcttggtttctttctgcattccctgaagggtgtggaaggcatgcccacgtttgcccctctgcttccctcactttccactagggactcaccgcatgactcagagcctggctggacacagcaggtgcagacagccttccctttctcagaccatgcttctgtagtggccacatgcctgtgcctcacaggcagcacactcaacttgagggcagagtcactgaagctgttctgctagtggatctgctgttaaggaaactgtggatcgccaacagaaaaatagtagggcgcaagctcccccagtgggcaaacagaagcttgcaaaagaga

SEQ ID NO: 515247 - DNA, 630 bp, Homo sapiens
tgcgtgtaaggaatgcattctttgcacggtggtgaaactactgttggtacacaacagccttttctggtggtaagccagcttccttctaagtaagtgtggttagagggtcatgctctcttcatgaaactaaattcttaggattgtattcagggttgcctttcttttcttccggctgtgctgctcttctttcttggtcttggtttctttctgcattccctgaagggtgtggaaggcatgcccacgtttgcccctctgcttccctcactttccactagggactcaccgcatgactcagagcctggctggacacagcaggtgcagacagccttccctttctcagaccatgcttctgtagtggccacatgcctgtgcctcacaggcagcacactcaacttgagggcagagtcactgaagctgttctgctagtggatctgctgttaaggaaactgtggatcgccaacagaaaaayagtagggcgcaagctcccccagtgggcaaacagaagcttgcaaaagagaacagagacaggggaatgggtactgtaacgtcagggaatgtcagaaaatgccaatgagtaagcaagcagaactagatgttaaaagacatcacatcaactcgggtttaaatatt

SEQ ID NO: 515248 - DNA, 544 bp, Homo sapiens
atgggtttaaaattcagtgtatatygatcaacgactgcttccttaaatcatcttcctacactgattttgcaagttttcatatttacagcacaggtaataagaaatagttatgcaatggtttataggttttaaaacattagaatacatttcaaatataaggccccttaggctactctgtatagccattcttaaatgcccttattttgattacttttcctatgttttgactaaaatattatttgatttaaaagaattcaatccagtttgattactttcatagtgatcatatttaaaaaaatttaccctcaaatgttgagcatttctatttggcagacgctatactaacagctttcagctttacatgaaataagtcatggaattcttacaaccactttacaagattagtatatttgtatatttgcatatagggtaaccctcagaataaccccataagattctcacatgtactatcccacacattcccatgaaaaagactaaaatatgaagtggtggggagtcctgcacagggcccaggagggcacag

SEQ ID NO: 515249 - DNA, 544 bp, Homo sapiens
atgggtttaaaattcagtgtatatcgatcaacgactgcttccttaaatcatcttcctacactgattttgcaagttttcatatttacagcacaggtaataagaaatagttatgcaatggtttataggttttaaaacattagaatacatttcaaatataaggccccttaggctactctgtatagccattcttaaatgcccttattttgattacttttcctatgttttgactaaaatattatttgatttaaaagaattcaatccagtttgattactttcatagtgatcatatttaaaaaaatttaccctcaaatgttgagcatttctatttggcagaygctatactaacagctttcagctttacatgaaataagtcatggaattcttacaaccactttacaagattagtatatttgtatatttgcatatagggtaaccctcagaataaccccataagattctcacatgtactatcccacacattcccatgaaaaagactaaaatatgaagtggtggggagtcctgcacagggcccaggagggcacag

SEQ ID NO: 515250 - DNA, 544 bp, Homo sapiens
atgggtttaaaattcagtgtatatcgatcaacgactgcttccttaaatcatcttcctacactgattttgcaagttttcatatttacagcacaggtaataagaaatagttatgcaatggtttataggttttaaaacattagaatacatttcaaatataaggccccttaggctactctgtatagccattcttaaatgcccttattttgattacttttcctatgttttgactaaaatattatttgatttaaaagaattcaatccagtttgattactttcatagtgatcatatttaaaaaaatttaccctcaaatgttgagcatttctatttggcagacgctatactaacagctttcagctttacatgaaataagtcatggaattcttacaaccactttacaagattagtatatttgtatatttgcatatagggtaaccctcagaataaccccataagattctcacatgtactatcccayacattcccatgaaaaagactaaaatatgaagtggtggggagtcctgcacagggcccaggagggcacag

SEQ ID NO: 515251 - DNA, 614 bp, Homo sapiens
agaacgcagtaggtgtttattgaaccatgaactacttctctttctctctacttttctttcatcttctttcttgcctaccatgatcatctcacaccctatgctttgtacttaagctcraaagattaaaacaaaaaaaaaggaacttgatatatttcattagccatttggagtgctcaaatttattctcctacaatgttagtttacagacatctgttttatattagagaagaggggagctctccccaagattcatatataccacacatttctccataggactcatcagctaggaccacatgaggtcacattaataagaacagctcaaattccactagttttgctagccttttctacttgttggtaaaggactttcaggtcccctgccagaccacccacctgcatttctggggccctctaaagggtgcctcaaatgtacttgcaagcagtttcaccctggaggcacccagcagccctgctcagtttgatcctcttattgctcttctgtaagctctgccccctgacattgctctgcatctgctttcctgattttgggcccgcctgctccttgctcccccaatggccatttcagtctttcctgtttctctgctcagcac

SEQ ID NO: 515252 - DNA, 614 bp, Homo sapiens
agaacgcagtaggtgtttattgaaccatgaactacttctctttctctctacttttctttcatcttctttcttgcctaccatgatcatctcacaccctatgctttgtacttaagctcgaaagattaaaacaaaaaaaaaggaacttgatatatttcattagccatttggagtgctcaaatttattctcctacaatgttagtttacagacatctgttttatattagagaagaggggagctctccccaagattcatatataccacacatttctccataggactcatcagctaggaccacatgaggtcacattaataagaacagctcaaattccactagtttygctagccttttctacttgttggtaaaggactttcaggtcccctgccagaccacccacctgcatttctggggccctctaaagggtgcctcaaatgtacttgcaagcagtttcaccctggaggcacccagcagccctgctcagtttgatcctcttattgctcttctgtaagctctgccccctgacattgctctgcatctgctttcctgattttgggcccgcctgctccttgctcccccaatggccatttcagtctttcctgtttctctgctcagcac

SEQ ID NO: 515253 - DNA, 618 bp, Homo sapiens
tacattatttttttctggcataaatgttgttatcaatagaactaagaaaaaataattccactactacagacccctccgcttttgaaataaatcagattccagttctgcctgagctccatattcctggccatttaagatcatatgctagattctaaccctacattattttgatgggtaaaaataaccctgaacttactaaaaaaaaattataataayacctgggtggcccagtaagtttgtatttctggaaatttactaaaatctaaattaccttttcatagtgaagatggggaaaggataaacagagtgaataccatatggcctgcctcttgttactggtagaaatagcattgtcctttacccaggccattcatcttgaaaaatcatacttgccctttatttttgagatctgatcacctcatttttgattaggttctatgtccccagctaactgcacactttgaagaacctgaaccagtttgaaggctgcccttctcatttagcagcaggtacagcaataatagcagctaaaaacattgattgtgaataacccctcaaagacatccaatagcattctcgcctcttcagctctaattgagtctgcatttcctcatgtgt

SEQ ID NO: 515254 - DNA, 507 bp, Homo sapiens
agcctgggcaacatagaaagaatctatataaagaaaaaacaaagtttacttctgccgctatatttttagaggactatttctagccttctccttgaaaattgttgatttccgattgaatgtgctcatagtaggtatctgctagaggcaaattcttcttgcaaaaaggcaatatatgcaatacacaatcctcagttaaaactgcragtcatgtagagtaatgaaacagtaaaagaaaagataggaaaataataacaaaatagaaaaagacccacttgacctccaattaatatagcaaatagacttaacacttaaaatagctatgcttaaagtattcaagaagatgaaagaacacactgaggattttgggagaggcctagtaactctaaaaattccaagagaaattataaaattggaaaacctaatatctgaaatttagaactcaacgtatgggattaaaagcagattagatatagctgaactttttttttttaatgtagcaactggaag

SEQ ID NO: 515255 - DNA, 507 bp, Homo sapiens
agcctgggcaacatagaaagaatctatataaagaaaaaacaaagtttacttctgccgctatatttttagaggactatttctagccttctccttgaaaattgttgatttccgattgaatgtgctcatagtaggtatctgctagaggcaaattcttcttgcaaaaaggcaatatatgcaatacacaatcctcagttaaaactgcaagtcatgtagagtaatgaaacagtaaaagaaaagataggaaaataataacaaaatagaaaaagacccacttgrcctccaattaatatagcaaatagacttaacacttaaaatagctatgcttaaagtattcaagaagatgaaagaacacactgaggattttgggagaggcctagtaactctaaaaattccaagagaaattataaaattggaaaacctaatatctgaaatttagaactcaacgtatgggattaaaagcagattagatatagctgaactttttttttttaatgtagcaactggaag

SEQ ID NO: 515256 - DNA, 507 bp, Homo sapiens
agcctgggcaacatagaaagaatctatataaagaaaaaacaaagtttacttctgccgctatatttttagaggactatttctagccttctccttgaaaattgttgatttccgattgaatgtgctcatagtaggtatctgctagaggcaaattcttcttgcaaaaaggcaatatatgcaatacacaatcctcagttaaaactgcaagtcatgtagagtaatgaaacagtaaaagaaaagataggaaaataataacaaaatagaaaaagacccacttgacctccaattaatatagcaawtagacttaacacttaaaatagctatgcttaaagtattcaagaagatgaaagaacacactgaggattttgggagaggcctagtaactctaaaaattccaagagaaattataaaattggaaaacctaatatctgaaatttagaactcaacgtatgggattaaaagcagattagatatagctgaactttttttttttaatgtagcaactggaag

SEQ ID NO: 515257 - DNA, 507 bp, Homo sapiens
agcctgggcaacatagaaagaatctatataaagaaaaaacaaagtttacttctgccgctatatttttagaggactatttctagccttctccttgaaaattgttgatttccgattgaatgtgctcatagtaggtatctgctagaggcaaattcttcttgcaaaaaggcaatatatgcaatacacaatcctcagttaaaactgcaagtcatgtagagtaatgaaacagtaaaagaaaagataggaaaataataacaaaatagaaaaagacccacttgacctccaattaatatagcaaayagacttaacacttaaaatagctatgcttaaagtattcaagaagatgaaagaacacactgaggattttgggagaggcctagtaactctaaaaattccaagagaaattataaaattggaaaacctaatatctgaaatttagaactcaacgtatgggattaaaagcagattagatatagctgaactttttttttttaatgtagcaactggaag

SEQ ID NO: 515258 - DNA, 606 bp, Homo sapiens
ccggaaacgccttctttcgggcgcttggccctggattcccgacccgtccccagtttgctcccatcgggaagcgcgcaggtcgccctggcctgggagaggatggcggggagggggcgcgtggcccttccctggcccggccttccctctgcaggacctgccggggctgtgcggaccccggcgcggcgctgcaccaaaccctcgccaagtgcgcccttcgcgtctccgcggtccccgcgcgcccgtagccgccgccgcccgggcgccctcgggacttggtgcgcgggccgggctggacccggagctgcccctacccacccgccccggcacggaggtccctctcggtccctgcgcccccgagtcttccccgcgcgcccccctacctcgcagtcccgcgcccgccggagccggcagaggccgcgccgrgcaccgagccccgggcagcagcgtgggcagctcggcctgggccgggaggatcgggaggtcccggtgacgtcggcgcgcggggcagggaccgaggcgggcgggactggggccggtgtggggccgcgggcaggacaggagggccacacccctcccggcgctcagcgtcctgccccactccctcca

SEQ ID NO: 515259 - DNA, 617 bp, Homo sapiens
tgggatgtctgggaaggaaaatgggggtcctgggcctgcaggtaaaagaattcagcccagggttccagccagcaccaccccccgcaacacaccccccaccccccattgcgggcgacctgtgcaagcctgaggttcaccatctgtacccaagggtgtgctggccctgtctctgggtagctgtgagccagtgggcggggagggcctatgccagccggcagagctctggaagagcaaaacaccattcatcccagacacacatcctaagcgtctatcccaggcccgccctggccctcataatattgccatcaccatctcacttccagaagcctctgcctgctcctctccagagccctgcgcccctgcactgccccccacccccgggagcgatgtggaggcttcgccagtcctgggaggactctggacttggtcctgaggccctgggaggccagggaggggctggcaggggggcagcaggccagattccttgacagagatgaactggggcggtgcagagaagttcaggacaaagggcagggccytgctgccccgtgctccgggggaccttgagcaagacacttccttttccgagcctccagagctgagactggcaggagtgg

SEQ ID NO: 515260 - DNA, 525 bp, Homo sapiens
acttctttgtttgggatacgttactttcaatcattttcytgatcctctgcatgatttacagaagccgagtgggaggctttagcatttccatggtcctccttctccactatcatgagattcttaggtgaattttttttagagccattattctccatttataaaggcagaatgcagtggcaggagctgggactctgggaaaccaacagccaagaattcaaactacagcatactatgaaacactcagataagatgtccccatcatattctattattgggcaaaataaaatgtaaaccatgtgctcaaaacagcaaatattgtgggtgacagtgacactggtattcggaaagatgaagaaatgcaattaagaaacctgacaaagaagtaaacatgccatgtagcttacaaaagaccagccacattgtgtgtattttaatattgtttaacagtaacacctaataaagagagcatcatgattgtgtgaactcattttcggtcataatgaatgctacaaaattaacctcccg

SEQ ID NO: 515261 - DNA, 635 bp, Homo sapiens
ttctttgtttgggatacgttactttcaatcattttcctgatcctctgcatgatttacagaagccgagtgggaggctttagcatttccatggtcctccttctccactatcatgagattcttaggtgaattttttttagagccattattctccatttataaaggcagaatgcagtggcaggagctgggactctgggaaaccaacagccaagaattcaaactacagcatactatgaaacactcagataagatgtccccatcatattctattattgggcaaaataaaatgtaaaccatgtgctcaaaacagcaaatattgtgggtgacagtgacactggtattcggaaagatgaagaaatgcaattaagaaacctgrcaaagaagtaaacatgccatgtagcttacaaaagaccagccacattgtgtgtattttaatattgtttaacagtaacacctaataaagagagcatcatgattgtgtgaactcattttcggtcataatgaatgctacaaaattaacctcccgagtttaaataggctacaacgtcttgggaaatatgcaagaagagttatttgataaaggtgacagattttcacacctgaaaataatgtttttctcccagcctatcttgatcaac

SEQ ID NO: 515262 - DNA, 635 bp, Homo sapiens
ttctttgtttgggatacgttactttcaatcattttcctgatcctctgcatgatttacagaagccgagtgggaggctttagcatttccatggtcctccttctccactatcatgagattcttaggtgaattttttttagagccattattctccatttataaaggcagaatgcagtggcaggagctgggactctgggaaaccaacagccaagaattcaaactacagcatactatgaaacactcagataagatgtccccatcatattctattattgggcaaaataaaatgtaaaccatgtgctcaaaacagcaaatattgtgggtgacagtgacactggtattcggaaagatgaagaaatgcaattaagaaacctgacaaagaagtaaacatgccatgtagcttacaaaagaccagccacattgtgtgtattttaatattgtttaacagtaacacctaataaagagagcatcatgattgtgtgaactcattttcggtcataatgaatgctacaaaattaacctcccgagtttaaataggctacaaygtcttgggaaatatgcaagaagagttatttgataaaggtgacagattttcacacctgaaaataatgtttttctcccagcctatcttgatcaac

SEQ ID NO: 515263 - DNA, 204 bp, Homo sapiens
aatattggatgaactttaaaaaattattatttttttgtttaaagccatcaaaaaattgtgggcctaaagtktcaatgaactaaatttcagagaaaaacaagcccttccttggtgatcacagattagcagcagagcccatctctgaggacatttgctggatctgggaacttgagtaggtagaagaacaagcctacaatgtgcaga

SEQ ID NO: 515264 - DNA, 204 bp, Homo sapiens
aatattggatgaactttaaaaaattattatttttttgtttaaagccatcaaaaaattgtgggcctaaagtttcaatgaactaaatttcagagaaaaacaagcccttccttggtgatcacagattagcagcagagcccatctctgaggacatttgctggatctgggamcttgagtaggtagaagaacaagcctacaatgtgcaga

SEQ ID NO: 515265 - DNA, 499 bp, Homo sapiens
ccacccccactcggcctcccaaagtgttgggattataggcgtgagtcatcacacctggccacaactgacttttgtagtaaagccaagataaatgtagtttttaaayctggttacataatcagatcaccttgcaacctctcgataacacacatgcagcataggtaaagattggctgtaagatttttttgctgtaatcagtcctgtatatggatgctgaaaatttgccacacccagaagagttagcattattctatgagtttcaacaaagaattccatgaaaaagattccctaatccctgttacagcttctgtccccttaatattccagcagtggcagtcagttaaaggtttcatatataacagtttgttttaaaaatgttcttacagtgttttctgcttagctctacaattgaactttttgcactataattattttgtaatattgctttaaatacaactagaaagaagagagaaaggaaagaatgctatgagaatggcaa

SEQ ID NO: 515266 - DNA, 499 bp, Homo sapiens
ccacccccactcggcctcccaaagtgttgggattataggcgtgagtcatcacacctggccacaactgacttttgtagtaaagccaagataaatgtagtttttaaatctggttacataatcagatcaccttgcaacctctcgataacacacatgcagcataggtaaagattggctgtaagatttttttgctgtaatcagtcctgtatatggatgctgaaaatttgccacacccaraagagttagcattattctatgagtttcaacaaagaattccatgaaaaagattccctaatccctgttacagcttctgtccccttaatattccagcagtggcagtcagttaaaggtttcatatataacagtttgttttaaaaatgttcttacagtgttttctgcttagctctacaattgaactttttgcactataattattttgtaatattgctttaaatacaactagaaagaagagagaaaggaaagaatgctatgagaatggcaa

SEQ ID NO: 515267 - DNA, 655 bp, Homo sapiens
attgtaaaggaattctgaagaccacaaatctacttagtgtcagggctagggctataaacatgtattggcatttaaamtctcaggctatagtaagattaaattgtaaccaagatgttcaaggtattaaaaaaagaggtaacatgacaacatctcttaaagtttagttttggcagatagttcttatctattcttcctttttaccggatatccctttttattgtcctgtccaaatcatacaacacttaaaatatgtgcttggcttaacactgagcaagccatttcctttctttttgataaatattccagattgtgaaaaaaaaattgccttaagtagcaattctacaatgagatttattcaggagaggacatctataaaaagttttttcatgtttcccggataacttgggaacctatgttttctgaaaatactggatatacacagatgctaagaaatgtctcaagtgagcagagtaaaatacaatggttatagatgctagaactgcaaggggcatcagaaggaaaaatgaattattttgctatgttacctcctgcacaccagagggctctgcacaaattgtggttgcctgcttttctacttggagattacaggtttagttaagagactggtaatctttctgtaaagggccaggcaata

SEQ ID NO: 515268 - DNA, 669 bp, Homo sapiens
ttgtaaaggaattctgaagaccacaaatctacttagtgtcagggctagggctataaacatgtattggcatttaaactctcaggctatagtaagattaaattgtaaccaagatgttcaaggtattaaaaaaagaggtaacatgacracatctcttaaagtttagttttggcagatagttcttatctattcttcctttttaccggatatccctttttattgtcctgtccaaatcatacaacacttaaaatatgtgcttggcttaacactgagcaagccatttcctttctttttgataaatattccagattgtgaaaaaaaaattgccttaagtagcaattctacaatgagatttattcaggagaggacatctataaaaagttttttcatgtttcccggataacttgggaacctatgttttctgaaaatactggatatacacagatgctaagaaatgtctcaagtgagcagagtaaaatacaatggttatagatgctagaactgcaaggggcatcagaaggaaaaatgaattattttgctatgttacctcctgcacaccagagggctctgcacaaattgtggttgcctgcttttctacttggagattacaggtttagttaagagactggtaatctttctgtaaagggccaggcaataaatattttagtcttt

SEQ ID NO: 515269 - DNA, 326 bp, Homo sapiens
ctgaaagaattctaattggctgaggaatgtcggcaacatcgtttatcactgagcaggaacctatcctcctggctgctgggtgatgcatttcagatgttttaagctccggagcccaacttgcagcttgcttwcaggagtctggaggagcatgtcacgaagctgcagattgtagatggcagcctgcgttctttgtatgttgggcatccgctgagttctctaaagggcatgatgctttcctgtggttccaacactggactggggatcagaaggtctgaatttgatttctaattcacacaagtaccacaatgaagaaaggggagggggtg

SEQ ID NO: 515270 - DNA, 473 bp, Homo sapiens
tgtgggctctaaggttctaaattcaggcagagcctgccaaaaagactaagtagaaacagctaatttggccatagaaaaccaggtttggtgtcacagttgccaagaagagctctttcttttttttctgcttttttttctgcttttttttttttttgagacagagtcttgctctgtcaccaggctggagtgcagtggtgcaatctcagctcactgcaacctccgcctcctgggttcaagcgattcttctgcttcagcctcccgagtagctgggattacaggcacatgccaccccgcctggctaatttttgtgtttttagtagagacggggtttcaccatcttggccaggctggtcttgaacccctgacctcatgatccacctgcctcggcctcccaaagtgytggggttacaggtgtgagccaccacgcccagccgagagctccttcaaaaagaaagggctgactactaaccaca

SEQ ID NO: 515271 - DNA, 540 bp, Homo sapiens
cacttcctggcttgaataaaacaattggccgcaagcctttggtcaatttctacagtgctgaaaaagttgattctatttttgtcagttttctctttgcctmtgtggaggagagaattttttggatgtccttagtctgccattttgttttgtatccactagcacattcttactgcacgggataaaaatgttcttgggatccaactaatgataggaattacttctcccctaagcatgggaaggaacacacagatctgtgagatctgtggactatattctcccctccccaaatatagaacagcatgcaagatgggacatcctgttcaagccaggctgttttaatcagatggatgatggctagagtaggtgatgtttacagctcattttggcagacagtctgacctgaatgtgtctcttcttgcaggtcagcctcactctgggtgaaataatcaaaggtgtgaatagctcagatccagtcctatgtttccaggccacccagacagccaggtatctccaaacagacttctgctgttgcaggttcat

SEQ ID NO: 515272 - DNA, 656 bp, Homo sapiens
gctgcaagcccagctcaccaacttgactgtggaagcacagaggtggtagactcacagaggcaacaactttctctccatgatagttctactttagtaactggacatgcttatcaagtttccctgcaagctctgacttgtctactgaatagtgccttaggaggtctggttaggacttattctctgaccccatggctctttttctttacttctttcagaattttattttcccagcaacccctataattgggtaatatgcaatttttataataaattccatcctttattctaacacattcattgtcacagagtgactgaactttggtaacatcactctgtgtcttcttagcttccccagaaccagaatttcagaagccactgctatctaagataattttttttttcatagccatcccaagggaagacacttgggacatgaatcatcactcagaactgaggctgagaggcagggmaaacagtcaacttccttcctaattcaataggtgctaatccatttatctctactataagggcatgctgcttcaagagctcaatttgttttgcctgcactagaggactgtggacaagaagaaaatgaacactttctaaggctgaaaaagtaaagctttcccatgagtagccccaggcttaggacttaa

SEQ ID NO: 515273 - DNA, 570 bp, Homo sapiens
agagtatcttgatttcatccaaggtcaaaataataatgatatatattttttctatttgaaggttgttaaagatggctaagtgcgatggctcacgcctgtaatcccagcgctttgggaggtcaaggcaggagaattgcttgaggctaggagttcaagaccagcctagacaatatagacagcctctgtacaaaaaatttaaaaattagctgggcatggtggcatgcagctctagtcctagctattcaggaggccgaggcaggaggatcacttgagcccagaaatccaggtcaaggctgcatacgattgtgccactacactccagcctggcctgggtgatggagtgagaccctgtcttgaaaaaaaaaaaaaaaagattctcaaagacaagaagacactactcttctyggagttaacatggaccagatcagatacttataaagagtagattttcgaggtgggcggatggagagcttgagctgagaagtttgatacctggcaacatggtgaaactccatctctacaaaaaatacaaaaattagggggcatggtggcacatgctcgtagtcccag

SEQ ID NO: 515274 - DNA, 209 bp, Homo sapiens
gagaatattgaattgcaccatgaatttgcaatcatcaaaatctggaatatgggatactaatgattaartggcctgggctttgtaaaagtaaaaagcaagaaaaagaaagtgatggagggtaatcctgtatagtaaaagcaaattgaaagatgtatcagtttaaaaataaaataaaataaattaaaattagacaagtcaagggaagcacc

SEQ ID NO: 515275 - DNA, 507 bp, Homo sapiens
tccctagctaggttcaagtttctttatctgtttgctccagagctttctggagggcaaagttccatttaacatacttattggcactggtgaagtagaaaaaattagtatatgaagtaccggccaatacaaatataatgtgagccacatacgtaatcttaacttttttaaaaccacrtgaaaaaaaggaaaaataaacagatgaaattaattctaataatatattttatttaatccaatatatacaaaatatttttaccatctaaatcaatataaacttgtgaatgatatactttatattcatttttttcatactgcttttgaaattcagtgtgtattttacacttacaccatgtctccattcggactagccacattttaagtattcaccagtcacatgggactagtgcctatttgatttaaaaatgaggctctagaacagatgagaaatttcatcctggccaggcagcaattggtaacgtactcctagctcacatcccagtcctcgat

SEQ ID NO: 515276 - DNA, 546 bp, Homo sapiens
gatcttaatctcgtcaaaatggaaattctcattcaaaagtgctggagtaaggcttgrgagtctgcatttctaacaagcacctgggtgaggtccacgctactggccctgagagtagcttgcacagcaaggggttctgaggagaggtgtaggtatcattcttagagctttataaaagcacacagtagctggttttgttccttgaactccttgaatcatgaatggaagcagtgagatggtctcttatttcttactcttttatgagtgaaagctttatcactttaaccaaaatctgaaagaatcacataggattctatttcaacgttttttttttttgagtgataccagcccccttatagttggcacttggtcccttgacattggacagtcttttcctttatattctatgagctcttgaagactttcattaggtcacgtggcatatttattaggctgttctaacataacttggctgaatcacacaggctatccagtagtcaagaaatagtctccaaaccaatgttatcttaaatgaatgattatttctga

SEQ ID NO: 515277 - DNA, 546 bp, Homo sapiens
gatcttaatctcgtcaaaatggaaattctcattcaaaagtgctggagtaaggcttgagagtctgcatttctaacaagcacctgggtgaggtccacgctactggccctgagagtagcttgcacagcaaggggttctgaggagaggtgtaggtatcattcttagagctttataaaagcacacagtagctggttttgttccttgaactccttgaatcatgaatggaagcagtgagatggtctcttatttcttactcttttatgagtgaaagctttatcactttaaccaaaatctgaaagaatcacataggattctatttcaacgttttttttttttgagtgataccagcccccttatagttggcacttggtcccttgacattggacagtcttttcctttatattctatgagctcttgaagactttcattaggtcacgtggcatatttattaggctgttctaacataacttggmtgaatcacacaggctatccagtagtcaagaaatagtctccaaaccaatgttatcttaaatgaatgattatttctga

SEQ ID NO: 515278 - DNA, 523 bp, Homo sapiens
gtggattatatgaatgtttgtattattccattttatctctttaatttgtttattagctataatttattttgcatgtttagtgtccatagtttgtatctatgatttaacacaatctattttcaaataatattcrtgtgttgtgtaagaatattacagtaatacattgcaatttctcccttcctgatgtttgtgctcttctagtcatatactaaaccaaacactgcattgtcattctttttttccccattttttgactgttattttaggcttaggagatatatgttcagatttgttacatgggtaaattgcttgatgctgttacaaattatcccatcaccaagttagtgagcacagtacttgataggtagtttttcaacccatgcccctctcataccccctcctcaagtcatttccagtgtctctcgtacccatctttatgtccatttgcactcaatgtttagctcctgctggtaagtgaaaacgtggtatttggttttcgttctggcattagtttactgtggac

SEQ ID NO: 515279 - DNA, 615 bp, Homo sapiens
cttcacttccaaacatgtctcttctgcataccccatcagcatgggtatgcagattaactaaaattttatccaaagtccaacatggtttatttttaacaaataaaataatacaaaatcagacctagtccaggagatccaaactcccctgttttgagtgtcaaaagagtggtgattcaagggcatctccttatttcacttgttcagttctcaaagattccctcttgatcacctgaatatgcatgttttcgtgtaaaaatcagaaagcaaaatgaatgttagtctcacttacttgcagaccaattaataaaagaaattaccaaaatacctgactgtcaataaaaggtactagtctacttatgaaaggaggttggctgtgcaggataacatcaaggggtttgaaggacatttactaggactaatgacttacatgtgacaaatcatttctgttttcttatctaattataaaagcttctamgcaagatccttctataagtgtgaaggtagaattacacctttgtctagtgtttcttaagcttgactgactaattcaattttagtattcagatccactcatctaagagagagaacagatggattccagtttttttttatcag

SEQ ID NO: 515280 - DNA, 673 bp, Homo sapiens
agatttctggagaatgatatgggaacataatgtggaagttattgtcatgataacaaacctcgtggagaaaggaagggtatgtagataatctgttatgtcacccccaaaaaagtaattagaggtactttaaattagttttaatagagtcagcattaggaaggagccaaagttttgagagttatttgggattcttttttagtaaatatgacagctaaagggaaactgttaatactgttagtcaaaaagtttcattatgaatcatgctrtctgccttttaaacgcattcttcatactgtgggagaagtaaatgggactcattgaaaagcaatgtagagtgaaatcgattttaattcacaggacatggattttagtcttggctctgtaacctgaatcttctgactcacttgccttatctgaaaggggaaattttagggtacctcatctcagtctcgttcagctctcagattctatccctagcctcctccacaactaatttcagtcacttataaagaaaataaaacatttagaagagtgaaggagtccattcctgtcaccatctcagacctttactgatttcagggaatgacttttacatggagcatttgaaatacagaagtaacatctacattttcttttgcagagaaaatgtgatcagtactggcctgccgatggg

SEQ ID NO: 515281 - DNA, 621 bp, Homo sapiens
taatgcagggacagaaaaccaagtacctcatgttctcacttataagtgggagstaaacattaattacacatagacataaacatgggaacagtagacactgtggtgtacgagagagtggagaggtgggtgagttaaaaagtctccctatcaaatataatgctcactagctgagtgatgggatttgtactctaaacctcagcatcttttagtattctcatgtaacaaacctgcatatgtgctcttctatctaaaataaaagttgaagtaaaaataaataaatacataaatattttttaaaaggggcccttcgtttgccaaaacatatccccttctaggggggatcagagatgatacagaactttttttttctggttacatagactaatatgcacatttatgattttaaagtttcaatcattgtcaaaatatatcattttgagacagcaatgaaatagaaaagtcaggtcatgttggttggatgagtctcatccatacagttacatattcagtcgattcttttttggatttaatacaaaccactgtcaaataattaatatgcccttatgcgtatagggcctttctgattcctctttcttctgaaccatcataatccctgacctg

SEQ ID NO: 515282 - DNA, 576 bp, Homo sapiens
gccccacacagctggtatttgggtggaggacattctcaaccttgtgtggttttcctggtgcatttcacatccagtccgacccttggaacagcttagcagggaccattggtgcctccccagccccagtcacccatggccctgtcccctgcacatggaccccctcttcttttttgggccagtattattttgtataacctttgggctgtttcatcatctgtctcctcaaccaaagcttgttccttctgggcatcttcatgttccctccagggaacatgtcctaagccgctcattcagcacttgaggtcttgggcacctcactccagactcaactagctccccgactgaatctgtgttcaggccctgccatcccagaagctctcagtcttggggagctggatgcttgcagatkaacaggaggggtagagtagcaggctgtcgatgctcttggctgcctgggtgagagggaggtcgggaaaaggttcctggaagagggcactgccctgagccttgaaggaccacaaagggtctgtgaagtgaataaggcagcgtggttacagctcgtggggaagagggagt

SEQ ID NO: 515283 - DNA, 579 bp, Homo sapiens
caggccccacacagctggtatttgggtggaggacattctcaaccttgtgtggttttcctggtgcatttcacatccagtccgacccttggaacagcttagcagggaccattggtgcctccccagccccagtcacccatggccctgtcccctgcacatggaccccctcttcttttttgggccagtattattttgtataacctttgggctgtttcatcatctgtctcctcaaccaaagcttgttccttctgggcatcttcatgttccctccagggaacatgtcctaagccgctcattcagcacttgaggtcttgggcacctcactccagactcaactagctccccgactgaatctgtgttcaggccctgccatcccagaagctctcagtcttggggagctggatgcttgcagatgaacaggaggggtagagtagcaggctgtsgatgctcttggctgcctgggtgagagggaggtcgggaaaaggttcctggaagagggcactgccctgagccttgaaggaccacaaagggtctgtgaagtgaataaggcagcgtggttacagctcgtggggaagagggagt

SEQ ID NO: 515284 - DNA, 633 bp, Homo sapiens
aaaaaaatacagaacacttcatgaatttgtgtgtcgtccttgcacagggaccagcccaggcaacatggtgaaacccgatctctactaaaaatacaaaaaaagttaggcgggcatggtggtgggtgcctgtaatcccagctactcggaaggctgagacaggagaatcacttgaacccaggaggcggagcttgcggtgagccgagaccgcgccattgcagtccagcctgggcaacagagcgagactctgccaaaaaaaaaaaaaaaaaaaaaaaaagctctgtcatccccttaggctgccagacactgtgacactgtcacctcagcaactaaaagcatcttataccttgacatcatcaaaacttccaatgtgatttaaagtgaaatcttttcccatcctgtgcagggcctactggccctgagatgagatcagccagggcagggggtctgcttcaccttcccttcccttccccttccctcttcccctgcccttgaccaactgccccccaggcaggtcctgttccctgcaggacaggggagccttggagcagggctggccccctcactgtgctgagctcacacagggtccatgggacayacacctcggcaagtagaggccacgtcaatgtggccagc

SEQ ID NO: 515285 - DNA, 592 bp, Homo sapiens
aatatctaccttcaaactatgtcatcatatatcaaggaaattatcagaccatcctatattttatggtggataactttataatttaaatagatttcttgtcattcatcagtttcttattcaaatgtcaataagtcactccatggtggactgaattccagtattctatcaaacatgaatttttatgtattagtagtatgaattaaaatttgtatggattctttgaaaaagaagactctggaaccttaaaaagggtaaaagttgatgaaaatgttgtgagtggtcgtatcctcagcctcagtgagaggtcgttgcctctttagaaatgtaaggtatttattatgggaaaaaaagaaagaaaaatattttatataattatgagagaaaccgccaaattattaacagttcatgtgtggatattgctatataggcctaaagccagattagcttcagatcttagtccaggtggaataccagacaaattatatattgggcctccaaaacacagtggaactgtgtgtggttcattggctacaatagctctttatgtgtatcatgtaccatggggaaaaakaactggacatgacacatgata

SEQ ID NO: 515286 - DNA, 581 bp, Homo sapiens
gtatgctactcccttaaatacttctcccagaaattagtttatttgatcagcaactgctttatatcctcttcttagaagtgttccttatacttatgttgcatttgaaaagtgttggaaaatgagagattcatttatgatcaacttaaagatttaaccatgtgttaagagataactgttycctggtaaacaagagctagaagaagttgggtggataatatggaagcccaaactcatcacggctcattttaatgcagttttaataataatactttgttaaaaaatttagaaatctggggcaaatgctaaactgatagtacattgtgacaacaggcataaactagaactttccccaggcaaaacaggactttggtcacctgacacacctagtggaatcacagtgcactcattaattctaagagcagagggctgtacaaaggggtatttgtactagaggagaaggttggtcatggcagacaccctactagacttgtccagaaacaaagcactctcagagttcagttcagagtaggatgaacatcatagtggagaataggcatagagtagaaagatgggctctaaat

SEQ ID NO: 515287 - DNA, 625 bp, Homo sapiens
caattttgtgacaagaatttaaacaaatatattcttggaaaaactcttgattctatgggaaaaattaaaaatgttccaaactaatcgctttctaggattaaacaaaaactgtttttcaggcccggatgttattgrtactgttccctgaatatatctagttattgtacttcctgttttgcattgcttcttttataaactgcttggttcctacccaaccttccaggttgtactgaaattttatttctgctgtgaagtcttccctgatcatcctgacccatgataatatcactctctcaggatacctgggtctagttctgacactgtcattggctatgtgaccttcaacgtagcattctgcatatctgcggaagagagagagttgggttacacagtctcttattttttaccatacaaaattagacaaatttactatatattttgtttatttaattcttttgcatttgactatttcttgaccatttctatttgctatttaatgattaaattttcccaaattgtaagttcactagccatagagataacataattacaattctatcttagcaccgcagttatacatgcagaattaagacaaatttttaaaaagttttgaattagtaaaatt

SEQ ID NO: 515288 - DNA, 625 bp, Homo sapiens
attatatcttggcatatcaaggcatctgctagattttcattttcctcttttcagttagaacctagtgattttctttgatagaaatatagaccaatttgatgcctttagcttgtaagagctaagaaattctaggaatagcactgagggtagctgtctggtagcaggtttgaactcagcctcgaatccgtcaccaaattctaactgatggagctaagcaggaaggaaaagcaaaattaacctttacaaatcacccaggatatggcagagattgcattttgacagcattttataaagtatgtttcatgacccataagtgattgttaaaaaatcctttataaaaattacacttgaaaaatgttgcttaatctcaattttagaaattcagaatgcacattagcttacataaagaagcataaagcagatacaggttgaatatcacttatctgaaatgctggggcaagaattatttcataaattttgattttgcagggagtttggaatcattgcattatacgtattagttacacatcccaaatcctaagtgctccaatgagtgtttgatttgagctttatgtcagcrctcagaaagtttgggtgttttggatcattttggatttgaggtttt

SEQ ID NO: 515289 - DNA, 656 bp, Homo sapiens
gacctctaagtcttacatgattctcattttatggagtattttcatatctgtggtagatatggtaaaagtccacatgtgttttgcatattccacttaccttctggcatgattgagagtcttggaatgtctttctgtgacttcctggatcccaccttctttattcctataaaataacttttgttgttgctgttcatggatrgctctctagagaggtagggattaattggacttgtggggctactcctgtctagatattgtcttatcactgaagatggaacagaaagttggaaacagcagccatgaaccaaggaatacaggtcaaaaacaaggacattgagaagtatttagaaatagtccttaaaaggatgaaagtcagaaccagaacacaaaatgcaaacccatctgaagcatatgctgctgaatgtggtgggaaaggctctaggctttgatgcatgttttccaaagcactgacatgatcccacacccagggctctgagtgagagccatggattctatagagactgaatacaatccagagtgccctgggccagtcagcacaccctcaggaagcaggcacgccctgtaggttgccttatcttcccctgttaagtctgatttcatagaactaagacgtcattccatttaaagacacaggc

SEQ ID NO: 515290 - DNA, 661 bp, Homo sapiens
aaaaaaacaacagctacaacaaaaagtcactttgatgaagcagcagcccaggctgagtctattatgtatacagtttcagaactgcaaaagagataacgtaaaaaccaggtatggcaaatgatttgagggtcaatctatgtttgtttttatatcccttgctcccacagaagactgtgaacatgtcaagtattaaggacctattttgaattactaaatagacgagatcattaccattagcaaaaattagcaccaaaggatgtataatgagaattattttggcccactaccacccaccaaaaggttggagtttctatatctgtgaattttgcagctctgcagagcttatgaaaacctgctcattttgtcattaacacaagccctactccttagtacttgggggactttgaacatgttcttaacttttccatttccaggttcttccctagtagagcaaggataacagcaatgtccttatttgtaggatccttaggattatggaagtaagctcctgsagaacacgtagccagggcatggttccctgaaaaggatctattagtgtgtgctattcttactgttcttatttctgcagtccttgccacatcactgctaccaggactccttcatgaaggatggagtccaactcccaggcacgtgtggatag

SEQ ID NO: 515291 - DNA, 643 bp, Homo sapiens
ttgaatatggcttcgtgctcagccccaatggagaggctaataaaactaataaaaactaayaaaaaactaataaaactaacacagcagggtaaattgggatcatagatactttcctcccaaaacttcaaagagaatcagttttcttgatctctcagcccagccccaccccactcagcaggactcgccttaaagcaacggatgctgatgatccaatcagtgtagatacattaaaacacaacaatacagagtttggctatattacaggattgactacaggcggcccctgacttaccatggttcaacttgggactcttacccttttacaatagcgtgaaagtaataacacgttcagtagaaaccacccgttgagtacccatacgaccattctgcttttcacttttagttcaatattgaataaatgacacgagatactcaatgtgttattataaaataagctttgacttaggtggttttcccagctgtaggctaatgtgcgtgttctgagtgtgtttaaggtaggcaaggctaagctacaatgttttgcaggttaggtatattaaatgcattttcatcactcttttcagcttacaatgtttttattagaacataaccgcactgtaagttgaagagcgtctgtccattg

SEQ ID NO: 515292 - DNA, 643 bp, Homo sapiens
ttgaatatggcttcgtgctcagccccaatggagaggctaataaaactaataaaaactaataaaaaactaataaaactaacacagcagggtaaattgggatcatagatactttcctcccaaaacttcaaagagaatcagttttcttgatctctcagcccagccccaccccactcagcaggactcgccttaaagcaacggatgctgatgatccaatcagtgtagatacaytaaaacacaacaatacagagtttggctatattacaggattgactacaggcggcccctgacttaccatggttcaacttgggactcttacccttttacaatagcgtgaaagtaataacacgttcagtagaaaccacccgttgagtacccatacgaccattctgcttttcacttttagttcaatattgaataaatgacacgagatactcaatgtgttattataaaataagctttgacttaggtggttttcccagctgtaggctaatgtgcgtgttctgagtgtgtttaaggtaggcaaggctaagctacaatgttttgcaggttaggtatattaaatgcattttcatcactcttttcagcttacaatgtttttattagaacataaccgcactgtaagttgaagagcgtctgtccattg

SEQ ID NO: 515293 - DNA, 605 bp, Homo sapiens
tgtacttctctagaaaatgatttttttataatgatccactaaattcactaaatataagcagtttctctgtctaaacaagtaatatgaaccacctccttgggaagagaatatatgagatatatgttatctatttcatcatggacaaattattctgaaattaaagtgaccacagaagcaattacataaaatggtatgctttgaaycacatcatcttcagtcataatactatgacattcaagcgtctctgcttaatatatttagctataatttatggagcaggctcctgggatactatagtcattatgtaacacattttttttacttccttagaatatgtttttccatgaaacttaaatgcataaaaatgaaaactactctaattagtcagtagtacattataccatattgggaaaggaaaagttagtaagcctgaaatattttctattcgtttacttggttgaagtgcggaaaacaagaaaagtaacctcatcagaaccccttaccaggatatacaaatgacatagctacaaggaagtacactaacaccttttctaagagcaaagtacatatttacagaatgcttgtatcaagatgttcttgatcta

SEQ ID NO: 515294 - DNA, 612 bp, Homo sapiens
gcgtctctgcttaatatatttagctataatttatggagcaggctcctgggatactatagtcattatgtaacacattttttttacttccttagaatatgtttttccatgaaacttaaatgcataaaaatgaaaactactctaattagtcagtagtacattataccatattgggaaaggaaaagttagtaagcctgaaatattttctattcgtttacttggttgaagtgcggaaaacaagaaaagtaacctcatcagaaccccttaccaggatatacaaatgacatagctacaaggaagtacactaacaccttttctaagagcaaagtacatatttayagaatgcttgtatcaagatgttcttgatctatctagggttgtatatgggaggcaaacctaaaatttataaatttatgggacatggtttccttgaaaatttcatatagactccagagtataaaaaggagaagtttgaagactgaaacagcttctttttgtttgatcctgatcacattgatcacttagaaatgttatgtgttggatctggccaaaagcatatctcacaccaaatatatgatgtgtggtaagcaattcatggttatcaaaggcagtgat

SEQ ID NO: 515295 - DNA, 521 bp, Homo sapiens
caatggaagccagtgagatctggacagagaaaaatcctcccatgagcctaacagtttctggacwcagacaacaatcctcttttcacatcagaagacacaaatatgatccacaaaatgtgcagatacctgggagagaagccactgagtgctgcagggacatttctgcaacagaaattcatatgtggagtgaagatcagttacttatccaagcaatgttgggtacgccacctagtactgtagaactgttatattcaaggaatcatcagtctttgatcttaaggacttcaattaatgggataagggccactcacattatggaggggaacctgctttcctaattcaacggatcacatatgttcatcatatccacaaatatcttcacggcaacattcaccttagtgtttgaccaaactatctggcatcatagcttagccaagtctgttgataaatttatccatcacaaatacaacccacaaggtagcacttagcatattttcctaactagtgaattcttggtttaa

SEQ ID NO: 515296 - DNA, 521 bp, Homo sapiens
caatggaagccagtgagatctggacagagaaaaatcctcccatgagcctaacagtttctggactcagacaacaatcctcttttcacatcagaagacacaaatatgatccacaaaatgtgcagatacctgggagagaagccactgagtgctgcagggacatttctgcaacagaaattcatatgtggagtgaagatcagttacttatccaagcaatgttgggtacgccacctagtactgtagaactgttatattcaaggaatcatcagtctttgatcttaaggacttcaattaatgggataagggccactcacattatggaggggaacctgctttcctaattcaacggatcacatatgttcatcatatccacaaatatcttcacggcaacattcaccttagtgtttgaccaaactatctggcatcatagcttagccaagtctrttgataaatttatccatcacaaatacaacccacaaggtagcacttagcatattttcctaactagtgaattcttggtttaa

SEQ ID NO: 515297 - DNA, 521 bp, Homo sapiens
caatggaagccagtgagatctggacagagaaaaatcctcccatgagcctaacagtttctggactcagacaacaatcctcttttcacatcagaagacacaaatatgatccacaaaatgtgcagatacctgggagagaagccactgagtgctgcagggacatttctgcaacagaaattcatatgtggagtgaagatcagttacttatccaagcaatgttgggtacgccacctagtactgtagaactgttatattcaaggaatcatcagtctttgatcttaaggacttcaattaatgggataagggccactcacattatggaggggaacctgctttcctaattcaacggatcacatatgttcatcatatccacaaatatcttcacggcaacattcaccttagtgtttgaccaaactatctggcatcatagcttagccaagtctgttgataaatktatccatcacaaatacaacccacaaggtagcacttagcatattttcctaactagtgaattcttggtttaa

SEQ ID NO: 515298 - DNA, 442 bp, Homo sapiens
ggacatatttgtcatcatttgatacagcagcaaccctaacccagaccttacatgaatctactgaatgtagtctgtrcacttgtggggaaatggaaagcaagcatgttaagtgatgtccctaaagtcacacaaccagatagagccagatgtggaatttaacccacattccttgaactctgatgatttttctttctaccatgttagaagttacagagaggctttacagaacccacagaagctagaagcagagatgggcactaagtctgcattttcctacaggaattttcctagttggtgctgggttttgctcaagagtcagaggtatctgatatttgtaagattttctttaaataaagatgcacagactgttagtggaagattttgcaaaaaggtaatgaaaatcctgtgagtgaaaggcattgatggagaaacaggttttcca

SEQ ID NO: 515299 - DNA, 442 bp, Homo sapiens
ggacatatttgtcatcatttgatacagcagcaaccctaacccagaccttacatgaatctactgaatgtagtctgtgcacttgtggrgaaatggaaagcaagcatgttaagtgatgtccctaaagtcacacaaccagatagagccagatgtggaatttaacccacattccttgaactctgatgatttttctttctaccatgttagaagttacagagaggctttacagaacccacagaagctagaagcagagatgggcactaagtctgcattttcctacaggaattttcctagttggtgctgggttttgctcaagagtcagaggtatctgatatttgtaagattttctttaaataaagatgcacagactgttagtggaagattttgcaaaaaggtaatgaaaatcctgtgagtgaaaggcattgatggagaaacaggttttcca

SEQ ID NO: 515300 - DNA, 442 bp, Homo sapiens
ggacatatttgtcatcatttgatacagcagcaaccctaacccagaccttacatgaatctactgaatgtagtctgtgcacttgtggggaaatggaaagcaagcatgttaagtgatgtccctaaagtcacacaaccagatagagccagatgtggaatttaacccacattccttgaactctgatgatttttctttctaccatgttagaagttacagagaggctttacagaacccacagaagctagaagcagagatgggcactaagtctgcattttcctacaggaattttcctagttggtgctgggttttgctcaagagtcagaggtatctgatatttgtaagattttctttaaataaagatgcacasactgttagtggaagattttgcaaaaaggtaatgaaaatcctgtgagtgaaaggcattgatggagaaacaggttttcca

SEQ ID NO: 515301 - DNA, 720 bp, Homo sapiens
actgcctaactcactgaaatattgtgaggattaatcagataatttatatacaattgctggagaatgcatacatacraaaagtaggtacccaataaatattgcctggatttaaagctttaccatgcttcacataggccaaaatgacttctgtatttttctaggtgatggatcattaatgtggactcagcagagcaacaaatttgaaactagcacaattgtctgttctttgcattcgtagaaaacatacattaaacatcaaggtacaacactaaaaatagggcaacattttagctattataactctgcactggaatttcctattttagagcaaaatggtacacttccatttacccggataacattcatcttgtaatcaccaatttcaaaaggtgataattaatatgtagctttcaacaagcttgacatgagaaaaagcaccaattagtcaacatggtgctccaggtacagaatgccaggagccatgctacatagggtgtgcaaagccctttgtattccagcagaatcagactcattctcactaatgacaagggagtccattgtgagttagcaaatttcacaaattagcaagtaagaaaaaaacataattaaaagaattagggacactgaatcatggtgtgtgcagtgttcatttattttgacaagtataatttaattttacttatttatggtaatatttcatagtatactaatgaatgcact

SEQ ID NO: 515302 - DNA, 599 bp, Homo sapiens
gacccaggtggaaccatttccacaggcctggagtgtgcactgcaagtctccagccttgacaaagatcatgggtgtgctgaggtttctcatccacccgagcctctgtctacacacacagagtgcctgggagctgagaagtgtgtttattctgctcctttcctccctcataaatgactgctaccagcacttggaggaaaagcccaagctgtgtctgagtgaatggaagcagagtgggcaggccggcctcactagccaagtccaagccgcgaccgcgtgtgtaagtgatttccatgatctcattccttaaccctttttgagatgatccttctcttcccgagtgcacttagggaaggcaggtamaatcatctgctttcctgtctctttccttgatctggctctatcagagaaagaaagaactgttaggacgcatccaagagaaaagatacctgatcaaattatttcaatgaaagaaatccagttataagatataaatatatacattcgaattctattataaacatgaaagtgtctgtgtgggtgcgtatctgtagaaaatacaagaagaatacatatcaacacggaagcagtaatacctcttg

SEQ ID NO: 515303 - DNA, 592 bp, Homo sapiens
ttttacccttcctaaacctgagggaggaggatgaggggagagagacctgcggagtcacagagtcatggagaatgacattctttgaaaagatggacgaccttcagtctgagcaagcagccaccccgaggccaccttgctggcatagattcacgaccttgctcttcccagctagcccatcaggagaaccttcctgcagtccacaggccacggaggtcctgctcacaccaccctgactcagcctctcaagcagcctatggtgggtacaggaccccaagatctattcccgttttcacccagagcccccagtactccccatcagtttcagccacactgggctccctggctcctgccttgtggctcctgtccctttcacacagggatccttgtctctcttggtctcatttagagggacagagctaacctggagtgatgacagagaaggggcctgtttccagggcatgtgcagtggagctaaatctggatgaaaaggagtagcaacatcgggagactgaggcagggtgggctgagaggggggtgggccatggagaccatcactgtccmccttgtttggatatttgacacttgaataaag

SEQ ID NO: 515304 - DNA, 564 bp, Homo sapiens
cataccaggaacaaatgcattattcaatgacaggaggacaggaagaagacagaggatcagttataccttaaataaacccacaacgagtgctccaaggtgagccagccagcattttggaaccgcacagaggtcactaaccacataggacattgcccttgcagcacctctttagaggaattataggtaatacccagaagacgtaatgtaagatgaaacctaagagcacgttacccctgctttcctctgaaggctgcagagactgagtcagacataaaccgtgtgattatggatcatttcaaacaaatatgtgagacaaaagtatttatttatactagcctggaatttttagtaactgaaaatgagttcattttaatgcctgaacatgatcaaaaagctactgaaactacccattcagggatatcagaaagaaataaaaaacaatgaattgggtttgaagatggtgatgagagaaarataaactttcttaacttgcctgtcaagttcagctcgtgcaatgtgtcagtcacagatagccatgaaggcacgcaaatatatttaagtaga

SEQ ID NO: 515305 - DNA, 416 bp, Homo sapiens
gcttaatagatgtagtttataatcatcycatgtttaaaatcttttcgctccctcttcttctagccatcccaaaatgcttatattcccagaatgagccaagctgtatagtttctcagacttttagtgtgtgcttcctggcccttatttgccttgaaaatattgactgctgtttagaaattgtctcaattatatcttttttaatgaatgttttcctgagccctacaggtggaactgaccacaccctggctgtgccccagtatgtttttttctacagacttctttcttggcactgagaatttaccaccagaagggttggcttatgttaatctcccttatggaccaagtctttgaatttgaccagctttagaaggttctcattacatacttatttttaatcaatacaattttgaatctat

SEQ ID NO: 515306 - DNA, 556 bp, Homo sapiens
ggatttactttatttacttatatttatatttctaaatttcatccacatcattgttatttaccattattaaccacatcactgttattaaaccattttgctgtaacagttattatagctcattcttctattttctttgaatacacttcaagattgttggcagatttttacattytacagagtcctgatgtgaaaattcatgtgccgatttttaaaaaattatctaaaagaatgagtatataattatttttcattgttttcttggcttacattttcttgaccactaagcactttgatatctttctatatgtttatttcctatttgtgttttgtgttctgtaaaatacttgtttatatctgcccattgttctgttgaatgttgtgcttttcttattgctttgaagtaatctttctaaaattgtttaattttttatcatcagttgcaaatattaaaaatgtttttttccactttgaaatttgtctttttactttttagatcctgtggctctagtaaaacttttttgaaggaatttgcatcttgattatgttgttttattag

SEQ ID NO: 515307 - DNA, 530 bp, Homo sapiens
taaagtggcgcaggtgcgatacagataaaatattaagtggacttagagacagagaccatgtccatttggataatacagaacaggcttctggctggaagaggcattaaaagcaagttgggaaacaaggacaatgtttgccatcataaggacataaggactttggattaaattccgagtataatgagaaggcattggagtctttgatcagaagagtgtccaagcgcgttcataagagggatcacactgcttcatgggagggttcataagagggatcacactgcttcatgggagggttcataagagggatcacactgcttcgtggagccttgagagcccacatggaattgtgtgcctgcttccatcacaagtaatctctatgattagttctctcttcctaatactcattatcacctaaggcctatatttatktacttatttgtctgccttctacaagtaagatggaagttttataagaacaaggtctttgctttctttcttccattatcccaatgcctagaacacaacagcac

SEQ ID NO: 515308 - DNA, 403 bp, Homo sapiens
ttatctggggcgaactatgtgtcggatactttactggcctttgaagtttcaatagagagcaagagaaacatatttgcttccttccaggacactaaattctgatagrgaaagagacacaagttaagtagatgcatatataacctagttcaaatgttttatgaattttatgaaaaaaataagcaaagggatgtgatgagcagaattatgggcagtgtggatggaactaatttagggttatctcagaaagcatctccgattagacctgtatacctcgggacaaaatacagttaactgtgcaaataggccaagtgtggtccatgcaagaggagagcagttgctcttttttccattcatatgctggatgaagataatcatgtcaaacttggatgtcacatggggaaga

SEQ ID NO: 515309 - DNA, 618 bp, Homo sapiens
atttaacactttgagaatcacattttattaattggtgttaaagaacttaaaaaaaagaggatatgggaaataacttagaaaattagtttcaaaaaatataataaaatataaacaaatacagtagtatactgtaattataatgwaatatttcttgtaacttcatgggaaacaatttaatgtctcaacctagttcatgtattcctcaaacatgtattcaacttgatggaaattttcctatgtattatactgtaatccacgagagtgggaagtaacaattctttaccatcttgctgtaactgggtaggcattttaagatgacgctaaagcttgtgtctctgagagggcattgtatgggagtgtgtatgcagaagttgagtgctgatgcagcagagacctcaggttcccatggcacaagacaataggcaatttaatttttctgcttgacacgccataaaacataaaaaatgcctatctatagacacatctgtattgcaaattattgtttacccattaccctctaccactagagtatgttccacaaaaagagtatagttttattcatttcattatcctcaacattctcaggttactgatatattgtatgctttcaatacaaat

SEQ ID NO: 515310 - DNA, 505 bp, Homo sapiens
ttccttaattcacagaaaagtccaaagttattgttgaaaaaaaatgtcttttatttttcagaataatttatttttccaaaaccaattcttccttttttttmcatttctttctgttttgcttcataatttctgtcttcatttctttccattattatttttgtgttattgccctgtcctatctttctagacattttgttaattggcagcatcatctgaacctgaaccttacccttgaccaagtattttgtgaacatattatttttagatgagctctatgtttatgtttagatttttattcttctctctttctctctctccctctcttttttttttttttttttttttgtgactgagtctcgctccaaggctagagtgcagtggcacaatctcggctcactcaacctctacctcctgggttcaagtgattctcctgcctcagcctcccaagtagctgggattacaggcgtgtgccaccacaccaggctaatttttacatttttagtag

SEQ ID NO: 515311 - DNA, 505 bp, Homo sapiens
ttccttaattcacagaaaagtccaaagttattgttgaaaaaaaatgtcttttatttttcagaataatttatttttccaaaaccaattcttccttttttttccatttctttctgttttgcttcataatttctgtcttcatttctttccattattatttttgtgttattgccctgtcctatctttctagacattttgttaattggcagcatcatctgaacctgaaccttacccttgaccaagtattttgtgaacatattatttttagatgagctctatgtttatgtttagatttttattcttctctctttctctctctccctctcttttttttttttttttttttttgtgactgagtctygctccaaggctagagtgcagtggcacaatctcggctcactcaacctctacctcctgggttcaagtgattctcctgcctcagcctcccaagtagctgggattacaggcgtgtgccaccacaccaggctaatttttacatttttagtag

SEQ ID NO: 515312 - DNA, 612 bp, Homo sapiens
ttgaaaaaaaatgtcttttatttttcagaataatttatttttccaaaaccaattcttccttttttttccatttctttctgttttgcttcataatttctgtcttcatttctttccattattatttttgtgttattgccctgtcctatctttctagacattttgttaattggcagcatcatctgaacctgaaccttacccttgaccaagtattttgtgaacatattatttttagatgagctctatgtttatgtttagatttttattcttctctctttctctctctccctctcttttttttttttttttttttttgtgactgagtctcgctccaaggctagagtgcagtggcacaatctcrgctcactcaacctctacctcctgggttcaagtgattctcctgcctcagcctcccaagtagctgggattacaggcgtgtgccaccacaccaggctaatttttacatttttagtagagacggaatttcgccatgttggccaggctggttttgaactcctgacatcaggtgatccgcccgtctctgcctcccaaagtgctgagattacaggcgtgcagcagtgcccgacctagattcttcttaatagcatcaacttg

SEQ ID NO: 515313 - DNA, 599 bp, Homo sapiens
agctatgttacacgtatcccagcttttacagcttgtgtggcagatcacatctctgaataactacaaccaggtgaacacactcagtgaccttaacctgttgccaaaggaggcaagggaaaaacgaagcacagagtgggtcattaaaccaaaggtgttgtttacacagctataatctgagtgatttctcccacagaatcgcttattgtttgctgctttcattttgtacgtattgcctgggaaatataggcacatttttatatacctgagtagcttgtgctgtagataatcagaaagttttaatgcaaaaacagaagtgtgtaaactctattgttgatacaatggatcaaattccttgggtaactctgatttattttagcttattctgctgttatatatgcaattgataatgagcagatagacccactgtccctttgtgccttttctggctgctatttctagtactagttttatccagacttctgtataactgttctttgtgaacaataacaatgattrtactgcattcactattttccttagaaccaggagaaaaagagtggaaggttctgttcccaagatatgctatgtataaatgttaa

SEQ ID NO: 515314 - DNA, 438 bp, Homo sapiens
tggtcctgctccaaacccaagtgcgttctgcaaagtgaggccgcagcggcaagtgcttggcaagtgcctggctaattaagaggacattagcgccctgggcagagcccgctcctgccaagatgtccctgccaggagaggggctgccggctgctgccaggccttggcctccctgcttggccgccacctcatcctgctttcactgagggccgggcccggcatgccagggctctccccggccccggcaccagtgcccaagacacctcagtcttgaackgtcctcctgcctctggcctcaggccccacctgccactcactcctccctgagcctgcaccatctgccactcactcctccctgaaccacctctgctgtaaacacccaccgggccaggcgtggtggctcatagtgacgtcaccgtcagccgggaggacccaggcacc

SEQ ID NO: 515315 - DNA, 630 bp, Homo sapiens
tgccagcgtgggccaggaaggaccccccgctgcctccacccaagcaagccgggcttggcagccaaacagctccggcctggcaatggcagccatgctgcggacacacccccgcttcactcgagcacggaaagcagtcattaagcattttagaggacaagggcacaaaggaaaacactcattagaagcagaaatagtttccaaatgagccatacagaatctgcagggaagtctggcctggaatgggggcctggtcctcgcgggcaggcggagaatgcagagaaggacggaaggtggaggaccaggagaaaggggcacatgaggaggtcagggggccctgaacctctgctgcctacccctcgaaaccatcagaaaatcccaaacaggagggaccgctctgtccagctcaccccttcatgcctcctctacctcacgaggctcagggtcctgcggctgcagtgacacccacatcaggcggtaggggcagaggccaaggcatcgggagaacggagcactgcctgctcctcccctgacmcactgggtgacctcgggcctggccctgtctcgctgggtctcagaaatccttctagaaaatgcactgggtagctcaggggacctgaaggccctgtcagc

SEQ ID NO: 515316 - DNA, 525 bp, Homo sapiens
cctgtataaaccaaacatacaaagcggaaattaatttaaacrattcccttgcaattcttgcccatgaaatgtatttattattaagaaagcaatattctttcttgacttttctggttttcaagacacggtgttttgttttcgttgttttggtggtttgataactcactccttgccgaaggagacgcatgtctagacatttttgtctaagcgtttggttgcaatgaaaaagcaacccacctgtgacattcaccatctcctttcctttggaatttgcatgttctcacaggcaggttcattactttgactcatgtgatgagccaaatggagggagatatcaacggctgaggggtgtttctctcgtccctttgaaataagaggtttccatctgctgtttccccactctattcctctctagactttgcaatgacttgccctcttcacctgtcttattctctgtccactactttctcttggacttgaaaagaccgtggttggttttcaccatcacttctccctcgattgcct

SEQ ID NO: 515317 - DNA, 525 bp, Homo sapiens
cctgtataaaccaaacatacaaagcggaaattaatttaaacgattcccttgcaattcttgcccatgaaatgtatttattattaagaaagcaatattctttcttgacttttctggttttcaagacacggtgttttgttttcgttgttttggtggtttgataactcactccttgccgaaggagacgcatgtctagacatttttgtctaagcgtttggttgcaatgaamaagcaacccacctgtgacattcaccatctcctttcctttggaatttgcatgttctcacaggcaggttcattactttgactcatgtgatgagccaaatggagggagatatcaacggctgaggggtgtttctctcgtccctttgaaataagaggtttccatctgctgtttccccactctattcctctctagactttgcaatgacttgccctcttcacctgtcttattctctgtccactactttctcttggacttgaaaagaccgtggttggttttcaccatcacttctccctcgattgcct

SEQ ID NO: 515318 - DNA, 525 bp, Homo sapiens
cctgtataaaccaaacatacaaagcggaaattaatttaaacgattcccttgcaattcttgcccatgaaatgtatttattattaagaaagcaatattctttcttgacttttctggttttcaagacacggtgttttgttttcgttgttttggtggtttgataactcactccttgccgaaggagacgcatgtctagacatttttgtctaagcgtttggttgcaatgaaaaagcaacccacctgtgacattcaccatctcctttcctttggaatttgcatgttctcacaggcaggttcattactttgactcatgtgatgagccaaatggagggagatatcaacggctgaggggtgtttctctcgtccctttgaaataagaggtttccatctgctgtttccccactctattcctctctagactttgcaatgacttkccctcttcacctgtcttattctctgtccactactttctcttggacttgaaaagaccgtggttggttttcaccatcacttctccctcgattgcct

SEQ ID NO: 515319 - DNA, 541 bp, Homo sapiens
cctggggccttgtatcttgagcctaagaggccagaatgctcatcgggcacagccgcgctcttcctcttggaagtcactagaagctgcctcgacccggagatagggagctgaaagccacggtctagtttcatgcccccaaccagctaaggggaaagggtgcctcacttgggagccccacaagtggctgcggttctccgacctcacaaattcagcctgtacctatctgttctctcccagcctccaccccaatccctgccctttctggaacctgccagaggttgggacaaacagcagcaccaatgctctagagatcgctccaagaagctggggaaggtttggagggcgcagcgcaagagcctagaaagggactctgaagccactagagacggagccctggggttaggaagcccgtgaccactgctgcaccagtgggaccaagaatcccacagcccagacaaaggtgcctgtgsgtctgcctgtctccccacaccatcgctgccttgggaagaaaaagcttgctctctttagattgacgagagca

SEQ ID NO: 515320 - DNA, 541 bp, Homo sapiens
cctggggccttgtatcttgagcctaagaggccagaatgctcatcgggcacagccgcgctcttcctcttggaagtcactagaagctgcctcgacccggagatagggagctgaaagccacggtctagtttcatgcccccaaccagctaaggggaaagggtgcctcacttgggagccccacaagtggctgcggttctccgacctcacaaattcagcctgtacctatctgttctctcccagcctccaccccaatccctgccctttctggaacctgccagaggttgggacaaacagcagcaccaatgctctagagatcgctccaagaagctggggaaggtttggagggcgcagcgcaagagcctagaaagggactctgaagccactagagacggagccctggggttaggaagcccgtgaccactgctgcaccagtgggaccaagaatcccacagcccagacaaaggtgcctgtgcstctgcctgtctccccacaccatcgctgccttgggaagaaaaagcttgctctctttagattgacgagagca

SEQ ID NO: 515321 - DNA, 592 bp, Homo sapiens
ctgccttccttagctttgttatgacactagcaatccatgttcattgatgaaaacttagaaccttcagaacagacaggaataattttaaattaaaatagcttcaaggcctgacactcaaagttaaccacagctaatattttggttttttaaaaaaaaaaaatctttctaaagataaatacaactagggatctcctagagggccccggagatctggcctcctttccaggagcctgggttcctcagctctgagtcaggctggtatctgacttttgctgtcagcgtctgcattggtctcggggaggagcttttgcatgaggcctgggatgtgccctcacagtggctggtcctgggaaagatggtggcgtgccctattgacagatgggaataccgaggccaggaaacttgcaccaagtcagtgagaaaggcagaattggaattagaaaacacatagctattgaatgaatgaactgtttcttggccttttggctaagatcaaatgtaaaggaatgaaaggatggatgaatgaatgaatgaatgaatgaatgaatgaatgaatgaaktgagtgaatgaagaataattatgctgtactcc

SEQ ID NO: 515322 - DNA, 592 bp, Homo sapiens
ctgccttccttagctttgttatgacactagcaatccatgttcattgatgaaaacttagaaccttcagaacagacaggaataattttaaattaaaatagcttcaaggcctgacactcaaagttaaccacagctaatattttggttttttaaaaaaaaaaaatctttctaaagataaatacaactagggatctcctagagggccccggagatctggcctcctttccaggagcctgggttcctcagctctgagtcaggctggtatctgacttttgctgtcagcgtctgcattggtctcggggaggagcttttgcatgaggcctgggatgtgccctcacagtggctggtcctgggaaagatggtggcgtgccctattgacagatgggaataccgaggccaggaaacttgcaccaagtcagtgagaaaggcagaattggaattagaaaacacatagctattgaatgaatgaactgtttcttggccttttggctaagatcaaatgtaaaggaatgaaaggatggatgaatgaatgaatgaatgaatgaatgaatgaatgaatgaagkgagtgaatgaagaataattatgctgtactcc

SEQ ID NO: 515323 - DNA, 552 bp, Homo sapiens
ggatgtagctcccagatctgctggctacaagctcttgacctcagacaaggaaccttaacatctctatctgtaaaatggggcaaagcagtcactcccttataaagatgtggttgggtttttaatggaaatggtgtaatgtaaagcccatcacatagtaggtgtttgataaatggcgaccatgaccaggataaagtgtaacccagaagtgaggctgtcctgggaggccacatgctggcaacatatccagaaaaggctggataagaagcttcctgcacaggtgggcattcttggaggggcatctgctgcccgtgcccagcatgctcccctgccaccgaccaggagctgagtggggtctctctggggccagcagaggttgacttccctgtaccyggggagggctcgtcagctccacccacagcccttgctaccctcccttctctggcacctcgcgccaccctgcccagacccctctgcccacctgtggctgccacccacacagaaagatgcagatgtgatgtgacagcccgtgcacagccaccttgcctcaggcta

SEQ ID NO: 515324 - DNA, 524 bp, Homo sapiens
ctcagctgaatccaccctctctccggtcaactcacaactcacacatgcattctggcctctgggtgtgccaggcacacagctaggagctgggccttgcggaccacagggagcatcctgcccacagcrggctcacagtccgagagaccctggtatgtgaactgaggcagcgggaagagctcctggccaaggtctttgtgttcagaccagaagaggaaggagggctccctccccctgggctgtggaggctgaggctcctggggggttgtcacatctggaccgtgggagctgttggggggaatgggggcaggtggagaagaggaggagctttctggaaggaagccctgtgaatgaggggaaccagcggaggaaggggctcagatgaagcaggtctgggggagaggaaggaagacaggtgagggggctgatgggagccatgatgaggtcccaggggtagtgtgccccactttgggcatggaagacatcatggagacctcagagacacacagccctcttcccatgagcca

SEQ ID NO: 515325 - DNA, 588 bp, Homo sapiens
tgagactataagtagcctcacatcagttcaggtcacgttttgccaccaaatgagttatgaacaagctgtggcttttagagctttatggattttggaattggattgtgggcctgtaatataatttaagatagtgataaatgcagtaacgacagccaggcagagtaaaggaaggggtacgggagggttgcggatagagtagccaagaagaggcctctgcggaggggcacctggcagagccctgagagcggtgggatgggctgggagcagatctagggaatggcagtcctaacagagggaagagtatgtgcaaaggccctggggtggacataagcttgaagtctctgaaaaacagccaggagcccagcctactccagtgggttcccataggagtgacgaggctacagaggtgaccaggaccagatgggtcagcccatgggcattgtaaggacttggggtttcaccgtgagtgtggaggggagccagtgaaagaacgtgaacatgggatcacgctggctactggtgcagagggcaagggcrggaggctgcaggaggacaatgggccatgggaggacaagaataggtagcctc

SEQ ID NO: 515326 - DNA, 482 bp, Homo sapiens
actatagggcttatttatttatttatttttataaaaaagtaaagatgaaattacaggggaaaccaacagcaaacaagagctcccttcagctcaaagtaaatgcctcaaaaaagaaagtggcgtttctgaagggagcatggccgcagagccccctcaaacgcrgtgggggtcccacaccaaagagggctcctgaaggctgggcagtgatggcttagtggcccaagaaggaagcacatcacttataggttggtatgttgtgggcaccgtcccttcccggccagctctctacggcctcatctgacgcagcagatttctgcccccacctactcccaccatctgtttctctcttcctatctctgtatctgtctctctctccttgcctctctgtgtctctgtcccttggtctctcttcttccgtctctatctttctctatctctgtatctgtctcatcttctttctctccctgtctctccctgtctct

SEQ ID NO: 515327 - DNA, 482 bp, Homo sapiens
actatagggcttatttatttatttatttttataaaaaagtaaagatgaaattacaggggaaaccaacagcaaacaagagctcccttcagctcaaagtaaatgcctcaaaaaagaaagtggcgtttctgaagggagcatggccgcagagccccctcaaacgcggtgggggtcccacaccaaagagggctcctgaaggctgggcagtgatggcttagtggcccaagaaggaagcacatcacttataggttggtatgttgtgggcaccgtcccttcccggccagctctctacggcctcatctgacgcagcagatttctgcccccacctactcccaccatctgtttctctcttcctatctctgtatctgtctctctctccttgcctctctgtgtctctgtcccttggtctctcttcttccgtctctatctttctctatctctgtatctgtctcatcttctttctctcyctgtctctccctgtctct

SEQ ID NO: 515328 - DNA, 616 bp, Homo sapiens
actcagtctcactgagccctgacttcatcatctgcagaatgaaaataatagtaatggtgagacttcaataataactgctgataaaataagtctgcagtttagcagaaagaagggctgcactgtgagcgctctgggatctcgggcagaggagaagccaaccttcctttaacacagggactgaggaactttgccccttgcaggaagaggtaatgtccccagggagctctgcaccctcagacccaggctgactgaggcctcccgcccagcactgctgtccaggcctcagaccctcaggaggagagagctgagtaggacgaagcgggggtagaggccccttcctatcctccctgatcaggcagagaaactcactcggtcctcccggatggaggtcggggtgcctggccttgggcctggggtgcctggtggaagttygggcactaagccagacttgggtttgaaactcacctgcacatcttagcagcactgatgactgtgcgcagtggccgcgacactgaatcacaatgtcctcattagtagggaggggatgaaggatgaccctgatcttgcaggtttgttggattaaatgacaatacgtttgcagtgactggcacataaa

SEQ ID NO: 515329 - DNA, 616 bp, Homo sapiens
actcagtctcactgagccctgacttcatcatctgcagaatgaaaataatagtaatggtgagacttcaataataactgctgataaaataagtctgcagtttagcagaaagaagggctgcactgtgagcgctctgggatctcgggcagaggagaagccaaccttcctttaacacagggactgaggaactttgccccttgcaggaagaggtaatgtccccagggagctctgcaccctcagacccaggctgactgaggcctcccgcccagcactgctgtccaggcctcagaccctcaggaggagagagctgagtaggacgaagcgggggtagaggccccttcctatcctccctgatcaggcagagaaactcactcggtcctcccggatggaggtcggggtgcctggccttgggcctggggtgcctggtggaagtttgggcactaagccagacttgggtttgaaactcrcctgcacatcttagcagcactgatgactgtgcgcagtggccgcgacactgaatcacaatgtcctcattagtagggaggggatgaaggatgaccctgatcttgcaggtttgttggattaaatgacaatacgtttgcagtgactggcacataaa

SEQ ID NO: 515330 - DNA, 644 bp, Homo sapiens
tgtctgctctgagcctcctccatcccagaccctgacccagggtgggacacacaaaagtccccattttcatggatctgctacgctcacttgttttagctccttcctactagcaggcaaggtccatgaagactggcccatgaagactgtgtccgtgtgggcacagagggggtgctcgggagtctggcagcatgtgaaatgctcctagtgccaatctggggcttgggctggtctcattgccctccccgcacgatgaagcccactgggcatagaagggaaagactggacatctcgttgtcttccctcctgatgtgcagggatgaggctgagagagccttctaagtgtgacacagcccagagggactcaggcctctgggtgcctgtggagggctctgtggccagccaggctgaggtctgggtgtcacatcggttttgagatctgcaaagccatggtcatgtgattttcttggagctggggctgcctgcctgcttaggccaggttctctctgctcatcaacaaccacgggagggagggaagaaaggaagcgaggcaggggctggtgggaagtttgaggggctgggctgggttctctttggtattctgtsgagtgcctgcctgcaactcggtgggtgcttaataaatgttt

SEQ ID NO: 515331 - DNA, 644 bp, Homo sapiens
tgtctgctctgagcctcctccatcccagaccctgacccagggtgggacacacaaaagtccccattttcatggatctgctacgctcacttgttttagctccttcctactagcaggcaaggtccatgaagactggcccatgaagactgtgtccgtgtgggcacagagggggtgctcgggagtctggcagcatgtgaaatgctcctagtgccaatctggggcttgggctggtctcattgccctccccgcacgatgaagcccactgggcatagaagggaaagactggacatctcgttgtcttccctcctgatgtgcagggatgaggctgagagagccttctaagtgtgacacagcccagagggactcaggcctctgggtgcctgtggagggctctgtggccagccaggctgaggtctgggtgtcacatcggttttgagatctgcaaagccatggtcatgtgattttcttggagctggggctgcctgcctgcttaggccaggttctctctgctcatcaacaaccacgggagggagggaagaaaggaagcgaggcaggggctggtgggaagtttgaggggctgggctgggttctctttggtattctgtcsagtgcctgcctgcaactcggtgggtgcttaataaatgttt

SEQ ID NO: 515332 - DNA, 513 bp, Homo sapiens
acaaaaccagccatttggcaaacccaagccacataaacagaactctcagtcaagttttctaatcctaaaagaatcctccgtaggggaaacatttctacatgtaaacaacagaggaaaattatatagatataataatcattgtaatcctttatttgtaaatatcaaaagacaattaagaatttctgggcacaggtgaatgaataaccagcaccataaaaaggaaagattaagattaaatatacatgaatgaattaataaaactaaactcartggaactgaaggtaatttagcgcatcaaaaataaatatattggtttttcaagatatttgggaaaaaatattacatccacaaaaaagcatagaatgaccttcatgcatgtggtaatacaaatatttttgccagactatgttgaagcagcattaggtacaatcatctgaaaaacaaaacaccagaagttaagaatcacgagcccctaagcttggttgatcttcaatcctttctgaatattttaaa

SEQ ID NO: 515333 - DNA, 447 bp, Homo sapiens
gtagttctatcagtctatatattatcaatattttctaagttttagcataggctataatatattactatttaatttttctaatctcttgagtacttaagtcaatacacttgytatattttatttttcatctatatatttgtatcttctttctttttatttgattagccttactagactataactattacattgattttgtaaaaaataggtttcatagaataattttatgtcattgtttataaaataagctgtctgggacttagaaatgtatatgtgcatatttcagaaattacatcatgtaaatcaatgtgagcagacacaagaactctgtgcaatggctctacactgagaaaatctagcagcattagccagcctcagaaattaactttagagttatatatgagtggtatgtccaggtacactttggtagtttgttctaatgcctat

SEQ ID NO: 515334 - DNA, 346 bp, Homo sapiens
tggaaaagccaaatggaagacatcaaaatatatgagatcagattttttagattccacatttaaataagatcatgccrtgtttgtctttccatgcttgactgatttcattaacatgatgttcattcaggttgtcacaaactatgggatttccttccttttatggctgaataacaatctggttgtgtgtatataccatgagataatacattttttaattagctaagtttatgtatttaccacatatgtgtacttcaaaacattacgtggtacgtgataaaaacaaacaattgtatatgtcaatttaaaaataaataaatgtgaaaaaatacatatgagagctatatag

SEQ ID NO: 515335 - DNA, 565 bp, Homo sapiens
gcatttaactggaatcatagtatgttacattttcatattggcttctttcacttagcagtgtgtgttaagtttcttgcatgtcttttcatggcttgatattccttttttattgctgagtaatgttgcgttatatggatatatcacaatttatttgttcattcacctactgaaggacattatggttccttccaagttttagcaacaatgaataaatatgctataaacattcatacacaggcttttatgggaacataagttttaaaggcatttgagtaaataccwaggaacacaattgctatatgatatggtaagaacatatttagttttgtgagaaactgccaaactgtcttccaaagtggcagttctttaatgagaacaactctgcctcaccattgaagagaataggtcataactagaaaatttctaagcacgtgaaaagcagtacttgcagaagttagctgcattaattttcctttatttttatccctttttaagaaatagttttaaattaatttaataggtgaaagtcattattttatctattttttcatccttagtgcttagg

SEQ ID NO: 515336 - DNA, 565 bp, Homo sapiens
gcatttaactggaatcatagtatgttacattttcatattggcttctttcacttagcagtgtgtgttaagtttcttgcatgtcttttcatggcttgatattccttttttattgctgagtaatgttgcgttatatggatatatcacaatttatttgttcattcacctactgaaggacattatggttccttccaagttttagcaacaatgaataaatatgctataaacattcatacacaggcttttatgggaacataagttttaaaggcatttgagtaaatacctaggaacacaattgctatatgatatggtaagaacatatttagttttgtgagaaactgccaaactgtcttccaaagtggcagttctttaatgagaacaactctgcctcaccattgaagagaataggtcataactagaaaatttctaagcacgtgaaaagcagtacttgcagaagttwgctgcattaattttcctttatttttatccctttttaagaaatagttttaaattaatttaataggtgaaagtcattattttatctattttttcatccttagtgcttagg

SEQ ID NO: 515337 - DNA, 653 bp, Homo sapiens
tctgccagctgttgtgctgtatttccatcatgacctattataaactaccaaactgatgttgactgttctgcaagttctgaaaatttggaaattgaatcttataaatcactacaagttagctccagcacaacactctgtaaccgctgtttatccctttacacacactttttttaatgtctcttacattcagatatctaattaatggaaattgatctgcttggcaaaatatggctactctctgcaggatagcagggcatttgacattcagagaagatcacttttttttttttggatacagagtctcgttcagtcacgcaggctggagtgcaatggcgtgatatcggctcactgcaatctctgcctcctgggttcaagcgattcttccacctcagcctcccgagtagctagaattacaggcacccgccatcacgcctggctaatttttgtatttttgtagagacgaggttttcacatgttggctaggctggtctcaaactcctgacctcyggtgatccgcctgctttggcctcccaaagtgctgggattacataggtgagacatcttgccaggttacaaatttcatttcatacatgaaattcatgtgtttcatgttataataccagttttggtaagaattgtaacatgaaacacat

SEQ ID NO: 515338 - DNA, 383 bp, Homo sapiens
acaccacacagttggccgtgccccgggcgcagtcctagggataaggacagacaggggtctaagccactcagctcaacsctgctgagactgccatctctcccattttccttacttgacctcaaactcccctcctccaggaagtcttctcaaactaatcttatatccaaaatagctgcctgccccaaatctgagctattcagctttgaaatgcgtggagggggcagcatggaagggaatctcttacttgacagcacaggcagagtagcttccccaagtgatgcttatgttacctaatgacagtcccatttattgagcacctactacttgtcaggcacttatctcacttaagcttcgcaatagtcctacaaggtgcacattatcat

SEQ ID NO: 515339 - DNA, 619 bp, Homo sapiens
ctgctgcggctactactactgctactagtactttgagggttcagtttgctgccactctctatcaccaagccacctactgcaggttggcagayctgcagatcctctcccaatcttcccgtggtcttaagccacagaagtggaagctctctcctggccttccagtgccctgctgccctcattccatccatggcaatgctctagcaggaagttatttctggagtctgccctgcatgcatccctctcatggcaccctcaacttctatgtcctttccatctcctcccattctaagcagagacagacagtctccctcccttggggaattcagcccttggaagaagcaggggagccagaggccctggggctggatcaaggatgcaagttgggggaaaggcccagaagaaggagatggttcgctgccaagacaagaaccttgctttccaactcatccctaaagcaaaatactggtctcagggccgggaagtgcagcttcagacgcaagccagatgaggcaaggctccaggttgggatgtgggatgtctgtgggcagtctaggtcttggtggggctagaaaacagagaaatgaggaggcccacagagtggggagggggacgatctgtg

SEQ ID NO: 515340 - DNA, 616 bp, Homo sapiens
ctgcggctactactactgctactagtactttgagggttcagtttgctgccactctctatcaccaagccacctactgcaggttggcagacctgcagatcctctcccaatcttcccgtggtcttaagccacagaagtggaagctctctcctggccttccagtgccctgctgccctcattccatccatggcaatgctctagcaggaagttatttctggagtctgccctgcatgcatccctctcatggcaccctcaacttctatgtcctttccatctcctcccattctaagcagagacagacagtctccctcccttggggaattcagcccttggaagaagcaggggagccagaggccctggggctggatcaaggatgcaagttgggggaaaggcccagaagaaggagatggttcgctgccaagacaagaaccttgctttccaactcatccctaaagcaaaatactggtctcagggccggsaagtgcagcttcagacgcaagccagatgaggcaaggctccaggttgggatgtgggatgtctgtgggcagtctaggtcttggtggggctagaaaacagagaaatgaggaggcccacagagtggggagggggacgatctgtg

SEQ ID NO: 515341 - DNA, 453 bp, Homo sapiens
tccaggaagattccagatacctgacctagcattacatttccgaaataatggracgatttatccagagtactcccgaataaatagcgtgaatgttcctagtcctgcttggaagcataagctaccagtgagcttgtctcaggctgtgagaatggataaggacaggtggaagcaatggtgttcttctcagccggaaccccgtgtggtcagtgtgcagcctgacactcgaaactcgttcatcttcctttctaagtcctttcacatggagtccaaccctcgggcagaaccccagattttcttcagtacttcacatgttctctcgttggcctgttccagatccctcttcatgttgcagcacaccaaggctttggattcctccagcaatattcgattacatgagacaagcttcttgatctgagccaccaatttcctgagtgaaggtccaggatccaaaca

SEQ ID NO: 515342 - DNA, 478 bp, Homo sapiens
ggtcgtcccatgatttcggaaacgtaatggtagatcagctatctggaatctgcccagaggtagaagagggtgttggaaaccaagtctttycattagcctaaaccatatcacaaagaggcaatacggatgctcctagtcgaatggctgggccattgagtgcttcaacaatacgcagcttaagctgaacaatagcattcaggaagttccttctatccaacaatgaaacaggcccgaacctggacccaatcgcatctactctgtacttcagagaccagacaagattgggagcgttcacggtggtatgactgtagattgttcacgacgtttccagtagcttctgccgttttaatgcttgctctctctctgtcctctgtcaaatgtcgtaaaaaataaataaggccaagtgcaccacggaagaccgtaccaatggcgctgagcagtccaaggttgctgtactttctggagtcagtactcccga

SEQ ID NO: 515343 - DNA, 478 bp, Homo sapiens
ggtcgtcccatgatttcggaaacgtaatggtagatcagctatctggaatctgcccagaggtagaagagggtgttggaaaccaagtcttttcattagcctaaaccatatcacaaagaggcaatacggatgctcctagtcgaatggctgggccattgagtgcttcaacaatacgcagcttaagctgaacaatagcattcaggaagttccttctatccaacaatgaaacaggcccgaacctggacccaatsgcatctactctgtacttcagagaccagacaagattgggagcgttcacggtggtatgactgtagattgttcacgacgtttccagtagcttctgccgttttaatgcttgctctctctctgtcctctgtcaaatgtcgtaaaaaataaataaggccaagtgcaccacggaagaccgtaccaatggcgctgagcagtccaaggttgctgtactttctggagtcagtactcccga

SEQ ID NO: 515344 - DNA, 478 bp, Homo sapiens
ggtcgtcccatgatttcggaaacgtaatggtagatcagctatctggaatctgcccagaggtagaagagggtgttggaaaccaagtcttttcattagcctaaaccatatcacaaagaggcaatacggatgctcctagtcgaatggctgggccattgagtgcttcaacaatacgcagcttaagctgaacaatagcattcaggaagttccttctatccaacaatgaaacaggcccgaacctggacccaatcgcatctactctgtacttcagagaccagacaagattgggagcrttcacggtggtatgactgtagattgttcacgacgtttccagtagcttctgccgttttaatgcttgctctctctctgtcctctgtcaaatgtcgtaaaaaataaataaggccaagtgcaccacggaagaccgtaccaatggcgctgagcagtccaaggttgctgtactttctggagtcagtactcccga

SEQ ID NO: 515345 - DNA, 478 bp, Homo sapiens
ggtcgtcccatgatttcggaaacgtaatggtagatcagctatctggaatctgcccagaggtagaagagggtgttggaaaccaagtcttttcattagcctaaaccatatcacaaagaggcaatacggatgctcctagtcgaatggctgggccattgagtgcttcaacaatacgcagcttaagctgaacaatagcattcaggaagttccttctatccaacaatgaaacaggcccgaacctggacccaatcgcatctactctgtacttcagagaccagacaagattgggagcgttcacggtggtatgactgtagattgttcacgacgtttccagtagcttctgccgttttaatgcttgctctctctctgtcctctgtcaaatgtcgyaaaaaataaataaggccaagtgcaccacggaagaccgtaccaatggcgctgagcagtccaaggttgctgtactttctggagtcagtactcccga

SEQ ID NO: 515346 - DNA, 365 bp, Homo sapiens
tggtcgtcccatgatttcggaaacgtaatggtagatcagctatctggaatctgcccagaggtagaagagggtgttggaaaccaagtcttttcattagcctaaaccatatcacaaagaggcaatacggatgctcctagtcgaatggctgggccattgagtgcttcaacaatacrcagcttaagcggaacaaagcattcagaaagttccttctatccaacaatgaaacaggcccgaacctgggcccaatcgcatctactctgtacttcagagaccagacaagattgggagcgttcacggtggtatgactgtagattgctcacgacgtttccagtagcttctgccgttttaatgcttgctctctctct

SEQ ID NO: 515347 - DNA, 365 bp, Homo sapiens
tggtcgtcccatgatttcggaaacgtaatggtagatcagctatctggaatctgcccagaggtagaagagggtgttggaaaccaagtcttttcattagcctaaaccatatcacaaagaggcaatacggatgctcctagtcgaatggctgggccattgagtgcttcaacaatacacagcttaagsggaacaaagcattcagaaagttccttctatccaacaatgaaacaggcccgaacctgggcccaatcgcatctactctgtacttcagagaccagacaagattgggagcgttcacggtggtatgactgtagattgctcacgacgtttccagtagcttctgccgttttaatgcttgctctctctct

SEQ ID NO: 515348 - DNA, 365 bp, Homo sapiens
tggtcgtcccatgatttcggaaacgtaatggtagatcagctatctggaatctgcccagaggtagaagagggtgttggaaaccaagtcttttcattagcctaaaccatatcacaaagaggcaatacggatgctcctagtcgaatggctgggccattgagtgcttcaacaatacacagcttaagcggaacaaagcattcagaaagttccttctatccaacaatgaaacaggcccgaacctgggcccaatygcatctactctgtacttcagagaccagacaagattgggagcgttcacggtggtatgactgtagattgctcacgacgtttccagtagcttctgccgttttaatgcttgctctctctct

SEQ ID NO: 515349 - DNA, 365 bp, Homo sapiens
tggtcgtcccatgatttcggaaacgtaatggtagatcagctatctggaatctgcccagaggtagaagagggtgttggaaaccaagtcttttcattagcctaaaccatatcacaaagaggcaatacggatgctcctagtcgaatggctgggccattgagtgcttcaacaatacacagcttaagcggaacaaagcattcagaaagttccttctatccaacaatgaaacaggcccgaacctgggcccaatcgcatctactctgtacttcagagaccagacaagattgggagcgttsacggtggtatgactgtagattgctcacgacgtttccagtagcttctgccgttttaatgcttgctctctctct

SEQ ID NO: 515350 - DNA, 443 bp, Homo sapiens
ggtttggaacctggaccttcactcaggaaattggtggctcagatcaagaagcttgtctcatgtaatygaatattgctggaggaatccaaagccttggtgtgctgcaacatgaagagggatctggaacaggccaacgagagaacatgtgaagtactgaagaaaatctggggttctgcccaagggttggactccatgtgaaaggacttagaaaggaagatgaacgagtttcgagtgtcaggctgcacactgaccacatggggttccggctgagaagaacaccattgcttccacctgtccttatccattctcacagcctgagacaagctcactggtagcttatgcttccaagcagcactaggaacattcacgctatttatttgggagtactgactccagaaagtacaggaagcttggactgctcggcgccattggtagggtcttcc

SEQ ID NO: 515351 - DNA, 498 bp, Homo sapiens
ccttcactcaggaaattggtggctcagatcaagaagcttgtctcatgtaattgaatattgctggaggaatccaaagccttggtgtgctgcaacatgaagagggatctggaacaggccaacgagagaacatgtgaagtactgaagaaaatctggrgttctgcccaagggttggactccatgtgaaaggacttagaaaggaagatgaacgagtttcgagtgtcaggctgcacactgaccacatggggttccggctgagaagaacaccattgcttccacctgtccttatccattctcacagcctgagacaagctcactggtagcttatgcttccaagcagcactaggaacattcacgctatttatttgggagtactgactccagaaagtacaggaagcttggactgctcggcgccattggtagggtcttccgtggtgcacttggccttatttattttttacgacatttgacagagggcagagagagagcaagcattaaaac

SEQ ID NO: 515352 - DNA, 443 bp, Homo sapiens
tgtttggatcctggaccttcactcaggaaattggtggctcagatcaagaagcttgtctcatstaatcgaatagtgctggaggaatccaacaccttggtgtgctgcaacatgaagagggatctggaacaggccaacgagagaacatgtgaagtactgaagaaaatctggggttctgcccaagggttggactccatgtgaaaggacttagaaaggaagatgaatgactttcgagtgtcaggctgcacactgaccacatcgggatccagctgagaagaacaccattgcttccggcagtccttcttcattctcacagcctgaaacaagctcactggtagcttatgcttgcaagcaggaccgggaacattcacgctatttattcgggagtactctggataaatcatcccattatttcggaaatgtaatgctaggtcaggtatctggaa

SEQ ID NO: 515353 - DNA, 443 bp, Homo sapiens
tgtttggatcctggaccttcactcaggaaattggtggctcagatcaagaagcttgtctcatgtaatcgaatagtgctggaggaatccaacaccttggtgtgctgcaacatgaagagggatctggaacaggccaacgagagaacatgtgaagtactgaagaaaatctggggttctgcccaagggttggactccatgtgaaaggacttagaaaggaagatgaatgastttcgagtgtcaggctgcacactgaccacatcgggatccagctgagaagaacaccattgcttccggcagtccttcttcattctcacagcctgaaacaagctcactggtagcttatgcttgcaagcaggaccgggaacattcacgctatttattcgggagtactctggataaatcatcccattatttcggaaatgtaatgctaggtcaggtatctggaa

SEQ ID NO: 515354 - DNA, 443 bp, Homo sapiens
tgtttggatcctggaccttcactcaggaaattggtggctcagatcaagaagcttgtctcatgtaatcgaatagtgctggaggaatccaacaccttggtgtgctgcaacatgaagagggatctggaacaggccaacgagagaacatgtgaagtactgaagaaaatctggggttctgcccaagggttggactccatgtgaaaggacttagaaaggaagatgaatgactttcgagtgtcaggctgcacactgaccacatcgggatcmagctgagaagaacaccattgcttccggcagtccttcttcattctcacagcctgaaacaagctcactggtagcttatgcttgcaagcaggaccgggaacattcacgctatttattcgggagtactctggataaatcatcccattatttcggaaatgtaatgctaggtcaggtatctggaa

SEQ ID NO: 515355 - DNA, 617 bp, Homo sapiens
attaaaatgaatgattagagaaataaagagatacgttttcttcatcaatgatagactggataaagaaaaatgtggcacatatacatcatggaatactatgcagccatraaaaaggatgagttcacttcctttgcaaggacatggatgaagctagaaatcattctcagcaaactaacacaggaacagaaaaccaaacaccgcatgttctcattcgtaagtggaagctgaacaatgagaacacatgggcacagagaggaaaacatcacacactggggcctattggggggtggaggactaggggagggacagcattaggagaaataccgaacgtagatggcgtgttgacgggtgcagcaaaacaccacagcacgtgtatacctatgtaacaaaactgcacctgctgcacatgtatcccagaacttaagtgtaataataaaaaaaaattgaatataacttatagtagaataaaaaaatagaatgaaatgtctatagtccattacagaaattcaacaataacagaataatataattcatatagaaaagttaaaaaatttaattgaaaatcaaattcttaaaacgttatacaagtatataaaagaatgaagctcatatatagc

SEQ ID NO: 515356 - DNA, 495 bp, Homo sapiens
aatgtttttctatgaacacattaaattcaataatgtttacattttctcttcttgtatggatttcatttcttccagtttgttttcactattttttcattttgtgcctttgttttgtaataaagatattcttgagctatcaggtgatcatcgactatcccttcatatgtaagaaagaagcatgaaaaaaatttgtgagcataaacagaacttataaaatggtggtttttatcgtagtgtgagtggtagggagccagtggttttcactgcaaatatttttagacatatttatattagttatgtrtatatttgggtaaggtagtaatttatcatataggtaacatctcaagttcaactgggagtctttctcataacttaggatctttcattttcttaggatctcagcgtgacttcatctttctaatttttcaaattctacacaaaattaaagaaacaattattggacctatcttttaccttggccaagtcatgactttt

SEQ ID NO: 515357 - DNA, 541 bp, Homo sapiens
gtgtgcccagacatagtacagcataaacaagctgtccctgttgtgtcctgtacaaaactgtgatccatagagcccrtgagaataataaaacagttattatctgccacaaactttgaggtggcttgtaataaaacaatagataactggaagtaaatgctaaatttttacatggaaaggagcattggatattcatgatggctactgtgactgggcagtgttgacttgaatagagtttagggatgaagaccgagagcccggtaggacagatcatgttgggctttctaagccataaaaagtttagttagtttgcttttctgttttctaagcttgatggggccccactgacctattcctaaaggactgaaacctaaaagtgtggtacagaaaggcactttaacactggagcaaaatcatgtgggctcagggacattttcatcgtttattatatatgcttacctgaaaaatctgttaatttgtttcgtcctcagtttcatcatcagcaaagtagaaacgaatacaagagctactatttcaaagggtg

SEQ ID NO: 515358 - DNA, 541 bp, Homo sapiens
gtgtgcccagacatagtacagcataaacaagctgtccctgttgtgtcctgtacaaaactgtgatccatagagcccatgagaataataaaacagttattatctgccacaaactttgaggtggcttgtaataaaacaatagataactggaagtaaatgctaaatttttacatggaaaggagcattggatattcatgatggctactgtgactgggcagtgttgacttgaatagagtttagggatgaagaccgagagcccggtaggacagaycatgttgggctttctaagccataaaaagtttagttagtttgcttttctgttttctaagcttgatggggccccactgacctattcctaaaggactgaaacctaaaagtgtggtacagaaaggcactttaacactggagcaaaatcatgtgggctcagggacattttcatcgtttattatatatgcttacctgaaaaatctgttaatttgtttcgtcctcagtttcatcatcagcaaagtagaaacgaatacaagagctactatttcaaagggtg

SEQ ID NO: 515359 - DNA, 541 bp, Homo sapiens
gtgtgcccagacatagtacagcataaacaagctgtccctgttgtgtcctgtacaaaactgtgatccatagagcccatgagaataataaaacagttattatctgccacaaactttgaggtggcttgtaataaaacaatagataactggaagtaaatgctaaatttttacatggaaaggagcattggatattcatgatggctactgtgactgggcagtgttgacttgaatagagtttagggatgaagaccgagagcccggtaggacagatcatgttgggctttctaagccataaaaagtttagttagtttgcttttctgttttctaagcttgatggggccccactgacctattcctaaaggactgaaacmtaaaagtgtggtacagaaaggcactttaacactggagcaaaatcatgtgggctcagggacattttcatcgtttattatatatgcttacctgaaaaatctgttaatttgtttcgtcctcagtttcatcatcagcaaagtagaaacgaatacaagagctactatttcaaagggtg

SEQ ID NO: 515360 - DNA, 504 bp, Homo sapiens
acagcagcatgggcataacccaggagcaaaatctgaggctcccgctccaaccctacagaatcagaatctgttgtatcaagatcctctggttatttgcatgcccgttgaaattcaaggaacacttatctagactgagtggggctaagtgatggtttgattttaggaattattgagaagagtgaatctaggcctggaagggtgaaagtggtgtaggtattccattagaggctaacacactaaaaaacaatagagataaatgtaaatgacctagtttgtattcaaagacttcacaaaggaaatgtgragtaagaaacagatgagaagaaataaggtaggggagatgataattttaatttttggatgggaaaaataggagatcagcaatgggaaattcatcaggtgtttgggcttacacaactgtagatcccagaaaaggtctggatagagatgaagataggagagccatgcatctgttttttggttgctaagatcaggggagaggac

SEQ ID NO: 515361 - DNA, 644 bp, Homo sapiens
ctggtttcatattatagctttactccttactaatcaatgtccttgggaaatttattttacctttctttgtctcgggttactcatctgtgaaatggggattatatgattaccttccttttagactattaggaggataaatgtgaccatgcacccaaagctcataaaagagtactgggcacatgtttagcatgtaataagtgtcaattgttgtaataattatcattaactctcaagaagactggttgataaatattatcttacaatgtcacttkttccaaggtaagaataattagaataacacagaaaaccattcaacatttttattttgccttagtgttttttaactccttgaccttcaaaaatagggagtttctcaaaacccaacatggacaactcccaaagcaaaaagaaaattcattttgaaaactatgggtgtagtctgtctcaactaatataaatatattgccacacaaaggacatctgtaagtaggtacagtgcctgagaagaaaaaaaaagatcaggtttcaattatgtaaggcatgaattcttattttaaaatggtcagtaatgcaatgctcatacctcaagatggaaggaattagtctaatttatcctctgtgtgcattggggtatgattttttat

SEQ ID NO: 515362 - DNA, 644 bp, Homo sapiens
ctggtttcatattatagctttactccttactaatcaatgtccttgggaaatttattttacctttctttgtctcgggttactcatctgtgaaatggggattatatgattaccttccttttagactattaggaggataaatgtgaccatgcacccaaagctcataaaagagtactgggcacatgtttagcatgtaataagtgtcaattgttgtaataattatcattaactctcaagaagactggttgataaatattatcttacaatgtcacttgttccaaggtaagaataattagaataacacagaaaaccattcaacatttttattttgccttagtgttttttaactccttgaccttcaaaaatagggagtttctcaaaacccaacatggacaactcccaaagcaaaaagaaaattcattttgaaaactatgggtgtagtctgtctcaactaatataaatatattgccacacaaaggacatctgtaagtaggtacagtgcctgagaagaaraaaaaagatcaggtttcaattatgtaaggcatgaattcttattttaaaatggtcagtaatgcaatgctcatacctcaagatggaaggaattagtctaatttatcctctgtgtgcattggggtatgattttttat

SEQ ID NO: 515363 - DNA, 417 bp, Homo sapiens
ttatcctaagtgaactaatgcaggaacagaaaaccaaatactgcacgttctcasttgtgagtgggacctaagcatcgagtacacagcgacacaaagatggaaacaatagacactggggactactagagcagggagggaggtgaggactaaaagactacctatcaggtgttatgctcactacctggttgatgggaccaattataccctaaacctgagcattatctacctttctctaaagctggagaatgtcccaagtggatccgtcatacagaggctactttcagccactagtgttttattgaactttcagattccatttctaagtcactgaaggagtggggtccagtgtgggatcccttgaatgcctaatggggtcttcagcgccagatacataattagtggggctcagtgcaaaag

SEQ ID NO: 515364 - DNA, 568 bp, Homo sapiens
ggctatgtgctagaaaaatctcatccactgccttcatttccaaaataaaaacatggtgaattttgtctgatttagttcattcctccctcacagtcttatgtcatgttagaaacaaatccaaggatattcttccatatgccaaatctcacccacttgagtgagaagaatagtacaaaatttatccttgtgtattttactgttgtgtggggtttttgtttgtttatttgtttgtttgttgttgttataatactattgttgactctagatcctttctgtcaaagtgaagaatgggccaaaagggaaaatacagcaagtatttccatggaacaacctcagggctgtgttggaaatgggagaagtctgccattatgrtgatatagttctacattcctcacggaacaacacgggcaaaagtaatttgtgtttatttatcctgccgttattcacaaaatttgaaacacttgtaacatgtaaaacttgagctacaccaattgccgagagatgtatacatccagacttctaatatgcttgaaggtaagcaggtgatgtgtgtgactaagagaggacc

SEQ ID NO: 515365 - DNA, 498 bp, Homo sapiens
gcgttcatgttgttgcaaagatatgatctcattcttcttaaggctatgtagtattccatcttgtatagacacctcattttttaaaattcaatctaccattgatgggcacctaggttgattccacgtctttgctattgtgaattgtgctgcggtgaacatgtgagtgcatgtgtctgtttggtagaaggacttattttcctttgggtctatatccagtaatgggatagctgggtcaaatagtctttctgttttaagttctttgagaaatcaccaaactgctttccaaagcagatgaactaatttacattcctactggcagtgtacaagcattctcttttatccacaacctcaccaacatctgtttttttttgactttttaataatagccattcaaaaagcactattctggataattgatttcatttaggcaaaaatctctttatayaggataaaattaaaactttatctgtttaccacattgtgtctctatccatctat

SEQ ID NO: 515366 - DNA, 494 bp, Homo sapiens
tctccactctcttccatgtgtgcagagccccagtcctgccttgtgctgcactcatcagtctctgtacacacacccaaaaggatgaatagttaagaaaatctaacattgtgcagactgggatacaagaaaaaaagtccacttaccattgctcttcgacctgactgtttctgtctgggtagcttcctctctcacgttcctcaatgatccttccactcyagaaccattccttcaaaccccacagaagccctgctagcctctccctggaaccgttcccattttaggatttcttacactgcaacctgttattcctatcacataaggcatctcgttacaatgtagaatccatttcacaatcccagttggagctagaggttcaccatgtctagcaaactctcccatggttacatgatgcgtgtctgttttccttgaacttctcccctccacttttttcaagtgtttcttctccatttatcaaacccaagctggtgttttct

SEQ ID NO: 515367 - DNA, 494 bp, Homo sapiens
tctccactctcttccatgtgtgcagagccccagtcctgccttgtgctgcactcatcagtctctgtacacacacccaaaaggatgaatagttaagaaaatctaacattgtgcagactgggatacaagaaaaaaagtccacttaccattgctcttcgacctgactgtttctgtctgggtagcttcctctctcacgttcctcaatgatccttccactctagaaccattccttcaaaccccacagaagccctgctagcctctccctggaaccgttcccattttaggatttcttacactgcaacctgttattcctatcacataaggcatctcgttacaatgtrgaatccatttcacaatcccagttggagctagaggttcaccatgtctagcaaactctcccatggttacatgatgcgtgtctgttttccttgaacttctcccctccacttttttcaagtgtttcttctccatttatcaaacccaagctggtgttttct

SEQ ID NO: 515368 - DNA, 567 bp, Homo sapiens
tgggattacaggtgcctgccacaacactgggctaattttgtatttttaatagagaccgggtttcrccatgttggtcaggctggtctcaaactcctgatctcaagtgatctgcccacctcagcctcccaaagtgctgggattacgggcgtgctgagccatcttggcgaaatttggaagcttctccttcaagattctgggcgcagaggtttggaggcagtgactgcctgcttaggagactacaattctattttgtttccagggttaggacagaacttcccattccacaaatattgtattagttgcaggtcaccagaatctgaatgatgccctcagcctttgtgctctccagaaaataggtgtgagctatgaggacctgctccctatggtcaggacttgagaaggagttgggggaggttctctttaaacattgggaacagactctggttctgcattctttcctgttgtctcttgttatgtatatgttatgtattgatgatctccccatcccctcatccccactgctcccacccttattccacagaattctttgctctacccaaatgccta

SEQ ID NO: 515369 - DNA, 567 bp, Homo sapiens
tgggattacaggtgcctgccacaacactgggctaattttgtatttttaatagagaccgggtttcaccatgttggtcaggctggtctcaaactcctgatctcaagtgatctgcccacctcagcctcccaaagtgctgggattacgggcgtgctgagccatcttggcgaaatttggaagcttctccttcaagattctgggcgcagaggtttggaggcagtgactgcctgcttaggagactacaattctattttgtttccagggttaggacagaacttcccattccacaaatattgtattrgttgcaggtcaccagaatctgaatgatgccctcagcctttgtgctctccagaaaataggtgtgagctatgaggacctgctccctatggtcaggacttgagaaggagttgggggaggttctctttaaacattgggaacagactctggttctgcattctttcctgttgtctcttgttatgtatatgttatgtattgatgatctccccatcccctcatccccactgctcccacccttattccacagaattctttgctctacccaaatgccta

SEQ ID NO: 515370 - DNA, 539 bp, Homo sapiens
gtgagcagatcctgacctggtctatctacaaagcactgctccttcactgctattctctacacctgctggctgatgatgttctatactcgagcttctcccagtatgaattagtggcctatggtcagtagtttccacatgtggcrtttctaggaaaaggaactatccctattcccagaacaagccctaggttacacttggatccaggcctactttgagagattgttgccactgaaggggagacagcctactaaagacagagctctagcttcaaaattggagagatcagctttcaattttggctttcatatttactagctgtgtgatctaggtcaaataatttaacctgtctgaacttcagcaacccagcactatatttaacatggagagagctaaaaagtcattagggacatacgagccctagattacacttaggctctgtgcttctaaaaatccgactcctctggggagtcggaagtgagaatacgtgtgttcgggagaaagatataacagagttgataaaaagtgggcaatagtgatgc

SEQ ID NO: 515371 - DNA, 332 bp, Homo sapiens
ctgacctggtctatctacaaagcactgctccttcactgctattctctacacctgctggctgatgatgttctatactcgagcttctcccagtatgaattagtggcctatggtcagtagtttccacatgtggcatttctaggaaaaggaactatccctattcccagaacaagccctaggttacacttggatccaggcctactttgagagattgttgccactgaaggggagacagcctactaaagacagagctctagcttcaaaattggagagatcagctttcmattttggctttcatatttactagctgtgtgatctaggtcaaataatttaac

SEQ ID NO: 515372 - DNA, 539 bp, Homo sapiens
gtgagcagatcctgacctggtctatctacaaagcactgctccttcactgctattctctacacctgctggctgatgatgttctatactcgagcttctcccagtatgaattagtggcctatggtcagtagtttccacatgtggcatttctaggaaaaggaactatccctattcccagaacaagccctaggttacacttggatccaggcctactttgagagattgttgccactgaaggggagacagcctactaaagacagagctctagcttcaaaattggagagatcagctttcaattttggctttcatatttactagctgtgtgatctaggtcaaataatttaacctgtctgaacttcagcaacccagcactatatttaacatggagagagctaaaaagtcattagggacatacgagccctagattacacttaggctctgtgcttctaaaaatccgactcctctggggagtcggaagtgagaatacgtgtgttygggagaaagatataacagagttgataaaaagtgggcaatagtgatgc

SEQ ID NO: 515373 - DNA, 497 bp, Homo sapiens
caataatataatttccttgtaatactatagatatgtacagcacataraaatttatcaaatgtttttacacttatttggcttcacaaaaacttggcggcatgatattagagccccatttgccagatggtaaaacttcacttttctaaggaaactgcccaaatgcaaaacgttcacttggcagccaagatgccgagatgagtctcgatctcactctctagaccctttgctactcaagctgtggtctttggggcagcaacatcagcatcatgtcacctgggagtgtgttagaaatgcagactctaaaatgtaataggaaaataaaaggctgtgaaatctgacataccagaaaaaaaaggaaatcatccatgtaccgtattttctactattcagctgtaaaaaagaatggaatcctgtcattttcaacagcagggatggaactggaagacactatattaaatgaaataaaccagacacacaaagacaaatatcccatgttc

SEQ ID NO: 515374 - DNA, 628 bp, Homo sapiens
tgtcctcttcccctgttgctctgctgcactgatttgcaactaggcagatttgacggtgggggtgggagagagcatgcagaagygcccccactgacctcatgtgcccttccccacctagcctcaatcacacccatactgactgagaaccatggctccaacagttaagcctttaacgtgagggaacactgttttctcaactaggcatattctgctagaaatatcagatccttttcagtgtaccttaattttacaaatatttcaggtgaaagttactttgcccttgccccaaattacctgagccatgatctcaatctgatcattttattttaatagtcccaaccttaaaatgttcaaatccaccttattctgtagagaagtccatgtgtctgcagaaacaccatgtttctttgtctgtccttgtgagtctgaataattaaacaggattttgatggcgtgtgtgccatgtgtatttattgtgcacacaggtagatacatgcataacatattaattgaattattttaaaagcataaatattttgctgggttacagaaacacacactaaatatctaaatctacaaactgctgacaaacagcaccttttctaacaaaagagagcagtttaataac

SEQ ID NO: 515375 - DNA, 628 bp, Homo sapiens
tgtcctcttcccctgttgctctgctgcactgatttgcaactaggcagatttgacggtgggggtgggagagagcatgcagaagtgcccccactgacctcatgtgcccttccccacctagcctcaatcacacccatactgactgagaaccatggctccaacagttaagcctttaacgtgagggaacactgttttctcaactaggcatattctgctagaaatatcagatccttttcagtgtaccttaattttacaaatatttcagrtgaaagttactttgcccttgccccaaattacctgagccatgatctcaatctgatcattttattttaatagtcccaaccttaaaatgttcaaatccaccttattctgtagagaagtccatgtgtctgcagaaacaccatgtttctttgtctgtccttgtgagtctgaataattaaacaggattttgatggcgtgtgtgccatgtgtatttattgtgcacacaggtagatacatgcataacatattaattgaattattttaaaagcataaatattttgctgggttacagaaacacacactaaatatctaaatctacaaactgctgacaaacagcaccttttctaacaaaagagagcagtttaataac

SEQ ID NO: 515376 - DNA, 221 bp, Homo sapiens
tccttttcagtgtaccttaattttacaaatatttcaggtgaaagttactttgcccttgccccaaattacctgagmcatgatctcaatctgatcattttattttaatagtcccaaccttaaaatgttcaaatccaccttattctgtagagaagtccatgtgtctgcagaaacaccatgtttctttgtctgtccttgtgagtctgaataattaaacaggattt

SEQ ID NO: 515377 - DNA, 545 bp, Homo sapiens
tttaaagtgcatccctagttaattacatccaaagagtaataataaaatcaactgttaaattttagaacttcctctttaaagtattaaatatctgggaactgcaatgcagttaaatttctctcagaacaatgctttccgttgcttargctggcccctaagaatacttatgcaaactctttcggtgtgctagagagtgtgtttttcctgtgaagaagtatttcaaataaacccttgtttctgccagatgtctgtggcttattaaataaccaatagaggaataggttcattcacttaataagaggatatcactgagtcacaaatcttctataataattgacagtacatgaccaaaaataattgtgaaaccaaaactaaaatgttgtttgtgtcctaataccgtatttgaagccttgactcagttgcctcagcaggtttcaatccagacattgtctggcctttaaaatttggcccttgataatgtcaacccacatcaatgggaagggcatttgtgactcactgaagcacaagtctgtgctagaccagga

SEQ ID NO: 515378 - DNA, 359 bp, Homo sapiens
taaccatcagaattcaggtgggagcaattaccataataggttgaaaggtctgaatggcagtccatgattctgccccgtggagaactattgaaaaaagagaacagtgttcccaggcacaagatagtgggaaagcaaacttgaatactgtgtaaactatacagtcagaatatatcaaagatgggagatgaggaggctgaaggcagtctttccaataaaatgtcacattcttatgcctagttctgagacttgagccagctctaaaactggaattcacaggtccccataggaaggatcctgcaacaacagtgcaagtgtagacagcartgatagccccagtggttttctaaataagcttatga

SEQ ID NO: 515379 - DNA, 602 bp, Homo sapiens
tcccagcacattgcctttccacatttctctcctgtctcctctctgccatctttgagcagccacttaggttcaggctcttcccagttctcttttgaccttgcttcttacatcttaatgtgcagcagaatcacctgtggatcctattcaaatgtagattctgattctgtaggtctgggacagccagaggttccacatttctaatatgctcccagataatgtaaaactgctggtcccctatcacacgttgaacagcaaggcacatttacttctaatgagagccccagaatccagaaggtttccgttttaatctaattttcgggtttgtattctaaactatgcttctkttctttcctgctaaaatatggcttgcataattcgtagtaaataaaatctcttcacaatataactccaacctgtgttttgccttaacttccagaatccctagcctacatttatctaactagctactttgaggatgtatttttcgctttctgccttcatgccttgttgggctcaattctttgcttgaagtgccatcttcccccttttatttgtgttactcaaaattttataactcctgaagacctgacacaaataccact

SEQ ID NO: 515380 - DNA, 646 bp, Homo sapiens
tagctagtagctggaaataattgacagatgtgaaaacttctctgtaaaacagttttctaaataacatatctgtgctgaaactgaaataggtaataaatacttaagattaagcattctgagatgtgcaactgactctgaagctagcaacttctaaatagtgtttgtttgcctttgaggtgttttggttttaaattctttctgtcctgtaaactatcaggttttttatttttttatttttttaaattaaaactacagtcaccagttccatcaggtcatagcctataggaggaaagtataatctctttgttccatcactatatttttaccttcaggatctgaccatgaatttatttaattatgaacaaatatttattgagcacctacaacaaatgagatgagaaaaataagagataagtaagaagaaatatrttttaacagggtttcacctaataagaaatcactaaaatgtatctcaattaaaaggtttaaaaagatatatggttaaaatatttatcatatcttttgttctcatttcttttgctttttaattatttatttactttgctctcaaagtaaataaatattcgagaatttacctatccctattttcagggttgaattaaattctataatacattcttaaata

SEQ ID NO: 515381 - DNA, 607 bp, Homo sapiens
gcactcattccaatgtatgttctttcacttttacaagtggtgcctcaggaaattgttcttaaactataaccaggcatagtaattatctcccttattatctggttctggattggggaacatgctttataaatcagtttttgttggcaaaagatatggggacaaatttgaactaaaatcattattgcagaccatagtgtatgaaatgacatcttaacgttttttccagtttcttgcaaatgttaaccttagatgtgtgtaaatgattattttataataaaatatagatatatgattataagaatacaattcaacaaatcattaatgaaaaaatcaatatagcagatccacattccattgatattaacaactttgtgtcataatctaattctcattatctaggtctaataaataaagtaagtaaaaaaacaaatatatatatakagagagagagacagagagcgcagataaaacattacttcttcgaagttacttcccatattagggctaaaatgggcattaaagacatttctctcaggacctagctgagttacttccggttattagtgaatcaatcatcatcaagaaaacaaagacaacccccattaaa

SEQ ID NO: 515382 - DNA, 612 bp, Homo sapiens
ttatatcaggcaaagtccaatcaggagactgaaatcacatgataatttgaacaggacaattttaatataaagagttattagctataactggggattggagtaatgaggaattggctagaatgggacaaagagatctctaaacagtactggaatagcaggcatagagagcagccactacccctgtggctgagaaagagcatccaaggaaaagcccctctatgcctctgggctgagatccagatcttgttggacagggtgcagtttaccgaatggtggaggaatttgctgaggtgttgtgctggcaggacttgctgataatatagtttctgggtgcttragaaagctgtccgtggagcggtggtgtgactcagaacctgctgcaaagcttcccaaaggatgctataggaaggcttccaacgggaggtgccatacttcattgcaaagccaaacattgctggccaccaggcactgctgaccctcaattgcttaaggagctgggcactgaagaagttaccttagagggcaatgagggaagccattcacaacgatgtgatgtatgctactggcctttggatgctacagaagttgctcatagtgcagaagccttctaag

SEQ ID NO: 515383 - DNA, 635 bp, Homo sapiens
tgccttttttaaaaacagtgagcaattgctttaaaattctgtgactataccacctcaacatttttctttgaatttaccattaacacctatgtactttggtgaacattttaacatttagaaaatatcacttcgaagaaaactaaaaattgttgaaggaagcatgatccaaatatcctaccacttgaacacaatcatattattagcataaataaatgtttaattttagtctatataaaaagattcttgtacagaaattgactcagttttctcaaggaggaaattcgagraagtatgggttgttttgagagtggcataattgcctttatggtgctaatctccccgccaaagggctcaaggtgaattgagatagcttccctggagcaagagtcctccacaacgcaagtctgtctcaagcttacagcgcttccgaaataccgagacgactttcttcactagaagagctgaggaggaaaacacacacagcagcctcagcacaggtttcaagacaggagataaaataccagagaaccagtggaataaattgtcactaccattcagacttaggtttcaggaaatagagcttgagaaaaagagagataactgagcagactttgtcaaattgagaacctacttta

SEQ ID NO: 515384 - DNA, 399 bp, Homo sapiens
tctcaccatgtttctttacctaggtmacttcaacactgctttttttctttttttttctttttgagactgttgtccagactggagggcattggcgcgatctcggctcactgcaagctccacctcccgggttcactccattctcctgcctcagcctcccgagtagctgggactacaggcgcccgccaccgcgcctggctaatttcttatatttttagcagagatggggtttcaccatgttagccatgatggtcccgatctcctgaccttgtgatctgcccacctcggcctcccaaagtgctgggattacaggcgtgagccaccgtgcccggccaacactgctgttttttcccttagggtaacagaggctttagccaggcatgggacacacctcctcctccc

SEQ ID NO: 515385 - DNA, 506 bp, Homo sapiens
ttctgatggctcaaaaaccttcagccgtttgcaattttatgatttgtgaaatcatgaatcaggaatataggaaaagcctaaatctgtcactataagcagctaagtgctgaataaagaagttacaaagctcggctgggtgctgtggctcatgcctgtaatcccagcactttgggaggccaaggtaggtggatcacctgagatcgggagttcaagaccagcctgaccaacatggagaagccccatctctactaaaaaatatataaaattagccagtcatggtggcacatgcctgtaatcccagctactcaggaggctgaggcaggagaatcgcttgaacccaggaggtagaggttgcagtgagccgagatcatgccattgcactccagcctgggcgacaagagcgaaactcttgtctcaaaaaaaaaaaaaaaaaaaaattgcaaagctcttcatctctgtaaagtgyaatctgacaatctgactgccccattcagtagagagaggga

SEQ ID NO: 515386 - DNA, 553 bp, Homo sapiens
tcatgctggggtgctggatctcgggtgaaggacagatggaggctgcctagacgagcacagcctggggtggggagagcagccagtgagaggtggattctttgcatgtcaggggaaatgactggaaattatggctggacaaggaaaaggcagcaggcttggagcttggactgtgtgttggagtcaggggagtgaggggctccggatgttcaggagccatggggtaggtttactgtctgggaactcaggtccagggacaacaagttcaggcctatgatcaaggagtatcttgttcttcctgaattctcatcgtgatgcaaggcactgtggggaaaaaagacgtcaaagatgggggatgcctgttcatggggtttacaatctgttggcaatgaaggccatgatggatgcagtacttcaccaacaagggaggacagaaaccttagtgctaaacttacacattcaacaaatatttattggatactcatcacggcatgtgtgaagtactatattaatgaacaaaatagaaaaayataaaataaaatctttgctctttttg

SEQ ID NO: 515387 - DNA, 527 bp, Homo sapiens
aattaagatgttaatattatactagtygatgacatccacaaaggtaggatcatgtctgttttattcactaatgatttttttttattaagctcactaatgtccagccatgctaaccatttttctggttctcaaatgcactcatttcttttactctcttctgctttctctgactggtaaatacttcaatacttacttgcacactctctttttacatatttgtattctcacagcagaactttatttataattgctgtttactcagtttctcatatagtaggcatgctatcatatgaggctcaattctcttatcacgtattgtttatgtactgtctaccttcttctcactagagtaggagcttcctgagagcaggaacactgtcattatcatcacagtggtgttttcaactctcagaactatccaaagcacgctgtaagcccatgtattggttgagctaatgaatgaattatagctatcaactcatcttatgactccaaaatatgttctaagcattaataatgacagaaag

SEQ ID NO: 515388 - DNA, 527 bp, Homo sapiens
aattaagatgttaatattatactagtcgatgacatccacaaaggtaggatcatgtctgttttattcactaatgatttttttttattaagctcactaatgtccagccatgctaaccatttttctggttctcaaatgcactcatttcttttactctcttctgctttctctgactggtaaatacttmaatacttacttgcacactctctttttacatatttgtattctcacagcagaactttatttataattgctgtttactcagtttctcatatagtaggcatgctatcatatgaggctcaattctcttatcacgtattgtttatgtactgtctaccttcttctcactagagtaggagcttcctgagagcaggaacactgtcattatcatcacagtggtgttttcaactctcagaactatccaaagcacgctgtaagcccatgtattggttgagctaatgaatgaattatagctatcaactcatcttatgactccaaaatatgttctaagcattaataatgacagaaag

SEQ ID NO: 515389 - DNA, 469 bp, Homo sapiens
gtgattctgtgactgttaatgggtcttctgggtccagtcccatcagcagttgccacctgaaccaaggacctgcattagccaggagaagagcacctcaggtgaggcagtgccgagggccggtgaccaccagaccacaggctcagaaacgaggttgggctggctgcaccacgatgctgctgcctgtcagccatgtcaccacgtgaccygcctttcctgggtgctgcgttttcccatctctgaagcagttatccctcacctggagttgtgaaaatgaaacgagacacgtaccgctgttagcacaaagcctggcaccagaaacattcaccttcatgacgaatgatgggaagtgcagggggaaactgcccagtgggggaataatcgcttttttattcttttctaaaggcactcacttggaaagcagaacaagattagttactacattttataaattcctttttaggaaaacaat

SEQ ID NO: 515390 - DNA, 607 bp, Homo sapiens
ggtcagaggagtgggcaggatggccctcggcactgtctgctaggaagccttttgattggacagaactgccccatgacctgcaccttggccctctcaggctgccataagcacctcccctaggccagccgaaaagactggcactgcwgttagcaaagttagattggaggagattcttagtacacacagtaagtgaattaggaaattataccagaaagacatatgtagagggcatcacttcaacattattagcaccctccattgcatggcacttcagagttttaggaatgctttcacatttactctctctaagcttactacaagataagtcataagtggccctgtaagtagatagggcctatcttgcagtgcaaggattatcaggtggccccaacacaccagggtgagtggcagtggcaaaattcaacccatgtcctttttgttgccactgcttaaaactgaatcacccaccaccagagtgtcttgggttcctcctggcttctctagcaatcctttgaggaaacagtcctcaccctaaagcagaaagataaaaggggaatttcttccttttttgagccactgattttcctgaggccagaggttcagagca

SEQ ID NO: 515391 - DNA, 503 bp, Homo sapiens
ctgccataagcacctcccctaggccagccgaaaagactggcactgcagttagcaaagttagattggaggagattcttagtacacacagtaagtgaattaggaaattataccagaaagacatatgtagagggcatcacttcaacattattagcaccctccattgcatggcacttcagagttttaggaatgctttcacatttactctctctaagcttactacaagataagtcataagtggccctgtaagtagatagggcctatcttgcagtgcaaggattatcaggtggccccaacacaccagggtgagtggcagtggcaaaattcaacccatgtcctttttgttgccactgcttaaaactgaatcacccaccaccagagtstcttgggttcctcctggcttctctagcaatcctttgaggaaacagtcctcaccctaaagcagaaagataaaaggggaatttcttccttttttgagccactgattttcctgaggccagaggttc

SEQ ID NO: 515392 - DNA, 496 bp, Homo sapiens
ctggcttccaccctgacacggctgcatttcattagtgggtaaactgattgctcagagtatgtttatgtgtgggtgtggttgtacaactctatgcactctgtgcgctatgtatgcagatacagatacacaaaagtcattatctcgctctcagcccaacctaaattcattcctgctgtaagagttataaatggaaggttccaatcccttggtggatatggccttttggtaatatctgccccaaattctggytccccatcctctttgtgtttgtttatatgttatttacccttgcatcagaaaacttccccagactcagggcctgagtcctattatccggacatggaatcttcttcttcctctgaggcctagaaagccccaaatggttttctgatttagaaaatgaaatagactttgactcttgtggcaagctatgaaattcccaaccaacagcttccactaaatttataacatatacaacatctaaaagtatcactga

SEQ ID NO: 515393 - DNA, 502 bp, Homo sapiens
ggcttgtgtcagtggcaaaacttgaacatcgatatcgtggtttacctctttacctggggctgtctccttttcggtctatgtaaacctacaggcagttaagagcagcagttttcaatgtggggagttggaggagaggtcacaaaatccatttagtggttcatgagcaacatagcaacgaaatctactaaaataggagatagagaggggctcatcagagtaagatgtatttcttacatggctcaaagtcaaaacagtttggaaaacattgagcttgggcatctgcctcaagcaaackcaagtccgaatcctgatgctttaagctactgaaaggtgtctgacactaagtgaaaatgagcaagatggtaatgaggatgacgatgatacagatactgttgactgtggtgttgatgatgatggaggatagctagcatgtattgagtgcttgggaggcaccagacactcttctaaatattgactcgtcagtcttcactacaacttaatg

SEQ ID NO: 515394 - DNA, 473 bp, Homo sapiens
gcctcctggttttagtagtaccagagctctggcagtgtcctactggttggtggttgggtttctttgccctgccatgctttaaggtaagtgttggcagtgccaggaaaggatcctaactctgacttcttcgaacctgtcaggtcctgaaaagtgcctgggtgttggccttgggaagagttgcatccagattcccactccaccatttactagtggtgtgacgttgagcaaatgacctaagctgtctgtgtcttcgtatgtaatgtggcagtacaatacccacgtgttttggttactatgaggcttagagaaaattaagtattatgcttggaaaatacatggcacgaaattgggtgctcagtaaatgctgataatggygttgtaattgcccttatccaaatacttagtataataatgtcatagttttgatattgtgattcaccactaaatgaacaaagaatggtgaggatcgtgtt

SEQ ID NO: 515395 - DNA, 588 bp, Homo sapiens
tcctctggcctttcccagaacacagaaagagcaaagggtttttgttttatttaaatcaacatggycatcatcttggcccagcccactgtgcttccaaagtcagtctctaggtaacgcaaaggggtgctggtatccagaccattaaatatggccaggaaggctctgtgctgcaggcaagtcctggttccagcttgctcctcggatgagtgccctctcgtcccatcctgctaggccaagggcttgtttgtgtgttccccacatctggcctttatttgaaactccacctcgaagtatttcatagcacagaatatctttccttattaaactctcccccacagatttttttcgtaaaacaggcaccaaaaactacaaacctacctgtggctctcaaagtatctgtttataaacctttggaaaccgtttgcaattagttaatcacattttcaaaggaagttacagattatagatacactaacaaatgccatacacgatgcttaggccccggtaaccaactcctcacgcagaagaagaagaagtggtggagccgagggacctgggatttgtccccttttaaaactgcatgggaga

SEQ ID NO: 515396 - DNA, 588 bp, Homo sapiens
tcctctggcctttcccagaacacagaaagagcaaagggtttttgttttatttaaatcaacatggtcatcatcttggcccagcccactgtgcttccaaagtcagtctctaggtaacgcaaaggggtgctggtatccagaccattaaatatggccaggaaggctctgtgctgcaggcaagtcctggttccagcttgctcctcrgatgagtgccctctcgtcccatcctgctaggccaagggcttgtttgtgtgttccccacatctggcctttatttgaaactccacctcgaagtatttcatagcacagaatatctttccttattaaactctcccccacagatttttttcgtaaaacaggcaccaaaaactacaaacctacctgtggctctcaaagtatctgtttataaacctttggaaaccgtttgcaattagttaatcacattttcaaaggaagttacagattatagatacactaacaaatgccatacacgatgcttaggccccggtaaccaactcctcacgcagaagaagaagaagtggtggagccgagggacctgggatttgtccccttttaaaactgcatgggaga

SEQ ID NO: 515397 - DNA, 515 bp, Homo sapiens
gatgactccagccttcttcccagtacagtggatggcccctgacatcttcagtggaacctggctgggcaacagcagctctgcctggtgcaaagtcagggtgcctgcaggccaagcaggcaggttcctgggcagcaagaattcacctgtcaggacctcattggcacagcccttgttttcagagtacagcccagggctctgcaggctcacttttctcctgcttggtcggctgcccatttcctgtaccttcccagcctttcattctgctctggccttgctgcaattgcaccccatgctttttccccacgtagattcagcctatggtgctctatcaaaagctctccttatacccatgacttaaccctgtcaggtcttcttggtacttcctcaataaatcagatttsttagacacggctgcctttgtgtgaatccaggtggactctccttaattaaatcataacttcccaggtgtttccatctgggtccctactcttccctttttctaagagtgtgtctgt

SEQ ID NO: 515398 - DNA, 529 bp, Homo sapiens
ctccctcaataagttgtactttagggtgacttaacatccacttctgtgtcttcacacactgaatatttgtgggaaggagtataaatggagcagatggaggagacctgtttgaagtggttgttctttggcgaggaaatactgcttttttccccccactttatttctkacttggcctgtgtataattgtattagtagggttgaaagatctgggggtagttgccctggttattcctgagttactgggtgtgacaaggatgacagccttatgtatctgacctgtggctcatcttgaactaagcagacctattcttaatcagccaggagatatgggctctgaggattcacagttgctgtcttcaaattttgtcacttaatgtctcatgttccttgaggaaagtgggagacgggatcatttaactcaacaagatttacttatgcttaaaggaggtcaggcttgcttacctccaggctggtccagcgagctaattctgaaggcatgttgtctcccgggagctgaggccacatgcag

SEQ ID NO: 515399 - DNA, 555 bp, Homo sapiens
atcattccactgacccacaggctcagccccagggaccgtcactagaacaggtctccactatgcataggaactcacaaaaactttctcttcwtcttggcttcctctgatatccagccagtgccccacttctcaccttaaacacagatggcagctccttcccatcgttccaaaccttggggattttccagccaaattctcttcagacaccaaagcttcacccgccctcttcagggaggtgctgcaagggcatctgagatctttggaagcccaattctggcctctctttggggtgggctgagagtgggaactagactctcttttccaagtgccatgtttatcttgttcatcattatattatctccaatgcctggcacatagtaggcactacagactgacacacagtaggtgctattagtgtctgtataatgggactcttgaggttgaagctattagcagaaacctgccatgcaaaaggatggaaaaccaacaaccaaaaaaaaaaaaatgaaaacaatcatggctttgagctctaaacacactaggcaccagcccaag

SEQ ID NO: 515400 - DNA, 555 bp, Homo sapiens
atcattccactgacccacaggctcagccccagggaccgtcactagaacaggtctccactatgcataggaactcacaaaaactttctcttcttcttggcttcctctgatatccagccagtgccccacttctcaccttaaacacagatggcagctccttcccatcgttccaaaccttggggattttccagccaaattctcttcagacaccaaagcttcacccgccctcttcagggaggtgctrcaagggcatctgagatctttggaagcccaattctggcctctctttggggtgggctgagagtgggaactagactctcttttccaagtgccatgtttatcttgttcatcattatattatctccaatgcctggcacatagtaggcactacagactgacacacagtaggtgctattagtgtctgtataatgggactcttgaggttgaagctattagcagaaacctgccatgcaaaaggatggaaaaccaacaaccaaaaaaaaaaaaatgaaaacaatcatggctttgagctctaaacacactaggcaccagcccaag

SEQ ID NO: 515401 - DNA, 618 bp, Homo sapiens
caacctcaaacttaaatcagaaagaatccatagatagggtctacatctttttttgtaaataattatatataaaaatttcaaagataarccccttagaaaagacatcaaatggaacaccaaatgtacatagaaaaatggtgaggactatgacggacctttcaatagatgaagttaggctgacctcccggtttagaaacatatggtcttatggaataactaatacagtacaaatgcaagaaaacagcaataaaaatgatcaaaccttatgcttgaatatggaattacaatttacagagtgctctgcgctctccatttgatgtgataatcctatgccatgtgtagggcaggaactattatccttaattttacaggtgaaaaaactatggctcaagaaatcgaagtttctagatgaagttaaggcttcttggtaactagtagagttctaccactagaggactctactagttctgaccctaaatccaggcagacttctgcaaataatatgagtgcatagacctgagttggaatctcagttccaacacttcccagatatctggccctgggaaagtcacttcatttctttaagttttgttgcaggttgactctcagtgagtagat

SEQ ID NO: 515402 - DNA, 610 bp, Homo sapiens
ctagacaaggcaacatagggagaccccatctctacaaaaataaataaataagtaagagaattgataagatgaaatctctcattcttcttactagaaatgcctctgaatcaaccacttctcatggggcattagtttcctcaaggggaaatgacacggactagtctctaagctctcttttatctttaaacttctctgataacatacaattaatttttaaatttttatttccttttcaccgtagtagctacattgattgagggtttaatrtgaaccagacactctccaaagcgcatagattagatatttaatcatcacaccaactctctgaataggtgttaatattattatcaccattttacaggtgaggaaattgagagacaaggtaatcagataacttgcccaagaaaacacagctagaaaggggtagaaatagttttaaatccagaaaattcgaggcttgttcccttaaccactcttcagtgttgccttctctgacaagtaagggactacattttctttagcttgatatattcctttgatgcattaataaaatgaattagaggaaaaggtccaagccatggtgctctgacctgctcactgaggctggaac

SEQ ID NO: 515403 - DNA, 523 bp, Homo sapiens
agtggtgtttactgatgtatttatagatgcattctattcagttttgaaaccacagcagaattaaccaaacagaaagacagaggtcaccataaaacactttagttttctccaaagagaaaattaaatggctcttatcaattacctttatcaactaatttgtctaaatatctgcaagcagacctgaagtcattgatagggtctgtgatttgacggggaagtagggaaggtgatccattagctgtatcattagtattttccaagtgcacgtttctatagaagcacattctggtattgtccactcacagactcggaacaagcayaatacatcagagcaagactgcctttgaaacatttttcactttatttttcctacattacatcattacttttttcttacaaaggaaactaaaatactttttaaccttcctaaccagcttgacttcctcacttccaatgtatgttatcttgttgagtgcatcctctcagacctctttctgtgcattatatatgcacatacatgtcc

SEQ ID NO: 515404 - DNA, 523 bp, Homo sapiens
agtggtgtttactgatgtatttatagatgcattctattcagttttgaaaccacagcagaattaaccaaacagaaagacagaggtcaccataaaacactttagttttctccaaagagaaaattaaatggctcttatcaattacctttatcaactaatttgtctaaatatctgcaagcagacctgaagtcattgatagggtctgtgatttgacggggaagtagggaaggtgatccattagctgtatcattagtattttccaagtgcacgtttctatagaagcacattctggtattgtccactcacagactcggaacaagcacaatacatcagagcaagactgcctttgaaacatttttcactttatttttcctacattacatcattacttttttcttacaaaggaaactaaaatactttttaaccttcctaaccagcttgacttcctcacttccaatgtatgytatcttgttgagtgcatcctctcagacctctttctgtgcattatatatgcacatacatgtcc

SEQ ID NO: 515405 - DNA, 537 bp, Homo sapiens
atattcccttgataaaccaaaagctacacttcctgttccctgtatctcatggggaactccaaagctgctttaaaagataaattgttttttcttttctctctttctctctctctctcttttttttttttttttacggggtctaactctttcgccaggctggagkgcaatggcccgatctcagctcactgcaccctctaactcctgggttcaagtgattgtcctgcctcagcgttcccagtagctgggattacaggcatgcaccaccgcacctagctaatttttgtatttttagtagcgaccaggtttcaccatgttggccagaatggtcttgatctcctgatctcatgatccgcccacctttgcctcccaaagtgctgggattacaggcgtgagccaccaggcccggccgaggtaaattcttatatatatctacacagtattttgcccaccactttaggggtatcccaacactataaaaaccaaagattaggcttaatccttgaagaatttacctcaaatatactgtttccaaggaaa

SEQ ID NO: 515406 - DNA, 537 bp, Homo sapiens
atattcccttgataaaccaaaagctacacttcctgttccctgtatctcatggggaactccaaagctgctttaaaagataaattgttttttcttttctctctttctctctctctctcttttttttttttttttacggggtctaactctttcgccaggctggagtgcaatggcccgatctcagctcactgcaccctctaactcctgggttcaagtgattstcctgcctcagcgttcccagtagctgggattacaggcatgcaccaccgcacctagctaatttttgtatttttagtagcgaccaggtttcaccatgttggccagaatggtcttgatctcctgatctcatgatccgcccacctttgcctcccaaagtgctgggattacaggcgtgagccaccaggcccggccgaggtaaattcttatatatatctacacagtattttgcccaccactttaggggtatcccaacactataaaaaccaaagattaggcttaatccttgaagaatttacctcaaatatactgtttccaaggaaa

SEQ ID NO: 515407 - DNA, 639 bp, Homo sapiens
aggcctgtaatcccagcactgtgggaagctaaggcaagtggatcaccggaggtcaggagatcaagaccagcctgcccaacatgatgaaaccctatctctactaaaaatacaaaaaattagccaggcgtggtggtgcatgcctgtagtcccagctactcaggaggctgaagcaggaaaattgcttgaacccaggaggcagaggtkgcagtgagccgagattgcaccacttataccccagcttgggcaacagagcaagactccatctcaaaaaaacaaaaacgttgactaaatgaatacagatccagcttatgactgataatttttctacttgcttagtgcaaaaagaaaaatttctaggccttaacaattatgtcttatatgaacatttattcaaaaactgtttaaattttgtgctcaaagtaaaaaagaaaatttgagataccacttcatcaacactgcaaattctcagatagtgagttcacctcaaatgtaatccacatagattgtatgtgaaccttgagtttcaaatacagactagattaccaagagtaaagagatattctacttttcagatgcattttagtatacttcctggtaaactgctactgtggagaaaaccgtatggaaacatcaactgtt

SEQ ID NO: 515408 - DNA, 483 bp, Homo sapiens
gctggacttcaccacagtgcaccaaggacyggacctgcactctatctttaccccttccgacaccagatgctgagatgccacactctgagtgtgcctgcccctgagggcctccacaaatgggaaaagcttcagacctattttggttcagacgcccgtgatggtgaatttgacctactacatcctgactttattcactacctgagagaggtttttgaagttcagtttgcttaatagggatcccagagacaggtacatggctagcactggggccctcaacttgctgacagctttgcatatctgtgatcaggttagcagtgatcattgatttatcacggaaattactggcaattttctggccactattttgaatgaacaaggaagccactgatcatttatctaaaccacaatctgtgaattcaggcacttgcacaaagctgatatcattcagctacaccttcacagatttcaaagtttccaagccct

SEQ ID NO: 515409 - DNA, 615 bp, Homo sapiens
tgacatctaagatgttgaagggtgacattgggatatggcctgcctagatttttattgtcactctgttattggctgccaggttaagccttatttcttcctcacatatcatttgcatggagatatagttattgcctgtgccacttatgtagtcagggcctgccaatgctttgtgtttccaagggtgctaggaaaatgatgactcctctcccctcttaaactccaactctctagctgaactttcatctcagttaaagtacaaattccttggcagggttatgctaagttatttacactgtatcctgtctgaaactctgattaagggaaagaaatagagtcacatgagagtcaccaaaactgggcaagtgtcggagggggtggtggtgcagamtttggaatcttcaggcccagaagacaaactcactcaccttacaatattgagcagggtgaacatttcatcagggatattagggatgctcatgtagggcctgtactaggagaaccatcatgctcttctcttatggggaacagtgactccttgaattactttcctgttgccttgtaacaaatgactccaacttagtagtttaaacaacatccacttgttattccacagtt

SEQ ID NO: 515410 - DNA, 377 bp, Homo sapiens
tggcctgagttctatttccaagagttagtagaacactcctctaactcaattttaatttgttttttaccaaaatataaatgttggaaacagcgaaataaatttaaaatagtaacagggcagggctcggtggtgtacacttataatcccagcactttgggaggctgaggtgggagggktgtttgaacttaggaggtggagaccagtgcaagatggcaaaaccctgtctccacaaaaaatacaaaaattagccaggcatggtggtacgcacctgtagtcccagctacttgggaggatgaggtgtaagaatggcttgagcccgagaggtggaggttgcagtgagccgagatcacgccactgcaccccagcctgggcaaaag

SEQ ID NO: 515411 - DNA, 377 bp, Homo sapiens
tggcctgagttctatttccaagagttagtagaacactcctctaactcaattttaatttgttttttaccaaaatataaatgttggaaacagcgaaataaatttaaaatagtaacagggcagggctcggtggtgtacacttataatcccagcactttgggaggctgaggtgggagggttgtttgaacttaggaggtggagaccagtgcaagatggcaaaaccctgtctccacaaaaaatacaaaaattagccaggcatggtggtrcgcacctgtagtcccagctacttgggaggatgaggtgtaagaatggcttgagcccgagaggtggaggttgcagtgagccgagatcacgccactgcaccccagcctgggcaaaag

SEQ ID NO: 515412 - DNA, 377 bp, Homo sapiens
tggcctgagttctatttccaagagttagtagaacactcctctaactcaattttaatttgttttttaccaaaatataaatgttggaaacagcgaaataaatttaaaatagtaacagggcagggctcggtggtgtacacttataatcccagcactttgggaggctgaggtgggagggttgtttgaacttaggaggtggagaccagtgcaagatggcaaaaccctgtctccacaaaaaatacaaaaattagccaggcatggtggtacgcrcctgtagtcccagctacttgggaggatgaggtgtaagaatggcttgagcccgagaggtggaggttgcagtgagccgagatcacgccactgcaccccagcctgggcaaaag

SEQ ID NO: 515413 - DNA, 532 bp, Homo sapiens
tgcaggccacacggcagaggagactggccgtagtcctggtcgcccaagtgccatcgattggggctgccaccaccagcccagtgccgcaccagcactggccaccattcctggttccccacagcaagcctatatgacaggagatggtgtctccattttacagaaaaggaagcggacgccagggagggtaagggcttggttcaagggtaggcaaacagtgctggtgacaacagcaagtaggaacgcaggccctggcgaagcccttcctgtgaaccggatgcagattgacagagcagtgcccgagatccccatgtatcctagaaccacacggttttctgtgtgcccggaagccacacrcccgaggacccgcggacaggtgcaaaggggacgacctcgggaacggcgattcttgaggtgccctttggacctcgaatgacagtgtttgctgctcgtcctcaggccagagcactttaaataaaaacaacccacacattcttgtgtttgtataaaagatatttacttcaattatcacacc

SEQ ID NO: 515414 - DNA, 569 bp, Homo sapiens
ttagttctatcaaagtacgtaaggggcrtaaaatagactcaggaactcggggctaaatcatccaaaaatggagccaaggctctaactagaaactgtctctgtcgtccctgttggcctcaaaaccccgaggtaaaaggctggtctcggctcctcccaggccccctggctcccagcacagtgccccgtcctctgtgttcatcatcatcgttttttaagagacagggtctcgctctattgcccaggttggccttgaatccctggactcaagcggtcctcctgccttggccttccgagtagctgggattctaggcgcatgcccctgcgccgggctgccctgctctctgcaggtgccttctctgcatgggcccagtgcctggatgccagtttgaggctgcgccacatgaggacacagcagttccgcctctcttctccccgctggccccaactgctgtgagccggcggaaagccccgacagttgcagtcatgcaaggaggagctccacccacttgacccagtcccgcctctctcagcctgttctgtttagacccccttccacttcgggatgaaat

SEQ ID NO: 515415 - DNA, 601 bp, Homo sapiens
ccagtgtggcatgacctcctccaggaagccctccctgactgcacagaacaaatctcttccccctgaggtttacggtctgtgccacatctctctcctgaaagcctgtgtgttccccaactgtgtccttgggcccaaggagcatcagggagagaaggatgtgactcacggcctcaagctcctggttccgggcacggaagcgctccctctggctggagatgatggaaagcagtgaatccacctggccctctgggagggcaccgctggctggtgctgcaggtcctagcaggtagaggagggtggcttggggggtggcaggaggtggaacccagcaggcggccctttggggtgggtcccccagccctgggggatttctgccaaatgccatggggtagaagccacatggtgtctgactccctggtgctgggcaggtcggggaaggggaggggacagccaggggaaccggggagcgtgagaatggatggcaggggctgacctgacaatacgcacgctggggaaggrcccagcacccccgtctgcgctgtcagagggccaggcccagaactcccctcccagtcactctgtccttgaatctgagaccctt

SEQ ID NO: 515416 - DNA, 335 bp, Homo sapiens
ttaatgagactatttctcttggttttctgataaatgagttactggaacccttatgaatctgaatgcaaaagaaacagctaaatgttatgtaattgttgtgtttaaaaaccagattataaaactatctgtattatatgattacrgtttaataaaaacaaaacaacggcctaaatgtgtatagtataaaggctggaagagtcagcactttcatgttctcagcggttatccttggatgtgagatctcatgcactttttgctctcttctttgtgcctttccattttgtatgtgtattttttacaatctaaaaagttacttaaacatatgcagctaaaaa

SEQ ID NO: 515417 - DNA, 335 bp, Homo sapiens
ttaatgagactatttctcttggttttctgataaatgagttactggaacccttatgaatctgaatgcaaaagaaacagctaaatgttatgtaattgttgtgtttaaaaaccagattataaaactatctgtattatatgattacagtttwataaaaacaaaacaacggcctaaatgtgtatagtataaaggctggaagagtcagcactttcatgttctcagcggttatccttggatgtgagatctcatgcactttttgctctcttctttgtgcctttccattttgtatgtgtattttttacaatctaaaaagttacttaaacatatgcagctaaaaa

SEQ ID NO: 515418 - DNA, 512 bp, Homo sapiens
aattgtgatcatacctataagacattaaaacatactccatgacatatagtaagcacccaatgaatataacttgctccattaaaccaccaaaatctttactatttttcagatatacatggtttataaggcaatagaatgtgacatgtacacaatccattcaagctttgtgcactctagtattcccagtgtttagtacaccataaatcctctacaacaatttgtatttaataccagcaaagttacactastcgtcaggtaaaagcaaaccaagattaccagataccacttcacatctactaggatgctaagacggccttaatcaaaaagacaaataatgtggagatattggaacccttatgtactactgatggaagtgtaaatggtgcagctactttggaaaacacgtgtcggatttctcaaaaggttaagcatagtttccatatgacctagcaatttcaatcccaggtatgtacccaaaagaagagaaaacatatgttcacacaaaacttgta

SEQ ID NO: 515419 - DNA, 652 bp, Homo sapiens
ctgttgactgaatgcattctacctatttgaattaagttgtacaatcctcttgtttttcaaaaataactgagtgtttttatcaccagaagtgttttgcattgatacttgggactctgcattgattgcattgatactgggactctgaggttttttagacacgtacttctttcaagctcattaggaaatgatttcagttttatttattttctttgcttagtgactagaaastgtataagaaaatatttttattaaaaaaagtcaatagaataaactttttgaatggtaaagatacagaaattctgtgcaaatcccaatttttttttcatgcaactctaagaaaagggggttagattagcgtagtaagttaattcacacaggtggttaaatcaagcttcctgactaacgaaacgatacaattcaacaaatgttttgagcatctttacatttacttaagggcattctgatcaggagtttaactagctgaactgacttgaagcaaaaacatattttagttattttaaagtaaagaatatgtatccaagcattattgtgtatttaagggcatttcttaaatttggttgcagtgtaataacagcatcagaaatagtagtaatattggtgatcattgtattgaagtgctgattttgtataa

SEQ ID NO: 515420 - DNA, 391 bp, Homo sapiens
acctccgacatttctgctcaccagagggcatgaactgctggtttgtacctggcttgcagataccttctttgggcagcacaatgttcaaaattaaaaaaactaccaacacttctaaactggatactttgtatcaatatctgggtttctggcttctcttcatgggaaacaaacaaamaaaaaaaaaggtttggtgaacactggggcccacattcctgcagggcaacagtcacatggagactttagatgggcacgtgcccagaacacactagagtccccatcgctccccattctcttacattctgttcccaactaggttcttataggcctgggtttgtgcctgttgcacacttatctactctcttgcttcccactggtcaggaagtctgacaaa

SEQ ID NO: 515421 - DNA, 378 bp, Homo sapiens
tttatgccaactggctttagtaattaratgattctctagtgagaattattcttatggaagatcaatttagttataagaatgatggaaacaaaaatatttaaatggagaaacaaataccaccttccttctagaagtctaccaaacaaattgctgtaaggaaagtagagaaaacatgtacaatgtatatatccaaaataaaatttgcagcgaaatgaatgaaagcacattacagataaataaaccaacctgcaaggtgagaatggcttcgtttaatttttcttctatctccttccttgctctttcttcaatcaacagtttatgccattcagcttcaccacgttctaacatatttctttccatataacttttgaggtttac

SEQ ID NO: 515422 - DNA, 577 bp, Homo sapiens
ctgatgccaagtaaagagaaagtgagttggmcccattgagccttgcctaaaactgcagattgtgaacaaaatagatgttgttttgagacactgcattttcttatataccaagaaataactgatacagatattgacactacatatagattgcacaacaacaacacaacaaaaactactaaaacatgtaggactaccattggaccaggagctaatcagaagctaaaaggacctacagaagaataagcacaaaaacaagaagagttttaaagagactgttagtggaagcctgatggtcctcgaagaagctggtaggaagggcttcaaggatagtgaagaagacgatacgggaacctgaaggaaagggcactgttactacacagccgctgaaagtaaaaccaatgcaagagataagctaaagaaagactactacatataaaagaaccaggactttctaggttcagtatcctttttatagcctctccacatgtcagattcccaaatatagacagtccttgacttagcatggttcgactcaccattttctgactttttataatactgtgaaaatgatatgtgt

SEQ ID NO: 515423 - DNA, 577 bp, Homo sapiens
ctgatgccaagtaaagagaaagtgagttggacccaytgagccttgcctaaaactgcagattgtgaacaaaatagatgttgttttgagacactgcattttcttatataccaagaaataactgatacagatattgacactacatatagattgcacaacaacaacacaacaaaaactactaaaacatgtaggactaccattggaccaggagctaatcagaagctaaaaggacctacagaagaataagcacaaaaacaagaagagttttaaagagactgttagtggaagcctgatggtcctcgaagaagctggtaggaagggcttcaaggatagtgaagaagacgatacgggaacctgaaggaaagggcactgttactacacagccgctgaaagtaaaaccaatgcaagagataagctaaagaaagactactacatataaaagaaccaggactttctaggttcagtatcctttttatagcctctccacatgtcagattcccaaatatagacagtccttgacttagcatggttcgactcaccattttctgactttttataatactgtgaaaatgatatgtgt

SEQ ID NO: 515424 - DNA, 462 bp, Homo sapiens
tgtccacaaatcaaagaatgttgctccctggctccatggctgcaaagccctacatcagtcattttcaactctgattgcagagtgtaatcacttcaggcatattttaaaaatacaaatgcccaggctgaccgcctcattggcctgggctggggtcccagcacctatatgttctttgtaagctctctgggtgatttgaatgtgtagtcagggcggcacgcctgctgctgttcctggagaggccacacccgcacctctgcatgttggccctagctgcccctcccaggctcgctctatctcatcgctctgttttgctttctgcgtggcactgttgttatctgcaacaatctgttcatgctttagtttccttgttccttcccccagctaaattgtaaactctctggaggaaggaccctatstgtctgcttcatgactgcgctcccagcacgtggagtgcttcctgca

SEQ ID NO: 515425 - DNA, 592 bp, Homo sapiens
ccgggatccgtaccctgcagggacccgatggacagtctgcattgagaggatacttttcaggggtgtaggcagagccctgggcagggggactgccttcattgatgcctctttgaagcatggcaaattcagagacagtctgggagccccactggacagtcagccccttgagggcaggcctgtgtccagcatttatgtctctactcccagcccagcccccagagcatctgtgctcctcctcttcctgagcctggacctgtgcaaggtcstggctgggagaggactcactctacagcccttagtgctttctccccacctccctgaggccagcagtcctgcctgcaatccttgtctcccgtgtctggtaactggacccaccgtttcctcttgttttaggtttttgttcagacatcctgcatcatcagctggccagcgaggtgctccgtgtctccacaatgagccgggccacctctatgttttcagtgctgtgtgcatggcctgggatgtgcccacaccctagcagctggtggctgcctagctgaacttgaatgaggagcaggtcgaggactatttctttcagctcaaggtgtaatag

SEQ ID NO: 515426 - DNA, 394 bp, Homo sapiens
cgttcaccatcacctgccagaggagagcacgtatttcgggggaggygccccaggccgggatggggaccacccctgagctcctggtccctccttctaaaaaatgaagacctgagtctggtcttcagtgtggggccagttacagggacgtgtgtgtggcccgaagtgcatcaaccggagtctctactgggctccagtcgggctttccattcttctggttgtttccttcccctttcttctcactcctcgatttccagcctggttaggaggccatattgttccagaaagagcccatgctcaggaaccaaactgaatttcctggggtttcatttatttattatttttccttcaactttttttttttttttttgagatagagtgtcactctgtcagccag

SEQ ID NO: 515427 - DNA, 394 bp, Homo sapiens
cgttcaccatcacctgccagaggagagcacgtatttcgggggaggtgccccaggccgggatggggaccacccctgagctcctggtccctccttctaraaaatgaagacctgagtctggtcttcagtgtggggccagttacagggacgtgtgtgtggcccgaagtgcatcaaccggagtctctactgggctccagtcgggctttccattcttctggttgtttccttcccctttcttctcactcctcgatttccagcctggttaggaggccatattgttccagaaagagcccatgctcaggaaccaaactgaatttcctggggtttcatttatttattatttttccttcaactttttttttttttttttgagatagagtgtcactctgtcagccag

SEQ ID NO: 515428 - DNA, 394 bp, Homo sapiens
cgttcaccatcacctgccagaggagagcacgtatttcgggggaggtgccccaggccgggatggggaccacccctgagctcctggtccctccttctaaaaaatgaagacctgagtctggtcttcagtgtggggccagttacagggacgtgtgtgtggcccgaagtgcatcaamcggagtctctactgggctccagtcgggctttccattcttctggttgtttccttcccctttcttctcactcctcgatttccagcctggttaggaggccatattgttccagaaagagcccatgctcaggaaccaaactgaatttcctggggtttcatttatttattatttttccttcaactttttttttttttttttgagatagagtgtcactctgtcagccag

SEQ ID NO: 515429 - DNA, 627 bp, Homo sapiens
ctgctactaaatatgaacctggatcctatatagcttctcctctaggatttacacacaaggaaaatctgaatcaagatccagttttggaagtarcaaaagaatatgcacagattttaagaagaaaatacatactctgaaagataaggcaattttatttgggctattcacatgatattttgtttcccattaaatatatgatgtgaacatttttactaaagggaaatattctatgttatacatgtctgatgaaaatttatatagtattttaaataatgtttcttggcctcttcagctaacttttaagtggattttgcaaatgaaaaccagtattactgagttttacatactcgaactgcccaaatgttagctgtttaaacagccaaataatcaagttgccattaataatttagtggagccaattgatggcttgtttgtattttataattttatctttatacatagtgatagatttaagtttagatagacatcattttggtatactggtactgtggtcattgtcaatgtttggatgtattacgactgttatagtgcaatcaaacttagataattttaattttaagcactgatttatttagatctttccatgaggaaaaataaggtatgcct

SEQ ID NO: 515430 - DNA, 627 bp, Homo sapiens
ctgctactaaatatgaacctggatcctatatagcttctcctctaggatttacacacaaggaaaatctgaatcaagatccagttttggaagtagcaaaagaatatgcacagattttaagaagaaaatacatactctgaaagataaggcaattttatttgggctattcacatgatattttgtttcccattaaatatatgatgtgaacatttttactaaagggaaatattctatrttatacatgtctgatgaaaatttatatagtattttaaataatgtttcttggcctcttcagctaacttttaagtggattttgcaaatgaaaaccagtattactgagttttacatactcgaactgcccaaatgttagctgtttaaacagccaaataatcaagttgccattaataatttagtggagccaattgatggcttgtttgtattttataattttatctttatacatagtgatagatttaagtttagatagacatcattttggtatactggtactgtggtcattgtcaatgtttggatgtattacgactgttatagtgcaatcaaacttagataattttaattttaagcactgatttatttagatctttccatgaggaaaaataaggtatgcct

SEQ ID NO: 515431 - DNA, 627 bp, Homo sapiens
ctgctactaaatatgaacctggatcctatatagcttctcctctaggatttacacacaaggaaaatctgaatcaagatccagttttggaagtagcaaaagaatatgcacagattttaagaagaaaatacatactctgaaagataaggcaattttatttgggctattcacatgatattttgtttcccattaaatatatgatgtgaacatttttactaaagggaaatattctatgttatacatgtctgatgaaaatttatatagtattttaaataatgtttcttggcctcttcagctaacttttaagtggattttgcaaatgaaaaccagtattactgagttttacatactcgaactgcccaaatgttwgctgtttaaacagccaaataatcaagttgccattaataatttagtggagccaattgatggcttgtttgtattttataattttatctttatacatagtgatagatttaagtttagatagacatcattttggtatactggtactgtggtcattgtcaatgtttggatgtattacgactgttatagtgcaatcaaacttagataattttaattttaagcactgatttatttagatctttccatgaggaaaaataaggtatgcct

SEQ ID NO: 515432 - DNA, 627 bp, Homo sapiens
ctgctactaaatatgaacctggatcctatatagcttctcctctaggatttacacacaaggaaaatctgaatcaagatccagttttggaagtagcaaaagaatatgcacagattttaagaagaaaatacatactctgaaagataaggcaattttatttgggctattcacatgatattttgtttcccattaaatatatgatgtgaacatttttactaaagggaaatattctatgttatacatgtctgatgaaaatttatatagtattttaaataatgtttcttggcctcttcagctaacttttaagtggattttgcaaatgaaaaccagtattactgagttttacatactcgaactgcccaaatgttagctgtttaaacagccaaataatcaagttgccattartaatttagtggagccaattgatggcttgtttgtattttataattttatctttatacatagtgatagatttaagtttagatagacatcattttggtatactggtactgtggtcattgtcaatgtttggatgtattacgactgttatagtgcaatcaaacttagataattttaattttaagcactgatttatttagatctttccatgaggaaaaataaggtatgcct

SEQ ID NO: 515433 - DNA, 554 bp, Homo sapiens
cattgtcacataatctgccaaggagatgcatttcattgtttttcaattcttatgcctctaattgttttctcagtacaggactaaattggtaatggggatagtgagcatacttaccttgtgcctgacttaatggaaatggctttggtgatttcccattaagtaggatgctggctttagtacagacacacactcagttgtgctgacatgcacagtatggcatatatgttattttattttttatatatataatgcccacatacttctccatatgttaaggaaatgyctccattgctatattcttgaatgttttcttatgaaagtttgttgaattttgttaaagactttttcagcatttatgggataagcataacctctccttaggtctaatgatatggtgaactacacaaagagagtttctcatattgaaacttttggacgttactgttatattccatgattggtcatgatgtactgttctcataatattcaattgaaatctattcacattgcattttatttagaattacaatttttgcaacaatatttatgacagt

SEQ ID NO: 515434 - DNA, 610 bp, Homo sapiens
tactttccaggcagactcttctctcctacacagctacagtcacagatacatcatgattttggaaaaaaaaaaaaaggaagggaagagaaagccaacaaataggattttgtgagtttttgggagacaacaaggaaagctaggaaaacagagtttggaattgtctttagtagaacacagatattttttcccagtgtttgaaatatggtttttaaaaggcctggcataaatctttagaaaactggaattttaggccaacttgataagagtaccacctatagcatacgtgctccttccaacagaggctctatgataatacagggcagyggaaatcccatatgccattcctttcatctgtcatcattattttgccatgttacatgaccatcttgcaatgattattgccctttaaatatagtctataaaaaaaaagaaaaatagtctatattatagacatataatgtgaaaaatgttaacaagagtttgctttatttttttactttttaatcaactctcaaaacttgaactgaggtttgatgattccgtcagggaagcatgaagaagaactagaaaacaggccttgaattaatcctctggactgaaacagactcag

SEQ ID NO: 515435 - DNA, 610 bp, Homo sapiens
tactttccaggcagactcttctctcctacacagctacagtcacagatacatcatgattttggaaaaaaaaaaaaaggaagggaagagaaagccaacaaataggattttgtgagtttttgggagacaacaaggaaagctaggaaaacagagtttggaattgtctttagtagaacacagatattttttcccagtgtttgaaatatggtttttaaaaggcctggcataaatctttagaaaactggaattttaggccaacttgataagagtaccacctatagcatacgtgctccttccaacagaggctctatgataatacagggcagcggaaatcccatatgccattcctttcatctgtcatcattattttgccatgttacatgaccatcttgcaatgattattgccctttaaatatagtctataaaaaaaaagaaaaatagtctatattatagacatataatgtgaaaaatgttaacaagagtttgctttatttttttaytttttaatcaactctcaaaacttgaactgaggtttgatgattccgtcagggaagcatgaagaagaactagaaaacaggccttgaattaatcctctggactgaaacagactcag

SEQ ID NO: 515436 - DNA, 594 bp, Homo sapiens
ttggtagaaggcttcagttctccacactgtgagcctctccacagagcttcttacaataaggcaactggcttcttctacagtgagtgatgagaaagagagcccaagatggaagctgcagtcttttatacctaatcttggaagttacctattattccttctttcatatcctattggtcacactgggcaacaatagtacaagatgggaagggactacacaggaggcagggatcactgggaaycaccttggagactggccatcgtagaactcaacacactgaatgatgaaaataaaataagaaataagtgttagtttctttcctttttacctcatgtggatgctgttgaaagagattgagtctacacttgaatttgtattatcatcaaactcaataacttcagtctatgtcaactccagttgtatatctggagtggcaactggaatgagagaaagatgctgaagagtgtattttgtgtctgactagttggtattgttggtgacagatgaagagctttcacctatcttgtatcaagttggaaaatcttagaattttactgatatctgtttggaaagaaatgctgaaaaaagctaactta

SEQ ID NO: 515437 - DNA, 613 bp, Homo sapiens
ttgcttgcactgagcacggtgctctttctttgatcttcttggcttcaaaacaaattagaccaaggcccaagcttcataggcagatgtttctggttgctggcttgtgtctgtagatgtttaagattcaaagactgaaaaatgaggcaaactaacatatttatggctccttccttaggttataatcaccaacagatgagtgaaggacacaggcagaaatctgaattttataaccgcacagcatctgaatcaaatgtctacttgaatagtttccattatccagatcacagctacaaggaccaggcctttgatactctgagcctcgatagctctgatagcatggagaccagcatctctgcttgctcaccagacaacatctctaggtaagatttatttatgggtaaggtttctggtttggaaaagagcctactgctcacaaaaagtaaagccatcaatttgggaactgtatatgcacaagcccaaatttttgagacataaagggtctgtaatgcagaagagggttggtatcatgatggcctttgaaagtagtttctcttaycttgtgtaacttagctagtcaggcatcatataatctgtttccacctttatcctgttt

SEQ ID NO: 515438 - DNA, 610 bp, Homo sapiens
gataattaaaagcatcttcttacataggaaaattccagaagaaagaagccacattggttggaagctttggaaagaccaattacttaagagcgagatccccttgtgtatggaagatttgatggcacatggatttggacaggagaatatgcacattgacgacataaaagccttcagacaaactctaatgtgacattttaaattttggtagagcgagaaaagtgttggggaaaagacagttgtttggatatcatcaggggatcagaaataatggaagaatagaaaataaaaaacagcatggataaaatgcctatagtctcaacccagtatatttaaaactcagtgctgggaataaaagaaatcacaagatagatactaatctcaattaaacaattaactctcataatggtgtttactaatgccccataatagcagatataccaccagatggcaattttattcagtaaatgtgacttcaaagagttgaattaaagtcttcatgtggatctaccatayggcaattactgcactaaacatgtgtatttctattttgtaaaattaaaatataatttaaatgtctgagagggcttatgttttatagaaacctgtgagt

SEQ ID NO: 515439 - DNA, 612 bp, Homo sapiens
agagatcatccaggttaataagaaaacttcagaaaaccacatatgtactcaggatcccacttttttggcttttatttgttttaggcagatctagttcatgctagacaaacctatcctaacctctgcagcacacacctggcacagagaggggacagagctgagagaccaactactccaatctctgcccttctgccaagatggcttaaagatataaacactctgtgttagcatgtttcaagggagcagctttttccattgttrtattaatgagaaacaaaggaggaggggtggaatctctttgctttagaaaacaatatcaatccattagaaaacatactagataattactatatgagaggtgtgtaaagacctgtagaagtcagtcatttcccttggtagctattatgctgtggagagatggcatctgcatcattcataaccgtagcgcacaaattggcacagggagaaggccaacagcaagctgttccaggtagaccagatgtctccaagggaggctgtctctctagaagtaaacacaatgtctatttcctgtcactttcactgttgaataattagatatttggtatctggaataattattgataaataggg

SEQ ID NO: 515440 - DNA, 636 bp, Homo sapiens
cccatctctaaaacaaacaaacaaaaacacatttttgtttactatacatgtatacattagccagggactattagactcaatgcctaaaccaaaaaaaaagtgaaaggaattggggacaaaatagaaatggaaactctttggagtgtgacacattaaatgcacctgaatattccagaaagtagctaccactcactctactgaaatggaggattatcctgtaattgatatacccatatacaaataactaaattgatttgtgattctattacatatcatagcagcaatagaatcagaacctgtaaacttgatatcacatctcagtcttagtaatttggagaatgcagagaatgttagaactggaaggatctaacrgcagatctctcattgttcagctctgcattcaggcctgctgaatggaaggccagtgaaagttcacagattaagtttaaagcctggtaggtgaaccttaattttcattcaggaaagattgcatctaaacctgtgcaaatattttcaatagctttaatggggtataaattatatatcaacaaattcactcatttaaaatgaacaattcaatagttttccgtttatttacaaacttgttcagccatcacaatgatctaattttagaat

SEQ ID NO: 515441 - DNA, 473 bp, Homo sapiens
ctgtattacggaacaactgtgtgtttagttgagcagaatttctcttctgaaccataaatcctgtttttaaattattgaaaaagttattatgccaattaacacatctcaacataggggaaagaacatgagctctgaaacagatggttcaaatcccaggcctaccgcttataagctgtgtggcctaaggcaagttgcttaaggactctgagcagtagtttcttcatttataatttgggaatacaatctaactcagaggtccaacaaactactgcccatagccaaatctggcctgtggcttgtttttgtaaataaagttttaytgggacacagccatgcccactcattttcatattgcctagaattgcttttgtgctactgcactggagttgagtagttgtgacaagagactgtgtgtcttcaaagcctaaaatatttactgtctggcccttgactgaaaaaatttgtcaatggca

SEQ ID NO: 515442 - DNA, 513 bp, Homo sapiens
caagacagagaaaaaatgcgggccaaacttcatcctttaatcaggagcccactgccgtcataactaacatgctcctgtgataatattattaattcatttgtgagggcagagccctcgtgacctaatcacacctcttaaaggtgccacttctcaatactgttataatggtaattaaatttcaacatgagttttggaagagacattcaaaccatagcagcttcttaacattaaggtttaattatggtaattagtragcagggttactagctgggtctagtacctatggcactaaaggccaggggagaggtgatgagataataccttgtagatttactcatttcagaattgtcttccctcttcattgaataggaaacttccttatgtgattgtcatgctagctgtttcaaaactatttaatatctgtggggcctggatttctatcattatataatgtatgtgctaaaaccttttaatccatgtcccataagttttattccataaattttatatatg

SEQ ID NO: 515443 - DNA, 476 bp, Homo sapiens
ctgatttccacccccgaccttcccacccaggaattgagaataatttggtgttaattcatcttttctttctattatatcacaccttgatcttttgttcatgatagctacgaacttacaaaataaaagatgctctcataaactttagtcttattccttagctacttaagcaaccctatcaaggtcacctttggaaatatttgcatattttagtattttttattacaaaatattasagacagttaaacgaggtggaaagcacctagtataaattttgaagtgaaatatcttaaagcagggcaactattgactaaaaaagtagtcatgctacaaagctttggagatgaatattctgacagcttcttgaaaaattgttatagaacaggaaaatgaaattcttttttggcaaccaaaattgagcaagtagatacaattctagtggactacttgcctcccttacactatatgacttacttttt

SEQ ID NO: 515444 - DNA, 538 bp, Homo sapiens
ctgcttagcacagcacttttcaaggtctgatttcttatggcttattggtgtggctcttccatggcaaatacctaaaatccattttatggatttatggtatggaatatgatggggggttccatgtgatcaatttgttccaccagtcttcattgggaccactcattgtctgtcaccagcccatgtctggtctgggacaagtgaaggaaggatagataaagttttggggctcttttttcgttcatacgttctgaggaatggtcttggtactttggccagaatgcacctatatctataatgaagaggatttagaatctgcctyctgggcactgtagctgagcacatgactctacttagcattttgaacaatgactgaaaccagattctgcaaatgacagaaatgcagtggtttcatgaaatctgcattccagtcccaagacttctacgaacaagttacgcaacgttgggcgagtcatttaacaatagcagcagtgctggcgatggctaacattggtttggaatggagcctggggcacagtaa

SEQ ID NO: 515445 - DNA, 591 bp, Homo sapiens
tagtactaatgaatggaggcgccgtggcacagttccagggatgtggttacaggtctgtagcatccagagaagatcttaaaagttatacctgggaaagacacaaaaagcttgaccgaggggtaacacttgagctgagtgtagaatgatgagcaagtctcttgtgcaggcaggggtgaggtgggattggaaacaaggtagagcagagaagagaagacattccagactgagagaagtgatcaaaaggactgttacagtcagtttaacggtaaataacaagtaacccccaaatctcagtgatttataacagccaagatttagttcyctctcatgctgcatgtccagtgtaagtcaggcatagttctacccctcacttgtcatcattctgggacccactgaggcttaagaaacagcttctctctgggacaatgtggatcttatttatgacaaagggaaaaaggacatgatagaacaaaactgtagcatctaaagtctgctcagaagtagcagccatcacttcagctctcatgctgttggtcaaggtaactcacatggcaaagtctgctgtccgtggtatggggaagtctaaaccag

SEQ ID NO: 515446 - DNA, 485 bp, Homo sapiens
tctgtccccacctttaccggaggaaaatgctcctaaggaggcgtctggccccattctcatcttgacttggccgacatctggcgtcgcactgattaccaaactgggcctggtggaggccacgtgttcccggagcggaatccaggaaaccactccagatttgctctcatatcatttgtgttcatagaaggttctcacttaatgttttccttatgtttttcctaagaaatggatctaagtcatcgccgcttgcctgtgagtagattcatccactcgctcactcactcacgtgtgtgctgagcacccactgtgtcaggcgtggttccgggagctggggagagcagtgaaccaaacgggaaagcatccgggccccaggggaatttctgttctgggagggagatgatgaccaccggttgcaccatcaggaaatgtccacggagggaaagtcaagggrcaaatcatgctgcgtgtttagggcctgaagccca

SEQ ID NO: 515447 - DNA, 490 bp, Homo sapiens
ctcccatcgcaagtcccaggctggttctcattggctgcggtgagtcatgtgtccgtcccagaaccaatcagggaaatgggatggagtcgaatgttggtcagggctgcctcccatgatttctttgtgcagttagcaccggtggacaccaggagctgctggtatggtggggtcgtgatcagagggtgtgacctcagcagagtctgtgctttcccttcggtacttccacgtgcctgtctctgagggccctggctggttgggcccgggctgcgcgtcctggcccaggcttcccgtctgcaggctgggtcagggccccgcagtgaactggagcagctccctggactgaggggcgtcaggggcccaggggtgttgsgcggggcgccacgagccgagggcagggatctttgtgcaagcagaggtggtcgcgagggaaaggcttgtggcatcagagcctccctcacagcgtctacagagctccgagcagggctggttt

SEQ ID NO: 515448 - DNA, 635 bp, Homo sapiens
  misc_feature (1)...(635): n = A,T,C or G
ctgggggcggctgggaggctggcgctggcctccggngtagacagtgaaaccaggggcanggctggtgatggtgacgatgggtaccggtggaaatcggacgtgagccgcacggtccgacccggcatcccctcggggaggactggcagaggcgtggagctctgtcctgccaggagtgcygtgaaaatgcacagacgctcacacctagatcctgcagataccacgtgtccccagccttcacccacgcggctcagggaagctgcttccccctagcagacgcagcagccgtggaaatgaccacagaggacacacggctgtgcagccctggttgggcacctgctccagggacctggcaaccaccacatcccgtgcccctgcaagcccctgtggccacccaggcccacggcctgcccctccagggccggctccagtccactccaccgggacccaggcctgtcagccaaggcaagagggacacacactcccgtcttcactgagaacctgcctggctgcctccgtcactgcacacctgcgcaacccagcccagcagaggacaagaattccctgcgttcagggggctccgaaaagacataaggaacccaaccctgcatgccacgctctgagcgggaaggaaggcc

SEQ ID NO: 515449 - DNA, 232 bp, Homo sapiens
gaagtccttggggcagcccctacctccccccagccaagtacayggcaggtgccaggcccagagcagcaccgaaagaataagcctgcgctggctgccccagagtccaaggaggccacatcacaaaactcctcttcccagctcccgtggacagaagtcctccttctcacagccaggccagcttccccaaggccctcgaggaggactgtggggagcacgcctacatctcactctc

SEQ ID NO: 515450 - DNA, 673 bp, Homo sapiens
gctgccgacagagctgccagtacctgtttccacgtccaacctttattctattcgttaaaaaaaaaaaagacacaattaggagacatttattgaatcagatatttggtgcttggaatctggagtgggttttcaggcaaaatttttctattcattcccctcttcttcttagagttccctgtgaggaagctatatatacatgaaacagtgactaaatgggaaaaaatgactggcrttataaacagagtatgtgtatgaatgtctctactctcctaaaagtggatcatttctaaaaagctttagtactttaggtccaaaagccaaatctgggtttttgagtccctcaaagctggaatcaccacttcactgagcaaaccaaatactaaccaaattagttgtgtggctgaagatggacagagcttgcccaaagatgggaaccctgttagttgagcttatcacaaatgagcaatacattgaaaagaagtggtggtgcccatgactctaccttacttcattttgtgctgcaataacagactgggtaatctataagaaatagaaattccttggctcacagatccggatgctggcaagtccagtgctgaggtgctggcacctggtgagggcctcttgctgcatcatcacagaagaagcaagagagagctagaaagagcaagtg

SEQ ID NO: 515451 - DNA, 490 bp, Homo sapiens
gcctttggatttcctccaaatagcttctttatctattcactgtttgaaattccacattagagattctcctttttaaaaaaaaaaataaacttcaagtttcaaatcttctgtacaaatgcaaatatctcagcataactaagtaataaatatattgagtaacatgttagtaatgtgcagtagcttatagtaatgtgttagtgagtttataaacttttttgtggattatggggtttttytctggccttaaatagtactgataagggagagagcaacatgattcttggttattgggagaaggggtgggagaataagatgatgatgatgccccaactgtgagaatggggggcgtagaagaaaagctgggtgatggaagccaaacgccacttaattatctcttttgctctgggctaagccttctttcttgatctttgagaaaatggggaaaaaatctttgactttatgcctgaagacttttggttgtatctttagg

SEQ ID NO: 515452 - DNA, 457 bp, Homo sapiens
cattacccattatttgcagaaggcatgatgattttttccataatgcatataagcccaatatatatagaaacctcgaagtatttctccttgctcctaacatgttagcctaattacaacttttcttgttaagggttgtttcaaaatatacagacctatctgaatatttctggtattttagtattttttttaatagagacagggtcttgctgtattacccagaccggtcttgaactcctgggctcaagtgatctgctcacctcagcctcccaaagtgctgggattacaggtgtgagccaccatgcccagactatttctggtattttatattatgttcttaatacttttttttttgaaattaacagaaaagtttctaaaatgcagtggttcatctctcygacctcattattctgtccccataatgtgcatcacaataaaaacgactgacaaaggactttga

SEQ ID NO: 515453 - DNA, 539 bp, Homo sapiens
taggctaatctgtgtcagacttaaggcctccaaacgtgtcatagaataatacatacctggataaaggattgattttaaagaatatgcctccatttgctttgttactgatatgtggttcagcctgacctcaggctctttaagtcacaattttccagttctcttcctgtcagtgacttcatttgatgaatagctttgtgcaatgtgaggctttcaatatatgttaaaccaagacaataaagatactaaactattttctttcagtatagagaacctgcaaagatgtgatgayttggattttgtttcaacagttcaactaatggctaatgaataaaaacaacaaacaaaaaacagcaaagcttctttctgatctgaggttgtggcaaacctaacctgggatctgacgggatgcgttttgccagctcagatctcttctgctactggaaacttgcattatttacagccattaggagctccctggcttccattccactcatgactagctttacctctttgaccccactgtattattgtctagccca

SEQ ID NO: 515454 - DNA, 321 bp, Homo sapiens
gaccacttaagctaatacatgtattacatgctggacaaagacctgcatgaccttcctctgaaaaccagaatgtcaggggacagaagaaacctgcaaccccaggaaatcctctgacacaagcgtagctagsgaagatgatatgcaatggcagcagcagaaatccagttctacacagggatagtcattgagtcacggagtgttgatgagctctacagccagaccaaataggcctaaggcataaaaaccatttcagtggccactcatttgatttgaaatcctccagcacagccctctctgccatatccatcataggtcaaggaa

SEQ ID NO: 515455 - DNA, 625 bp, Homo sapiens
acatccatctctcagaggcagtagtaggagatgttttagcataagtgacctagtggttaccttaggagtataaggtgttgaactaattcagtgattcagccggtgacttggtgagcatttcatgtttggttcaccagggtcactcaatatcttttataaaatttcttatttgtttccactaaccaatattgggttctgttgtttgtaactaagaatccaaggtgatacacctaggttgaatctcaggccttcaatatattagctggatgtttctgggtaaattatttaacttctttcaccctcagtttcctcatctgcaaaatgaaaaatattcagtgcaataactcatgggcttgttgggaaggttggtgggggttttcattagarttttccagccttgatgtctcaatatgctcttcttaaataactgtcattctaagaattcaaggaatggatttttgtttctctcccttctttggttccttctaccttttcctgggcagaatcttctggagcttccagtcaattcatgcaactttgagaattagaaccaggcctcctgtaaagaaggtaggattcagaggagtcaggcagacctgggtgtaatccttgatctgccacctcc

SEQ ID NO: 515456 - DNA, 529 bp, Homo sapiens
tccaggtgttgtcttactaaaggtcactcacatctctatttgactatcatttactgagtgcttactgtgtaccaacacatagctcaaagaatactatacaacgaggttgagcaaattatttcaacactaaacaacatggagggcttttacaaacataatgccaagcaaaacaagttaagctccaagcaaaaaaaaaaaaaaaaattctgatttatttaataggtgaataggtgaaattcattaatgctgataaaagtcagagtagtggctacatttgagatgggagtgtgtaatgcttggaataaggcatgaggaaagatttgggggtgctggcaaagttctggtccttgatctggttgctggttatgctgggtgttcactttacaaaaacatatcccactataatcttagatctgtgagcttttttcaatgtatgttatacttcaataaaaactttacttaaagctaaaaaatgatacgtacatackccaaacctgtttaattttaacttaaaacatataaatgcaca

SEQ ID NO: 515457 - DNA, 554 bp, Homo sapiens
ctgtccttgaatctgggctcaactgtgacttgatttggccagtagaaggtgaggaagtgggacagtaccaattgtgaacctaggcctcaggagattgggtgcatatcttctctttcctagaactttgcttctgttgggtaaataggcttggactagtgagccagagaatgtgagagcctgtggagaagagctcatttgttcaacttgaaaccatgtaagatcagttgacagttagctgattccaaaacagatgagagagtccagcttggaataacagagctgctttttctactcgcagcgaccacagacacatgactatgcccagctaagagcagcagggctgcccagccaacctgcagacatgtgagcataataaaccttggtttctcactgagcaaggctgtctgcattcactaatggctgtgcaaggctctgactttctggagactcaagaagygcccagtgtcccaaagagcccctttgaaacagctcctcttctcttctttcacccttccatccccagctttaaaccatcgcttgtttgaggcagcaag

SEQ ID NO: 515458 - DNA, 479 bp, Homo sapiens
aacataaagaagagagagaagcaaggcactactttatttttgtagaaggaaaaaatactataggtttgtccacatgggatttggtggaatggttcagaaattagtttgtctgaacactcatttctccattcatccacttaacacggtttacttttaatgactttttaaaataaaaatcgtgtacatttaaggtatacaacatgatgttttgatatatgtatacttagtgcaatgattattatcgtcaagtaaattaacatatccttttcttcacatagttaaattttgtttcttttttgtagtgacagcatctgaagtctattcttttagcacatttctagtrtacagtatagtatttgatatggtttgggtgctgtgtccccacccaaatcttattttgaattgtaatcctcataatcctcatgcgtcttggcgggacctggtgggaggtgattggatcatgggggcagtttccctca

SEQ ID NO: 515459 - DNA, 605 bp, Homo sapiens
tcaactgcagcaaagttgtcatggccagcacatgtgcgaccttcctctctgcatctgatggccatttcagttgatttatttgatgtggtagcaccttacagggttgattataacttattgctgcccctacataacacttctttaaaaagttacactaggatttagcactgaaataagaacttgaattcattggttttccatcctgaaggaaataccatcaatgcagttgaaattgtcaatttattttggaatacagcatagactttttgaagccaacagtagctgatgtgaccgattcctgtatcatgaaggacatcaagcacccaacatctaaatgtcaaaagcttctggctgacttttaagagaagctatttaacttccaggaatgtatatttcaataaagggaaaacagaacaatgaatttaaccaagtcgaaaattcaaatgaactccagcrttctttgacatgcctggaaataacgctgttaggcaaaaggttccaaaagagtcaaaatcaattatttgatcctgagaagaactatagcctatttgttcaaatgcagatttagcaccatgctgcgtgggtttaaacctttgctttgatgc

SEQ ID NO: 515460 - DNA, 625 bp, Homo sapiens
ttgaatgaatgagatgtttaaggctaagatgggttttatcagacattttctcttttaatcaggaaggggcttgggaataggatggaagcaagaggaggaaataaggtccctcctggaagcaaattgagggctgggctgaggggaagaggatactggaatgtggctcctcctttgatgggcaccaccagacaccatgaaagtcrtgctcaaaggcagtgtctattaccataagctccactgggccacaccaaaattttattctgactccaggaggaggggatttccactgggattctgaaggttttgccagaaagtagcagaatgagaaggtgagatgaggtcacagacatcttgagtggaggacgtagtggtgggaatgactgggcgtgtttgtggagaggcccaggtactagcttcttttcccatcacttatctctagattattctatctgggaatacctagagccaggcagaacaatgtgaggaaatttgcacagaatgttatctctgcactttgccaaataattggtaaaccccagggagccggcccagcctctgcactgacctggatccttatttggaggcagggaaggaaagctgtcagtgctccccggcctcacttggg

SEQ ID NO: 515461 - DNA, 560 bp, Homo sapiens
cttgttggaaaagcaacctgcaggtgggggtgggcaccgcagttgtctttattttggccccttctgagtttgctstttgtctgcctgggctctggggggcccttcccacccactcaccttcccctgctggtcctggcctccaagggctccaagtccttcccccccaccctccccttggcttagctgtggactaatcccttttcccattaggtgagccaagacaagattagagctttattaaaaggaaattaaactaggaaatgaaaggataaacaaacctcaaacaagaaaaaacaacagcaccaaataagatgagttgacagagcaccactctttatcctaaagggtatccatctacctacaaattagggtgtggctcccagtggggccatcatctcttcttccaccctcaccagctctgcctgtcatgatcaagctcgtcatcatggtggcttcagcaaacatgttctttggggaccttggtgatggcaccatactctccagcgctttgctcacactagcccctcccctgatttctttctgagtcccgcatgcaggat

SEQ ID NO: 515462 - DNA, 560 bp, Homo sapiens
cttgttggaaaagcaacctgcaggtgggggtgggcaccgcagttgtctttattttggccccttctgagtttgctgtttgtctgcctgggctctggggggcccttcccacccactcaccttcccctgctggtcctggcctccaagggctccaagtccttcccccccaccctccccttggcttagctgtggactaatcccttttcccattaggtgagccaagacaagattagagctttattaaaaggaaattaaactaggaaatgaaaggataaacaaacctcaaacaagaaaaaacaacagcaccaaataagatgagttgacagagcaccactctttatcctraagggtatccatctacctacaaattagggtgtggctcccagtggggccatcatctcttcttccaccctcaccagctctgcctgtcatgatcaagctcgtcatcatggtggcttcagcaaacatgttctttggggaccttggtgatggcaccatactctccagcgctttgctcacactagcccctcccctgatttctttctgagtcccgcatgcaggat

SEQ ID NO: 515463 - DNA, 505 bp, Homo sapiens
tttgcctaggtaccactaaatgtttagttttatgtcacagagacataagaagtagtactgtgaakaatttatttattacaagtactggcttcatgtagctatctctagttaattactcacttggataaagtagatatctattgtatgaggtaatatttctaacatgaggttggaattttgcattgaggaaaatggttattgaactccctggcataggccagttatcttcagcttcctgggatcaattacttggtctggcgaattctagctatctttaggttgctaattacatgtttaccaccagatgtctgtggtaatttattatttcaacaaaaaatagtggaatgataaggaaggattttcctttttcttggcatcacatagatgattcaagttatctccagttattctttgtaactttttttcctgggtaatattcagcacctacccttgtaagttcttatctcaattaaaaccgataattgagagttgcaaagaacatgat

SEQ ID NO: 515464 - DNA, 520 bp, Homo sapiens
aacataaattatttccttattatttggttggtgggtatcattttcagcaggataggttttaaaatccacaatgggamctttgtgtaaaaatgatgccaatacatattagttaaattaccttgtatgcatattttatactgatgggatataagctatttgcttgatgatgaaaataaagcacctgaatatgtaaagttgagtagatttcgcctgctgggaaatatattcttagtgttaaaaatgcagcatcacacggagctagaaagtcttctcgtatcccatagggtaataaaattgaataggagagagtttcaattattcctctaataagcaaataaagcagccacttagaagttagtgtgtttgcagtactgagacttagttctgtgttcaattctgccttccagtctctgaaaatgtatgtaaccttttactatcttaaatgagattttctttaatgtaagttttatgatgagcaagttgggtgaatgtaattttccatggtaaaagtgaaaaacac

SEQ ID NO: 515465 - DNA, 613 bp, Homo sapiens
gtgcctgctgttgccagatatgttgcawgggtcaataccttttttaaaactttgtctaagcacatctaaatttggttaatattactagatatcatcacatcttagatcatgcagatatattcatattgcatatattaagaggtaataatatgaatgaaataaagagacaagtaaaatggaaaataaataggttaagaaaactaaataatgcattcatataggctaacagtaagtgatagagaaatataatttgaacttgcagaataactgagtttgaatgagttttgatttgaaaaactgaatttgagcaaagtattaatttatattaaaacagagaaatggctatagtttattgacagcttattacaagccagacactgaaccatggtttggacttatgtggataatacttcttaattattaccttttttaaatcaatgctctgacctaggtattattattttcattttactgatgaagaaactgagtctagtagaggtaactacccttactccaggccttctagtaagtgcagtcaggatttgaactgtttgactacaagtatttattaaggccaggctaggcagattacagattatttttgttctgtagg

SEQ ID NO: 515466 - DNA, 493 bp, Homo sapiens
gagaagggaaggaagcttcttatgcattttatgcatagttcttttcaatagaaggcartaaatgacatcaaattgcaaagacattgactgaatattgggatgcattcaaacttaatttttcttggttaactcgatcatactaaccatcaaggtacagatttagtaagataaagcaagagttcttaaaaacaaaaccccaaaccaaagctttagcaaaacttcattaatatccttttctcaaccagatattttatatataaatataaatatgtatgtgtgtgtgtgacgcacacacaaacacccactagctgtgtgtactaaaagtcaagagccagggttttcctacaaaatttacttggaaaatgtatacacacaaatctcaaacataaattagtaattctaactgagctgttaaacatttaaggatttatctatcacagactccctaaatgtatacccagcatttggcaggatacagtatgtaagcaataag

SEQ ID NO: 515467 - DNA, 493 bp, Homo sapiens
gagaagggaaggaagcttcttatgcattttatgcatagttcttttcaatagaaggcagtaaatgacatyaaattgcaaagacattgactgaatattgggatgcattcaaacttaatttttcttggttaactcgatcatactaaccatcaaggtacagatttagtaagataaagcaagagttcttaaaaacaaaaccccaaaccaaagctttagcaaaacttcattaatatccttttctcaaccagatattttatatataaatataaatatgtatgtgtgtgtgtgacgcacacacaaacacccactagctgtgtgtactaaaagtcaagagccagggttttcctacaaaatttacttggaaaatgtatacacacaaatctcaaacataaattagtaattctaactgagctgttaaacatttaaggatttatctatcacagactccctaaatgtatacccagcatttggcaggatacagtatgtaagcaataag

SEQ ID NO: 515468 - DNA, 637 bp, Homo sapiens
gtgcacacacgtattacaatctcatctgactcctgggccctgttaggacactctctgtaccacacaagggtattatgtggtatgcacgagagtcacaatctattctgaaaccttcatactagtatggatttgtgatttttacctgtggctttaagcccaggtatgagggtcaacatctctcctattggtgggttccagatagaacagtctttacctacctatgatttgggtttaggaatgaatcactatcttaacagaggctgaatgttctgtcacaattgcaactgtagattgtgtctgcatttgggattcaggacctcctcagtgggctcggtctatgtgtgagggtgatgatcttaatgactgccacagtgtaaatatgtaaagcacaacctcaattgtgtgctgttctctgtggtgacactctcagtacaagctgagtgctttatggtacatgcaatagagtgataarcctccatgatctttgtacaaagaggagacccaaggatcttacccatttttctaagtctacctacaaaagacagtatttctcttattggcaggtttgaggaatgagggtcatcatcacatctgttacctgagtaaagacatatgtcacaattccacctgtggatag

SEQ ID NO: 515469 - DNA, 548 bp, Homo sapiens
ctcactgataacatcatacttacatgcttagyagcatgcctgggatgtagtaagcataaaaaattgcaatcatcattgatattattattattattattattattattattattattattattatagttactgaccagtaatgagcattatgaagactcagcttattatataattataagtattgtcttgttaattgaagaattcttcaggtagaggtaaagaagtaatatctcaaagagtccctcctcagtctctcaggtactcatgccaaccacagctccaagttcataacactccacccatcagctgggccctccctgtggcagaaaacctaagccaggcagggcaaaccacagagaacatgagaagccaggtggggagggggttgctataaagttggagaagatgagcacaaaagagatctttttgtctctttttcattttccaatcttggttgcagttcctgcttttcatcttaaagcctgaatggagaaactgatataatgttgaagactacgactcattaataattaattgtttagaacaaa

SEQ ID NO: 515470 - DNA, 548 bp, Homo sapiens
ctcactgataacatcatacttacatgcttagtagcatgcctgggatgtagtaagcataaaaaattgcaatcatcattgatattattattattattattattattattattattattattattatagttactgaccagtaatgagcattatgaagactcagcttrttatataattataagtattgtcttgttaattgaagaattcttcaggtagaggtaaagaagtaatatctcaaagagtccctcctcagtctctcaggtactcatgccaaccacagctccaagttcataacactccacccatcagctgggccctccctgtggcagaaaacctaagccaggcagggcaaaccacagagaacatgagaagccaggtggggagggggttgctataaagttggagaagatgagcacaaaagagatctttttgtctctttttcattttccaatcttggttgcagttcctgcttttcatcttaaagcctgaatggagaaactgatataatgttgaagactacgactcattaataattaattgtttagaacaaa

SEQ ID NO: 515471 - DNA, 548 bp, Homo sapiens
ctcactgataacatcatacttacatgcttagtagcatgcctgggatgtagtaagcataaaaaattgcaatcatcattgatattattattattattattattattattattattattattattatagttactgaccagtaatgagcattatgaagactcagcttattatataattataagtattgtcttgttaattgaagaattcttcaggtagaggtaaagaagtaatatctcaaagagtccctcctcagtctctcaggtactcatgccaaccacagctccaagttcataacactccacccatcagctgggccctccctgtggcagaaracctaagccaggcagggcaaaccacagagaacatgagaagccaggtggggagggggttgctataaagttggagaagatgagcacaaaagagatctttttgtctctttttcattttccaatcttggttgcagttcctgcttttcatcttaaagcctgaatggagaaactgatataatgttgaagactacgactcattaataattaattgtttagaacaaa

SEQ ID NO: 515472 - DNA, 364 bp, Homo sapiens
cttgttcccttattctcaaagtaaactaaatcacctggtgggaaccccttccgagtctcatcactaccttcctgcatcctcactggccctgtttccctccctcctgtcgctgtgacagggctctccctactcctgggtaaggctcctttgcatcccatccctcctttctaccacctcttcagatacctctctaatgtgtgtatcattctctccctcccctgtagggtcaacatttccatctctactggatcctccatattaacttttaaaccattttagcgtctcacaatattattaktattattttgagacagagtcgcactctgtcacctaggctggagtacagaggtgcgatcttggctca

SEQ ID NO: 515473 - DNA, 607 bp, Homo sapiens
aacaaatagaggtacttccttacaaaggaatattactttgtaataaagagaaacaggcttggatgaatctcaagggtatgtcaagtgaaaaaaaaaatttctaaagggtgcatactgtatgattgcatgtgtgtgatattctgaaaaagacaaaactgtgatggaggacatatcagtgattgacatcagtgtgggtggggacaggggtgtgactacaacaggaaagaaygtgggactttgctgagggtgatggagctgctctgggtcctgattgtgctggcggtagctacataaattgacccatggattaaaattcatggaactgtacaccaaaaaaagacactaatttactttatgttaatttttatttaaaagagttagatgcaaaaaaaaattatccctagacaattatctataataaaaacattataaaaccagagtgtacgaagggaaaggaaacctgagaattctactagagaaataaactttgcctttgggctttgacatctccagagtgtgactgtgaaggggcctagcaacccggaccaggcagttctctctgcccagggcctctcctgatcgtgaccatgacgtgctgaaggagcag

SEQ ID NO: 515474 - DNA, 618 bp, Homo sapiens
taagaggcttcccatcctcgcccatataaaaggaaggcctgaaaacacttctcggagcatcagttcataggtcaccgcaaccggccgaacaatacgcgattattcaacgggctccaattcattttcctctgctcctcccccaccgttacccttgagagaaaactaatttgcagaaaaatagcccctgccagccaacttcttctcctaaatgtatgctgaccccgaactcttgtctcagtgggtccttattctcatagtcaatgcacagsagttctgaaaagcagtcttctcctttaaaaacctcccccacaccccagcatctcagtacgggagatgctttctttttctgctattctttgcttctctttttaacatgtgtgctgaaattggcactttctctgttcagttcactccctttctagtattaatgcagcaacggagaaatgtgcgcaatttctccagtctctgcgctcggtgagcccatgggtgatggatgaaatgtaacatgctctaccttacatattactatttaagggaagcgcccgggccggctggtgatgcatggtgctctccacagcgccccgcgcaagcagggagcccaggctgcctgcaccgttg

SEQ ID NO: 515475 - DNA, 610 bp, Homo sapiens
ccatcctcgcccatataaaaggaaggcctgaaaacacttctcggagcatcagttcataggtcaccgcaaccggccgaacaatacgcgattattcaacgggctccaattcattttcctctgctcctcccccaccgttacccttgagagaaaactaatttgcagaaaaatagcccctgccagccaacttcttctcctaaatgtatgctgaccccgaactcttgtctcagtgggtccttattctcatagtcaatgcacaggagttctgaaaagcagtcttctcctttaaaaacctcccccacacccyagcatctcagtacgggagatgctttctttttctgctattctttgcttctctttttaacatgtgtgctgaaattggcactttctctgttcagttcactccctttctagtattaatgcagcaacggagaaatgtgcgcaatttctccagtctctgcgctcggtgagcccatgggtgatggatgaaatgtaacatgctctaccttacatattactatttaagggaagcgcccgggccggctggtgatgcatggtgctctccacagcgccccgcgcaagcagggagcccaggctgcctgcaccgttgtct

SEQ ID NO: 515476 - DNA, 610 bp, Homo sapiens
ccatcctcgcccatataaaaggaaggcctgaaaacacttctcggagcatcagttcataggtcaccgcaaccggccgaacaatacgcgattattcaacgggctccaattcattttcctctgctcctcccccaccgttacccttgagagaaaactaatttgcagaaaaatagcccctgccagccaacttcttctcctaaatgtatgctgaccccgaactcttgtctcagtgggtccttattctcatagtcaatgcacaggagttctgaaaagcagtcttctcctttaaaaacctcccccacaccccwgcatctcagtacgggagatgctttctttttctgctattctttgcttctctttttaacatgtgtgctgaaattggcactttctctgttcagttcactccctttctagtattaatgcagcaacggagaaatgtgcgcaatttctccagtctctgcgctcggtgagcccatgggtgatggatgaaatgtaacatgctctaccttacatattactatttaagggaagcgcccgggccggctggtgatgcatggtgctctccacagcgccccgcgcaagcagggagcccaggctgcctgcaccgttgtct

SEQ ID NO: 515477 - DNA, 509 bp, Homo sapiens
gctcatgctcagcatgcggagctggtcccccaccatggggaggagctcagggacaccgagtgtgaccacaagatgaaggagactctatggagagccacactgggggaggwcatatcctccttcttatccaccaaacatccttttagcaagaccaggaaaagtcaggagaccactcaaaaaagaaggagactctgagaaacgatctcaaacaatgtcagcaagacaggatcattgtgacattttcaaaaaagacttgtgatcccaacacttggcttaagcctcagccctggtcactgctctgttctcatcctccatgagtctgtggctctcatctgtaaagtgggcacagtggtgaatttgccggactgtaatgatgcctgagcttatgtatgctgagatatttgtaaagcatccccaaatagtcatattcaagttatcataactattaataataaataattgttattacttttatttaaaaaaaaggagagctgagagccaaaaaataa

SEQ ID NO: 515478 - DNA, 371 bp, Homo sapiens
aaatagctaaaacatttaaaagacaaaaatatatacgctggctgggcagggtggctcatgcttgtaatcccagcactttgggaagctgaggcgggagaatcgcttgagaccaggagttcaagaccagcctgggttaacatagtggaacccatctctacacacacacacacacacacaaaaaaaaaaaaaaaaaaaaaaaaraagaagaagaaaagaaaaaaattagctgggtacattggcacatgcgtatagtcccagctacttgggaggctgaggcaggaagatagcttgagcccaacaggttgtatttataggtaaaatagcactgctcagatcctatagcagcagtagaagaagaaagtcaagctgta

SEQ ID NO: 515479 - DNA, 371 bp, Homo sapiens
aaatagctaaaacatttaaaagacaaaaatatatacgctggctgggcagggtggctcatgcttgtaatcccagcactttgggaagctgaggcgggagaatcgcttgagaccaggagttcaagaccagcctgggttaacatagtggaacccatctctacacacacacacacacacacaaaaaaaaaaaaaaaaaaaaaaaagaagaagaagaaaagaaaaaaattagctgggtacattggcacatgcgtatagtcccagctacttgggaggctgaggcaggaagatagcttgagcccaayaggttgtatttataggtaaaatagcactgctcagatcctatagcagcagtagaagaagaaagtcaagctgta

SEQ ID NO: 515480 - DNA, 641 bp, Homo sapiens
taaatatatttagatttgttattttaaaaaaatttaaaaaatatttatttaaaatataaaataaattttgtctacaaatactgaaacagttcaaaattgcttcctaggaatttcactaaaaggttgttaagagttaatgaggccaggcactgtggctcrtgtctgtaatcccagcactttgggaggctgaggcgggaggattatgagatcaggagattgagaccatcctggctaacacggtgaaaccccatctctactaacaatacaaaaattagccaggcatagtggcatgcgcctgtagtcccagctactctggaggctgagccaggagaattgcttgaacttaggaggcagaggttgcagtgagctgagatcccgccattgcactccagcctgggtgacagagctagactccatcttaaaaaaaaagagttaatgtgatttatatataattaaatcaattagatgtacgaaaaacaattctgcatagagtgtagaaacgaaagcaaaaaatgcttttgatgaaggaagttagaaacatttagtgtagtttgaaattacttaatggttgtgtcaaattgaaaaaataaaatagtagataaaaataaaatataaaaagtttaaatgattatgagagatta

SEQ ID NO: 515481 - DNA, 641 bp, Homo sapiens
taaatatatttagatttgttattttaaaaaaatttaaaaaatatttatttaaaatataaaataaattttgtctacaaatactgaaacagttcaaaattgcttcctaggaatttcactaaaaggttgttaagagttaatgaggccaggcactgtggctcatgtctgtaatcccagcactttgggaggctgaggcgggaggattatgagatcaggagattgagaccatcctggctaacacggtgaaaccccatctctactaacaatacaaaaattagccaggcatagtggcatgcgcctgtagtcccagctactctggaggctgagccaggagaattgcttgaacttaggaggcagaggttgcagtgagctgagatcccgccattgcactccagcctkggtgacagagctagactccatcttaaaaaaaaagagttaatgtgatttatatataattaaatcaattagatgtacgaaaaacaattctgcatagagtgtagaaacgaaagcaaaaaatgcttttgatgaaggaagttagaaacatttagtgtagtttgaaattacttaatggttgtgtcaaattgaaaaaataaaatagtagataaaaataaaatataaaaagtttaaatgattatgagagatta

SEQ ID NO: 515482 - DNA, 641 bp, Homo sapiens
taaatatatttagatttgttattttaaaaaaatttaaaaaatatttatttaaaatataaaataaattttgtctacaaatactgaaacagttcaaaattgcttcctaggaatttcactaaaaggttgttaagagttaatgaggccaggcactgtggctcatgtctgtaatcccagcactttgggaggctgaggcgggaggattatgagatcaggagattgagaccatcctggctaacacggtgaaaccccatctctactaacaatacaaaaattagccaggcatagtggcatgcgcctgtagtcccagctactctggaggctgagccaggagaattgcttgaacttaggaggcagaggttgcagtgagctgagatcccgccattgcactccagcctgggtgacagagctagactccatcttaaaaaaaaagagttaatgtgatttatatataattaaatcaattagatgtaygaaaaacaattctgcatagagtgtagaaacgaaagcaaaaaatgcttttgatgaaggaagttagaaacatttagtgtagtttgaaattacttaatggttgtgtcaaattgaaaaaataaaatagtagataaaaataaaatataaaaagtttaaatgattatgagagatta

SEQ ID NO: 515483 - DNA, 528 bp, Homo sapiens
agcttcaaaaatgatccttaaagagattgaagatgatgactcagagcagaaaaataaaacaaaaacaacatgggtggcagagttgcgtgatagaaagaatggaaccttcaggtccagttaaacctgctctgctattaattagtttttggttttgaggtgatttttccaagccgtcattattagtaataagagctacaatatcattggatgaagaagaaaaatttctgaacagaagcatagctcccaaccatatgttttccataccagcatctatacaggcaccaaamatcatggatgttcttatagccttgtgcctcacggcgtgaattgctcattgatcatttgaactcgtaacaatggaaacatcagttttaccaggcctcctgggcacttgtctgacctttctgatttgtcaaatggaattgcttcgtttgtaaaatgtttcataggagacaggacaacaatctctgtttgatgaaggtgaatgtacccaagataatttctagggttttaatggaagagttttgt

SEQ ID NO: 515484 - DNA, 570 bp, Homo sapiens
ttgaaaaccttgggacaagtgcccttgggctgcagggttgggaacggggggagcatggccagcctatcacctggtgtgccctcaggtgaaggaatacgactccatctcccggctggaccagtggctcaccaccatgctgctgcgcatcaagaagaccatccagggcgatgaggaggacctgcgctaagccccacccagccccccagtgcccgtcttcctgtcccatctgctcagagagaggtggggccgagacttgctggagagcttccctcctttcccatctggggagtsccgcgggccacagtgggcaggtggcaccgggggtcagcatgcaggggcgccagaggcccaggctgctggccggacagtcaccctctgttctcgctacatcccttgccccctgtccatttatttaagcccccataggtgcccttcacccccaaaaccagctgtacagaatctttgatacagacctatttgctaggggtgctgccggggatttggggtcagcatctggccccctatctcctgaccagctgagtcatgaggccggtttctctctctctccca

SEQ ID NO: 515485 - DNA, 460 bp, Homo sapiens
tgcacggaggtgggcagggctcctggcccagctcacacgtgctgcttccggtggcgcagcacctctgtgggtgtaaagaggaagtccttcccgcaggcctcgcagtggtagggcctctgcaggacagatgtcttctggagggtttcgagggcagcttcctcagcccctaagggaggaaaaggaggaggctgtgaggggcgtgttccagtgcacaggtctacccgcacccaaatgccaggcacctgtggggctcaggttctctcctggcctttggagaacccagttttgcctcctccaggaagccctcccagattaataaaaatacacaggtctgtctttactccgcatccctgccagtgagagagacagagagaaagacacaaggagagacatggagactgasaggcagacacagccagccggggatggaggcatgtggccccagtgctatctcccccac

SEQ ID NO: 515486 - DNA, 583 bp, Homo sapiens
gtgaagtgacgcaggcgtggccctgagtcttcattctcccctgcacacacatctcttgcaggaattctgcagctccctctagttaagaggtggagtcttggccaggcctggtggctcgtttgtaatcccagcactctgggaggctcccaagtagctgaaactgcaggcgtgcaccaccatgcccaagcaattcgtttgcttgcttcgtagagatggggtctcactatgttgccaggctggtcttgaactcctggccttaagtgatccactcgccttggcctcccaaagggttgggattataggcgtgagccatcgtgcttgcagccggccaatcagtattcttattcgtgatttacgagcttcaaattggtaagaatttgaaatcttgggatagacacaagaactccagttggtggctccgtgtttttaagactttatcattaaaaaaaagaagaaattagagaagggaggtaggggggacaggagagtgaaggaatctctccaaaatgtcggatccgggcgaccctmcttccctgactgcccagccaccccgtcccttctctgtcctggcggcgaggcccta

SEQ ID NO: 515487 - DNA, 567 bp, Homo sapiens
tctcagccttgtctccatcacttcatataaactccctggtgattccactgaaagaatgaatgatttgacaggagatccttggtgatcttagcaagcatggtttcagagaaaaggtgaccataaatgctctattaccaaacagaaaatgaaatgataaatctaaaagagtatatatagataggattagagatttatggggtctattttgtcatcttttttcttttttttaaatgggaatgaagttaatggagagggaaagactgaagatcaaggatataaatgatgttattaagtcaccaaggaggtggatgagatggtatcaagaatcatatatttagacagatgtcacaactatctaaaatgggaagagctaaacctcttcctctgggacagaaaggaaaaaggtaaaaatgaggtcaaacagagacatgtaatgagaaagtcagaaggaagttgaaagagttcacaagagaaagcctaaactttttggtgtcccagatccaaggtgggttgkatgacaatgagacagagattaggaaggggtctgagatgagtagaagtctgtaa

SEQ ID NO: 515488 - DNA, 481 bp, Homo sapiens
ggccgctgggatcctgggcttcgtcttctcagacaaggtaacactgggagccaggaggcctcctcaggtgtgacccagagggaggaaggaaggttcctgcccatgtttagcctggttaattaaccacagctccttcccctgagaaacatcagtcgttgaaaagttcattaggggtgaatgaatagcctgtaaactcatcatatttgaagagaattttaagatcayaaggtgctttcctctgacagtctgagaagctaacagggaagtaaattatacaaacacaaagttaaaataacttagaaactttaatagcaaatgacagaatcaaactcaataatcaagtggaccactgacaatatgaagagcctcttatttcttttaaaaattgtttattgagataaacagaaggaaggaagggggaagagaacaagattttgttttgaggtttatttttctttctttctttttttttttttttttg

SEQ ID NO: 515489 - DNA, 658 bp, Homo sapiens
agcaagatgattgccaaggccttctctaagcggcacgagctcctgcagaacaccaggccaggagctgtccttcagcatgcacactgtgtccacgacgggcccgtgtgagcctcacccctcctctaccggagccgcctggccccgcgctgcccatgtgctagtctcktccagcctgctgggggcacacagattatttggaagaccgactgtgaggagcaaggcgctccctccatcgctcacacacccattcttcccccggcccctccgtacctctggggggctctcccctctctgtttctgcccctgggtctgcttgccggtgcttgggttccaagaagactcccctccctctcccttctcataaattctccagttgctctccctgggcaagagtaagtcagggttccaagaactggatttctggcctccagttaggccctttggggacgtgaggcccttctcttcagattctgaaggggtagagatcaccgtggttacagggtgagctttctctggtgagcaggagggactggctgtgggaagatgaatggcactgactatgggaggcactgccagggaccgggaagtcactattccttctcctttccttccttccattcccacagcgggcttggcctttgacctcaatgagccctca

SEQ ID NO: 515490 - DNA, 531 bp, Homo sapiens
ccctcacctcctgccctctgagaagagtaggaagaaataaagccacaaagtggcacaggagctttggcttggtgctggtggctgaaagttaaccagcattgaggaaacccagggggcttctgtgcattgcaacccactgtgcattacagtaacctacaagggtggcggcaggttcagacctgtcaccaacgggacccggggaatgagcaagaaaggatgagaggagcctttatccagagcttcccaggcccttccacgctgtggcacacagagcgggtggcacstgcagatgcactgggcacgtgctggtgccctcggtgtgctgggcgctgctggacccaagcccagggtgcagactcctcaccccggcctggctgtctcgagggtggaggggtggtgttgggaatacctgcacccattgcagcacctggcacggataagatgagcattaggaagaggtgagggggtggcaccgcccagggctccaagtcccctttccttattgctgggagctgatctgcgtcctcactc

SEQ ID NO: 515491 - DNA, 531 bp, Homo sapiens
ccctcacctcctgccctctgagaagagtaggaagaaataaagccacaaagtggcacaggagctttggcttggtgctggtggctgaaagttaaccagcattgaggaaacccagggggcttctgtgcattgcaacccactgtgcattacagtaacctacaagggtggcggcaggttcagacctgtcaccaacgggacccggggaatgagcaagaaaggatgagaggagcctttatccagagcttcccaggcccttccacgctgtggcacacagagcgggtggcacgtgcagatgcactgggcacgtgctggtgccctcggtgtgctgggcgctgctggacccaagcccagggtgcagactcctcaccccggcctggctgtctcgagggtggaggggtggtgttgggaayacctgcacccattgcagcacctggcacggataagatgagcattaggaagaggtgagggggtggcaccgcccagggctccaagtcccctttccttattgctgggagctgatctgcgtcctcactc

SEQ ID NO: 515492 - DNA, 531 bp, Homo sapiens
ccctcacctcctgccctctgagaagagtaggaagaaataaagccacaaagtggcacaggagctttggcttggtgctggtggctgaaagttaaccagcattgaggaaacccagggggcttctgtgcattgcaacccactgtgcattacagtaacctacaagggtggcggcaggttcagacctgtcaccaacgggacccggggaatgagcaagaaaggatgagaggagcctttatccagagcttcccaggcccttccacgctgtggcacacagagcgggtggcacgtgcagatgcactgggcacgtgctggtgccctcggtgtgctgggcgctgctggacccaagcccagggtgcagactcctcaccccggcctggctgtctcgagggtggaggggtggtgttgggaatacctgcacccattgcagcacctggcacggataagwtgagcattaggaagaggtgagggggtggcaccgcccagggctccaagtcccctttccttattgctgggagctgatctgcgtcctcactc

SEQ ID NO: 515493 - DNA, 414 bp, Homo sapiens
ctgcgtgtggggaagggaggagggacgtgaggaggtggcccccctccatccagagctaagaggaggagaaaaagatgctccagaaccccttccatggaaagctgccaagccaagcgcaccctgcctggctgaaactctggtgtcagyaggaaaacttgcacgtctagcaacttccacagacactgagtacccctgcttctgacggctcctccccgtgcccaccacagccaaatgaaacctcctgagaggaggtggctggagggcccctgcagagggagggacagatgggggcttctggtaaaggcacaggaaaccaggaagcccagaggccagttccctcaaacaaatcgcagagtttgcacacctcataagccggcaggggactcgacgctgtgctgcgtttatcttcactcc

SEQ ID NO: 515494 - DNA, 599 bp, Homo sapiens
tctttctttcccagacagcacttttctcctcgacagcagaaactcagccagctttgtctactgcaatagcccccgtgctcagaatagtgcctgctgatagaacaatcgtctctaaaaatattgttgaatgaatgcatagctaatgacacacaagctgtaccaagcaattaatcctattagtatatttagtagctaattgtgatatagaatttttaaaaactcaatcaacgacactatccaattttgggtacctattttgaatcacaactttcattttaacccttcttatccttgtcttatcacctggtaggaccccggcctgacatcttgttctttgtcttcctacattctgccctggtatctgggctatctccagcccctggttctccctctccaagcacacccatctccccgacaccccaagccatcatctgcaggggyaccactcattcacaggccccaacactgctcttcgcaaatgccagctcccagtctaacgacacacgtacctgcccctcaacaatccacctggagatggacgttttcccgtcatagcctggccggaactgaagggtggcggagcgagggctgatgttgga

SEQ ID NO: 515495 - DNA, 575 bp, Homo sapiens
ctgcggaaaggagcaattgaacagacttgatattcagaccatcacaagtctcctaggtcagttctgagggtttggtaaaatgataaaaatctactccccagtgggaagtctagctgactaccatagttagacatggaattctaatcattattcagcatgtcttataaaaaggtctaaaatcatgasaaaactctttgtttttttcttacttaagtggcacacaaggaggtgaaaacctacaaaagccattcaacatagttcttattaaccaacattaactgcctgccctgggaattgagtcctggttctcaaaagcaaataataaaaagtaaatttcatcacacagggattttttttttggttgagtttacaagtgtagtaaagagattaaacaaaatggccttaaaggccacaaatgtccaacagagaaagcttgcttcctaggattcaaatctattgcaaaaatgacctatttttataagacagttttcttttgatctctataaacttgctgagctcccttatactctcattgcacacaaaccttttatgaagctccaattaatttcattgtt

SEQ ID NO: 515496 - DNA, 352 bp, Homo sapiens
accccacactgttaattcttctagtctcgctgcctgacagcacctggctcttaatggtgccctagaaatgaacagcatgagatgggcttcgagaacaggacttgatccaaagataaggagggccaagggcatggctgggcatcttgttccactcttccccagcgtgccaccaccacaccggcctcctcccacatcttagacacagtgagcttgctcctccttctgtcccctctgcccatgggcctggacagttgcagtggctgcttcttgtcatcaggatcaycttcctgcaagaggcctgaccttcctcaaaccccgtcattctctttttcttctcagcacacacactgcc

SEQ ID NO: 515497 - DNA, 558 bp, Homo sapiens
acttctgagattggattacatttcaacatgagattagagcagggacatrcattcaaactatctcaatgtgtaaaatataaaaattcagtaaacaatagagttcctattgaaaatgtgtgccttttaagttcaagtcttggatataaccagtcagaacctctgttataattatgagttggggatggggatagaaggcataataaagatctatattgttgtgagccaagaaggagacaggttatacctctttgcgttcaatagatttaggcttgactaccaaacaggagaatgctctaaaatacaatggaaagtgaaagctttgaatcttggcttaaaggtgatttattctgcaaaaggagctctgcccaatggacttttctggcaccctctgaaggctgacactttctgtagagcccaggaaaaataataaaagacttagtatctacatcaaacaattcctgcacactaaagtatttcttctaaaaattatacattaatcttggctactgaacaacaaaaagaagtcattgctttaggatgttttgtttgctttatgag

SEQ ID NO: 515498 - DNA, 558 bp, Homo sapiens
acttctgagattggattacatttcaacatgagattagagcagggacatgcattcaaactatctcaatgtgtaaaatataaaaattcagtaaacaatagagttcctattgaaaatgtgtgccttttaagttcaagtcttggatataaccagtcagaacctctgttataattatgagttggggatggggatagaaggcataataaagatctatattgttgtgagccaagaaggagacaggttatacctctttgcgttcaatagatttaggcttgactaccaaacaggagaatgctctaaaatacaatggaaagtgaaagctttgaatcttggcttaaaggtgatttattctgcaaaaggagctctgcccartggacttttctggcaccctctgaaggctgacactttctgtagagcccaggaaaaataataaaagacttagtatctacatcaaacaattcctgcacactaaagtatttcttctaaaaattatacattaatcttggctactgaacaacaaaaagaagtcattgctttaggatgttttgtttgctttatgag

SEQ ID NO: 515499 - DNA, 576 bp, Homo sapiens
aaataaactcatataaaactaggaaacacctttaacttgataaaggctagctgccaaaacccaagagtaaacaccatatttaattctgaaactaggctaagattagagtcaagcaagtaaggcactcgcctcaggtgcagaatttaagggggagcaccacaaacctaggtaatcagataaataatattttaatgcagtatttttttaaaattagtgttaatacacaagatgaagactttaaagtaccaaaattttgaatgaaaacccatgccatgcggagcccyatgggagccatatacatagtcttgagtggttttatttttaatggttacttttttccagaacattaaagtagctgaaaaaatattgaaaatgaaacataggtatattaaaaaccacattattttaagtttaaacttttatttatatcccaatcagaatttattacatttttactttcctggctttaaatgaactccaactcatcagtaatattttcaaactctttcttggcttctcagttgagaacatagccatgtttcacaatttctcctgaccgagtgactgtattaaata

SEQ ID NO: 515500 - DNA, 528 bp, Homo sapiens
ttacataaacaaaataaagtagaataactgtattatcatatctataaaggctgaaaaggcacttgataaaattcagtttctaattaacaaacaaagaaactcatggtgaattagaaattttcttaatatattagggcagtggtccccaacctttttggcaccaggagcccattttgtggaagacaatttttccacggacgagtggggtggtttcagaatgattgaaacccattacatttattgtgcactttatttctattattattacattgtaatacataatgaaataattatacaactcaccataatgtagaattagtgggagccctgagcttgttttcctgcaactagacggtcctatctgggggtgacggggaacagtgtcagatcatcaggcattagattctcaggagcacacaacttaggtttcraatttgcagttcatcatggggtttgttatgagaatctaatcctcccactgacctgacagaaggcagagagcaggcggtaatgtgagtgatggggagc

SEQ ID NO: 515501 - DNA, 611 bp, Homo sapiens
cctgccatttggagttggatctgagtccctagttgcagcttgactccttgatttccatcttgcagtatttcacattctatctcatcctgctacttttaatttttctgtccttgctaggtcacaggatgtaacagaatatacattaaactttcattaagagtagaattagattttactgtgagaaggactgttcttactaagcagaaggtgttcactctattaattaaagtgtaggtggagagagcaaaaatcagtaacaaggcacctataggaatctcccccaatagamtaagtcaatagagcccagtcataataatttagaagattgaaagccctaatacttaaaggcagatccatcccaggctctggtagtctagcttcaaagccaggatcaataggtaaaagtgacacactccactgagggaaccaaatattcaagcttactaattaagggctgagctgagccagcaccataaatatcaggcttttaaatgggtgaaacacggagcattccaatttggttcttctgaaactataactatttgtctaagggatagtcttgaatcatataaaagtaaaattatctaaattacaaagtagtcatcactggc

SEQ ID NO: 515502 - DNA, 530 bp, Homo sapiens
agctctggaatcacagtgaactagacatcacatagctgcaygcagacacatgagcacagcttagcccagcctaaattgccaatctgacttgcaatatcatgagctaaataaatcgttgttttaaaccatcaagttttgaggttgtttgttatgcaacaatagttcattgatacaggcagcaagtccatgaatatcttccgtcaattttcttggattgagaaataataattcctggttcaggttacttccaattcactattaaatttctgaatggtaacaaaaggaagcaagtaatgaaatgattattctatatagataagagcttttattattaatttttaggtcatacttaggatagtgatactttgctgtttttctggcaattaagttagttttaagaatgccttgatgtattttaaagacaattggcctgaataagaattttagctagtttatgccttttttccttactcgtatcttgaaatgtagattcataattacttaggcttcttattcattcttttcttttg

SEQ ID NO: 515503 - DNA, 637 bp, Homo sapiens
tgtcacaataatttctgtgggcatagcttaggcaaaaatataacatgacctgtgtgctggaggtagtgatttttcgtgatttttactgggagtaggtcccagatgggagagtcacatcacctcaaggttggcccaggtagataccacaataacatatgtgggctgaaacccttccagagagtcaaatcatatgggtgattcacaaaatattaaatcacaagcacactggcggaaaactcccagggtaagatttacaataccacacattagttgtttttatgagtgacagttggcttcatatatttaagatggtgacattccttactgtcagatcagtgtgcatatgagactcagaattatgcctttctgctgcattccatcataacaatttctgtacaagctgaggacattataaaatacttgaggctgctatagtcttctttgaacttttttattaccagaaagagatttaatcattcatgtttcaaaagcaatttatggaagttgaaaatacttctatgtgtgaggcccacatatgacagtcattaccatgtctgtgagatgyttgtaaattgaacattgaaataaaagcccaacaaggtactcttaaggcactaatctgttccttaccaacatt

SEQ ID NO: 515504 - DNA, 684 bp, Homo sapiens
ccctaaatacatgttttaataagctcccaacactgatctccttacaaatcattctttgccagtttgcaattgaaccaatgtcttggttaaaatgaaaattccccagggcacacaataaataataaaaaagaataacataatcgagagggttattattctgagcagaaaaaaataatgtgaagcagttggactgtactttgtgaatcttatgctcaaaatgcaaacatgagagaaggtggtgggcaggagcctcgctctgcaagccctcgcccttctgggaactctacgcagcagcatatgttgaggggactgatcttgggaaatgaaacatcttttctcacaaagacctgccttttgcaagatgttgggagtcactcttggagaaggaagccaccaatatraaataagactcatgcaacgttaacaaatatttagcaccaggcactgcaccacacactgggactacaaggaggacagacacagcattgtggcacttgccggtctcatgggtgagaattaaggggaagcagactttcatggtgacacaggcatgatttagagttagagacacaggatttcagccctggctctgtctatgagactttgaacaaattgcctatcctttccatgtctcagtttcctcatctgtaaaatgggcatagtaagacgatctactattgttgt

SEQ ID NO: 515505 - DNA, 612 bp, Homo sapiens
actgcccccttcacctgttctttatcttaatatccttgttattcgctctctgctgaagaagatttcttgctatttcaggtggggctgatgggcacatcgtgaggggccctcttccgtaaaaasgagacgatgtcaggcaaacactccttaccctgccatttctagttacgtcaaggatcttactgctccaggacggaggaccttcaaggaactgcagggtagcgataatcaccgatgcagttaagccgggccctgggctgattcactctcagaccccggggggagtggcccttgcgcccgaaagagggctacggcgtagacccggcccggcacccaagttgactccttgcttcccgtaccccaaaagcctaagcgcggaagaggccggggacaccaaagaaacccgcaccaactccccgacccaggccctggggaaaaatggcgaagcccaggggcgggggacaggacggagcgagtgacctggcgctccccgggcctcagagcccgtggagtgggtcgtggtgggcgacgccacgcaaccgcgacccgtccgttgcctccgccatcttctcctactcacccggactccccccgcggccgcgctggcttcgc

SEQ ID NO: 515506 - DNA, 599 bp, Homo sapiens
tgggctatttatggttacccatggaaaggcatgaggggttcctacaagacaacacaaaggtttagagatgtctccttgtaagcctataacacaaaacagacctacacttatctcagtcttatatttcaatctgttccatttcctagagcaacacgtatttacaacccaaatgtaaagtagtaaagaaaatttgacaaagaatttttgagtagaaaggtgcctttgagatcatcctgaatagctatcccttttatctattctctttcaaacatcaaggtgacttcctgattctagtattgtgggatgtgataaataggtaggtattactctagctctacctttcatgattttcagactttcatcatatcyttttcagaccacaaagtcccgctgttcctagcctgtcctcacacacggccccttcatccctttattgtagctgctttcctccagcagatagtcatctaataccactgtcttttctgaggtgaacaaccaaaactctgtgtgttgtacacatgaatgagctctggaattggacaaaggtaggagattttccctcccttttatttataaaatcttctgtgacaacatcaagc

SEQ ID NO: 515507 - DNA, 477 bp, Homo sapiens
ttcataaggaaagatgtatcttcatgcttcagccaaaacccagatgggaataagaccttctattatacaggattccccagagaaacagaaccaatagtgagggggtcaggggaagaggcagttgggagagagggagaaagagagagaggctttatcttaaggaactggctcattcaattttagagtttggcaagtccaaaatttgcagagtagcccagtagactggagacccaggaaatacttgatgttcagtccaaaggcactctgctggcaaaattccctcttcttcaggggaggtcttttttctcttaaggcttctaactgattggataaagcccacctartgacctcattgtaatttaattacttctttaaagacattgtctccaaatacaatctcattctggggtgctaagggttacaacttcaacatatgaatttaaggggacacaatttcacccataaaatacctcagtg

SEQ ID NO: 515508 - DNA, 477 bp, Homo sapiens
ttcataaggaaagatgtatcttcatgcttcagccaaaacccagatgggaataagaccttctattatacaggattccccagagaaacagaaccaatagtgagggggtcaggggaagaggcagttgggagagagggagaaagagagagaggctttatcttaaggaactggctcattcaattttagagtttggcaagtccaaaatttgcagagtagcccagtagactggagacccaggaaatacttgatgttcagtccaaaggcactctgctggcaaaattccctcttcttcaggggaggtcttttttctcttaaggcttctaactgattggataaagcccacctagtgacctcattgtaatttaattacytctttaaagacattgtctccaaatacaatctcattctggggtgctaagggttacaacttcaacatatgaatttaaggggacacaatttcacccataaaatacctcagtg

SEQ ID NO: 515509 - DNA, 199 bp, Homo sapiens
cagaaaacaaacagatatgcccacttagattggcattagtgggtttattggaaggagcaaggatcggagatacagtgcacattcttactgagactttgagcaagtcatttagcgaggtgattcagcccatgctytcatgtggattcagggaataaagaagtcttcctcacaggctttacaaagggttcagtaagataac

SEQ ID NO: 515510 - DNA, 629 bp, Homo sapiens
gggtaacactttagtttacgagggtattattagagatagaaagaatttttttttaaataattgactcaaataccaacattttgcacattacatagagtaatagctttgcccaagttagaaaactgggggttcttctttattcctcttttgaccacatctatatactcagttttaaaaaggttcttcctggtatccttcaattccatccccatgttttcatctacaagcctagtgcagctattccagccgtctcctsatcaggtcttaagcacctcccatatgtccttgtagtacccaccatattgatctcagtagcaatcacagtactctattgtaaatatcttttaaattattatcttctctttgagcttttgggattttatcttatttatttttgtagttccaggatctagcaacagcttgtcacatcgttcatactcaactaatgtttgtttaatgcacaatgagcagaaataaacatactactccatagtaaaaagaggatgaacttttctgcaaatattaatcagcaccattttatccaccttttgggtttagtacattggaagtataggagtataaagcagaatgtccaatgtttacagtgatattttgaaatagataaaagc

SEQ ID NO: 515511 - DNA, 610 bp, Homo sapiens
ttttgacttttaagctttcttgtcagtgaattattgcaagccttatcatttacccatttactataatgaatcaatcactaatatgtttcatattatttaaaagacctttggcaaaagtagttgggaaccacaaaataggaagtaaaagacctgaatccttgtactattagctgcatgattctgggtaaataaatatttctgagtttctgctattatattggagaagtgaaggcattcaactaaatcaacatttcttaaaatgctacaggaacaagttaattattatcataagagaaaaaagggagggaatcagtgataaaaaagctcatggagcactgaattaaatacaattaagcagatgttactttgaactttaagacttctctgtacctttgatatgttaatatccatcattactctctaagaacagatatgatattcagttttttcaaatgtacacaaccccagaaaactatttttgayttacaatgtctactattgtctcatgatacaagaaacactggaaaagtccaaactgtatgacatctgaaaggtctttaaaaaaatggtataaaaattttttcatatgtataattgttttctttttaaa

SEQ ID NO: 515512 - DNA, 536 bp, Homo sapiens
aattaatttggggacatgagacaagaatgaacagtatctacaatctacgaaaaaataacaagcaagattgttggccgtttacctaacagtgtgttggttttttacctaacagctattmcttcctttcaatttaagataaaaccccactttttttttctgacaagtactgctttggggagattaccttatccctgtttcataagaaaatcttattagtctatatgttgatcatggaaatcctattctttttgccgatggttggtttaggcaagggcatatgagtcaatttggaagtgtagcaatataagaggaattctgttgggtgatttctggaaatgtttttctaacctttaaaaagacgtacagaggaagcagtatctcctttgctgggtggtgatgtgtttgcctgtggtacctggaactgcttgcagccatgtcgtaagtatgagagaatctggtgaaagggaaggcagatagatactctatggacagcgagctataaactgaaagtaaccataacctcacaatgccgttga

SEQ ID NO: 515513 - DNA, 536 bp, Homo sapiens
aattaatttggggacatgagacaagaatgaacagtatctacaatctacgaaaaaataacaagcaagattgttggccgtttacctaacagtgtgttggttttttacctaacagctattccttcctttcaatttaagataaamccccactttttttttctgacaagtactgctttggggagattaccttatccctgtttcataagaaaatcttattagtctatatgttgatcatggaaatcctattctttttgccgatggttggtttaggcaagggcatatgagtcaatttggaagtgtagcaatataagaggaattctgttgggtgatttctggaaatgtttttctaacctttaaaaagacgtacagaggaagcagtatctcctttgctgggtggtgatgtgtttgcctgtggtacctggaactgcttgcagccatgtcgtaagtatgagagaatctggtgaaagggaaggcagatagatactctatggacagcgagctataaactgaaagtaaccataacctcacaatgccgttga

SEQ ID NO: 515514 - DNA, 536 bp, Homo sapiens
aattaatttggggacatgagacaagaatgaacagtatctacaatctacgaaaaaataacaagcaagattgttggccgtttacctaacagtgtgttggttttttacctaacagctattccttcctttcaatttaagataaaaccccactttttttttctgacaagtactgctttggggagattaccttatccctgtttcataagaaaatcttattagtctatatgttgatcatggaaatcctattctttttgccgatggttggtttaggcaagggcatatgagtcaatttggaagtgtagcaatataagaggaattctgttgggtgatttctggaaatgtttttctaacytttaaaaagacgtacagaggaagcagtatctcctttgctgggtggtgatgtgtttgcctgtggtacctggaactgcttgcagccatgtcgtaagtatgagagaatctggtgaaagggaaggcagatagatactctatggacagcgagctataaactgaaagtaaccataacctcacaatgccgttga

SEQ ID NO: 515515 - DNA, 536 bp, Homo sapiens
aattaatttggggacatgagacaagaatgaacagtatctacaatctacgaaaaaataacaagcaagattgttggccgtttacctaacagtgtgttggttttttacctaacagctattccttcctttcaatttaagataaaaccccactttttttttctgacaagtactgctttggggagattaccttatccctgtttcataagaaaatcttattagtctatatgttgatcatggaaatcctattctttttgccgatggttggtttaggcaagggcatatgagtcaatttggaagtgtagcaatataagaggaattctgttgggtgatttctggaaatgtttttctaacctttaaaaagacgtacagaggaagcagtatctcctttgctgggtggtgatgtgtttgcmtgtggtacctggaactgcttgcagccatgtcgtaagtatgagagaatctggtgaaagggaaggcagatagatactctatggacagcgagctataaactgaaagtaaccataacctcacaatgccgttga

SEQ ID NO: 515516 - DNA, 659 bp, Homo sapiens
cagtgtccctctccagttatgtatccccacaccccctccaggccctgggctgtgtgctctatgcctgtgcaccataccacatataataataagaagaaagaaatatttcaggaattgccaaaatgtgacacagtggcatgaagtgagcacttgccgttggaaaaagtggcactgatagccttgtctcttgcagggttgccacaaactttcaatttgtaaaagaggcaatatctgggaagtgcagtaaaataagatgtgcctgtattaggaagtccagacagaaggggaaggagaatgggttgtcgaacgtgtgggtaccaaatgaagctctggccacagcaggccctgcactggaagatagggtgcctgaaatgacagcagaagagatggtgttaaagagccagttccgctcctgcccagcttagctcccctagcccgcatccaggtcctacgtccagctccttgcttatcccccacccccaccctatccatttctccactcaccaatcccaccacccttccccagcagccccctcacctctgccctctgcccttrcccttactaatccacccctctcattcctccccaggtgaggggatccaggcccccagtttctccagctacctctacttcctcttctgcccaacactcatctaca

SEQ ID NO: 515517 - DNA, 570 bp, Homo sapiens
cggcattacattctcataggagcacgacctttattgtgaactacgcatgtgagggatccaggttgtgtgcttcttatcagaatctaatgcctgatgatctgaggcgaaacaggttcatgtcgaaaccacccaaccccgtggaaaagttgtcttccatgaaaccagtycttggtgccaaaaaggttggggatagctgttgtaggaaacatcttggggttggcaacaaaatcagtaaaattgggtcaaggcatggaagaatttgccactacctccgcctttccccccttccatttttgcagaattagggatcctggcctgagtaaatggacggttggaaatggtggctgaatgcaacaccgcagtcccagtcccctcctcttgcacctgtcttcacccacgagcagcttttaacttcctctaggagatgggcaagcttagtgttgcgagagagccagtcatttcattttcaggttttgtactcattgtggggaagtgaaaccaagaagtagttgtctccagtggttgaagtctcctattttcaagcgttccctgtcgtggatttggcacttg

SEQ ID NO: 515518 - DNA, 508 bp, Homo sapiens
ttaaatgtctcagtcccctgcaaagactagctgaatgttttcatctataccatttaagcttcttgtttttaggcatggagagtaaaatgcacacaaaaaaaaaaaaatcccagaaatcctcttagtgattttttttttttttagtaattttatctgacaacatttaagtgtttttaagaaaattacattgaaggtacatgccttgaaggaggaaaaaacagaatgcttattatgtgcccgggaagtttacctatattatttcatataatctggacaatcaccctatggtatggattttattacctctattttacaagcaaggacactgagattcagagaggcacagaggctcaccaaggccactcagccagaaggtaacaggactgggaggcaggcccggcactgtgagcccagagcccctgctccttcctatgtggaagatacccagagasagcgtcgagtgttatttaggaaaatgagtgctagacgcatgatatgtaacaatcgc

SEQ ID NO: 515519 - DNA, 622 bp, Homo sapiens
ctttcctattttaaatttagtgatgtttactgatgtgtagtgatgtttttaatattcagttgggcgtggtagctcatgcctgcaatrtcaatgctttgggagcctgaggtgggaggatcgctttgggcctaggagttcccggccagtctgggcaacatggcaagaccccatctctacaaaaactttttaagactcagccagggttgggtgtatgccagctacgcaggaggctgaggtgggaggatcagaggactgcttgagcccaggaggctgagactgcagtgagccatgttcataccactggacttcagcctgggtgacaaagtgagaccctgtcacaaacaaacaaacaaacaaacaaacaaaaaagaaaagtagtattcacgttttggacattcctatctaaactaggtggaaagagaaaatggagagtactgggttctaaggaggcaggtattctagggtaagtaatttggtattttaatttaagcagaaagacatggtcccctacttttccccttgggatatgccctggagaatgacaaaatgattttaaaagaaaaaaatatattttaaatttgaaaaaaaaaagcagaaggacaacagagtgaaatgtattcag

SEQ ID NO: 515520 - DNA, 634 bp, Homo sapiens
ttcttgaaggggaacccacctcacaggcacccagggtgcaaagtgcctgtccaaacaccactgatccttcccagggagatgggaagggctgtcccaaatcattccaggtggagctgcaggttagtaaatgaatgtacctgatgccaggcagatttgaatttcagataaacaggaatgattgctgctctaagcatgamccccgcacccctggggagtgcttgtagcagatggggctgctccatcaggaggaggaggggcctgtgggtggggaggcccccactgggcctgccctcccctcttccccatctttccctggatgcagaccatcctggatgggcgggccacatggtcacaggaaacactaggatgaaaacgtttctgataatctgttaaaagcttatcctgtgcactaatttccctagaagattctccgtgggtgggaaacaaggtgtagcctgtagcttaggggtgaggacagcagagaaacagctcttttcaacactgatgtgccccgggcatgtttagcctgggagaggcagcccaaggagaggaaacaggtggagggggagaaagcccagggactctggagacagcagggggagcaggtgagggcggggggccgggctggctgcag

SEQ ID NO: 515521 - DNA, 226 bp, Homo sapiens
ctggcgggagtcctgttccggtgtggtgaggagccagggacgtggacacgggaagcctgagggattctgcaccgtcyccatccctttctgctggccagagccactcccaggctcaagcccaaagccaagggcagagggtgggggctccacagggaggggtgaagccctgtagccatgagctggatctatcacagcccccacagagggctatttacaggtggtggtg

SEQ ID NO: 515522 - DNA, 226 bp, Homo sapiens
ctggcgggagtcctgttccggtgtggtgaggagccagggacgtggacacgggaagcctgagggattctgcaccgtctccatccctttctgctggccagagccactcccaggctcaagcccaaagccaagggcagagggtgggggctccacagggaggggtgaagccctgtagccatgagctggrtctatcacagcccccacagagggctatttacaggtggtggtg

SEQ ID NO: 515523 - DNA, 602 bp, Homo sapiens
tgtgtgagcttgcctaaggacagcccaaagccagggtgagaagggggctgcagactgagccccaggctcttcaccttcccactcctgcctaccaactgtgctaatttcacctttgacacattccattakagaaagaattgcagtattttaattgtctattaaccagaatacctttgacaattcccaggcatggtcaaaagtaaagttgaagaaatccatttactagtcagaaacacacactctgctaactcacaaagcactgaaataaatgtcactaaattctgcagtgaattcaccatcaggtgctaatcaagcatgaaaatttaattcctaagaggaatcttttaataaagtcatgtgtgactgaaaatgagggggctaatgaaattattttggggacagtgtctggacattttacacacaaatgctgctcattggaagttatttgaatattccattgccaacagatgatagaaagagagattttctaatgctataaggcaggaatgaaaagacccacagaaggcatctgcagtttggggctactgaaatgacggataaatattcacagcccatcatcctggggctgccaaggaagaatt

SEQ ID NO: 515524 - DNA, 551 bp, Homo sapiens
ccaccctgtcctccgagggaaagtgagacagtcaccccaggctgggctgagcagcccacgggtcgctgcaaccctcacactgcacctcactattccctaaagggccctgcaggactggytccatcccttctctggccacatctgtgtcagggattccaggaccatccccaggttcagagactcccaggactcaggctgcaatttattacagtgaaaggacaacctgcaaaaacagcaaagagaaaggcacaaggggaaccaggcacaagctcccagagtcccctccctggggagtcacacagcacatgtctaattccccagcgatgagatgtgacaacacatgtgagtgctgtctatgagggacgctcactagagactcggcacccagggtttactggggtctggtcacgtcagcacctgtgcctggcatagtccaaaatcccagcctctcagagggaaagcaggtcctcagcataaaccctattgtttgcacacgcagccattcagtgaatcagtgtgggggcctgtttatcggcaaagctcccaggccc

SEQ ID NO: 515525 - DNA, 496 bp, Homo sapiens
actttttaaagtgccccagccaccagtcatctcagtagcataaaacaaacaaacaaaaaaacccactcatcactccagagattccaaggattttaggctttgtatgccagaaaacaggaactaagastaaatataattttcacaatattacggtaccattttatcttttccaagtgtaagattgatactttcacactctattgttgggagtgtaaaaaagtcaaactattgggaaacacagtctattcaaaattaaaaaaaaaactattttactataactgaagcatgcctccttttctgtatgcaatctatgggtgtattaatgttggctcaggtctgcaataagagaagcatagccacattcactgaagcacagcttgtaccacaaaaaagtgagaacaatcaaagtgtttataaatagaagaattctgcaataagttatggattctctcttcaatgacatcctatgaaagcaataaaaatgaatgatgttgct

SEQ ID NO: 515526 - DNA, 496 bp, Homo sapiens
actttttaaagtgccccagccaccagtcatctcagtagcataaaacaaacaaacaaaaaaacccactcatcactccagagattccaaggattttaggctttgtatgccagaaaacaggaactaagagtaaatataattttcacaatattacggtaccattttatcttttccaagtgtaagattgatactytcacactctattgttgggagtgtaaaaaagtcaaactattgggaaacacagtctattcaaaattaaaaaaaaaactattttactataactgaagcatgcctccttttctgtatgcaatctatgggtgtattaatgttggctcaggtctgcaataagagaagcatagccacattcactgaagcacagcttgtaccacaaaaaagtgagaacaatcaaagtgtttataaatagaagaattctgcaataagttatggattctctcttcaatgacatcctatgaaagcaataaaaatgaatgatgttgct

SEQ ID NO: 515527 - DNA, 468 bp, Homo sapiens
catagaagtacatgggtttggaaaccaaatactggaagcacgagtggatgagatcatccatttccgcaagtctgggctatggataattcaaagttcctgtccctcagagggggagaacttcagccagggggcacagcaggatgcttattgaactatttaggcccttgtgtttagggatcagcaagtaacttggcctgggcaattgatctgattatcaggtggaaataaaactgatattactgcamgggagcagggaagaatatgtttggcatctgagatttacttgagcacctcttggcatttccaggtagatagccaagtgcaacagctttggtttgagaagggcatggtgaccaatagctcagacccctaagggatgaagatctctagtctgtcaccaggtaaccccaaagacaagcaactgagggtaaaagaagcttagagtggatgataaaatagagagaggag

SEQ ID NO: 515528 - DNA, 468 bp, Homo sapiens
catagaagtacatgggtttggaaaccaaatactggaagcacgagtggatgagatcatccatttccgcaagtctgggctatggataattcaaagttcctgtccctcagagggggagaacttcagccagggggcacagcaggatgcttattgaactatttaggcccttgtgtttagggatcagcaagtaacttggcctgggcaattgatctgattatcaggtggaaataaaactgatattactgcaagggagcagggaagaatatgtttggcatctgagatttacttgagcacctcttggcatttccaggtagatagccaagtgcaacagctttggtttgagaagrgcatggtgaccaatagctcagacccctaagggatgaagatctctagtctgtcaccaggtaaccccaaagacaagcaactgagggtaaaagaagcttagagtggatgataaaatagagagaggag

SEQ ID NO: 515529 - DNA, 468 bp, Homo sapiens
catagaagtacatgggtttggaaaccaaatactggaagcacgagtggatgagatcatccatttccgcaagtctgggctatggataattcaaagttcctgtccctcagagggggagaacttcagccagggggcacagcaggatgcttattgaactatttaggcccttgtgtttagggatcagcaagtaacttggcctgggcaattgatctgattatcaggtggaaataaaactgatattactgcaagggagcagggaagaatatgtttggcatctgagatttacttgagcacctcttggcatttccaggtagatagccaagtgcaacagctttggtttgagaagggcatggtgaccaayagctcagacccctaagggatgaagatctctagtctgtcaccaggtaaccccaaagacaagcaactgagggtaaaagaagcttagagtggatgataaaatagagagaggag

SEQ ID NO: 515530 - DNA, 621 bp, Homo sapiens
ctgccctggcagaacagagccccattcctccctctcctctgaggaccagagccagaggcgggagaggatgggggaggggaggagccgtgtgccatctgcttctgtattattgctttgtttttccttcacgattttctcttccctgttattacccttgacttcaggatattgtcttgttacacaaaccttatttttcttttctataaccttgagaaagggaattttaaaattccactgatatggaattccattggcagaaaggaagaacattaagaggaagagaacctttgtaatattttcctctacaagaacagggttggaggctcaaaggactccgtaaacatcaaaggccgtgcatggaagtcacaaaatagagattgagacggattggatcctccttaagtgtttctctaaaatttcaatttggtgacactgcagatcgtttccagattaacaaaggaagaagccatgggactgacactggcagggactgactttccaaygccctccagcgtaatgcacagacgcacgtgcagtgtggacaaagcctcctgagagctgggtctgcactcttactattccttggttcttgcagttgaaagtttacaaatagtcttgaaa

SEQ ID NO: 515531 - DNA, 531 bp, Homo sapiens
aaattctacaccacggcaggggatgcaaaagttatccctgctgttgttgctgatttctggcagcctgaataaagtgccaacacaaagacccaggggccgggggactgggcttcatgttattcttcaaaggaaagacaccagcctctgccccaaaaacacagtgcaagtggcctcacagccaaattctcaggctggtagatttagattgggctgtgacttcataaccagataaatgatcagcgaaaatgggagacatggagaccacaagcaccgtgctatcagctcaaaggcaaaagaagtsaaatctccttcttcaaagtcctttctgtgtctttaaaggaattggatcttcttgactggaactagtgaattaaagaaagagaaaaagaatgcactgtttttgaaaggatgaggccacatttgcagaatcatctggcgaggaacctctatagagactgggaagattggcagggcgggttttgttcggccttggagagtgaacctcctcggctttcattctcagcggtcctc

SEQ ID NO: 515532 - DNA, 191 bp, Homo sapiens
gtctgaatgcagggactgggtgctgggaagttataggctgagagtgagagagctaaacacagccagtgcaacaatcttgttaccaagaatggccaatgtgatagagaccagtgcaagatgccaaggatgatgcagttcacacagaatyacacagagtatatttaaaccaagtccagaagatattgtactct

SEQ ID NO: 515533 - DNA, 453 bp, Homo sapiens
ctactaaaagccagacattatcctaggacacagakaataaaaatgaataaaatggaaaatatctttaacccttggcagcttaccttctagtgtgaggtttgttatacaataagtacatacattcagtatagggtaggtattattttgtgtgtgtgcgtgtgtgtgtgtgtatctgtgtatatgctcattcttgtcgatatatgtttaaaatacacgtagaaaaaagaatgaaaaactttaaggatggcatccgttttggtgatttaaattaatttgtattattatctttgtgctttcatcattttctacaatgagcatgcattcctttcataatcagggaaaaaacattgttaacaaaactcttaatgcagacatattggttcctgcagtttctcagcagaaggagagccacagcatgctccctgagaacttgtagctagtgagtttcaacag

SEQ ID NO: 515534 - DNA, 453 bp, Homo sapiens
ctactaaaagccagacattatcctaggacacagataataaaaatgaataaaatggaaaatatctttaacccttggcagcttaccttctagtgtgaggtttgttatacaataagtacatacattcagtatagggtaggtattattttgtgtgtgtgcgtgtgtgtgtgtgtatctgtgtatatgctcattcttgtcgatatatgtttaaaatacacgtagaaaaaagaatgaaaaaytttaaggatggcatccgttttggtgatttaaattaatttgtattattatctttgtgctttcatcattttctacaatgagcatgcattcctttcataatcagggaaaaaacattgttaacaaaactcttaatgcagacatattggttcctgcagtttctcagcagaaggagagccacagcatgctccctgagaacttgtagctagtgagtttcaacag

SEQ ID NO: 515535 - DNA, 492 bp, Homo sapiens
caatataccctcttgccatttaaaaagtgacatcaaaccaaaggagggagccggccgtggtggctcatgcctataatcccagcacttcgagaggccaaggtgggcagattgcttgacctcaggagttccagaccagtttgggtaacatgctgaaaccctacaaaaaatacaaaaattagctgggtgtggtggcgcatgcctatagtcccagctactctggaggctgaggcaggagaattgcttcagcccaggaggcagaggttgcagtgagccgagatcgcaccactgcactccagcctgggcagtggagcaasatcttgtctcaaaaaacaaaacaaaacccaaaatccccaaaaccaaaggaggaatggaaaaatattttttgtaattcagtttccctttactcttgtattcatacctcttcactgttagcacttaattgcttttaatcaattaaagttcttcataccatatatactagagcagtggtcc

SEQ ID NO: 515536 - DNA, 596 bp, Homo sapiens
tgatgtgataatctcattataaatgaatatggggcaatttctcagttggcaaatagtaatgtcactatagataccaactcacagggtactcagtaaagcattgtcatgtgttccttgagacaaagagtacctacagtaaatgacacgaaatggagcaaactttctgtaaaataattttaacacttttagtgatattattttcagtgaaaattatttctaacattcctccaactcaatctgctcgggttggcacagaagacaaaactgatgtgtacatgaaatatgttgatactctgataagaagtaaagtaagcatgaactggacatcttaattcattataattgctcataagataacagagagtttacttgaaagagatcaaaggaatttcttagcatctctctttggggaaaaaatcatccatttggttggttcataattactagattatgtacagcatgcattgcaaaagttaaattgtttttggatgttcattttctgcaattaatataaattttcagaaaacastaactgatctctgaactacatacccattcttcagttaacctagttcttttatagagatgatcttaca

SEQ ID NO: 515537 - DNA, 605 bp, Homo sapiens
caattgtacacaaaacaatcaacagastcattttttccgaacacctacagtcattcaggataaggtaacagatatctggagcacctgaccctctaaagatttttaaaaggaaggcatggacagatcataatgtagttccaggacaaagttaaataaagcaaatgaaatcaagcaaaatctagcactccactgggtgtagaattcatagtgtctaacattcaatcaaaaattaccatgctgcaaagaagcaaataccacccacaatcaggagaaatagacacagaaatgatagagacagatggaattagcagatcatgaccttatgtaacggctttataagtattataaacacacctaagatagacactatcagaataaaaaagaaaaacaaaagacccaactacatgttgtctacagaaacctactttaaatataactacacagatagattgaagataaaaggatagaaaactacataccacataactattgctcaaaagagagccaggttacttacattaataacaaacaagcctttagaacaatgaatgactatcatcagggataaatagggacatttcataatgacaaatagatcagttcat

SEQ ID NO: 515538 - DNA, 605 bp, Homo sapiens
caattgtacacaaaacaatcaacagactcattttttccgaacacctacagtcattcaggataaggtaacagatatctggagcacctgaccctctaaagatttttaaaaggaaggcatggacagatcataatgtagttccaggacaaagttaaataaagcaaatgaaatcaagcaaaatctagcactccactgggtgtagaattcatastgtctaacattcaatcaaaaattaccatgctgcaaagaagcaaataccacccacaatcaggagaaatagacacagaaatgatagagacagatggaattagcagatcatgaccttatgtaacggctttataagtattataaacacacctaagatagacactatcagaataaaaaagaaaaacaaaagacccaactacatgttgtctacagaaacctactttaaatataactacacagatagattgaagataaaaggatagaaaactacataccacataactattgctcaaaagagagccaggttacttacattaataacaaacaagcctttagaacaatgaatgactatcatcagggataaatagggacatttcataatgacaaatagatcagttcat

SEQ ID NO: 515539 - DNA, 605 bp, Homo sapiens
caattgtacacaaaacaatcaacagactcattttttccgaacacctacagtcattcaggataaggtaacagatatctggagcacctgaccctctaaagatttttaaaaggaaggcatggacagatcataatgtagttccaggacaaagttaaataaagcaaatgaaatcaagcaaaatctagcactccactgggtgtagaattcatagtgtctaacattcaatcaaaaattaccatgctgcaaagaagcaaayaccacccacaatcaggagaaatagacacagaaatgatagagacagatggaattagcagatcatgaccttatgtaacggctttataagtattataaacacacctaagatagacactatcagaataaaaaagaaaaacaaaagacccaactacatgttgtctacagaaacctactttaaatataactacacagatagattgaagataaaaggatagaaaactacataccacataactattgctcaaaagagagccaggttacttacattaataacaaacaagcctttagaacaatgaatgactatcatcagggataaatagggacatttcataatgacaaatagatcagttcat

SEQ ID NO: 515540 - DNA, 551 bp, Homo sapiens
gaagcacacacaggaaaatatggcaggaarttcatggaccttagtttaaaactctataaagaaaaaaaaaaaaacttgctgccaggcagcagacgtttttgctttcctctggaatcttgggtaggttcactggataaaatcttttaacaggtattaggcttcaccctatttgaggatataaactcaacagaacaaggctaaagtttgtgaaacccccagacagggttaaagatctgaaactgcctttgcaaaagcagtgagaaaattacgacagtgaaagagatgtgacctaaccaactacatcttgcctttaacctgcagactgccctcgttcattcctgaacacagactgagctaactacaggaggaatttacagtgttaacatggaaacaaaaatggtaacagccttttccggaaaaaaatcccatttttgcctggggacacaccacctctgtaggacaacaaattcgccacaagtttagaaagtatggctcagaagtcctgcagtcagaggccacaagattctcaacctccccagttggtcctaggg

SEQ ID NO: 515541 - DNA, 491 bp, Homo sapiens
gctgcttcgggggagtcctcaagaggcttacaatcacggtggacgggtaagcaggagcaggcatgtaacatggcaaaagcatgagccagagagagagttggggggaggtaccatgcacttttaaaccaccagctctcatgtgaactcagagcaagagctcactgatcaccaagtggaggatggcccaagcgaaggatctgcccccatgatcagtatacctcccaccaagccctgcctccaacattgagggctacaattcagcatgagatttgggagggaataaatatataaactctattactgaccaatgcagtttctcctcataaacactgacctgatgcagggtctttttggcgtagagggggcatggagattagttcattctgattggtcattaccaaaggctgggcaagggcatgtggtaagggatgcaggagtgcctgtggaatatrgaatggtgaatgaggctgagcagggcaggggtcccaggg

SEQ ID NO: 515542 - DNA, 609 bp, Homo sapiens
cattgttttaaaacttatatcaggcaaaactgcaygtacagcatgtgtattcatttcagaaaaataattgcataagtggttaatgacaccaggaaacctaatttttgcagactatgtatatattacctcaaaataagaatattatagcattatattcattttaagaatatttagtaataaacccatatatatcgtataaaaagttatagtctattttgttccaatacaataaaaatcattgatattaattaagcaacttctatacagaaggtgggtggttttcaactgtgagtctgttttgtcttaaggaagttaatatcccttaatccaaactttcaaaatagtgttcaaggaacaggaatgttattcttaacttgaaaatactttgcccatacacataatctagttgaatccataaagagattgtggtgttttgatacctaataatttctttataaaaaaagaatgtatcccctaataaaattaaaaataactctctttgaagatagagaactagacctgctgatgtttatgaaaaactcagttggatgtttcaggttttcatgagcagcagattgtcagaccattggacatgagctgtttcatttt

SEQ ID NO: 515543 - DNA, 626 bp, Homo sapiens
tttcttgttcaagatttatcgaaggaaacataattccatgaggacacgctgctaccattgtgataaatggattggtcatgctcagtgacaaaagtgtctcctggaccagactctactcaggctgctctgagtctttttctccacaaggcccccacactggcctataaagacttgaacaagttcaacagctcaaggtcacaccgctacatgactctagcccccttaaagtacttgcctacgaaaactcaaggctgccaaaataactgattgttggttccagccactcctgcagacaagcctctgtggaagggcaggagcctgacttctatcagcaccagtgaaacccagatggcttcacactgaccaaaccctcttccygctttctgcaattttcacttccccaactctgctgagcccctgctgacccctccctactccctgaatttccctttaaaatgcccagtcacctctgggataattgatgttgagcccagtttcacattggtctcttttctctattgcaatagtatattatggaagaaaatctgtgctgatcgctttaactactgtctggctgtgtttatccttgacactagaaaataaccaaagtcaaattccccaaagca

SEQ ID NO: 515544 - DNA, 626 bp, Homo sapiens
tttcttgttcaagatttatcgaaggaaacataattccatgaggacacgctgctaccattgtgataaatggattggtcatgctcagtgacaaaagtgtctcctggaccagactctactcaggctgctctgagtctttttctccacaaggcccccacactggcctataaagacttgaacaagttcaacagctcaaggtcacaccgctacatgactctagcccccttaaagtacttgcctacgaaaactcaaggctgccaaaataactgattgttggttccagccactcctgcagacaagcctctgtggaagggcaggagcctgacttctatcagcaccagtgaaacccagatggcttcacactgaccaaaccctcttcctgctttytgcaattttcacttccccaactctgctgagcccctgctgacccctccctactccctgaatttccctttaaaatgcccagtcacctctgggataattgatgttgagcccagtttcacattggtctcttttctctattgcaatagtatattatggaagaaaatctgtgctgatcgctttaactactgtctggctgtgtttatccttgacactagaaaataaccaaagtcaaattccccaaagca

SEQ ID NO: 515545 - DNA, 562 bp, Homo sapiens
tgatggatgtttttaacttttctatgaaccgttgttttgaaatatggggtctgggccctgctggagactgtagggctgttcccaatattgcttttgagcggtggcaataatcagtaggtgggggccaactccacctcttggggcctctgttcttgtcatgcagtgggcgttaatctctgcagaggaattgattgtgaggaggaaaagagaaaatggataattataaagaactgggcacagctcaataagtggaaacacgaatgaccatgtgatagtgcttttccaacgcacctcccttgcccagtcagttttctctctggaaccaggtaatgttttccctatttcactcttctggtcttttcaggtgtgtcaattgtttgagctgtagyaatgcagtgattaccagtgattacttgggttttgaatgtgagtttgaaagttgaaatgttaccttattataggcacagtactcaagatttccgaagtacttatgtataaagtgaaatgaatcagacacagaaagagaaacactgtatgttatcacttatctgtgggatctaaa

SEQ ID NO: 515546 - DNA, 493 bp, Homo sapiens
cctcatgtaaaatgaagataatagtacctacttcttaaggccattatgaggaagaaatgagataatccaggtaaagtatgtaactctgtacctgacattatgctacatgttcaggaaatactaacagctatctattacaatcgactgatcatcagctaagatatgcaaggtcttatttttctaaacaggtaagtggatctaaaagaacttctaaytcctctcaggtctacttaattttacttgctaaacaaagattcaaacagggagtactgaaggataaattttcaaaaagtatgacctcttccatctaaacgtgccagcagcaacatgaagtatgagtgaccaatttgcttagaaaccattcaacagcaaagtaaccactcaaggtaaatcaggatttgggtagcagttgtagcacagaactgaattcttagcagcccccacattaatgcagaaaatacctgacaggaaatgatgaaaaagcaaaggaaga

SEQ ID NO: 515547 - DNA, 577 bp, Homo sapiens
ttgtgtgttgctaacgcctctgtaaatttaaactctggaaaaatgcccagaattttttgttaactgaaaaccagacacatccctgaaagatatctcccccttccatagttaatgcacgttttgcttctcaatagttttggcaacaaattttagagtttgcaattctatggttgggctctgtgacattggttctcaaagtgacgtgtgttattagcataacgggtgggcaattttcacaagtactttgaacaaaacacagtcaaatatgattcatttaaatttcaaataattatttgatacctagcaccttaaagaaggaaagaagattataaaaccataygctacatcttggaatgcaggatgctagcacttgggaagctatcattatccaagacaactgaaatcagatcatttcagaactaaaactttttcaggctgggcttgatggctcatgcctgtaatcccaacactttggctggtcaaggcaggtggatcccttaaggtcaggagttcaaaaccagcctggccaacatggcaaaacctcatctctactaaaaatacaacaaaattagctggg

SEQ ID NO: 515548 - DNA, 509 bp, Homo sapiens
atatgcaaaacagcaaagaagagagggaccagctttttattacatgaaactcaatgggagaatgaaacaagcattacataggtgaaaagtaaaaggctgcaaaagcaattaggagagcattacaaaagtagcagatgttcccctctaaattgcatcatgtgtagctcatagrcttgaaatctcgtgcatctgaaggttaaaaatggggctgggggtgtggaaactcacttgtcgaagctattcagaattgaaaatagtctgataaatccaggattctcatgacccctggcagcattcacatctcatcacagtgataaatgtcccattgatgctttggagagcatcgatcacatcagcacagactgcccttgctgtaaaccatcttggtgatttataggcttgggcggcctgactgtgccctttcagctctgctgcacgcaacaggaggcctcccaagtcatctaggtgaaagaaactttcatttgctgttcaattccatcttcctggca

SEQ ID NO: 515549 - DNA, 280 bp, Homo sapiens
ggtgggggaaggaggagtgggacggtggcggtcccccacaaagtgatgaactcagcagggctttctgcctaggctcatggggctttgaagttggaaggaaagcggcctggtctgggctgtttttcccagcctcctcctcctctgcctckctgtcccccgtccatcggcgtctccgtctccggcctaatggggagccttcctcctgtggctgagttatctgcttgtcatgccagtggcccacccgaggacgataaaagggctttttgtctgcaagcactta

SEQ ID NO: 515550 - DNA, 551 bp, Homo sapiens
tcatgggccatgactcaacccactaccaaagccaagacctcaaagtggcagcagtcgcatgcccggaaacacctttggtgcccctttcctttcccgctagttccagaaaactggctggaagctgcagaggagagctccagggatctccgggatggccccagggcccccctatagccgacagagctggaaacagacctgagagrtcccacagccaccctctccggcctgagcctgctaaaaactggccccaaggaacccaaatccccttccctgtggcaggcatccatgagccagccactcgtgggcagcttgaggaaaggggcctgcctcctggatggggaggccagacacaggccatcacctctgcccctaaataaagacactccccagaccaaaatgcatcctatttccccatccaggcccgggattcttctccacaaaagcatcaaaatgaagccctgaccacgttggctaagggaagccaacggtactccagggctgtttttctgcatgttgtttttatttttaaaaggggccgcccccacccacag

SEQ ID NO: 515551 - DNA, 709 bp, Homo sapiens
cagcacccattagttcccagaacatttcaggcacgtgcggcgcagagccccgcgtgcctttcatcctccccacagcccgcggctgagcgctccgggcacatcctgtagctcccacacctccaccagcccccgcctgcccctcaccctgaggctgtaattccaccctccccaggtctgaaccaggccgctcaagacacagaaaatctatggaatgtgtctcggtgtggcctcatcctgccggagctggagaggaatgcaggggtggggaggccccatggaagcttccagggcctcccggaaaggcgcctctgcccggccaggtgggaagaggacacaggtgtggtggtttctggcatcactgcgttgctggcatgcacctccgctgggcagagtcattcagtgtgcacctactgtgtgccaggcaccagaaggggctctgggtccagcaggaggcaaggcggacagccagtcagagctcacggcctgagctttccgctgtggatttggaaaccttaccaaagcccgcagtggccgggaacagggaatgtggcccacttggcttctgctgctgccyggcagagtgcagtgggggcggggggcacttgtgtgtttgctacctcctggcaggcatggcccagggacagacccctgcagccgtgcatggggagcccctccacctgcctgcgtgggatctgcagccctcctccag

SEQ ID NO: 515552 - DNA, 586 bp, Homo sapiens
cttcagagctttccaaaacaagggctaaagggaaaagacaacacgcccttcaccaggaaccccaggaagatgcaggagtgttttggctcatttaagctggataagacccaaatcctggaggctgttctgcagattttgacactcggaacaatattctggttttcactgggtgagtcactcttgggagacagagccgtgttgttagcagtttcattttgactttgtgaaaactcatgccctccttactccctttatgccagcccccaaaaagcatccactgcctgaagtggagagaggtctggcttctcttcgtctgctcgggggagactctgagtaggacttgctttggagactggagcaaactgtggtgtgcagagggttgctttgtgaattacctggcaccgttgttcagggaatgagccacagtgctttgaaggttggatactctggagtycttggatatgcagatggccaacaaaagaagtgctttatcttcatggcctcgttggagctgggaacattctggacctcagtgctggagcctgctttcacttcctctactaccacagtctcagacttggcctga

SEQ ID NO: 515553 - DNA, 589 bp, Homo sapiens
cctcgcgtctcactcatctgagcctgctgaggtgcggtgggaggacagcagtgacgaggaggctgatagcatgcactgactgagatggtctgcctgtctgagaaatgaagacgggcagatgctgacctggaggcttggcagaagagaagggaagtagagtccctgaggggttgagatggcagaggtgaggggtcaggagctgaggccgtgctatgaaatgtctcaaaagaatgtcctagaatgtcagaggtggaatggccttttgcccatcaagacagggtggggcaggagctgagctgacttcggtccacactgacgcctctttttctcacactcctggatctgcgccataagcgaatcttattgcccataccttaaaaatccatcctcaaggactgggagagatatttgcacacctgtgttcacagcagcastgttcataatggccaaaaggtggaggcaaccagagtgtccgtcaatggatgatggttaaacaaaatatggtctatccagacaatggagtattactcagccttgaaaaggaaggacattctggcacaggctacgatgtggatgaatcttgaagaca

SEQ ID NO: 515554 - DNA, 506 bp, Homo sapiens
ctaaaaaataaaaaataaatcaacacataaacatacgttctcctcctgagggacagagcttgccccggttgttccatgttgactgtgctgcacacaggccgccccccttgctctgcccctcactgtattaagtctctttgggcctcagtttctccatctctaaaggaggtcggggaggccaggcgggtgttgagtgagatgaagaggcccttggagtcattccaggagtctataggtgactccagtctcttctcacttctgacagcctggtggcgggggtggagtctctgctggggatgtgggtacagggctgkggtgggcggggatgagggtggggtttggtgacagggcgtgggtggtcacccagctttgcctttctccacagggtcctgaggacaccgtgagccagccaggcctggccgctgggcctgaccggccccccagcccctacaccccgcttctcccggactctcccagcggacagccccccagccccacagcctgag

SEQ ID NO: 515555 - DNA, 579 bp, Homo sapiens
tggcggccccgctgattgggtagggagtgggctgacagttggcagaagtcctccttcctgccactgcgtgagtccctggggagccgggctaatgatggagtggcgtacccttggtcaacctccgtttctgcatcgctgcccaagagggagccagctttggaaagggcagcggagacagccggtcgcctgctggcgactcctggtgacgggggcatctgcactgcagtgtggaggagggacctcgcctctcactgccctgcttaattgcatgctcggctgacatctcttctgcactgctgcctcagtgatctttctcaagtgcaaatctgctcatgtagctcccggctaaaatcccccaggccctcagaataaggtcccagctctgaaatggggggcacagggccctgcatgatccggctccagcacaaatttcccaaaggccttgcaattcttccaagcagccaggctgtgacatccacgcactccccgccacccagccacggcatttatccttgttttttccacccggaacttcttctgttcctgcctggatgcmacccccaatctgtcttctccccc

SEQ ID NO: 515556 - DNA, 594 bp, Homo sapiens
ctgccgggaagcagagctgtctcgtgacctgtcggggaagcttctgtgctccttgctcgctaggtaaaggcagtggggttgcatgttacttgaatacaattcccattggttcttacaaagtctttcagagaaaagcagccaaagtaaatggtaccgtctgttgtctccccatcgtgtttcgtcctctgtagggtgatagtgtgagcccatttcactgtgcaataccctacttaacaaggggcctgagagacctccaataattgtgattgggggatttcagcctttttttttttttaagatggatcttgctcttgtcgcccaggctggagtacaatggcgcgatttcggctcactgcaacctccgcctcgggttcaagcgattctcctgcctcagcctcccgcgtagctgggattacaggtgcccgccaccacgcccagcaaatttttgtatttttagtagagacggggtttcactgtgttggccaggctggtctcaaactcctgacctcaggtgatcacctgcctcagcctcccaaagtgctgggattacaggcgtgagccacygcgcccggtctctgattgtggtatttgagc

SEQ ID NO: 515557 - DNA, 507 bp, Homo sapiens
caaaaccctctctgtcttctcaatctccttgccagcctacagcttgagatttttcacacagtggattttcagagcctacggtcggcatctaatgaacaaatacgcgggtggggactgaatacctcttgyaagaatctcatctcagcccttcaaggccactctgggaagcttacttcttggaagaggacttatctcttccttcccaaaagagctgcattctaaatccaaacagccgtggagtagctgctcctggaaggatacttcaacatccatgaaatgtaatgatgtcctcaagtgaaatatttcaacagcgtgctcaggaacccaacaaaagaacataggtttaggggaaatacacagacacgcacacacacacgcacacacaccccaaattctttccttaaaacataagctggaaggattttatctgctctcacagggaaaactcaagaggtttaatttaaaacttgggcgggcttgtggtttttcaatggggtgattgttccg

SEQ ID NO: 515558 - DNA, 667 bp, Homo sapiens
aaaatggaaaagtaacaaaaagtaaaaataaataaaaacatctcaaacaataacctaaatgttgccactttaataaatgataaaaaaagattctcatrcccaaagatagtattttcaaaaagctctatttcaacttgaaattcagggcatattacctaaatgacagaaaaatctcagtcaatacgcatagtagcatttagctaagcacagtggcatgtgcctgtggtcacagctacttcagaggctgaggtaggaggtttacttgaacccacaagttcaaggccagcctgggcaacatactgagacatctctcaaaaaaaaaaaaaaaaaaaaaagcatactaatgcttaaaagatccagaactttcaggacaggaaacagtaatataaatcatttgtagttcacatttgaaaaaacagtttttactgataacatcttgtttaaccctaacaaccaccctgggaataggctttgatgtattctaacaacaaaataatcaaggatcaaagaagttaggtaactgctcagaatcatccagctccagaaaagtccagtcttttagttctttgcctgtgactttctactgtatttactgtatgaggaaatctagatatcctgcaattattaatctcttacttccattcacattctagttctagacacttca

SEQ ID NO: 515559 - DNA, 667 bp, Homo sapiens
aaaatggaaaagtaacaaaaagtaaaaataaataaaaacatctcaaacaataacctaaatgttgccactttaataaatgataaaaaaagattctcatacccaaagatagtattttcaaaaagctctatttcaacttgaaattcagggcatattacctaaatgacagaaaaatctcagtcaatacgcatagtagcatttagctaagcacagtggcatgtgcctgtggtcacagctacttcagaggctgaggtaggaggtttacttgaacccacaagttcaaggccagcctgggcaacatactgrgacatctctcaaaaaaaaaaaaaaaaaaaaaagcatactaatgcttaaaagatccagaactttcaggacaggaaacagtaatataaatcatttgtagttcacatttgaaaaaacagtttttactgataacatcttgtttaaccctaacaaccaccctgggaataggctttgatgtattctaacaacaaaataatcaaggatcaaagaagttaggtaactgctcagaatcatccagctccagaaaagtccagtcttttagttctttgcctgtgactttctactgtatttactgtatgaggaaatctagatatcctgcaattattaatctcttacttccattcacattctagttctagacacttca

SEQ ID NO: 515560 - DNA, 541 bp, Homo sapiens
cctatttttctttttttttttttttaaaaaagcaaactcaaaggataaatttcatttaatacccccaataatctgtgaggtaaatattgtggcagagaaattaggtaatttgcccaaggtcatgtaacttagaaatgcctgaagtcaacgttaactgctttggaccaccataatcctacccgcctttgtagaaccttctttactttgatattttccaacttaagctatgcttgatgtaaacaaaggtagatgcccattattttaagggcagcatatgttaaattcctaataacagacagataacatgatatcaaaattgtatgctccttctcagcctctgtatctattagtagtctattaagtcataaattgacaataaaaataactttctttgtattcagacaaatttaaaacaaataggaagacgccraaggggaatctaagctttttttttccttacttgatttgtagacctttctaagtctatccatagaactcagattaagttgaatgcctaatgtttatcgcgagttactggtgc

SEQ ID NO: 515561 - DNA, 642 bp, Homo sapiens
gttcactctttgtccttaattcccagcaggatttcggtctgctatctttaggaagttctgcttttgtggtaccagtaagtggtcatggctacactggggtgattaaaacagaagcaaaagaggaaccataacccaatagtttcacttcttcctagtaaatgccagttgttttctttcatttgtgagccatctcagattcttcatacctaatatttcactcctcctcccctcattcattaatgtaactgtactaaaagttcattactgagagaagaaaagattggtaacatgtttctctagaagttaatggagggagggaggttgcagggaggagagtgtggttgtggtagagaaaatacaaggcagagaaaagycctagaataggagtcaagaaacttgagtttcaatccttaacatattacttaaattctgtgaaactctgggcaagttaagtctttctgagccctggtctcttcatatgccaaaatacagtaaagataatatcttcctaagtatctatatgaactatagaaatgagaaatattttaaagttataaaatagcatatatttatataagactagcttgttatttgtaataggaaagggacaataactctgctaacagataaatatatgcaagg

SEQ ID NO: 515562 - DNA, 393 bp, Homo sapiens
atctctagtgctttggtgcacatctcaaaaaattttttcttatatttggaaaaacctaaaaactccaccagaaaatgattagaactgataaacaaattcagtaaagttgcagkatataaaatcaacatacaaaattttttctcaatattttattgtgaaaacattcaaatatgaaaaaattaaaaagactattacagcaaacacctgtatactgtatacccactacctatattctcctattaatattgtgctttatttcatttattacatgtctatccatccactgattcatcttattttgattttttatacattttgcaggaaactgtgaacactacattcccaccctccaatacttacgcatgcatgtcattaacttgctcctcaaaattt

SEQ ID NO: 515563 - DNA, 481 bp, Homo sapiens
tgccgaggggaggacttggagcgcacaatggcttttatagcccaaagggggccagcgccctggggttgacccaggcagggctggagaggggggtgggccttggggtgcctgaggatggtgctgtacgcagcccaggctcagggccacccagacctgtatctgagtccctgccctgaactgtgcctggtctgagcttcaggtcctcatctgggaagtagagctttcactgttcacccacaagggtagtctgaggtctggacagcagggaagcaaggctcgccaggtgcggaggtgccgccgagtatgcaggatgtcgttggagcctggtcacctgggtacaaatctgcactctttggcaggcccctcggataagcatgacstgaaacagggggctggcactagattccagcttaatgcatttttaaatttttaaatgaagaacagtgcctttcagaaaatactgacgccagtgcaggactca

SEQ ID NO: 515564 - DNA, 647 bp, Homo sapiens
ctatgaccctaattcctctttcagaacttacgttagtagagtttgaatagttaagacttgaaattaagayccttgctttagtacataatctcacaaatgactttcagaaaatggtgcatccagtatgtttatttggagcttcaaatttttaatagtgtcagagtctttcacagcacgctacaaatttcatgagtatcagatgtcaagatcaaacaaaacacagttgccagtaaaataaccaactatcaatttacttctgctttacagttaatgtgtgtgcacccacatcatttgaaaaaaataaacttaaatttcttatgtttaatttgattttgtatatttatttatttggttgttaaaaaactcaaggtctaccactttctagaaaaatgagaaacctcctggaaaaaatataataatactgatattcatcaatagtattgttctagttcaaagtgagggctgttattactgacaaattattttttcttttccatattttcagtttatattacctacactagtttgcatcattgtttataaggaactaacactggtagatggctgtttataaattgtgacctattatattgccctatgtggaaggtacagagatgtccctaagatacacttcatgtttttactac

SEQ ID NO: 515565 - DNA, 609 bp, Homo sapiens
gcaatttgtcttggtggttggtctgaatctagacgctattaagatttgccctagataaaggcacacttgatacaatatatattctctgtattttgatgaaactgtggttgtaaatatttaggtctgaaaactattattcttggattcactgaatgaaaaggacagtatcattaattgattattgctaaggacctttttttgtactggcacatctttatgtatcaaatttttgaaatkttaatgctgtcagagaggtgcccttttaacagctagttaagttccctaagttatagaaactttacactgccttgattctttacttttgcagttatctgaactcttacattgctattcttcttagcagtaacttcaaacacgaaatttttatgttcccttaagattatccttttagttcttcttgaaccatcatcagatgtaacctattgcattttcaagatgtgtattcagacatttatatgtgtacacaagtaaatgactatcctgttctaatatcctggaatagtgtgaaaaatttataaacaatttagggctaaacctttataccatctttgtgccaagtacatatagtaaatgtagaatggttaagct

SEQ ID NO: 515566 - DNA, 609 bp, Homo sapiens
gcaatttgtcttggtggttggtctgaatctagacgctattaagatttgccctagataaaggcacacttgatacaatatatattctctgtattttgatgaaactgtggttgtaaatatttaggtctgaaaactattattcttggattcactgaatgaaaaggacagtatcattaattgattattgctaaggacctttttttgtactggcacatctttatgtatcaaatttttgaaatgttaatgctgtcagagaggtgcccttttaacagctagttaagttccctaagwtatagaaactttacactgccttgattctttacttttgcagttatctgaactcttacattgctattcttcttagcagtaacttcaaacacgaaatttttatgttcccttaagattatccttttagttcttcttgaaccatcatcagatgtaacctattgcattttcaagatgtgtattcagacatttatatgtgtacacaagtaaatgactatcctgttctaatatcctggaatagtgtgaaaaatttataaacaatttagggctaaacctttataccatctttgtgccaagtacatatagtaaatgtagaatggttaagct

SEQ ID NO: 515567 - DNA, 624 bp, Homo sapiens
ttagaaggttgaggcaggaggattgcttgagcccagcagtttgagtcaagcctagacaacatagtaagactccatctcttaaaacaaaaacaaaaaaaagacagcacataggaagagaatggatcttgtggcctctatgaggtcatctatgttgatggcccagcatccttcattttatagtattgctttggtccgtttaagaagaggattggtgtcaaagatggttaatctctgcaagattccaaggaatgacttcatcctcatctttgcaggtgatcaaggaagctgaaccctgggatcaaggtcatctgataagttttcgtgasaataaaggaatggctcagacaaagactagcagggattataacaactgagatcaggtgataattattgtataacaaactggaagtctatgaaattccactgggcttctctgaagaaccaagctccattgctcctccagtctgtctctcagaattctgaattttacttcccatccctaaattcacagttgagagcaatgttcagggcaaggttggaggtcccatcctcttcgcatctggttgtccatttatcttccccatttttggtggtactcttcttcttcttttagggtcacagctc

SEQ ID NO: 515568 - DNA, 654 bp, Homo sapiens
tagtctagttacctatgatgtgcaaggcagacatgatccattgtgtccccactgtgagtgacagaatgaatgacagcctttgccagtcaaagccgtgataaggactgggttctgagagaagctcctgctccagagccatctgcattgtcccagccatcatgtctggcaggaaagctgatttggagataaggaggtgatggtgctgagcttatttcagagaaggatctcagcaaactaatcagtgccatctgcatttagaacaacagtcatcaatttggcttctttctttcttttttttttttttttaacttttcattaatgtyccccactgaatacttctaaagcttcattatatttagtatactaccaaagatggactcttggtattcaagagcaaacaaaaccaaactaaacaaaaacaccaaaaagatctgagaataatgaaaggcagaagcaagaaggtctgtgaaaaattctgttctgagggactcagactggtgtgaggccagcaaagaccttgttataggagctcagagattcaaatgctaatgaagaggcaaaggtttactggagtcttgcagagagaagggtggcctttgcccaagaggcgtgcataaataaaaacaataacaaaaatactgccaatagagtggt

SEQ ID NO: 515569 - DNA, 494 bp, Homo sapiens
ttgttgccttagtttactaaactgtsgatagtgtcagtagttcttacttttcagtaggttactgtaatgatggaatgggtggatccatgcaaggcatttgaaatagtaacttggctcccactgaacttgcaatagctattttgttgttattgtcattgcagttccacatacttcagatcaaggagagggagaaactgtttttgttatgccccctccttctacttattgtcacttccagatctttttttttttttttttttttaatcctcctcttgtaaaacttgctattctgacctccaaactacccctttggagtagtttgtactcagttcttggtcattcctcttgattcacaaatgagttctgctttggacccactcttccttaccacacaaacttcagccagtaggctgatccatgcaatcacaagacccctaggttcttaaccttcttgtatcagaggatctttcccatcacaatatctcccatatcct

SEQ ID NO: 515570 - DNA, 494 bp, Homo sapiens
ttgttgccttagtttactaaactgtcgatagtgtcagtagttcttacttttcagtaggttactgtaatgatggaatgggtggatccatgcaaggcatttgaaatagtaacttggctcccactgaacttgcaatagctattttgttgttattgtcattgcrgttccacatacttcagatcaaggagagggagaaactgtttttgttatgccccctccttctacttattgtcacttccagatctttttttttttttttttttttaatcctcctcttgtaaaacttgctattctgacctccaaactacccctttggagtagtttgtactcagttcttggtcattcctcttgattcacaaatgagttctgctttggacccactcttccttaccacacaaacttcagccagtaggctgatccatgcaatcacaagacccctaggttcttaaccttcttgtatcagaggatctttcccatcacaatatctcccatatcct

SEQ ID NO: 515571 - DNA, 639 bp, Homo sapiens
aaagtatctcacatttatagttatagctgtatacttatacacacacacatgcacacacacacacagacacacacatacatataccaacatacagagagcagtttaacattattttatatcccagttaaataacatgtgagttcatttttaaagaggaaccactggagaggttgtagtgactggtgactgtgagttctttaacaacagaaagttaaaagtgatagtagccatttcagccttaagcccctgrccttctgcactgtttcaagagtgtgctgagagctcgcatgctttttgctgtttatcctctacttcacaagctacacataggttttattcaaattgaacaggcctctccggttgattgacgttcacagctaaaaccactttcccaaaattaaagcagcagaaatcaaggtgcatactctagcagtgataacagtttccctgtaaattccaaacaatgtgctgtagcttaggtgtcttaggtacagagggaaaagattttgcaaagaagtaacatcaaaagaacagagagaggcttgtgctttagcactgtggattaactgcaaaaggaaagtcccctaaggagcaaacccacaggaggatatgctcaagctttctgccaatagctaacag

SEQ ID NO: 515572 - DNA, 639 bp, Homo sapiens
aaagtatctcacatttatagttatagctgtatacttatacacacacacatgcacacacacacacagacacacacatacatataccaacatacagagagcagtttaacattattttatatcccagttaaataacatgtgagttcatttttaaagaggaaccactggagaggttgtagtgactggtgactgtgagttctttaacaacagaaagttaaaagtgatagtagccatttcagccttaagcccctggccttctgcactgtttcaagagtgtgctgagagctcrcatgctttttgctgtttatcctctacttcacaagctacacataggttttattcaaattgaacaggcctctccggttgattgacgttcacagctaaaaccactttcccaaaattaaagcagcagaaatcaaggtgcatactctagcagtgataacagtttccctgtaaattccaaacaatgtgctgtagcttaggtgtcttaggtacagagggaaaagattttgcaaagaagtaacatcaaaagaacagagagaggcttgtgctttagcactgtggattaactgcaaaaggaaagtcccctaaggagcaaacccacaggaggatatgctcaagctttctgccaatagctaacag

SEQ ID NO: 515573 - DNA, 639 bp, Homo sapiens
aaagtatctcacatttatagttatagctgtatacttatacacacacacatgcacacacacacacagacacacacatacatataccaacatacagagagcagtttaacattattttatatcccagttaaataacatgtgagttcatttttaaagaggaaccactggagaggttgtagtgactggtgactgtgagttctttaacaacagaaagttaaaagtgatagtagccatttcagccttaagcccctggccttctgcactgtttcaagagtgtgctgagagctcgcatgctttttgctgtttatcctctacttcacaagctacacataggttttattcaaattgaacaggcctctccggttgattgacgttcacagctaaaaccactttcccaaaattaaagcagcagaaatcaaggtgcatactctagcagtgataacagttkccctgtaaattccaaacaatgtgctgtagcttaggtgtcttaggtacagagggaaaagattttgcaaagaagtaacatcaaaagaacagagagaggcttgtgctttagcactgtggattaactgcaaaaggaaagtcccctaaggagcaaacccacaggaggatatgctcaagctttctgccaatagctaacag

SEQ ID NO: 515574 - DNA, 587 bp, Homo sapiens
atttcactgttgacatctgcttgtctctgattgcaggacagcctgaggtcaactggaaatacatgtctcccttctgaccaggtgcccagggtctccccattcagttataggtccactgctagaaaggaagaactgataagaggacacctcaagacaatgtgaatagggttttatcctgtgttctaacaacatcccagataacaaagctcttcttgaattgttaagatagaaaaccgatggccataactgagttctcagcagcaagaaatccaaacatttattgatagacaaaatgaaaacaagtggaatctatttagtcagcacacatcaggagagatgaaatgtcaacacaggatctaatattgctcccggggcacatctaaggaaactggtagcacccacacaggtctgtgagtccaatagcattctcagaaacccttccaagccaaggaatgtgaagtgggatggcgagaccaccagcaattacctggaacacagccaaggccctagtgctgaaacgatgttctcgctacctcagcccctaggtgggrctgtgcagaagatggataacagcaggtactgggaca

SEQ ID NO: 515575 - DNA, 638 bp, Homo sapiens
ataataactaatattattattggtaataatatacatgtaatatattatcagaactctaaatacttgatattcactgtcataccctttcaaaataaatatatattacacacaatccaattggaaaacagtgatcatttgcagaagtttatctttcagttttaatatttgtactggaatttcaaaagttcaatgaaaaattccaatacaaaaattgggggcaagaggaagaaaggtgtatgcatccccacgctgtgcttcctggataaaaacactgtctcgatcaaattattttgcaactcatctctctctatcccaamagaagtagattaaaagcaactgagaagataaatgattcctcaccaaaagtgggaggaaaaattaatttgggactgggacaacaaaacatttatttgtcattactgcactgaggaatcccagaaaatgactagaaccctttgtatattgtttgcctgcaagaatcaatgtctgttttcagccctttgtcaatttcctcctcctgatgccttagttcattctcactgaaggttttagcagtattaaccatccacagtagctgagtcagtaaagaagtgagaagagggaggaggaagacacaccgacaggagggggagggtggg

SEQ ID NO: 515576 - DNA, 640 bp, Homo sapiens
atttgacaaatatcttatggatataatagggagaacacttgaggtttttatttccttaatgtacacatatcctgaggccgaatgagtatctttattagaggtcatttctcaaagaagagataatgaccacaagggaaaaaataaaacctacatattatgaaatatttctaatatgtgtttgattttaattgggcacatttctgggtgtgccagacagtttattaaactgtttcacataaaaatgttatacatatatatctcaaaatataattaagagttattttagttctgttatttaatatctgtatttgaaacattattgaactgtgattcaggaaaactgtgttaattgtagtactaaatttatcaggagttgggactttggcatatcacttaytgacatagtacatttgttttcaaaaacaaagttgcataattataaatacacttatttcagaagatttttggaagacaaaagtaaatgtatattaaaagagtagctaaaagagctatgcaaaagcaatgtaacactgctatcattgttacatagtattttccgttttagaatgtacttatcagtaatatatacctaaagatgacataacaatatacattatataaaatatgacacaaataaata

SEQ ID NO: 515577 - DNA, 578 bp, Homo sapiens
tatctgttttcttcattttttaaaaggaattgcaacaatatctagctaacctggctgaacagtgcagtgctgataataatggagtggagctcccagttgtaataattcttgataatcttcatcatgtgggctctctgagtgatatcttcaatggttttctcaattgtaaatacaacaaatggtatgcttatcaaatattctgaataatgaaatatgaaataattatcatcaaatttgccttcttgtacmtgtatgcatttttaaaatttgtttaatatttaatttttattttttaaattgacagataaaactgtacatattgattgtgtaccccatgatgttttgaagtaaatgtacactgtagaatgattaactccagctaattaacatgtgaactacctcagtagttattatttttagacttacaatggctgtcattaatttgagaaaccctctttaatattataccacagttttaaagactccatatgcattccttagaatatctatgtattcattcaacaaccatatcccaggcactcttatggaaacattacttccttgatgatgttagcttc

SEQ ID NO: 515578 - DNA, 511 bp, Homo sapiens
ccttccttccctccacctagcaccggaagccgcgacggcgactggagctgtgcggcgtacccccacccccagcccgggatacttcccacctccccgatcgcgcgakagctgcgcggtagctagcggcagttctcgcgagacccatcaccatggcagcggctgcagcaccggcggccgggcgctggagctggagtcagggcgggggcaggtgtgggggctgtgggcggcggaggcgggagccgtgaatggggatgagacagtgaggactgaggtgacaatcccaagctccagggttgtgcctggaatttaaggactgaggcggcaagttggctgcgtaggagacgggctgggctgcggggcccaggggctccttgggcaaagccagcatcgggatatgggtgaacagtcgttgctgtggcatgccttacccagccagacttcatctttatttcttaatctgggctagctgccatcccctgaaagccctcaccgcaccattgttgttgctcac

SEQ ID NO: 515579 - DNA, 511 bp, Homo sapiens
ccttccttccctccacctagcaccggaagccgcgacggcgactggagctgtgcggcgtacccccacccccagcccgggatacttcccacctccccgatcgcgcgatagctgcgcggtagctagcggcagttctcgcgagacccatcaccatggcagcggctgcagcaccggcrgccgggcgctggagctggagtcagggcgggggcaggtgtgggggctgtgggcggcggaggcgggagccgtgaatggggatgagacagtgaggactgaggtgacaatcccaagctccagggttgtgcctggaatttaaggactgaggcggcaagttggctgcgtaggagacgggctgggctgcggggcccaggggctccttgggcaaagccagcatcgggatatgggtgaacagtcgttgctgtggcatgccttacccagccagacttcatctttatttcttaatctgggctagctgccatcccctgaaagccctcaccgcaccattgttgttgctcac

SEQ ID NO: 515580 - DNA, 511 bp, Homo sapiens
ccttccttccctccacctagcaccggaagccgcgacggcgactggagctgtgcggcgtacccccacccccagcccgggatacttcccacctccccgatcgcgcgatagctgcgcggtagctagcggcagttctcgcgagacccatcaccatggcagcggctgcagcaccggcggccgggcgctggagctggagtcagggcgggggcaggtgtgggggctgtgggcggcggaggcgggagccgtgaatggggatgagacagtgaggactgaggtgacaatcccaagctccagggttgtgcctggaatttaaggactgaggcggcaagttggctgcgtaggagacgggctgggctgmggggcccaggggctccttgggcaaagccagcatcgggatatgggtgaacagtcgttgctgtggcatgccttacccagccagacttcatctttatttcttaatctgggctagctgccatcccctgaaagccctcaccgcaccattgttgttgctcac

SEQ ID NO: 515581 - DNA, 511 bp, Homo sapiens
ccttccttccctccacctagcaccggaagccgcgacggcgactggagctgtgcggcgtacccccacccccagcccgggatacttcccacctccccgatcgcgcgatagctgcgcggtagctagcggcagttctcgcgagacccatcaccatggcagcggctgcagcaccggcggccgggcgctggagctggagtcagggcgggggcaggtgtgggggctgtgggcggcggaggcgggagccgtgaatggggatgagacagtgaggactgaggtgacaatcccaagctccagggttgtgcctggaatttaaggactgaggcggcaagttggctgcgtaggagacgggctgggctgcggggcccaggggctccttgggcaaagccagcatcgggatatgggtgaacagtcgttgctgtggcatgccttacccagccagmcttcatctttatttcttaatctgggctagctgccatcccctgaaagccctcaccgcaccattgttgttgctcac

SEQ ID NO: 515582 - DNA, 468 bp, Homo sapiens
ttttttttttaaatgctgagctgggccrggccgggccgggcgtggtggtccacgcctgtaatcccagcactttgagaggccaaggcgcgcggaccacttgaggtcaggagttcgagaccagcctggccaacatgttgaaaccctgtctctactaaaaacacaaacatcagcgggacgtggtggcacacacctgtaatcccagctactggggagtctgaggcaggagaatcgcttgaaccctggaggcagaggttgcagtaaatggagatcgtgccactgtagtccagcctgtgcaacagattgagactccatctcaaaaaaaaaacaaaactaaatgcttagctgccaggcaggacttcatcccacttggggtgcaggggtctgggtttgtgtgggtaccacaggggttagttgacattaagcacaccttcctcaggggtgtggcaagcctaggctccctgagaagcc

SEQ ID NO: 515583 - DNA, 622 bp, Homo sapiens
tctagaatcacttctgttgctcaggcaactaagatttgtaaatacttgtatttaattccattttatgattgaaatgttatatattaaattttttaaaaaaacttactagcagattgttttatgaaataacagttaaaacttttctatactgaaactggatttcaatatgattttgatgaacggtgatgataggtaatgtttaaactatagtacgtttgttaaaaacctttctcttttgctgacttctaaagtattttttttgtacttaagagactatacctttggtaaaataatactattcctcaaaagactttaaatttacttttaagagtcactttctcccaaaagtttaccttaataaccttaataatttcctcccaaaagtttaccagaataacatcttgttctgaatttcgttgtgttgcccttctctcacttttggttgaaatctacttgtggagtgcttttacttaaaaaaaaaaaaagtgtaaaaggaaaatacttttattttccttttactaagggttactattttcctaaccctaamccttattcaggtaagtgaataagacttacctgtcttattcacccggtttgatgtctggctgccccaagtcagttc

SEQ ID NO: 515584 - DNA, 622 bp, Homo sapiens
tctagaatcacttctgttgctcaggcaactaagatttgtaaatacttgtatttaattccattttatgattgaaatgttatatattaaattttttaaaaaaacttactagcagattgttttatgaaataacagttaaaacttttctatactgaaactggatttcaatatgattttgatgaacggtgatgataggtaatgtttaaactatagtacgtttgttaaaaacctttctcttttgctgacttctaaagtattttttttgtacttaagagactatacctttggtaaaataatactattcctcaaaagactttaaatttacttttaagagtcactttctcccaaaagtttaccttaataaccttaataatttcctcccaaaagtttaccagaataacatcttgttctgaatttcgttgtgttgcccttctctcacttttggttgaaatctacttgtggagtgcttttacttaaaaaaaaaaaaagtgtaaaaggaaaatacttttattttccttttactaagggttactattttcctaaccctaaaccttattcaggtaagtgaataagacttacctgtcttattcaccyggtttgatgtctggctgccccaagtcagttc

SEQ ID NO: 515585 - DNA, 566 bp, Homo sapiens
tgttcatatcacaggtatgcggcaaagtttaaaacatcatttcacatgctttttctctatactagwcctttatctaattggggcggggctgctatttctgcaggcagcatcctatgtgtacagcagctagaaacaggaaagatatatgtgagaaacagataactcaagtaatgagaaaagctaataatagaatgacctgctgtatcaattctttggtctcttggtggctccatttaatgagttttcaacatgctactcctgcaagtcttcttcaggagctgccccaagccacatatatctgctctcttctatcatggaacagtatgataagaaacagtacacctttatgctgctaggtaggcagatctattatgctgttacatagagctctttccatgaaaagtgattttaacatgaactgcccattctgcaaagagtttttatatgttgaattagttaaatatccaattcaaaagatgttacagtaaaatacatgtaagacttaacaaaaaaaaaaaaaaaggacagagacacaatttcttatcctcaattctcatctccaaaaa

SEQ ID NO: 515586 - DNA, 524 bp, Homo sapiens
ggaagagtttaccagccaataggtggggagactcagatcaaagacataaccttctcatgtagagggagaatggaagaatggaagagaattagaagaaagagaacagaaaggttaggctgagaactaggaggactgggcttcaaagacccaaaggcccaggagaggtttccaagygttaagatcattaattggctacctcggtatttttgcttcatattctatacactgaaaaatcttcatccggacagttaagatcttatactttggacctccggcggtgaatctcagtaggactctttccttgttgtgtactgtagcaagtcctgtaagcaccctgtacctttccttcctcatctagacaacagggagaataataatgcctacttcataggttactaggtagattaaacaagttattattttctcattattaaaaaaaagaaaacaacttgtgatagttggcaaaataccgcaagactcaagcttaatatttcttagcatctgctgattagaagaagtaacta

SEQ ID NO: 515587 - DNA, 627 bp, Homo sapiens
actctctccacattttgcatcttctaagccaatcccaatccaccgttcctttccccagctgtggaattcagtctagctgcaatgctcaatgccctccaacagagttgagattacagatgacagaaaaattaaggatgactcccattatgtttgaatttcaagtaaacaatgaattttgttagtacatctcatcgaatatttggaataggatatacttatactaagcaattatttactgttatctgaaattcagatttaaatagagtcctgtatttttatcaaatgtggccaccctggtaggggcaaataaaatgtattcctcaaagacctgcccactgtgaattaatgtgcatgctactagacgaatcacaatagaacttgtttggggctggtcttcagttggattcccccagatgcagaccctgagataaggatctgagtgcaagtggtattttgggaggtgacataagwgagaaagggaaggagccaacacagagtgcattaaccaacaagttactgctgtaggtaagaacaaacttcagagatgcctcccccagggaacaagaatgctagggtatctttcttcaactcatatttggcattaatggaggatcgttcctgaagatt

SEQ ID NO: 515588 - DNA, 406 bp, Homo sapiens
ccacgtggatttctactttgttctttgtggtgactgatatatccacaaacaatttaaacctattagattaaataacctcattttgraaaactaaattctatatgttctcaattgggagatatcaatatgtcactgaaaaccatagaaaattttcttttttactattatttggaaacaagtaagacaataagagctcaccacgaaagctcaaagcaatgagttgtgttaaaatgtgtggaaagagaaaagaggagacagatatagtgtttcccaggtgtactgtacagttggaggatcattggacaaataaaaaatattactagagccatgaagaaatagcctaatgtcattacatctaaaatctaagagacagagtagcaggacatagggacattaggataagaaa

SEQ ID NO: 515589 - DNA, 514 bp, Homo sapiens
  misc_feature (1)...(514): n = A,T,C or G
gctgcaagccaatgaatgccaaggattgataattaccacccaaacctaggaataagaaaagaattatactcccctacagatttcagagggagaatgggcttgccaacacctttattttagatttctagcctccagaaccatgaaaaatgaatttctgtggtttataagccacccagtytttggcagtttgttatagtagccataggaaactagtaaagttgataacctcagtttctatttggtaaatgctaggtttgagaggccttgtaatacccatggagggatgtacaatagagagtaagaaatgcaaatctaatactcagggaaaaggtcaaagatagagacattgctataagagcctgcatataataaccagagttaaagtcatcctatatatatataaaatgtatatgntacattaatcaaagtcattagtgctagctgatataacaataatctaaaaatctataataatatagncaaattttctaatttacttcacatttgaaatagg

SEQ ID NO: 515590 - DNA, 514 bp, Homo sapiens
  misc_feature (1)...(514): n = A,T,C or G
gctgcaagccaatgaatgccaaggattgataattaccacccaaacctaggaataagaaaagaattatactcccctacagatttcagagggagaatgggcttgccaacacctttattttagatttctagcctccagaaccatgaaaaatgaatttctgtggtttataagccacccagtctttggsagtttgttatagtagccataggaaactagtaaagttgataacctcagtttctatttggtaaatgctaggtttgagaggccttgtaatacccatggagggatgtacaatagagagtaagaaatgcaaatctaatactcagggaaaaggtcaaagatagagacattgctataagagcctgcatataataaccagagttaaagtcatcctatatatatataaaatgtatatgntacattaatcaaagtcattagtgctagctgatataacaataatctaaaaatctataataatatagncaaattttctaatttacttcacatttgaaatagg

SEQ ID NO: 515591 - DNA, 330 bp, Homo sapiens
aatgtagacgccaccatctcttttcaaattacaaaggatgtagaaaaatattaaatgaaagccagcccctsggattaagtaagctgttattggcattctgaagtattgatggactagtagtattaacagaaaacagcagcaggatatcaggacagatgaggctcttgctttatggctcgcaggtattattgagttcaaaaggccacagagtagagatggagcaacccatgttaaggacaagttaaggtttccatgcaagacagggtagggcgtaagggtgtcataactacacatttggttcatatgccttgctgttctgtagggtgcagt

SEQ ID NO: 515592 - DNA, 446 bp, Homo sapiens
tccctgtatctgccattcctatactctttagagttctcttcacttctaactaaccaatccctcactatcccagtcctctgtgatagttaacaattctctattttaaactttccgtgttcacattctttcttatggctggacctagactgagacagacaggacacaaacactcataaataagcatggatcacagactgtgatgggatctgcacaagacaaggacaaataagtgaaaatagaaagggggagactaatttagccagagtaaccaggagaagcctctccacgagttgaccttcaaatgaaaagtgacaagaaatcagccataatggagcattctgggccgagggagccaaaaggagacctgagaggaaygagacttggcatggccacgttctgaatatgcaagcttctgagggacaggctggatttggttcacaggagtc

SEQ ID NO: 515593 - DNA, 354 bp, Homo sapiens
ctgcaggaacctgcccaagtccagcaatgaatggaataacaattaaggcagagctgcttttatgtacaggttttttttaaagtcatttctctcaatccagaggaaagaggtcttatacttttaggcaatgggcatgcttgctaatgagtccatttctacaaaaatgagttcataactggtaatttgacctgctcctgatctagtcttgataagcctttcaaatatcaagaagtgtttcatgattctctcagtttaataattacaaccgcctttcaggaatcaggatcggtgtttcagccatgagacattcattaggcaatttttcctgcagyggggaaggaggcatgtgagagt

SEQ ID NO: 515594 - DNA, 588 bp, Homo sapiens
gaattaaattctgggagtcttgctcctaatccttctctctccatcaccttcctgacattcattcctgggygtatccagctctgctagggagggaggaatgcccagtgtttcactccaaagcaaagatgtcagaatttatttatttttattttgtcagtttattttgtttatatgtaagccactgtttccctagacagactgtctcactcccttctttgattcacagatacagcgtaacataataataataaacacacctgtagcactccgtctgtgccagcactttatattgtattagctcacttaacccttgcagcagcctcacgagatggccactgtgttagcttcctggggctgccacagcaaatggccacaaacgcgatagtgtaaaacaacagaaatttattctctcacagttccaggaggccagagcccaaaatcaagatgtccgtagggttgagaaaccttctcatgcttttcccctaccttctggttgttgctggcagtccttcatattccttggcccatagaagcataactccagctctctctctctctgacttcacatcgctgccttctcaggttccc

SEQ ID NO: 515595 - DNA, 549 bp, Homo sapiens
caggcctgctgataaccccacacttagtctcaggatcttactctctggacaggaagagaagaacatagggctgggacccctgcatggtggctcttccttcccccttctatcctaataaccctctggggtgggcaaatgagtatcaacatgcccrtttcacagatgagaatggttcagagaggattgcggttttggcctagagtcgtagtggtaaatataacctttctcctatccaaggaagagtcctaggcttccaaacaagtgagatggggaaggagccctaatttcccatgtcgggggcagaggagtcagccctgggcctcccagttggagatcttgagttgtctaagaacttggaaacttagcagtgttaggcgcctgctgctggctgccacgggaccatcctagggaggagggccaagggggaaaggaaccaggtgaatgaagtcccctgttgccccacctcactcctcacctgaaaatgagttccaagtctgggtccaatccccacgccagcacttgctggctatggcaacaatgtcagcacgt

SEQ ID NO: 515596 - DNA, 628 bp, Homo sapiens
cctccacagactgcaaagcaataaggttgtaaccccataaagggagagactttattctcaatacatcatatcaagggtgcatattatcaccatgacttaccactgctgatgtagccttcatctcctagctgagggagtgtttgccagaagcttccttcactgtgaagctaatcttttccttccttgccttcctctttgggaggaagtcactagatactgcctacattaagaggtgrggagtaatgctttacctccttgagggagaagtagctacataaatgatttgaaattctgcaaatatgatttgtctattctcccctcatttatttattattgagtcacttattttttatctgtatgggctcatgatatttatttcatactttggattataatctaataccactttattttgtaccgaaattgctctagcttgacccattgtgtgctctttcagttggcaggggatgggggataaagggatcttatatccaaggcctatagtagggactactgaaatgcagaccaaatagggtcccagcaagccctcaggggatctgaagcacttgcaagacctgaaattgaagctttgtcagcaaggagatattgctgaacttctctgaaaaca

SEQ ID NO: 515597 - DNA, 556 bp, Homo sapiens
ggtctgtgcccaggtattcatagccaaactgagcagcaggacacccatcaggttcatcaggaggcctgtccgcacctgaaatagagcccagacagagggaggggtcagcacctgacccaccatacagatggaaacattcagactcagagacaggaagtcactcacccaagatcgcacagccaggaagtgatggagccaggacacagacccaggtcggtaaatgcctgggacccttcaatctttacactaccctaggctgtcactcaaagagctgcaagtgtccccattcattgatggcctctaggttccaggcactgtgtgctacgcagttgtcacagggttatgctgtttaacctcagaaagcaaccttacaaaggtcattcttattaatccccattttatagaagagaaaaatgagacctagagaagttgacttgtccaaggtcacctaacttgaaaataatcttgtctgatcactaaacacccccatcccacacacacatacacacaygcatgcacacacacacgcatgcatgtaggaacacacatatgtaca

SEQ ID NO: 515598 - DNA, 526 bp, Homo sapiens
aaagccttttgctcttataaatgcagggtaaaaatagcacttgtgcccaagrgctgttgggagagttaagtgatgtcctgcatgtggagtttccaaaaactcccaagctgtgggaaacatgacaattattttcactgggaatagagcagctccacctatcatgatgcctgtgcactctctccctaaagctccaagtcaaatgctggatccacactttggcttcctggggacccctgagtgtccccggtaagatggggctcagggctggtggcctctgcctcaggctgagcggccctgagtgtgtgctgaatccctctctctgcccagctcccaacacagagacagagcccttgctgacctggaagaaggcccaggagacagtgccttggaacatcatccttctcctgggagggggcttcgccatggccaaaggctgtgaggtaagaccccctggctcccccaaccagcaggaacagtgggaggcaggtgtgggcgggtcccagtgctggctgcagcaccaggatca

SEQ ID NO: 515599 - DNA, 526 bp, Homo sapiens
aaagccttttgctcttataaatgcagggtaaaaatagcacttgtgcccaagagctgttgggagagttaagtgatgtcctgcatgtggagtttccaaaaactcccaagctgtgggaamcatgacaattattttcactgggaatagagcagctccacctatcatgatgcctgtgcactctctccctaaagctccaagtcaaatgctggatccacactttggcttcctggggacccctgagtgtccccggtaagatggggctcagggctggtggcctctgcctcaggctgagcggccctgagtgtgtgctgaatccctctctctgcccagctcccaacacagagacagagcccttgctgacctggaagaaggcccaggagacagtgccttggaacatcatccttctcctgggagggggcttcgccatggccaaaggctgtgaggtaagaccccctggctcccccaaccagcaggaacagtgggaggcaggtgtgggcgggtcccagtgctggctgcagcaccaggatca

SEQ ID NO: 515600 - DNA, 526 bp, Homo sapiens
aaagccttttgctcttataaatgcagggtaaaaatagcacttgtgcccaagagctgttgggagagttaagtgatgtcctgcatgtggagtttccaaaaactcccaagctgtgggaaacatgacaattattttcactgggaatagagcagctccacctatcatgatgcctgtgcactctctccctaaagctccaagtcaaatgctggatccacactttggcttcctggggacccctgagtgtccccggtaagatggggctcagggctggtggcctctgcctcaggctgagcggccctgagtgtgtgctgaatccctctctctgcccagctcccaacacagagacagagcccttgctgacctggaagaaggcccaggagacagtgccytggaacatcatccttctcctgggagggggcttcgccatggccaaaggctgtgaggtaagaccccctggctcccccaaccagcaggaacagtgggaggcaggtgtgggcgggtcccagtgctggctgcagcaccaggatca

SEQ ID NO: 515601 - DNA, 310 bp, Homo sapiens
acactaatatcaataaagcttaattattttttcattcttttggctgaaatacaagaatagaagtccagtgaattgctggggtgctccctatcctccactttggagaycactgttataaataatggaaatccataaagagttatttgtaagcaaggactggagatttgtgaccaaatgtgtattttgaaacaatgctctagagcataagagttggcaaacttcagtccgtgggcaaaatctaggccactgggagccaaacgtggtcacgctcatttgttacacacagtctatgactgctttcatgtcacaa

SEQ ID NO: 515602 - DNA, 586 bp, Homo sapiens
cacagggccttcataaattaataatttattaattttattattaaatttcaatattgaataaacaataaataaaattttcagataagcgtgtcccatgcaatatttagtatgtatttatactaaaaaaaaatccaaatttaggctgggtgccgtggctcacacctgtaatcccagkgctttgggggatcagtgcaagaggatctcatgagcccaagagcacgaggttacagtgacctatgaaagtaaattaataaatatccctaatcagagttcactggcaacctgtacaatctgtattttttagttggggtcttgctgtgttgcccaggctggagtgcagtggtgggatcatggctcacttgatctgcatttcatctggcaatcctcgtggtggggacacgggcagggcagtgactgccaacgctgcactacctccacttaacattcaggagttttcacaggagaagtccgaatctccatggtcacccgagagagcagtttgtggtatggcaagccacattcctgcagctcttggctggagctgagacaaggctgcggctcaggagggcctgagcctctgcagacc

SEQ ID NO: 515603 - DNA, 591 bp, Homo sapiens
tgccttcagaaggccagggttattttccagttctggggaaggtaagttctagttccacctaagtcaaagcccagccctttccttctccccacccttccccactccagccatctctaaaagcaaaaaaaaaaaaaaaaaaaccggttttccattttaaattattttattgtattttaaaaaaccaaataaagcattaactttaaagacctcagacacacacagtataaacacctgggtaaggttttgttcgtgtccatgttgacaccggaactaccgttaaagtgcaagttttgttttgkgttcctttgggcagtttcactcacatgtaaacaagtcacttggctatgatttgacccacgcccccccgcttagttttgggagggcagaggctctaccggctgtcacagcaacccggaatcacagacaagataatgccccgtgggtcctgaccctcaagcgggcatgacggtttcttgaagcctagcagaggctggataacttcacatccctcccccaccccgcgctcactcttaggtctttgagaagataaatccaccctcggctgggccctcgctcccaaagttatggggg

SEQ ID NO: 515604 - DNA, 591 bp, Homo sapiens
tgccttcagaaggccagggttattttccagttctggggaaggtaagttctagttccacctaagtcaaagcccagccctttccttctccccacccttccccactccagccatctctaaaagcaaaaaaaaaaaaaaaaaaaccggttttccattttaaattattttattgtattttaaaaaaccaaataaagcattaactttaaagacctcagacacacacagtataaacacctgggtaaggttttgttcgtgtccatgttgacaccggaactaccgttaaagtgcaagttttgttttgggttcctttgkgcagtttcactcacatgtaaacaagtcacttggctatgatttgacccacgcccccccgcttagttttgggagggcagaggctctaccggctgtcacagcaacccggaatcacagacaagataatgccccgtgggtcctgaccctcaagcgggcatgacggtttcttgaagcctagcagaggctggataacttcacatccctcccccaccccgcgctcactcttaggtctttgagaagataaatccaccctcggctgggccctcgctcccaaagttatggggg

SEQ ID NO: 515605 - DNA, 591 bp, Homo sapiens
tgccttcagaaggccagggttattttccagttctggggaaggtaagttctagttccacctaagtcaaagcccagccctttccttctccccacccttccccactccagccatctctaaaagcaaaaaaaaaaaaaaaaaaaccggttttccattttaaattattttattgtattttaaaaaaccaaataaagcattaactttaaagacctcagacacacacagtataaacacctgggtaaggttttgttcgtgtccatgttgacaccggaactaccgttaaagtgcaagttttgttttgggttcctttgggcagtttcactcacatgtaaacaagtcacttggctatgatttgacccacgcccccccgcttagtttygggagggcagaggctctaccggctgtcacagcaacccggaatcacagacaagataatgccccgtgggtcctgaccctcaagcgggcatgacggtttcttgaagcctagcagaggctggataacttcacatccctcccccaccccgcgctcactcttaggtctttgagaagataaatccaccctcggctgggccctcgctcccaaagttatggggg

SEQ ID NO: 515606 - DNA, 666 bp, Homo sapiens
tctccatgaatggcaccccctgtaccctgggccttctcggaaaaacattgcttgggytccttacgggtggtaatggctaataatgcagagagaacaccgtgttttggtttcaggcctttggccagggcggtgagagaggggtgtgtgtgtgtgtgtttagtgatggtagtggggtgatatttattttcatttctccatcataaaggaattgaagtcctatagcatgtcagcaatgtcaatgtttcagggtgaaataaacaagtaaaaggtgttagcgttcagatgagctctagcagcctgtgacgttaggaaaatcgccaactcctggggcctcagtcttctcatctgtaaaatgaggataataatagaaaccaccttccactcatggtgattgagtgagccatcgcaggtaaagcactcagccccaggcctggaacataggactcattgaacattggctattaacttaaaagcaagcgttatgcgttttagtctatttaaggagccacttttgaatatctgcttgtgaactcctatatgaagttggctgtgaaaacacagaaaacacagtctttatgctcacagagcttgaggacaaccagggtgacaagaaaaccatccgggcagggccagctcaatgctggcgcgttggcaccaaccaggaga

SEQ ID NO: 515607 - DNA, 488 bp, Homo sapiens
ccataaaggaagtagctattttaggcaagggaaaatgagatggtgggactttccccaaaagcaggcttgtgcctgatgcagggtggaggagccccacgccctgtggaaggacaaacacagcgtcatccacagacgttgcccatgggtccagtccatccatcggtgacttatgggcaaaagggaaggaaggaaaggaaagaagattggtgagcagtgttctttgctattaggcagaactggcccagtgggtggcagtcacagaaggggcggagaccagctccgcaaaaagagttacttctccaagtagtgagcatcctgtcacagaggttatatgagcaggggcaggatgaggagactgtttttatttacactctgataggaggagtagaagtggacccwgaccttgaggagcctaaaatttttctgcagaggcaggcgggacctgatatggcaagtgaacatcaaggcctgccttgcctcacagggca

SEQ ID NO: 515608 - DNA, 564 bp, Homo sapiens
atcccaaagagagacccgaagggcacatgccaaaacagcccacctcaggcaaaaccaccacataggagcagatcagagagtggtgaccttgagaggaggctcaaagagccctgggggcctagctgtgatgcttcttcacccaggtgcaggaggcacaggtgtatccagtgtgaggacatcctgtgttccatgatctccaggagaaaaaagaaataaaagatttaaaaacaaaaaaacttgaaaaaggactgtactgtcctctgtatgcgtgtttgactttaataaaaacttactttaaaaaatagcccacttctggggccaagtgcagtggtgcacacctctaatcccagcactctgggaggctgaggtgggaggattgcttgagtctgggaggtagaggctgcagtgaaccgtgattgtgccaccacacttcagcctcggcaatggagcgagaccttgtctcttaaagaaagaaaagtcaacttcacaggcacccagtkgcctctaagataagctccacatcctgggcagccccttcctgctctgcccccacctcccatccca

SEQ ID NO: 515609 - DNA, 688 bp, Homo sapiens
gtacgaggtggttgaattactcacccaaggtcacggagctggctgttggcagatgtgagcctgttctctgatctgtcccttaggggacacaattcaggccagtgctctctgcagcccaagatggaacaatgagaagctgccctgtggctgattatcatgcctggcttgtggcctcttctcaytgttgcccagtgtaactctgcatatttagtccatctccactgattcacactacaagaaaagccaacttccacctaggaaactagtatcttagtccattctggctgctataacaaaataccataaactgggtggcttataaatagcagaaatttattgctcacagttctagatgctgggaagtccaagctcaaggtgccaacacattttgtggcgtctggtgggggcctgcctcccgattcacatgtgatgtctcctcactctgttctcacatggcagaaggggcaacgagctcccttgggcctctttgataagggcactaatcccattcatgagggtgccacccttgtgacctaatcacctcctaaaggcctcacctcctaataccatcacattggggattaggatttcaacatatgaacttttgggggacccaaactttcaaaccataccaactagcttgactctaacatgcagacctggggccaacttggagcacttgccccac

SEQ ID NO: 515610 - DNA, 585 bp, Homo sapiens
taatggaaaccaaaatactctaaatctaggtacaacaggatataaaacctagtaccctgccattgcttttctaaagattctcctttccttataattatagctgagttcaggttaatcgtcattcttcaagaaggggtaacttcccccacatgctatttatctctttacaaaagatttaaaaggttaaaatatgtggattaagttttaaggaaattttcattttggaaaacataggcaattgtaacggttaattacaggtcttggggggggattctgaatctgttgccaagatgtayctatttaaccatacctggggaacagtagcagtgttccagacccaagtgctgccttaatcttccaacccctggaaagggagtcccaaccccactccactctctaaagcaggtaatttctgttctctgcctcacttcttctctgcctctctccttctctgcccctcttgttctctttttccctctctttctgtatacacaaagacaaatgtgcattttgatttccagtgccagagaaaagtcaacccctttcccctccccctttgccatagctgttctgttccagaatgag

SEQ ID NO: 515611 - DNA, 615 bp, Homo sapiens
gtcttcaattaatcttatctcataaacattagcattttaaatactttgtcagagtcttgcatacacttttcgaaaattagaaactttcagaacttctttgaggacttcaaaattgtttttgatacccttccaraataatcttatgttatcttgagattgcattgaatcagagaggagatgttggctttaagacccgatagtcataaacctacatacatatatatgcacatatatccacatatatgagtaatcagctcccaaggaacctagtggtcagcaagacaagggacttgtgtatactcagatggccaaatgtcatggaggtctttatttctcaaactagtcatccccttaactctcctattacgttcaaaggtacccaggaataaaatctttttatttttcttatcaagtatgtagaatcttgtttgtaagcagcaaatacctggctcaaattaacttaggaacattaatctcatgtatgggccagaatgtgtctttctctttcacttgacttactctctgtggactctgtgaggattggcctttgcactctgggtctgtgtgcttgcctaacagtaaatttttatggcgatgaactgtgccacccctctg

SEQ ID NO: 515612 - DNA, 633 bp, Homo sapiens
cagccacttggttctcccaagcatcgcctctctctctctcccaatgtgatctctcatctttagatagtctagcatgagcttgttgaccgggctgctggcttccaggagagtgaaaacagactggaaaatctgggcttaaaagactcaagtgtcatttctgctgcattgtattgactaaaacaagatatggggtctgcccagatttaaatggaagggagagatctcttgatgataggaataacaaagttacattgcaaaaggacttgcaagatgggaagaattttkggggccatctttggacataatctgtcaaagtggatctgttctaagaggtcttcagttggcctagattgctttttcatgttgctctgccatctctagggtgttgcccttctctgtataatccaagatgactcaccatcatgtttcagacaagagaaaggagaaaaatggaagaggtaggtactttcttttaatagcacaaccaggattcagatcttagtcacaaggcttatctggttagaagtccaaaagaaaataaactcttaattctggatagcaataaggccatctgaaaattaagggttctatttccatgagaacaaattagagaatggattttggaaggcagtt

SEQ ID NO: 515613 - DNA, 629 bp, Homo sapiens
aaccttttgacttgagcctttatatgttgacatacttccagggtcttgtgttacttctccccgattcttcccttggggtgggctgtctgcctgcgcatgcttgagtccactcgaccaatttcggagatcttatagggaagttgcggatcaccagtttcaggtgttttctatatattaggagactgcctttccctggsgctggctgtgaccaattattttagagagatggttaacaaccacctgaccatcacttgatggtcacctgacattcctgatatgtgtctgtcaggttgggcaggagcctctctttccctgctcatgactgactgacctgttgtaacattttccccctcaagagtccaagacccagattctttggggaaatggataaaggtcagtcttccataactgtttcctgctgacaaaggggcagtggtgatggttctgtgggtcttggcctcttgctagctgtcacagcaggagggtggctttgtggattggtgaaagtggtatccagccaggtccaagagagacaggggcagggttttgccaatgccaaatatacttcagcagtagaagccacaagattacattattaaattgtcccaagagtcccccagtgcaaaccc

SEQ ID NO: 515614 - DNA, 550 bp, Homo sapiens
gaggacttcccaaataatcaagtcctgattcccttttacatagcatgttttcctcaatttatctttcctctcccattttaccacaggcatcaagaagaaactagggcacatccttaatattttcctaggaaatctcagcttacaaattctgctttccttgtaactaggaagcaattcagctaagattctgacacttttcccactgtgtttttgaaaattcttctatagactctacccattgcccaatcccaaagccaattctacatgtttgggtatttatcacagcaacattccactttcaggtactaaaatttgtactaggttcctattgccaccgtaacaaaataccccaaacttactagcttaytccaaacaacataaattgattctttttcatttccggggtttgtaagtcaaaaattatgacgttggtaggtttgcattccttctggagagttcagggaagaatctatttccttgtctttccagcctcaaaagaccacctgcatttcttggcccaggtgttcttccactaccttcaaagcatgtc

SEQ ID NO: 515615 - DNA, 550 bp, Homo sapiens
gaggacttcccaaataatcaagtcctgattcccttttacatagcatgttttcctcaatttatctttcctctcccattttaccacaggcatcaagaagaaactagggcacatccttaatattttcctaggaaatctcagcttacaaattctgctttccttgtaactaggaagcaattcagctaagattctgacacttttcccactgtgtttttgaaaattcttctatagactctacccattgcccaatcccaaagccaattctacatgtttgggtatttatcacagcaacattccactttcaggtactaaaatttgtactaggttcctattgccaccgtaacaaaataccccaaacttactagcttactycaaacaacataaattgattctttttcatttccggggtttgtaagtcaaaaattatgacgttggtaggtttgcattccttctggagagttcagggaagaatctatttccttgtctttccagcctcaaaagaccacctgcatttcttggcccaggtgttcttccactaccttcaaagcatgtc

SEQ ID NO: 515616 - DNA, 592 bp, Homo sapiens
tttctgtttatactatagatagtgtattcctgaaagtgtgtaaaacatgaacagaatagtggttaaattatttatgtttttataggttcaagttatagmggtaaaagttaataaattacaaattgtaggctagtatcattcataaacatgagtacaaactgatttatcccagggattcagagatagtttattattaaaaattcaactgtaataatttaccatatattcaaattaaaagctagtgacatcatctctatagttggagaggagatgtgattaaattcagcaccaatcatgataaactcttagcaaattataatgtcttggtaaagttatacaccaaaaatctaaatctaacatcaaacttaatgtgttaggaacattacctttaaattgaagagcaagaaaagaatggccataatcaccatttctattcaacctggtactgggtgctttaactagcacagtcagatgaaagagaagtaaaagaataaaggatgggaaagtaagaaacaaatcagtcattatttgcaaataatacaattatttaagagctcaaaagttttacacatgcaagcaacatacagttgca

SEQ ID NO: 515617 - DNA, 639 bp, Homo sapiens
cattcatagatagtcatatatattagggttcagagtctttgagaagaatattgcctaggtgtcagaagatctgggttttagtccaagttcatcattaaccaggaaacctaaaacaaatggcttggctttctttacattccctatttatataataaaagcattgactatataaactaattgttctctgaaggctcttaaaactctgacattctaggattttatgtattattatgccacaacctcatctaatcacaataacaatagctaacatttcaattccaacaactatggcggattgttggcaaaaatagtgacaattattcccttccctttgtcgtatgaggttgtagttctatcaagtggtagagtctaggctggccttgtggttttctttgaccaataaaacacggcagaaatggtgttctacccgttagaagcctaggtgtcmggagtcttgcatgcttccactttttcgtttggaacactgctgctaccttatggacaagttcaaggtaggctactgaaagatctgagacatgtggcccattcaaactccatcaccctagccaacagttatccacttcctgacaatgtaaatgagaacaccctagagaaaccagccctcagcccatccaccag

SEQ ID NO: 515618 - DNA, 599 bp, Homo sapiens
ttaagccatcaagttttgaaatactttgttacacagcacaaactaaccaataaatcatttttcttgcctcttctgctagaaaktcagcatcttacaagcagatggtgttacttagtcatttgtgtaaagtatgcattagagtagatgtgtgacgaaaatgtataagtgaattgttttcatatactcctctgttcctacatgattatgggagattatagttttcaaattggaagcaacggtatttctcatttcaaatattcttctgtaatataactttgcctcattcccatcagaagttgcagtccattctccaacccctcagatctggatggtctctataattgtttcgattaacaaaatatagcagaagtgacactgtgcaaggtctgagcacagcctttaacttatttggtactcttgaaagcgagctgcaatagaagaagagacactgccatgtagataagcctaagtcatgtggggaaaccttggaagagaagtgacatgtgaagggagagagggaggcaacaaggaccaccaaggcaccaggcatggaagtaaagatgccactgtggaagtggaccctccagccttaactctcc

SEQ ID NO: 515619 - DNA, 599 bp, Homo sapiens
ttaagccatcaagttttgaaatactttgttacacagcacaaactaaccaataaatcatttttcttgcctcttctgctagaaagtcagcatcttacaagcagatggtgttacttagtcatttgtgtaaagtatgcattagagtagatgtgtgacgaaaatgtataagtgaattgttttcatatactcctctgttcctacatgattatgggagattatarttttcaaattggaagcaacggtatttctcatttcaaatattcttctgtaatataactttgcctcattcccatcagaagttgcagtccattctccaacccctcagatctggatggtctctataattgtttcgattaacaaaatatagcagaagtgacactgtgcaaggtctgagcacagcctttaacttatttggtactcttgaaagcgagctgcaatagaagaagagacactgccatgtagataagcctaagtcatgtggggaaaccttggaagagaagtgacatgtgaagggagagagggaggcaacaaggaccaccaaggcaccaggcatggaagtaaagatgccactgtggaagtggaccctccagccttaactctcc

SEQ ID NO: 515620 - DNA, 631 bp, Homo sapiens
ttatgtcagagccaggattaaaacccagccaggtaaactacagaggttgtgtgattagccactgggtcaatgtttcccaaactttggtcagtttcataccactgtaaatgtctttatttatttccttaaaattccattttcattaaattatttgaaataaataatatgtttaaaaagatgtagctaccataaagttacctgaagtttttatatagtagttaaacatttttaatgtttaatagtaacagatttattrgattttactatgctagagaagaaaactttgcaatcattacagatgaacatatatatattaataatttcagtttgtatgttcagtgtctttaaaaagacattaatctattgaatccagttatatatctttcctacagcattaaagttaatatatggaaatgtaagttgtttaccacataccttctaagatcatcttgaacaccactcaaattcatttgacaaacatttattaggtctttgctaatgtgccaggcatggcatatagcaagaaaataagaaaggcaaaaacctttggagaaagacattattattgaagaatagaacactctgctgatgtcccataaggagcccaaggagacagttattctagaagagc

SEQ ID NO: 515621 - DNA, 441 bp, Homo sapiens
tgctcagaatgattctatccgtctgcraccccccacccttgcatctgagatgatttgactaattctcaccaataaaatgtgaacaggagagacaattattactttcaggacaaggagctacagatgtggcatgccttgctcactctttgtctccatctccagatgaaggtggaggttttcaaggcaaagaggaggatggagccacaagattcactcactacatagaaagctacacattgaccaggaacactcatgtattagagttcttcagaaaaaccgagccaatagggcacacgtgcacacacacacacacatacacacacacacaatgttagctcacaaggttgtggaggctgagaagtcccatgatctgccttctacaagctggagacccaggaaagtctctcttgtagatagaaatatactgttaaaatgtgcctc

SEQ ID NO: 515622 - DNA, 441 bp, Homo sapiens
tgctcagaatgattctatccgtctgcgaccccccacccttgcatctgagatgatttgactaattctcaccaataaaatgtgaacaggagagacaattattactttcaggacaaggagctacagatgtggcatgccttgctcactctttgtctccatctccagatgaaggtggaggttttcaaggcaaagaggaggatggagccacaagattcactcactacatagaaagctacacattgaccaggaacactcatgtattagagttcttcagaaaaaccgagccaatagggcacacktgcacacacacacacacatacacacacacacaatgttagctcacaaggttgtggaggctgagaagtcccatgatctgccttctacaagctggagacccaggaaagtctctcttgtagatagaaatatactgttaaaatgtgcctc

SEQ ID NO: 515623 - DNA, 575 bp, Homo sapiens
aacatagactgtggtgcctgtgtaagaccaaaatagtttccaagaatcaaacaaaatataataggtgagaaggcaggcccatagaggacagagaacaggactgagagtgaggcaacaaaagttcccatccaaatgtcaccaacgaccactgtacgacatggaaaagttacttaagttctctatgcttttgtttctttatatataatatggaaactttaatatctgctttaacatagagtgaagttgtactgatctgctttgctaataataaggcacaattcaaataacaagacaaaggtggacaagatcatctatttcaattttgccctcttccccagcacaagcacacatgtcccagctcagatatgtgagmctcctctatagcaaacctgacacacagttttcagtcattgtgttaaaagacattttccttcatgaaattattcatttcactgaggagtagctgttaggaaggccggttcatctgctttcaatgtggtcatctccctttgtcatctacacactgatttttcttatagcttagacataattcatgtatcacatttgggaaattg

SEQ ID NO: 515624 - DNA, 536 bp, Homo sapiens
gtggtgcctgtgtaagaccaaaatagtttccaagaatcaaacaaaatataataggtgagaaggcaggcccatagaggacagagaacaggactgagagtgaggcaacaaaagttcccatccaaatgtcaccaacgaccactgtacgacatggaaaagttacttaagttctctatgcttttgtttctttatatataatatggaaactttaatatctgctttaacatagagtgaagttgtactgatctgctttgctaataataaggcacaattcaaataacaagacaaaggtggacaagatcatctatttcaattttgccctcttccccagcacaagcacacatgtcccagctcagatatgtgagactcctctatagcaaacctgacacacagttttcagtcattgtgttaaaagacattttccttcatgaaattattcatttcactgaggagtagctgttaggaaggcyggttcatctgctttcaatgtggtcatctccctttgtcatctacacactgatttttcttatagcttagac

SEQ ID NO: 515625 - DNA, 575 bp, Homo sapiens
gagtttggatacccaagacctcaatctctggagccagtgaacaggtcacacattagccccttctgcctctgttctttcaatcatatccacttctctcacttggagattgggtggagggcatctgatgtccaccccaagtatgctgsggctactagtgacacagaccaaggtggccaagcaagataaagtcaggataggggtgggagggcaggggcaggtatggccaaggctgtggaacttctccagagagctgaataagcttgatcctgctgaggtctggctcttttccttggcagcactgaacatatttacaattattgtccatgatatttctgccccacaatagaggcagggtaccttcatgctcctctgaattcttgtgtccagcacagagcatgaccaagggcatatgttcaagaaatgggtggtgcgaccaacccccatgagtccttcaggtctgactcaggtacttcattgagaagtctttatttgttgacacattttttagttgttttggtgttcttcaccatgggaccccatagccttggtgctcttgtattgtgagctcaaaagac

SEQ ID NO: 515626 - DNA, 606 bp, Homo sapiens
tgtggtcctgacgtttgtggacatgttacgaggctcagccagatggtttgtctggtgtatattgtatgagaaatatatgatcatcataatagctataatttagtggccattttccatgtacacatttaatctccataataactttatgaaataggaattattattcttgttttactaatggggaacgtaactttttgaaagattaagtgattcatcctagaaaacgtagtcaccactcacggtaagagtacttgggcctgtgccacaccagccttctatctacrtggtatgcagctaaaattgccctcaatgtttcagttcttagcattggttttctctccccttggagcgaaaatctatccctcttgataaaatcctaggaccattttgatgttctgcagatgtcacactcttccataaggactttcttgactctcctcatgtccaaatcagaattatccctcctttcctatttgtacattgtataaacttctattactgtctacattccatagtggttttgggatttatccgtggggctgtgagcccctcaaaggtatgtctctttctatctcctgtgctgatccagagcctcacaaatatttt

SEQ ID NO: 515627 - DNA, 606 bp, Homo sapiens
tgtggtcctgacgtttgtggacatgttacgaggctcagccagatggtttgtctggtgtatattgtatgagaaatatatgatcatcataatagctataatttagtggccattttccatgtacacatttaatctccataataactttatgaaataggaattattattcttgttttactaatggggaacgtaactttttgaaagattaagtgattcatcctagaaaacgtagtcaccactcacggtaagagtacttgggcctgtgccacaccagccttctatctacatggtatgcagctaaaattgccctcaatgtttcagttcttagcattggttttctctccccttggagcgaaaatctatccctcttgataaaatcctaggaccattttgatgttctgcagatgtcacactcttccataaggactttcttgactctcctcatgtccaaatcagaattatccctcctttcctatttgtacattgtataaacttctattactgtctacattccatagtgrttttgggatttatccgtggggctgtgagcccctcaaaggtatgtctctttctatctcctgtgctgatccagagcctcacaaatatttt

SEQ ID NO: 515628 - DNA, 507 bp, Homo sapiens
taattacaaattacttccctttgttactcttgtaaacataatatttgtgatatttagtatatcaagtaaargatgaatttcttaaattctacataaactctgggagtaactaagtctctttacttgtggaatgatttattataacgtttattttggtgcaattgcttttggcgctttctaacacattccgtttttatgtgcagatttttaaataggttatacttctattaataaataaatgttttaatacattataaaacccagctgatgtatgagagccatggtattatctcctgctgctcatcacaattgaagaattaagggattcacagcattcttctatctgctttgagattttgcagattttcatacttgtatctctgataagtgtatttatctgctaaagcttaatatataaaactttccttgcaacactttaagattcatagggacatttcaacttcttgtaaaacaagatgataatggaaatttagtttactgagatac

SEQ ID NO: 515629 - DNA, 507 bp, Homo sapiens
taattacaaattacttccctttgttactcttgtaaacataatatttgtgatatttagtatatcaagtaaaagatgaatttcttaaattctacataaactctgggagtaactaagtctctttacttgtggaatgatttattataacgtttattttggtgcaattgcttttggcgctttctaacacattccgtttttatgtgcagatttttaaataggttatacttctattaataaataaatgttttaatacattataaaacccagctgatgtatgagagccayggtattatctcctgctgctcatcacaattgaagaattaagggattcacagcattcttctatctgctttgagattttgcagattttcatacttgtatctctgataagtgtatttatctgctaaagcttaatatataaaactttccttgcaacactttaagattcatagggacatttcaacttcttgtaaaacaagatgataatggaaatttagtttactgagatac

SEQ ID NO: 515630 - DNA, 650 bp, Homo sapiens
acaaatatggagaagtgtgataacatcacacttatctttgggttatatacttctcatgtcaaactctaattttaagaaataagagactttaaaagtcttcacaaagagtgctttctcaaaaaacttcttttcaccctttggaagggtagaaccctggaggaaatccacttggccttaatgtataccccaatctgtgcatccaagttataagtcagaagcctggacaacttgcaggatgtcctgtaactcaacagaaacagtgaacgtggttctatggcattccgtatttggtgttctcaatactacaaggccaatcttcaggaagtttggaaccacctagaattttcctagaccagggaaaatgctttcatctaacataaaaaagaccattctcatggtgaataacaaaataacccattttaggtttctttcttcctttcttttctgytttccttctttcactcacacattagccaatgttccctcctactgacagagtcattttgctctttctttcttctccaaataaacctgttaattgtgtctgacaccgcttgtttatatttgaacaccaatttgagttcacaggtaaactttcccaagactttggcaacttaggcacaacctccaatagtgaatgtgtctgacaa

SEQ ID NO: 515631 - DNA, 602 bp, Homo sapiens
ctgataggattccctcagtctcttgtcactaaagcctcatgtttacctacccctgtactcattcatttcacctctatcttgttacaactgaagagtcctaagccagtcccttcatctgatctatggctcctgttccattctgctttccgaggaacactgatctattgtttatgtcccctctctcgggacaaattttccttctctgtttctcattttctatcagatttaaacaacctcaggtgtcttctatctgaaaaakgtagtctttctagctcatattctctttaatctacacttgatttttatctcccatcttcacaggataatttaataaaagagatgttacacttactggcttattttattatcctgcaccttttctctgaaacttttcccatcctagtcactgacacatccctttagtaaatataatgtgctgttttcatagcttggacccactaacgacatttaatacacctcatcacttcctcttataacattccttttccgcggcacttagggcaatatacttgcctttttggtctgttgttctggctcttccttctcagtctctgcgcaggtgccaacaatgttacttttat

SEQ ID NO: 515632 - DNA, 602 bp, Homo sapiens
ctgataggattccctcagtctcttgtcactaaagcctcatgtttacctacccctgtactcattcatttcacctctatcttgttacaactgaagagtcctaagccagtcccttcatctgatctatggctcctgttccattctgctttccgaggaacactgatctattgtttatgtcccctctctcgggacaaattttccttctctgtttctcattttctatcagatttaaacaacctcaggtgtcttctatctgaaaaaggtagtctttctagctcatattctctttaatctacacttgatttttatctcccatcttcacaggataatttaataaaagagatgttacacttactggcttattttattatcctgcaccttttctctgaaacttttcccatcctagtcactgacacatccctttagtaaatataatgtgctgttttcatagcttggacccactaacgacatttaayacacctcatcacttcctcttataacattccttttccgcggcacttagggcaatatacttgcctttttggtctgttgttctggctcttccttctcagtctctgcgcaggtgccaacaatgttacttttat

SEQ ID NO: 515633 - DNA, 588 bp, Homo sapiens
aaggtatcaatgtagatatcaataaatcaatttattattcagaacatgtttttatgtatgttgaaacagcgaatgaagatgggatacaatgactttatttctttmtttattttttattccagcaataattcttgaattacctaatattttataatttatttattcaattgataatatttgttatacacctactttgttctaggcactttacttggggtaaagcagtgacaatggacagaccaggactctcctggctgaccatacattctagtgtgtgtgtgtgtgtgtgtgtgtgtgttgaggggaggagcatgggagtaataaataaacaagagaaaaaagccaggtgacataaaagaaatgatgagcctgtggtagggccactgatgtgagaatggttgaggatgattctttaggaaatactatttaagcttagtgttgaaggaatcaaaagagctgagctctgaggagcaaggggccgatgttccaggcagacagagcaacaattgtgaaggccctgggatgcgaatgagtttgagcagggcttaagggtcagaacagaagtccaagtggctgtaattaagtgac

SEQ ID NO: 515634 - DNA, 640 bp, Homo sapiens
aagaagctgctacataaacacttctgcttaccatccaggtgacctgcatttagtcatatggctatacctagctgcaaagggaaagtgggagctgtagtttccattctgggaagccatgtgccccaaattggaggcttgatcaccattgaaatatgggagaatggatattgcaggataagttgtgcattcccaaatatccatgaacacactactcacttctgttcacacaagaacaacatcagccccttcttaaggaaagcaactgccaaatgccataaaattactcatctactcaaagtccttgacctttgggtatgctggtcgctctccatcggggccagatgtagcattttgtggtttggtggcctacaaactaaaagatgttctatyggccccgtaagtgctaaaaatataatggtacaggaggagtagaataacttctgggaaacaagaaatgcataggagtcactatccatagcaattatcaaaatctgcaggacaggaattctgaaaattatggactttcttctcgggcattagaaaaggtcctggatttagtttatttggtagctcctggctttgctttctgataattccctagtcccgtgttcgctgtgatgcctgactatatcctttggga

SEQ ID NO: 515635 - DNA, 577 bp, Homo sapiens
ctgtgtcagtctatttaccatttctcaaatgcacaaaagtattttttctttcatgctattgaaacttctttcctcactgcccagaatgaccatgcccatacttcttttgtctgctgaaatcacaccaaactctacttctctcattaaggattctgtgattctctgaagttaaacaaaaaccatcccaaatgccattagattctttgagatgtaggaggtgcttatgttttctttttctggataatgggagccatgtaaatgataatttttctttatgggccaccaggaatttcactttagtaaagtttaataataaatgtattaggcctattatttgtgttgtttttaactattcttgagcttttattctgactggtattttctctaactcttattatgtaagtatttgtttttatataggttcctatacatttttacaaatactttwtaaaacagaccaagagtaaataataacaatcaaacaaaacaaatttcttctcaaggctgtttcaattaattaagttgaacctcattttcaatcatttatgactcatatttttccacaactaaattgtaa

SEQ ID NO: 515636 - DNA, 535 bp, Homo sapiens
cagtggtgcgatcataactcactgcagacttggctcctgggttcaagcacgcctcttacctcagcctccagtagctgtgacgtgcatgccatgacayctggctctttatttttgtagagatgttgccaaggctggtcttgaactcctggctttaagcaatcttcttgcatttgcctcccaaagtgttgagattataggtgtgagccaccattcctggccctggcatttcataattcccagatgcacttgctacacctaagcatttttgtttttgtttgaattttcagtgagagctccctttgcctcatcaaatttcctctcccaaaccctaatctcttaacaaaactggagttctctgtctgtatttacagcttctctctccttttgctagattaatgagaagcagtttctctattagtgagtggaaaaaattggaatttgctgttgcccacaagccattcaataaagagctacactatttccctatttccttaggaggatcaatgagtatttttttggtgataaaatatggcat

SEQ ID NO: 515637 - DNA, 511 bp, Homo sapiens
taatctcatgtaacagataccttcacaacaacctccagaccagtgtttgaccaaatatctgggtactgtggcctagccaagctgacataaaattaatcgtcattgttattagtcttcctttcccagttcccaaggaaatgtcatcacttaaactaactggatactacagatactagttaggttagagtttcctctctttctctgaaaaatatatatatataaaataacttttcaactataaatttttgggttttttgcactctcctttgtaaaaataaggcccacagcctcaaatcctctgaatccaatatcactaggtttcagactccrtgtgcaccttaggacatactatggagaaccatgccccagagtcatctcctgaacattggtgtggatttttattactcagttacttaaaataaagtcaaaggatgcaaatggaatttgacacattattgcccttaactcatactgaacttaatacactgtgatgtgaagcacaaacgaatgc

SEQ ID NO: 515638 - DNA, 323 bp, Homo sapiens
ccccccacaatctggcatcttaaaccttatctactgcaattgctcttgcaccttgattccagttagcaatgcctgttctctattttaaacaatgactaatttatccaactctattcrtttgctcaaactattttcttgcctacaatagcctcccaacatttttccactcaatgtaagtacagttaatgattgttatttgtggtagttatgttctataaagtcaccttggacacttaattagtgaatacgaaaaaattgctcttagaggaaatatagggttaggttccttccagcctctggtcacaacatttttgtcagttgat

SEQ ID NO: 515639 - DNA, 547 bp, Homo sapiens
tctgtcttcctagaaatgtttccatttcattgaaattatacaatttgttggcatgcaattgttcatagtatttctttaatattctttgtgtttctgtaaggccagtagtaatatccctaatttattcctgatttttagttatttctagtttccttacttttagttacatgagttttctctttttatcttgatcaatcaaggtaaacttttttttcaacttygttgatcttttccaagaatgagcttttagttttattgaattttctgtattttgttgtttttttttatttttccaatgagttaatatttgaaaagctcttaaaacaataactagtgcagtatttgggtgggagtgtcccgtttttccaggtatggtcttagcaaatgacacaccagattatatcccgtgcctggctcagtgaggtcccatgcccacggagccttgctcactgctagggcagcagactgagattgacctgcaaggcagtagcctggcagggggaggggcgtccgtcattgctgaggcttgagtagttgaacaaagcag

SEQ ID NO: 515640 - DNA, 547 bp, Homo sapiens
tctgtcttcctagaaatgtttccatttcattgaaattatacaatttgttggcatgcaattgttcatagtatttctttaatattctttgtgtttctgtaaggccagtagtaatatccctaatttattcctgatttttagttatttctagtttccttacttttagttacatgagttttctctttttatcttgatcaatcaaggtaaacttttttttcaacttcgttgatcttttccaagaatgagcttttagttttattgaattttctgtattttgttgtttttttttatttttccaatgagttaatatttgaaaagctcttaaaacaataactagtgcagtatttgggtgggagtgtcccgtttttccaggtatggtcttagcaaatgacacaccagattatatcccrtgcctggctcagtgaggtcccatgcccacggagccttgctcactgctagggcagcagactgagattgacctgcaaggcagtagcctggcagggggaggggcgtccgtcattgctgaggcttgagtagttgaacaaagcag

SEQ ID NO: 515641 - DNA, 550 bp, Homo sapiens
gtaccattcaaggctacagggagggtcatcttggggtgcttccagcctacttgacttagagcaagtttagagttggctatttacaccaaaagcacatgactccaatctgatgtggttcagttcctactgtgacagcacacacttgtaggccctaaggttgaataatggccaaaatttagacccaagaaaggaatatcacactgtctagtgatttgaaggttacttaacaggatctttttgaggatcatgctgctatgttaaagtcactaaagtgtgtctttggatgccccatcatccatgaatcagggtatcttcagtagcaccttctgtaccctcaggtgtccatgtcctgcttttccattgggtctcctaccctggagcactagctcttgagatgcacacactggacttaggaaaacgagatgtggtcttgtgaaacatgtctgacaatatacagaatgttgtgggcttaacaaacataaaattgctatagcagatcagaraagggagaactcagtatagaattgaataattgggaaagccttcctgg

SEQ ID NO: 515642 - DNA, 633 bp, Homo sapiens
ccaagtgggaaacagctaacagagggctggggacgggtgggatttcttggaagtgttgaaaagtgaaacaattcaattgactttaacccaaagcaagtaaatgctctttttgcaagaagaaattgaaggagggtaatgccaaagcttagggagaaaatawaatgtaactcagtattaccggaggaagccgcacaatgatactgaatttcagtttttcatttttctctgtattatccagatctacaagaaagttagagattagcaaatgaaacaaatacccattttgatactttagcaagttaatattaatacttgagtggttcatcttgataggacatatcccaactgtgtattctcaagctaatctaacagcattttggaaattttactctgactctctgaataaaaagggatttttctataacaggctgccaggtacaaagcaattttattgactaacttaaaacagaaggtaccttgaggaatgacaaatgctttcatataaacaaaaatcatcttaaaatacaattgaataatttgagtgattatactacagaatttaaagttcaaattcatttaattgcccctctcaataattttccttgcatttctagtctaactttgagatgacag

SEQ ID NO: 515643 - DNA, 669 bp, Homo sapiens
tgagttaccctggtctctgtaacaacctgcaatgaagaggtgaaggctgtgtgttagttcatttgcattgctgtaaaggaatacctgaggctggataacataaagaaaagaggtttattttagctcatggttctgcaggctgtgtaggaagcatgtgccagcatctgcatctggtgagggcctcaggaggcttccaatcatggtggaaagcaaagggggmgcaggcacattgcatggcgagagaggaagcaagagaaagaagcagaggagccaggctgtttttaaacaaccagatgtcacttgaattcatagattgagaactcactcattattgcaaggacagtaccaagccattcatgaaggccccatcctgcccccatgacccaaacacctctcacccagccccaccaccaacgttggggattatattcattcaacatgagatttggagggggacacatcgaaaccatatcaggctgtatacttggagccctgcaaccacacagcatcccatgaacatgacccaaaatgggaagcaatcaagggccgcttgtgaaaccagctttttctatgacccagaaggcactgcctcacctcatatgatcgaattatagacatcatcgtcgcagtaccataaatgagcagaaacgtcacttaaccaggtcccag

SEQ ID NO: 515644 - DNA, 657 bp, Homo sapiens
ctgaaaaattcctatcacctagtggccttgtagctatcataacattatagtgcaacacattactttttctatttttaaatatgtttagatacataaatacttaccattgtgttacagttgcctacaatatttagtacagctacaggtttgtagcctagaagcaataggctaaggcatctagcctaagtgtgtagtaggctgtaccatctaggtttgtgtaagtgcactttatgatgttcacataatgataaaattgtcgaacagtgtgtttctcagtatcctttttggtaagtgatgcatgactgcagttgaagagaaagggcagaatcaagccagccaggcactgaaactgagactatgtagggaagtccacacctagcctagaggctggcaccattcctcarggtattcgttctgttttactgctttgtcacattaaatgttctcgagacaaaaaaatgtggaggggaggaaagggtcaagtagttccatgatactgaaaatattctttcttggcagtagtatgttggtaattgttgaaaaagtttcacacactctttctcaaaaacagccctgatttgtagcatttgctgatttccagttgtaaatactccaccatggccaattttaagctatcaacatgaaagccacaaactc

SEQ ID NO: 515645 - DNA, 657 bp, Homo sapiens
ctgaaaaattcctatcacctagtggccttgtagctatcataacattatagtgcaacacattactttttctatttttaaatatgtttagatacataaatacttaccattgtgttacagttgcctacaatatttagtacagctacaggtttgtagcctagaagcaataggctaaggcatctagcctaagtgtgtagtaggctgtaccatctaggtttgtgtaagtgcactttatgatgttcacataatgataaaattgtcgaacagtgtgtttctcagtatcctttttggtaagtgatgcatgactgcagttgaagagaaagggcagaatcaagccagccaggcactgaaactgagactatgtagggaagtccacacctagcctagaggctggcaccattcctcagggtattygttctgttttactgctttgtcacattaaatgttctcgagacaaaaaaatgtggaggggaggaaagggtcaagtagttccatgatactgaaaatattctttcttggcagtagtatgttggtaattgttgaaaaagtttcacacactctttctcaaaaacagccctgatttgtagcatttgctgatttccagttgtaaatactccaccatggccaattttaagctatcaacatgaaagccacaaactc

SEQ ID NO: 515646 - DNA, 519 bp, Homo sapiens
tctctacaagtcacaggtagcttacataggcacccacagcagatgtgaggctacagaaaaatgaatgagacaaagaatacgcttcagaccgaaagtcaaagatcccgcaccgtccgttcctaactcgcccgcgtactgggtgaatcctagagcctggcgtctgcgaggactccaggagcgacasgagggaccgacgcagagaggtcctcagcctggtttcccggagaagaggtcgccccgcttcccccgcccgcaccccccggtgttttggaggcccgcgtggtcccgcctcattggccgccgcggagccgaggcctcggggaggcggggcggccttcgcagttgtagttcccgagtcctctcgttcagcggctccgcattcctgccgcggcgcctaggcgaccgcccagaccacaactcccacaagccccgcgcttgggggcgtgccgaggagccaagcgagccggggcgggccgcctggggatgaagtgggggcgctcgcctttcctgcctcactcg

SEQ ID NO: 515647 - DNA, 519 bp, Homo sapiens
tctctacaagtcacaggtagcttacataggcacccacagcagatgtgaggctacagaaaaatgaatgagacaaagaatacgcttcagaccgaaagtcaaagatcccgcaccgtccgttcctaactcgcccgcgtactgggtgaatcctagagcctggcgtctgcgaggactccaggagcgacacsagggaccgacgcagagaggtcctcagcctggtttcccggagaagaggtcgccccgcttcccccgcccgcaccccccggtgttttggaggcccgcgtggtcccgcctcattggccgccgcggagccgaggcctcggggaggcggggcggccttcgcagttgtagttcccgagtcctctcgttcagcggctccgcattcctgccgcggcgcctaggcgaccgcccagaccacaactcccacaagccccgcgcttgggggcgtgccgaggagccaagcgagccggggcgggccgcctggggatgaagtgggggcgctcgcctttcctgcctcactcg

SEQ ID NO: 515648 - DNA, 498 bp, Homo sapiens
tagatgtggatgtactataggaaccaataaatcaatactgagtgattctcctttggcgagactttcttggtatttctgaaataagtaatttagtcacaactatattttagtgttggaaggttgttttattttacagttgttttagaggtatattgccattttggtattttgtatgttaattcatttttataatgcttcctgttttctaagtatcracacatatgttctacttttaatcttcagaatgatcttgtgtaatagggcaactataattatgtatgtttttgtagatgaggaaagtgagactaagcaaagcctaagggtctcacagcaagcttttaactacacaatgctgggattttgtttgctgtttgtcaagaatgtatgaaggagaacctatgtcccttttccgtctgctgcaaagaacttacattacatgagaatatgaccagcacaggagtttttgtgttctatttatattgtctttctttgccaagg

SEQ ID NO: 515649 - DNA, 498 bp, Homo sapiens
tagatgtggatgtactataggaaccaataaatcaatactgagtgattctcctttggcgagactttcttggtatttctgaaataagtaatttagtcacaactatattttagtgttggaaggttgttttattttacagttgttttagaggtatattgccattttggtattttgtatgttaattcatttttataatgcttcctgttttctaagtatcgacacatatgttctacttttaatcttcagaatgatcttgtgtaatagggcaactataattatgtatgtttttgtagatgaggaaagtgagactaagcaaagcctaagkgtctcacagcaagcttttaactacacaatgctgggattttgtttgctgtttgtcaagaatgtatgaaggagaacctatgtcccttttccgtctgctgcaaagaacttacattacatgagaatatgaccagcacaggagtttttgtgttctatttatattgtctttctttgccaagg

SEQ ID NO: 515650 - DNA, 498 bp, Homo sapiens
tagatgtggatgtactataggaaccaataaatcaatactgagtgattctcctttggcgagactttcttggtatttctgaaataagtaatttagtcacaactatattttagtgttggaaggttgttttattttacagttgttttagaggtatattgccattttggtattttgtatgttaattcatttttataatgcttcctgttttctaagtatcgacacatatgttctacttttaatcttcagaatgatcttgtgtaatagggcaactataattatgtatgtttttgtagatgaggaaagtgagactaagcaaagcctaagggtctcacagcaagcttttaactacacaatgctgggattttgtttgctgtttgtcaagaatgtatgaaggagaacctatgtcccttttccrtctgctgcaaagaacttacattacatgagaatatgaccagcacaggagtttttgtgttctatttatattgtctttctttgccaagg

SEQ ID NO: 515651 - DNA, 544 bp, Homo sapiens
tcactatgcttttctgaagcttttcatctgaggaatcgtccataaaactgttaactgatgctacccaaggcttggtttgtcaggatccaaagttgagtcttgcaaagttcctgcttgtgccaggaagctgttagtttgttgtccccaatcatagtaatctggagcaaaacttaaaaagaaaaaaatatttcagtgacttgaaacattatatagtatgtatgacatagtctagtttaggtagacagagctgagatttttrtgtaaactatagataactctaaagttcttttaaatggctcttaaagtccattttcccacaaaaccatgctacacacagggctgaaatgcccaccgacaactctactgaactctttagagcacagagtatacagcatgactagagaacccagccagtcactatgcataggaaatgttttcagcaacaaactgcatctgaatcctaacatggagtacagctcacaacctgtggtggtgtctttggacaagtaacttctatgcctcaatttcctcatcttagaatggg

SEQ ID NO: 515652 - DNA, 618 bp, Homo sapiens
cctctgcatccaaaggccaggctgaaatacatggacctacagaaagcctcgtcttttctatttttaaaatctcatggaggtaccaaccagataggacttgaatggaaaatcacctgatattacccggttccataggcttttggcatctccattcatcccagaatagccagtcagctctctctgctgtgtcctagagcaccaggaaacgaataaatagtcctagagtgagacacaaaggataaagccaagtatcggaggtgagtggcaaggcaggcagtggctcttctgcctcatcctctctgcgtgagcatatcgggaggaggtctgggtgacagcaaccatttggagtctcctccctcctcactggagagtagtaagacctgaggtctgcaatgaccctactgtccttgcctttgttgggggtcactcagcagccaaccscctatgctctgggtttttagttcagattttgatgattcctggggggtgctatagagttgtcacgtgccttgacagtaagtgtatggaagccaaggttaaccccgcagaaagagaagtacagggactccttaggagcaaagcctcttcagaaaagaagaattgagctcagtcatctcc

SEQ ID NO: 515653 - DNA, 521 bp, Homo sapiens
aaaattagctgggcgtggtggcgggtgtctgtagtcccagctattttggaggctgaagcaggaaaatcatttgaactygggaggcagaggtttcaatgaactgagatctcgccactgtattccagcctggcaacagagcgagactccatctcaaaaaaaaaaaaaaaagaaaagaaagaaaggtaagagaggaaatggcatgtgtgtaagcattggaaagcaaaagttagtctggagtgcatgttgtttatgattgctggggccggattgtggctggtaatgacaagcaatctgtctctagagataggctggggccagattgtgaagggtctttaatgacatgtcggagttcagtgttagaactgaaggttggtaataccaagcaagcagtatatcggaattaccttgggaaatgtgtgaaatgtgttcaaatacagattcctgatctcaccacagacactgagttagtatttctggggatgcacccagaaacactatttttaaggagctccccggtgata

SEQ ID NO: 515654 - DNA, 453 bp, Homo sapiens
ctccagctccatcttcacatggccttcttccgtgtgtgtgtgtgtgtgtgtgtgtgtgtgtgtgtgtgtatgtgtgtgtgtgtgtgtgtctccatgtgttctcccctctccttacaaggacactagtcaatagacttcatcctcatccaaaaccggtatgacctcatcttacctaattacatctgcaaacatcctattttcaaataaggccctgttatgacrttctgggtggacatgagcttcgggagcaacaccatctatcctgtgtatcctcagcagaactcccaatatccttgtccactgtaagatgtaaagcagactctgaaaagacctacctctgctgctgcggatatgatcaataatcaaacttcctcctttttctcaacttgcattgttttcccaaatatttttgcattagtttcatcagtgaaaaaaaaaattaccactctgccc

SEQ ID NO: 515655 - DNA, 474 bp, Homo sapiens
tgctttttgaggaggaggaagaggtggaggagggggacaaggacaggcaggaggagataggtgctcaataaaaaaaaaaaaaaaacaaaacccaggctaaaattatcactatgattgatcattatctgaactgctcagattccagacagtcaatgccaaaggaatactctgtacaacgaattacgtgattcctacttgtctagaactatttataggagataaacaagaccttgttgagaaacactaagacctacatccactgagaggctcatgttattagaagagtcccccattgtctcttggccttttggctcagatcaagtgtagaaragtttccaaatttctactcaaaaaattatacgtaccatgcaatttcatcaaaattccaagagatgtttgggtggaaccaagctaattcaacaattgacacgaaaatacaaagaaacacaaatagccaagacactcttgaggaaa

SEQ ID NO: 515656 - DNA, 512 bp, Homo sapiens
ggatctatatacgtatatgaaggaaacaaaagaaaatattgagaaaggctatctctggatggagggctatcaccacacttcagtaagtgtgggtgactttaactttcttcttcatgcttttctgtgtttctcaaatttgtaatgagtacatgttgcttttctttttaatgtaaaattaaaataaagattttaamctagagatgtatttatagaagtgattgtgtaacagatcacttctataactcaccagtataaatggcaatcacaaaatttgtttaggatgactgattttagctctagaatggggcaggaatgagactgaaatttggcattcttaaagagtacggcaccttgtcaaatactgtgtgtgtaggatgagcactagaatatttttcctgtctttttaagatgttttatattagtttatatcttgtgattaaacattttaaatacaaacaaaccccagaaagatctccatatgccatgcaaaaagattaagacttttggtaata

SEQ ID NO: 515657 - DNA, 585 bp, Homo sapiens
aagttctggggcttttctaattaaggttcagagaccagttgaggctaagcattctaccatcctctttggatccttagtaggtcccggttggttcatggatcctctttgggattcagggtgtgttaatcaggatgagcatttgcatttgtccagggctcccaaaacaaccctgggccttgtgttagtcaatgcctgtctctactttctctgtgtttggccatttcygtggctgtcctacacagtgcatgtggtagcttccctatgaatagttgtgggatgagatttcttatcctttctactcttctgtgaatcttatttccagatagaagaggcttgggccatggaggctgtttttcagttttctatactattcagtattctctgttactcagagtagttattcagattctacttttaactctgattactgcttctgcctttaccctgggcttccctaggatgcatactgggaatcatgccaagacttttttttttttggtctattctaatctgtattaagctcatttacaactcatccaggtatttttattgaatatggttgtttacttgcaaggtagccattgt

SEQ ID NO: 515658 - DNA, 596 bp, Homo sapiens
ctgacaaatgctggggagagataagactttaaatatattttttaattaaaataggagacatgctacttgtagaattttcaaacaatacagaagcttatcaaatacaacacctgagttcctcacagcacccctagatttgctgaatctttctttctttctttccttccttccttcctttctctctctctttctttctctctctctctttctttctgtgttttttttttttgttttgtttgtttttttgagatggtgtctcactgtcccccaggctggagtgcagtggcacgatcttggctcactgcaacttctgcctcccgggttcaagcaattctcctgcctcagcctcccaagtagctgggatgaaaggcacataccatcacccccagctaattttttgtatttttagtagacacggggtttctcccacgttggccaggctggtctcaaactcctgagctcaagcgatctgcccaccttcgcctcccaatgtgctgagaytacaggcgtgagccaccgcacctggtggtttgctgaatatttcattagacctttttctctgcacagcaggggaggggaagagtgtgcatgtgagg

SEQ ID NO: 515659 - DNA, 296 bp, Homo sapiens
agaagcactactaaattattattaatctttcagcatgcaataatggaaggaacacttactagtctgtgrccctgggcaggtaactcaatctctctgagcctccttttttatgaatgtaaaatgggtataatacctatctcacaggattgctgggagggtcaagtaaagtaatgtctgacagagtgtctcacctagtgtttgacacagagcaggtgctcaaactacaagagttgaatcaggctcctcacttaccactgacagttagcgtcctcgctgacctctccccaagtctggcc

SEQ ID NO: 515660 - DNA, 538 bp, Homo sapiens
ctccagctgcgcacgcatagggatgcgccctttgtggactccattgcgcagggtgcattgccctgaagagcgctcctccttccggtgaaagtcgtcgggttcccagccgggagtctgcggagttctcatactctgttacccagcttcctttgtatgagkgctgttgcgcacttccggtggaagcgctgaagcgagtgggtggagtttacggagccggtgggcggtaggcggtgctacgggtagctgggtgctgtccaaaggcgacagggcgtcgttaggggagcgagtcgtgaccggttgggccacactcaacgtgggacgaagcttcgcctactgtttgactacgtgcgtgcagcctcccctcgatgtcggccctcgaaaagagcatgcacctcggccgccttccctctcgcccacctctacccggcagcggggcagtcagagcggagcaagatgcgaatggggtacgtgacccataccccttctccctatgggccaggcccagccgttggagaatggtatctctgggcgttcatag

SEQ ID NO: 515661 - DNA, 595 bp, Homo sapiens
gttatcagaggctgctctcagcctggggtaggagtgtgtcctcctgaccccgatcaggttgtctgcgggagctggagtgggatttggaggaatattctttacctggggctttccccctcaggcctgggcgctgactgcccctctttaggtcccctgggccccaagggaagtggggcctgggcttcgaatgctctgtgctggtgacttgagagggaggctggcctctgtggtgctggggaggggtgggctggcaggcgtcggagcagagataaatagaagcgggagggcttgtcaccaagaaggcrgcacccactccttccttgaggttcccgcatcattttgcaccctctgaggcccaggagtgctctgcctgccccagtggctgcatgcttgcctctctactggtttgctcccgatagtcaggagagtgggtggggctgacatttcctaagcttccaccatgtgccaaaagtaggcgaagcactttcacaaatgtcatctcatttgatcttcctcacaaccccatgaagctggggtgattatctctgttttacagacgaggccacagaggctcagacgcagtgagactggtctc

SEQ ID NO: 515662 - DNA, 595 bp, Homo sapiens
gttatcagaggctgctctcagcctggggtaggagtgtgtcctcctgaccccgatcaggttgtctgcgggagctggagtgggatttggaggaatattctttacctggggctttccccctcaggcctgggcgctgactgcccctctttaggtcccctgggccccaagggaagtggggcctgggcttcgaatgctctgtgctggtgacttgagagggaggctggcctctgtggtgctggggaggggtgggctggcaggcgtcggagcagagataaatagaagcgggagggcttgtcaccaagaaggcggcacccactccttccttgaggttcccgcatcattttgcaccctctgaggcccaggagtgctctgcctgccccagtggctgcatgcttgcctctctactggtttgctcccgawagtcaggagagtgggtggggctgacatttcctaagcttccaccatgtgccaaaagtaggcgaagcactttcacaaatgtcatctcatttgatcttcctcacaaccccatgaagctggggtgattatctctgttttacagacgaggccacagaggctcagacgcagtgagactggtctc

SEQ ID NO: 515663 - DNA, 427 bp, Homo sapiens
gaagtagatggttggaactctggtacaaatcccacatctcctcttttctgccttggaagcacctgaactttcttgcaagtaccaagaaaataaacaataataataactgcttaataataactgcttttgagtacctaccctgtatcaggtgtcatgctggatactgagcatatartagtaaataagacagacaaattccctatcttcatggagcacaaataatgagcaaaaaataaaatatttatagactgatgagatgagtaccaggtgctgtgataaagaacagggtctctctgaggaggctgtgttaaagatggtagttatggtggtgcttagcacgtaccaggcactgttccaagtactttgtattaactaattaaatttagcaatctgatgaggaatatactatcattatgcctatttaaaa

SEQ ID NO: 515664 - DNA, 427 bp, Homo sapiens
gaagtagatggttggaactctggtacaaatcccacatctcctcttttctgccttggaagcacctgaactttcttgcaagtaccaagaaaataaacaataataataactgcttaataataactgcttttgagtacctaccctgtatcaggtgtcatgctggatactgagcatataatagtaaataagacagacaaattccctatcttcatggagcacaaataatgagcaaaaaataaaatatttatagactgatgagatgagtaccaggtgctgtgataaagaacagggtctctctgaggaggctgtgttaaagatggtagttatggtggtgcttagcaygtaccaggcactgttccaagtactttgtattaactaattaaatttagcaatctgatgaggaatatactatcattatgcctatttaaaa

SEQ ID NO: 515665 - DNA, 606 bp, Homo sapiens
aaagctgatctgcttccgggtcagggctaacagcccatccctgaaacaggagagggctcgtaattgctggattgattgccctggtttccccacatgatcaaagacaagacctgatctttcactccacrctgaaatgatatacctgagccaaggaacctcccagtctccactggaagcatctgtgaaacagatttcccctccctcctcccacagtagagtggatacaggagcctgtatgacattcgtcagatctttggacttttctgagtctgcttcctcatctgtcaaatggggttatcaggcctcacagggtggttgtactgtagaataacgagtgccacacaggtagagtataggggccagcccataattcccaccccatgctacttcaacttctggctgtcgcctctgcaaaaagaaaaggggtgagaacgatggctggtttagcaggactgcagcacagcgatccatttgcagttccaaattcattataaatcaatcaagttccgctgcccctgctttctcttccctcttgtgatgaagtaactctttactgggacagcttcctgattttgttaaaagttttttgtgattctgcttgctcag

SEQ ID NO: 515666 - DNA, 474 bp, Homo sapiens
cgctgaaatgatatacctgagccaaggaacctcccagtctccactggaagcatctgtgaaacagatttcccctccctcctcccacagtagagtggatacaggagcctgtatgacattcgtcagatctttggacttttctgagtctgcttyctcatctgtcaaatggggttatcaggcctcacagggtggttgtactgtagaataacgagtgccacacaggtagagtataggggccagcccataattcccaccccatgctacttcaacttctggctgtcgcctctgcaaaaagaaaaggggtgagaacgatggctggtttagcaggactgcagcacagcgatccatttgcagttccaaattcattataaatcaatcaagttccgctgcccctgctttctcttccctcttgtgatgaagtaactctttactgggacagcttcctgattttgttaaaagttttttgtgattctgctt

SEQ ID NO: 515667 - DNA, 543 bp, Homo sapiens
aatagtcctggtagagaatcccagctctccacaaagccaccagatcagatcagtagggggcctgagggaacttcctgatcctgggtttcttctcagcctgtggtccaggcctgacggctgagctgcccctcttggggcaagaggtcctgacctattgcctcatttcattaagccaccaagtccctagctttctgcagagcctaagagagacctaaaggtcaaagtatctctgataaaggccatacagagcttttagaagataagcaacttggccacgggtgtatagaggtcaggagaaacagccaaaattggctggcgcccaccctggcccagactgcaagttggcagacactttttaggaaggggctcataggtctgctgggcaggtgctagtctcaggttgcctgagccactctgaggccagagtccaggaggagccaggagctcttcttgtaagagtataacttttaacccttccctctcaaaacctggactttggagccctctctctggmagagcttgggttcagaagattgaggatca

SEQ ID NO: 515668 - DNA, 587 bp, Homo sapiens
gagaccagagccatgcggcagccgggctgagcaggtcagatttgggatttgcctctcagggctggcctctagtctaagtgccttgtcctcacatcccctctgctcctacttgtggctgctgagtttgctgctctctgtagtatcaaggaagttctagttcaggccagactctgagattcacccagggaaaggcagccatcaaatgggtgaagttgagcaaggcaggcagctatattgagccctcactcggcctctgatgcagcaatccattggcaggtccacctagccagccagacccaggcggctgtttactttcagttttcagctcctgagtcaatgtttatgtcacttaaaggggctactgtggaaaagaacagaactttagccctcatcccagaccagaggctcactgttaccaaagaaggggggaagacagtggggcggggagaacttgcctggtctagcactgcttacctcagtacagragatcctgtaccccagctctactcaggacttttggggcctgaccctttgccagggatggggtctgagaacagcaaggcttcattttgctcttgggtctgcag

SEQ ID NO: 515669 - DNA, 286 bp, Homo sapiens
cttggttttctcgatcatctgacgtccgaaccccgtgacgctctgtcggggagagaatcatgcggagtgaagccctgggggccatgtgcagtgaacgtgggccggcgggggaggggtcccgcctctgccatttcccagtggcataggcttatgyacaagccactctgcccctcctgggcctcagttcccaaatctgcaaaatgggactataaggcggctcctcaatggtcaggtggaaagaagtgggttccctggctcagagttctggacatgcacaaggaagtga

SEQ ID NO: 515670 - DNA, 584 bp, Homo sapiens
tgaagggtcacagggctcaagctccccctcccgctgccgcccttagatcatgctgctagagacagccaggcgctacaaccacgagacagagtgtatcaccttcttgaaggacttcacctacagcaaggacgacttccaccgtgcaggtagggcccaggggaggcttcggggaggcttggcgcccctgctggctggaagacctggggccaactcatccctgttggagtctctgtttctttatctccaaagttggggtgagggttgagccaaggtgagagtgaggtaagagtgcatgtgccacgtgtggtggtgcacgccaatagtcccagccactcgaggctgaggagggcagattgcttgaggctatagtgagccgtgattgtgygacggcattccagcctggtgacagagaagaccgtgtctctattttttaaaaaaagcatgtattgagtgccgactctgtacattgggttgcagtggaagttgagatgggaggagccctgttaccacatcaggcatcttggtgggcattaggaaaagcattccccgcccccgccaaaacgtggtctcacccaagggaggcg

SEQ ID NO: 515671 - DNA, 564 bp, Homo sapiens
actctgtacattgggttgcagtggaagttgagatgggaggagccctgttaccacatcaggcatcttggtgggcattaggaaaagcattccccgcccccgccaaaacgtggtctcacccaagggaggcgggctggagctcggtccattgtgaagcgggcagccttctttactgtctaggggagcactgcttcctgccctctgagagcgctaacctgcgtgggtgggcttctggaagaaggcctgggcagtgagaggcactgcctaggaaaagggtgggaggagcattgctagtgctgcagacatgcaccagggcctcgctccctcattgtcccacaatctctgggggacctctctgtatttcccgacatctgtccaraccccaccctctccccttcctcttactccggccctttcaccacccgagacggtcccagtaacccttttagtatgagcttagcagggcagggctgcagggaagcgtttctggcagaggagattggcgattgcagaggccctgaggttggggagagctggtggtttggaggaactacagggaggcccagg

SEQ ID NO: 515672 - DNA, 439 bp, Homo sapiens
tttgcagttggggaagctgaggctcagagaggttgtgtggctatccctgggtcacctggygaggcagaggcaggatttgggagctgtggggttcatgcatctgctacgggttgccttgtgaggtggaacatggtggaggtgtccccactttgcagatagcaaaatgggggccaagatggggagggaacctggtcactcgggtggaggccaggccaaaatttgaagctggacctcctggcccctgcctgggttgaagggtgggcgggggagggggcgtctctgaacctgagctcctcacagatgacagtgccaacttccggaagcggggctcactgctctggaaccagcaggatggtaccttgtccctgtcacagcggcagctcagcgaggaggagcggggccgactccgggtgaggtggggccctcagggctgggtgtg

SEQ ID NO: 515673 - DNA, 617 bp, Homo sapiens
gttgtgtggcagtttattaaactgtccccccagatcgacacgcagctagcctcctgcattgtatggttataaatagcaccctagygagtgctgtcgtccagtctctcttgggtgtggtttgaatgatctcgggatgcatgactaaaatggaattacgatggcagatcggaaacgcgtttataaacaagtgatggtttgtgagtcgactgtcaagaccaggaggtggtgcaccgtgggaggttgccttccctcccatcacttctttttgtttttgagtcagggtcttgctctgttacccaagctggagtgcagtggcggtaccttgactcactgcgacctccacctctcaggctcagcgattctcccacctcagcctcctgagtagctggaattgtaggcgtgcaccaccacgcgcagctagtttttgtattttttgtagagacggggtttcaccatattgcccaggctggtcgtgaactgctggactcgagtgatccacctgcctcggcttcccaaagtgctgggattacaggcgtgagccaccgcgcctggcctatttttggtaactttaataaagaagatagtcttagcattgctaacttctgtttctttctcca

SEQ ID NO: 515674 - DNA, 497 bp, Homo sapiens
ttccctacacagaacacagggaaaacctacatcccaccaagarctattgccaggaagccctgaacggcacgatgttctccaggcatcatgctggctgctctgcattctgcagataaccaggtgtttgtcttaggtgtccacgtgccacctgttgaatcccagcttcttgttttctgagctggagcccatgttgactgttagctgatatggccagaggctttgtcctgccggtgtccatgcccttgaaatgcgactttgcagcatccccatcagtggtggaatctgcttcccagcccttgactcagagctggcctgggactttccttgcccaacagactatggcggaagtggcattgggccagtttccagcctgggccacagaagtctcatttgcttccatgctctctcaggacctctgcctctgccacgtgagtgtgctaggctgagctcactggaggaggaggaggtgccatagggagcggcgtgctgggcgccca

SEQ ID NO: 515675 - DNA, 497 bp, Homo sapiens
ttccctacacagaacacagggaaaacctacatcccaccaagagctattgccaggaagccctgaacggcacgatgttctccaggcatcatgctggctgctctgcattctgcagataaccaggtgtttgtcttaggtgtccacgtgccacctgttgaatcccagcttcttgttttctgagctggagcccatgttgactgttagctgatatggccagaggctttktcctgccggtgtccatgcccttgaaatgcgactttgcagcatccccatcagtggtggaatctgcttcccagcccttgactcagagctggcctgggactttccttgcccaacagactatggcggaagtggcattgggccagtttccagcctgggccacagaagtctcatttgcttccatgctctctcaggacctctgcctctgccacgtgagtgtgctaggctgagctcactggaggaggaggaggtgccatagggagcggcgtgctgggcgccca

SEQ ID NO: 515676 - DNA, 497 bp, Homo sapiens
ttccctacacagaacacagggaaaacctacatcccaccaagagctattgccaggaagccctgaacggcacgatgttctccaggcatcatgctggctgctctgcattctgcagataaccaggtgtttgtcttaggtgtccacgtgccacctgttgaatcccagcttcttgttttctgagctggagcccatgttgactgttagctgatatggccagaggctttgycctgccggtgtccatgcccttgaaatgcgactttgcagcatccccatcagtggtggaatctgcttcccagcccttgactcagagctggcctgggactttccttgcccaacagactatggcggaagtggcattgggccagtttccagcctgggccacagaagtctcatttgcttccatgctctctcaggacctctgcctctgccacgtgagtgtgctaggctgagctcactggaggaggaggaggtgccatagggagcggcgtgctgggcgccca

SEQ ID NO: 515677 - DNA, 576 bp, Homo sapiens
gagaacagaaagagggaggaaacgccgagcactgacctgggggaggggagtaaagagaagtgaagggggattggaagggaactggagaatgagagaagcaacaggcggggtgcgtgtaggagggcgggagagccaatgacaagacagaaaaggcagagaaagcaaagcaaraccagactcctcatccggtaacactgtgtcaggtcattgccctcccaccccgcccccaaccccataactgaaaacaagtaggaacctggataaaatagtcttaacaatttttttttgagacggagtcttgctgtgttgcccaagctagagtgcagtggcgcgatctcggctcactgcaaactccgcctcccgggtttaagcgattctcctgcctcagcctcccaagtagctgggattacaggggcccgccatcgtgcctgctaatttttgtattttttagtagagacggggtttcaccattttggctaggctggtctcgaattcctgacctcatgatccgcccacctcggcctcccaaagtgctgggattacaggcgttgagcaccgtggccggcccttaaaagc

SEQ ID NO: 515678 - DNA, 417 bp, Homo sapiens
taccagggaaactttcaccactggacaaagcaggcctccaggaactccctgccctccaggagctcccactctaccaggcaggcagagggaacaggtggccatttgttagatgggcaaggcctgtggggctccgtcagaccggaaaggactacggggaagtctcaacagggtggatgtggttgaaataggccaggggagacatccctgagaacatgcctcctgaaacacagggcgatgagggggcgggtcttgcctggagaaagrgcttttcaggtggagggaaccatctgtgcaaaggtgctagggtcggactgagcctggtgtgttcatggaacagcagggaggccagtgtggctggaggtgcaggaggtgagggcagagagggagcaaggggctctgcaggtctgtgggccacgg

SEQ ID NO: 515679 - DNA, 623 bp, Homo sapiens
gtcccacactctttgacccccattacttctctgctccagccaaacaggctacctcactgtccttcaaacagaccagacaggcacccacctcaggaccctggcactggctgttccctcttccatagtgcccttccctttttttttttttttgagacagaatctcgctttgtctcccaggctggagtgcagtggcgtgatcttggctcactgtaacctccacctcccgggtttaagcaattatcctgcctcagcttcccaagtggttgggattagaggcgcctgccaccatgcctggctagtttttgtatttttagtagagatggggtttcaccatgttggccaggctggtctcaaactcctgacctcaggtgatctgcccgcctcggcctcccaaagtgctgggattacaggtgtgagccaccgtgtctggcccagcccttcataattttatattatttatgtgactctgggcaaatgtcagtctcccccaacatacaggaaatttcttgttcgaatcacccaggtcattgaaagcctctgaaaatgtttgttgtragaataaatggagtgaataaatgaatgagagcacgaaacagtgctgtaaataagcaaatggagtgaag

SEQ ID NO: 515680 - DNA, 624 bp, Homo sapiens
ttctccaaatgttcacaaaattgaggaagactataaaataaatccccaacatgaattagccacaactaaaaggcatttacaaataggaaacaacactggaaatcagaattaaaaaaaaaaaaactcagaatagagtgcacaaaaaatagcaacagatgaaaaaaatagtcaagtaaatttgagaaagaaatttaaaaatctgttaaaaatatttcagaaccaaatagtaaattacaaggtgcccaaagaggactatattgagtgaaatataataaatggcattgaaaagaggaaaaaacacagccaaaaaatcaaattaaattaaaaggcagaagtgttatgagsgaatgtgatagattaaaacatttaaaactcaaaatattcacatgcagcacatgaacctagatggaatccttgatttttttaaaaaaactgtacatttatttgggaaaatatttggaaactgaaatgtaaagtataccttttattactgaagttgttaattttctcatgtggaatgacaatggtattattatatgggagaatgcagtgtcttcttggtaccagaaatataatagatacttaatatctgtcattcctttactaatcatgttgcaaatgaat

SEQ ID NO: 515681 - DNA, 624 bp, Homo sapiens
ttctccaaatgttcacaaaattgaggaagactataaaataaatccccaacatgaattagccacaactaaaaggcatttacaaataggaaacaacactggaaatcagaattaaaaaaaaaaaaactcagaatagagtgcacaaaaaatagcaacagatgaaaaaaatagtcaagtaaatttgagaaagaaatttaaaaatctgttaaaaatatttcagaaccaaatagtaaattacaaggtgcccaaagaggactatattgagtgaaatataataaatggcattgaaaagaggaaaaaacacagccaaaaaatcaaattaaattaaaaggcagaagtgttatgagggaatgtgatagattaaaacatttaaaactcaaaatattcacatgcagcacatgaacctagatggaatccttgatttttttwaaaaaactgtacatttatttgggaaaatatttggaaactgaaatgtaaagtataccttttattactgaagttgttaattttctcatgtggaatgacaatggtattattatatgggagaatgcagtgtcttcttggtaccagaaatataatagatacttaatatctgtcattcctttactaatcatgttgcaaatgaat

SEQ ID NO: 515682 - DNA, 561 bp, Homo sapiens
cccaggaggggtgtgtgtgttggcctcaagactaggtggtgtctgttggtctactgaaatgctaacaaatatctaaaagaccagttatttaggtttcacaatagtgattgatatggttaggctttgtgtcagaacccaaatcttatcttgaattgtaatccccataatccccatgtgtcaagggagggaccaggtgggatgtgattggatcatgggggcggatccccctatgctgttctcatgatagtgggtgagttctcatgagatctgatggttttgcaaagcagttttccctgctcttgctcactctctctggcctgccgccatgttaagaagtccctgcttccccttccaccatgattgtttcctgaggccttcccacccttgcggaactgagtcaacgaaacctcttttctttataaattacccagtctcaggcatgtctttatagaagtgtgaaaacagaccaatacagtgatgttatctttggtagttggggaagttatgaattttgtgacactggttrtgtgactggggcagtaagcaacttatagaaaaaca

SEQ ID NO: 515683 - DNA, 616 bp, Homo sapiens
ctggcattctttttacatatttgttttcccctttactttcagggcttttgtgagctttagtttaggatgtgtaaactataagaaacatttagttggacttacttctttaaatgtaatctgactatctttgtcttttaaatatttaaaccatgtgatagttgacatgacacattctttctaaggtctcattttgtgccttctcttcatcctgtttatgtgctagtccccacccctactccttcataaacatgtcttttttcttaattttttggatcgaggatttccacactccccacaactctaacaattttccttcagtactgttttggtagttacacattctatattattttggcagtttctcttaaatttttaattctcatatccaacttaaaggggcattttgtgtcctgggcctaattctttttgtgtgccctaattctattcatgccatcattttctgtagtttctttctaaatctattttcctaggttttacatagtttgctttgtcttattatgtgggtcttgcaccatgtctyttcccacttcttgcaatggctcagctctactgtagaagctggcatttttgagttggccaacaaagactgtttgca

SEQ ID NO: 515684 - DNA, 488 bp, Homo sapiens
ttctcttgtttttcccattatcaggaccaagggttcaaaacattgaacatctttcagatgtttacacttctcacatttattttgcaacatgcattataagtacagagggctaataaatgtatacatctatttattttttaaacgatgtattaaaagaatttaatacaaawtgaagccatgtcatagcttaaatatccattgtagatcatgagctgtttgattttgagaatgatcattttgtttcaattagtactatcagattactcaaatccatgatgaggatttgaactgaaaacaggacagacttaatttttaaggagttaaaagcagtgtttcatgccatctccaaaggcctgaatgaatttgtcattcctcagggtaaacataaaagggttcaaaaaaggggtcaccactaaaaccagcagtgacactaccctgttatactcggctgcctgcgttaacttgggtttcacgtagagaaacaagca

SEQ ID NO: 515685 - DNA, 556 bp, Homo sapiens
gctgctcactaggttacttaccttggccaagatatttaactatttaactttcctgaaaccactttctcatcagtacaatggaaatatcactacattcttcgcagggcaactgtgagattcaaggaaattcagcctatcataacgcagtaagtggagtctaaaatttcagttgcgtgagatacggaaccccattattgctagatttaaacggctgaggtgaggatgcactgcgagcctgccaggaattccaggcctcgcagtgttctggcgccacctggtgggagctgttaaatagcgatgggggaggactcggttgctggggagctggagcttcctggaaaagctggagtccattgctttgcccgattatttggggagattggaggtgcagagactcctcctaggtctgttgtttcccacctgtctcgctgtcctaggaattccggcagggggagaacaggagatagccaatcacgggggaagaatgggagatagccaatcactrgttactttatattgtaatcacacggtagtggaagaagtcgccctccagcct

SEQ ID NO: 515686 - DNA, 621 bp, Homo sapiens
cagagtgctcagagccctgtggtctaatgggatgcctggtaagaggaaagggtctatcctctctagtctagacgtttgactttcttcagaagaattccacagaaaaatgacaccagaatacaataatctatcactatattctgggttactcaacctaaatagcattgtttttatttattcatttagttttttgagacagtctcactctgtcatccaggctggagtgcagtggcgcaatcttggctcactgcaacctctgcgtcctgggttcaagtgattctctgcctcagccatctgagtagctgggattayaggcatgcactaccacatccagctaatttttgtatttttagtagaggcagggttttaccatgttggccaggctggtctcaaactcctgaccttgggtgatccgcctgccttggccttccaaagtgctgggattacaggcgtgagccaccacacccagccaaaataccatcttttaaagagtttatttcacagttctctgtctcagttccttatcccttgtaagcaagtgcttgaatgcagaaacacactctcacaccccattggagagaggttgcaaactggtggcccatagattgcactcagtatgca

SEQ ID NO: 515687 - DNA, 486 bp, Homo sapiens
tgcgcagccggctctcccttagcgttcagggtcagcagcttaactctttctccctctgggcatgaatgcatgctgagccatgtcctggctgccctctatcagtctgcaagatggacagccttggttctctctctctttctctgggcaccagagcctgtaccatgtcaaggcacgttgagccaagccaagttgcgtgcacagcatcggcaggtcaattatacctttttcaaacaatagtggctctgagctaagcatgagcttacacaaataggttatataacaagtatatatatatatatatatatatatatatatatatatatatgcctgctccctaaactcgctgagtcactttggcctggatgtccacctcagcctattycttgaccaaagcacatccatgtaccttacatcatatcaggccttgcacagtgccgcctctgcctttgctccagccttgtctctcaaaccacctccctgccacct

SEQ ID NO: 515688 - DNA, 627 bp, Homo sapiens
gatgattttgagttttttttttttttattttaatgcttttaggatggtagaaagcaatcttcagtttgagacccatccttaggtaagtagttgaattagagttctgccttcgctaaagtttaacaacaaactggtcttaatttctmcttacttttttttctttttttttttttggacggagtctcattctgttgcccagggtgcggtcttggctcactgcaacctctgcctccccagttcaagtgattctcctgcctcagcctcccaagtagctgggattacaggcacccaccaccacccctggctaattttttttttttttgtatttttagtagagacgaggtttcaccatgttggccagactggtctggaactcctgaccataggcaatctgcccaccttgacctcccaaaatgctgggattacaggcgtgagccaccgcacccctcctgtttctccttttactattacagcgctcattgatcatattgttgagtttttgttgttgttgtttgttccggtctttctcccatcagatttgaccaactctaattgacttggtcaaatctgagtgagaattccaaattatgggtaacaaaccctctctaatttggctgaaattccttg

SEQ ID NO: 515689 - DNA, 627 bp, Homo sapiens
gatgattttgagttttttttttttttattttaatgcttttaggatggtagaaagcaatcttcagtttgagacccatccttaggtaagtagttgaattagagttctgccttcgctaaagtttaacaacaaactggtcttaatttctccttacttttttttctttttttttttttggacggagtctcattctgttgcccagggtgcggtcttggctcactgcaacctctgcctccccagttcaagtgattctcctgcctcagcctcccaagtagctgggattacaggcacccaccaccacccctggctaattttttttttttttgtatttttagtagagacgaggtttcaccatgttggccagrctggtctggaactcctgaccataggcaatctgcccaccttgacctcccaaaatgctgggattacaggcgtgagccaccgcacccctcctgtttctccttttactattacagcgctcattgatcatattgttgagtttttgttgttgttgtttgttccggtctttctcccatcagatttgaccaactctaattgacttggtcaaatctgagtgagaattccaaattatgggtaacaaaccctctctaatttggctgaaattccttg

SEQ ID NO: 515690 - DNA, 627 bp, Homo sapiens
gatgattttgagttttttttttttttattttaatgcttttaggatggtagaaagcaatcttcagtttgagacccatccttaggtaagtagttgaattagagttctgccttcgctaaagtttaacaacaaactggtcttaatttctccttacttttttttctttttttttttttggacggagtctcattctgttgcccagggtgcggtcttggctcactgcaacctctgcctccccagttcaagtgattctcctgcctcagcctcccaagtagctgggattacaggcacccaccaccacccctggctaattttttttttttttgtatttttagtagagacgaggtttcaccatgttggccagactggtctggaactcctgaccataggcaatctgcccaccttgacctcccaaaatgctgggattacaggcgtgagccaccgcacccctcctgtttctccttttactattacagcgctcattgatcatattgttgagtttttgttgttgttgtttgttcyggtctttctcccatcagatttgaccaactctaattgacttggtcaaatctgagtgagaattccaaattatgggtaacaaaccctctctaatttggctgaaattccttg

SEQ ID NO: 515691 - DNA, 607 bp, Homo sapiens
cataggcgaggaaggtgcggggcaaggcggccgcgggtccctggcatccctctccttacgcccaggctaagctggcggtgctgctggtgacgctggtggccgccgcggtctcctacctgcggatggagcagaagctgcggcggggcatggccccgcgccagccctgcatcccgcggccccagcacaaggtgcgmggttacttctacttggaggaggacaactcggacgagagagacgcggaaggcgagcatggggacgccgcggaggaggaggcgccgcccgcggggcccaggcctggccccgagcccgctggactcggccgccggccctgcccgtacgaacaggcgcaggggggccacgggccggaggagcagtgaggggccgcctgggccccggactcagcctccctcctcgccggcctcagtttaccacgtcttaggtcgggggcaccccctcctagtcccgcgctgtcttcaaaggcccctgtcacccctcccccacgttggggacgccccttccagagcccgtgtcacctccgggcttccgcagcccccctccaaggcggagtggagccttgggaacccctcggccaagcacaggggttcga

SEQ ID NO: 515692 - DNA, 607 bp, Homo sapiens
cataggcgaggaaggtgcggggcaaggcggccgcgggtccctggcatccctctccttacgcccaggctaagctggcggtgctgctggtgacgctggtggccgccgcggtctcctacctgcggatggagcagaagctgcggcggggcatggccccgcgccagccctgcatcccgcggccccagcacaaggtgcgaggttacttctacttggaggaggacaactcggacgagagagacgcggarggcgagcatggggacgccgcggaggaggaggcgccgcccgcggggcccaggcctggccccgagcccgctggactcggccgccggccctgcccgtacgaacaggcgcaggggggccacgggccggaggagcagtgaggggccgcctgggccccggactcagcctccctcctcgccggcctcagtttaccacgtcttaggtcgggggcaccccctcctagtcccgcgctgtcttcaaaggcccctgtcacccctcccccacgttggggacgccccttccagagcccgtgtcacctccgggcttccgcagcccccctccaaggcggagtggagccttgggaacccctcggccaagcacaggggttcga

SEQ ID NO: 515693 - DNA, 488 bp, Homo sapiens
ctgccgccgccatagctccaattgcagcccacgggtgtaactttttatatttttaagttggatatatggagctacttggcttttgctttcatctcatcgttgaggaaagaggtggttgcttawgggacccctgtttttactgcaacctgtaatggatgagaacctccctgttgcagagagcaaaacactgaactaaattgtgctgtaacacagccctgtattgggggattgggagtgatcatgcaaacgcttgcaaatttgcacagtgacagagacaatcgtttgggcagctattcactatatgaaaaggcaattgaccaaaagtcagttactgagctatctcaatactttcattttattttaacttttggcaacagggtgcaattaaaggagagaaagaaaacaaagtgataagtgtaagataatgtacacacatgtgtaaaagaaaatgacaagacaggatgactatttgtctcttggttagctcc

SEQ ID NO: 515694 - DNA, 471 bp, Homo sapiens
ccgccgccatagctccaattgcagcccacgggtgtaactttttatatttttaagttggatatatggagctacttggcttttgctttcatctcatcgttgaggaaagaggtggttgcttaaggkacccctgtttttactgcaacctgtaatggatgagaacctccctgttgcagagagcaaaacactgaactaaattgtgctgtaacacagccctgtattgggggattgggagtgatcatgcaaacgcttgcaaatttgcacagtgacagagacaatcgtttgggcagctattcactatatgaaaaggcaattgaccaaaagtcagttactgagctatctcaatactttcattttattttaacttttggcaacagggtgcaattaaaggagagaaagaaaacaaagtgataagtgtaagataatgtacacacatgtgtaaaagaaaatgacaagacaggatgactatttgtc

SEQ ID NO: 515695 - DNA, 154 bp, Homo sapiens
gcagctgccctctagattttttttttttgaccattgcttatttggtttgactttcattttcttccccattgtggtagtcattttctgaatgcctgttagtttgtccatctctytcctctgtagtccctagagtcagatgaactcctctgcaggt

SEQ ID NO: 515696 - DNA, 274 bp, Homo sapiens
gtcttaaacactcaacttctttcttgttttttccacttgtcaactcatgaacacctcaaccttgttamatccaaagccaaactcatggcttggagtggtaggtgatggctgtaatcccagtgctatgggaggctgaggtgggaggattacttgaggccaggagtttgaagccagcctggaaaacacagtgagactccctatctacaaaaaaaaaaaaaaaaaaaaaaaaaaaaaaaaaaaaaaaaaaaaaaaaaggctaggcatggtaatgtgc

SEQ ID NO: 515697 - DNA, 274 bp, Homo sapiens
gtcttaaacactcaacttctttcttgttttttccacttgtcaactcatgaacacctcaaccttgttacatccaaagccaaactcatggcttggagtggtaggtgatggctgtaatcccagtgctatgggaggctgaggtgggaggattacttgaggycaggagtttgaagccagcctggaaaacacagtgagactccctatctacaaaaaaaaaaaaaaaaaaaaaaaaaaaaaaaaaaaaaaaaaaaaaaaaaggctaggcatggtaatgtgc

SEQ ID NO: 515698 - DNA, 645 bp, Homo sapiens
tgatcgtggcattcctagaagtgaaataggtaagaagcctgccacatttttacttgatctgtgtttgcagaagggttctaggtcaggtgagtagaagtctaatctgaatcataaaaacagagtcacagtctccagtcaattcccagacataagccagttcacagaccgggagtcctttgtctgaatgggaagccaggtcccctccaaaaaggactctgctccactgccaaaaatttatactgtcaatttttctcccagcctgcccctgaaggagtacacagccttttactaggatgactgaacaggggaatagaaactaatgagacctatgcaggatcactggacacaggctctgaactggcactagggmgagactagggtctaccagtcagaataggcattttggaggtcaggtgaatgttggtgcaagttcatgtcatggtagatccattgggtccccaattccatcctctggttatatacaaagtggccatgttgagattcaaattcagggcatccaacgtagaggctgtgctcttactcatgaaacattctgaccctactaaccaatttaaaaatgcaaacacctcctgcggctagcgagagtcctccaaacagtcacgtaaattggttctgttaaggatt

SEQ ID NO: 515699 - DNA, 645 bp, Homo sapiens
tgatcgtggcattcctagaagtgaaataggtaagaagcctgccacatttttacttgatctgtgtttgcagaagggttctaggtcaggtgagtagaagtctaatctgaatcataaaaacagagtcacagtctccagtcaattcccagacataagccagttcacagaccgggagtcctttgtctgaatgggaagccaggtcccctccaaaaaggactctgctccactgccaaaaatttatactgtcaatttttctcccagcctgcccctgaaggagtacacagccttttactaggatgactgaacaggggaatagaaactaatgagacctatgcaggatcactggacacaggctctgaactggcactagggagagactagggtctaccagtcagaataggcattttggaggtcaggtgaatgttggtgcaagttcatgtcatggtagatccattgggtccccaawtccatcctctggttatatacaaagtggccatgttgagattcaaattcagggcatccaacgtagaggctgtgctcttactcatgaaacattctgaccctactaaccaatttaaaaatgcaaacacctcctgcggctagcgagagtcctccaaacagtcacgtaaattggttctgttaaggatt

SEQ ID NO: 515700 - DNA, 578 bp, Homo sapiens
tctgttgcatgcatttctatcatcctgacagagacatttattcattcattcattcattcagaacttaatcatttgagtacatactttctgycagccactgagtctgtgacttaattgccaggcttcattgtagtaatgttagtagaagataaataaattgaagaacaagactttctaggctgcctgcacactagaccatccctactgaaattcagtaggtaaatgattctatagtctgtgctctaggcaccattcagaataactcaatgtgatgttggaaacgtctttacctatactgtttaatgtggtagttgccagtctcttgtggctattgagcaatttaaatgtagctagtgtaactgaataactaaatttttaatttatatttaattagctacatgtgcaaagtgactatcataatgaacagcatgattctaaggtatatagcagctatctattgcttaattgttacttcaaaataaaatgaatggcttgaagagatattaaggaataatctacgggccaggaacagtgccttatgcttgtaatcccaggatattgggaggctaaagcaggag

SEQ ID NO: 515701 - DNA, 645 bp, Homo sapiens
gctgcatttaaatgattttaaaataagtgcttataaaaagtcaatttttggtgttttgctgcttaggaatgaaacgaatcacaaatgtttttatttgattttctctgacaggactgggaattcccacatttcatgggagatgttgatgtaaatctccctggtttgcacacccctcacatgcagttcaagattcctttcttccagaaaatcttcaaggaggaatatcgtattcacataacaggtgtgttatatctttgaacacaatttgattatcttcgtacattagttagggtaatgctagttgctgtaaaaagcaagccataatatttgagaggcataaatacaatgttatttctcattcacttaacagtgcaaggtggttttcagatcaacaaggggctctgtactatcattctgggacctaagttactggtggctttgacaatttcagtgttagcatccagcaggcagatggaaatacagagaatggggaaagtgatyaagaaggcttgtctgttccgtaatctcttgggcttggaaaagaaatatgtcacctttcctcatgttccattgatgataactggtacatagccctacttagagtcagggagagcaaggaaatgtagtccttagctgagcagccac

SEQ ID NO: 515702 - DNA, 395 bp, Homo sapiens
gcaaaaagcaatactttatgaagctgggtgagaacaaaaggttaacaatattatattggttacctgaagtaaaatttgctatcttcttaaagacttttatagtggatccatttgatatctgaaaccaaagataaaagatatatgagtkttcaaaatttaatggatttctcaacttcacccaggaattagatggctggatggatcttacatgctgtcacttattaaatcaaatatttatcaagaattactatgttctgggcactgtgctggaggctgggactaaatgacaagcaaggcagtgtctctgtcctcaaggggctcatggtcctgtggaggaggctgatgaggccatgggaggcagtggggtagtacgcagaaggtggaggccaggaccc

SEQ ID NO: 515703 - DNA, 556 bp, Homo sapiens
gtggtgagggggcggctcggctcgccaggaggaagtggcatccagccagtcggcgatactttcactttcagtggaataattcccgctggtgcaggggtctgatgtccctccaccaggtgctcaaggggtctggacaccgacagccctagtcctcctgtcctaccccacagacgtttagtgggtgacagtagctccgtgaccgccaggtaactttcccttccaagacaccaaggatttgtgggtaaaataataataccatttattgaatgtgccagacagcatgctaagagctttacctatcttttctcatttcatccccttaagggtcctgtgagctaagtgtcttcatgaccattttgtatatgggggaactggaacacagaagagctgtgactctccccagatctcactgctactgtgggacagcaccagggtccgagagctcttagccaccgccctgtgccctgaaaagatggaatctgccctggtctgttaaagtgtcgaagcctggcccctgggkgaggggaatcacgtacgcagcggctgtggctcgcct

SEQ ID NO: 515704 - DNA, 647 bp, Homo sapiens
tggtgtgaaatgcacaattatttaatgttttgagcctggcttaacgagggaatgtaaaatgatcaagtaatgggaattttgttttgttttttttggttttaaggagyggagagtctaacaggcaagaaggaagggagaagacagaaggaagatgctcgcccatacagagacagagggagggggggctccaaagccgaaagaggaggtccccaagtactgtggacactagccaggtatatatgcagaggctgcaggaggcaatgtctgatttgcctagggctcaggggagagatgaaaacacaaatcatatggaagatgggaaccctcaggcctacctcaacttaaaaatgggtgtaataacagtaccggccttctagcattgttagggagattaaatgtgatcatgcattcaagggcttagcacggggccaggctgctgggaaaggcttgatgatagtatcggcaataaaacctgtacaattactattgttggcattagtatccactcatttgcaaacagattcagcccacattggacagctaggacgcccactccatgctcagtatctctgaataaggaggaggctgccagcaatgaacccagtggaagccagtagactcctggctttcatcccagtccaccgcaa

SEQ ID NO: 515705 - DNA, 647 bp, Homo sapiens
tggtgtgaaatgcacaattatttaatgttttgagcctggcttaacgagggaatgtaaaatgatcaagtaatgggaattttgttttgttttttttggttttaaggagcggagagtctaacaggcaagaaggaagggagaagacagaaggaagatgctcgcccatacagagacagagggagggggggctccaaagccgaaagaggaggtccccaagtactgtggacactagccaggtatatatgcagaggctgcaggaggcaatgtctgatttgcctagggctcaggggagagatgaaaacacaaatcatatggaagatgggaaccctcaggcctacctcaacttaaaaatgggtgtaataacagtaccggccttctagcattgttagggagattaaatgtgatcatgcattcaagggcttagcacrgggccaggctgctgggaaaggcttgatgatagtatcggcaataaaacctgtacaattactattgttggcattagtatccactcatttgcaaacagattcagcccacattggacagctaggacgcccactccatgctcagtatctctgaataaggaggaggctgccagcaatgaacccagtggaagccagtagactcctggctttcatcccagtccaccgcaa

SEQ ID NO: 515706 - DNA, 647 bp, Homo sapiens
tggtgtgaaatgcacaattatttaatgttttgagcctggcttaacgagggaatgtaaaatgatcaagtaatgggaattttgttttgttttttttggttttaaggagcggagagtctaacaggcaagaaggaagggagaagacagaaggaagatgctcgcccatacagagacagagggagggggggctccaaagccgaaagaggaggtccccaagtactgtggacactagccaggtatatatgcagaggctgcaggaggcaatgtctgatttgcctagggctcaggggagagatgaaaacacaaatcatatggaagatgggaaccctcaggcctacctcaacttaaaaatgggtgtaataacagtaccggccttctagcattgttagggagattaaatgtgatcatgcattcaagggcttagcacggggccaggctgctgggaaaggcttgaygatagtatcggcaataaaacctgtacaattactattgttggcattagtatccactcatttgcaaacagattcagcccacattggacagctaggacgcccactccatgctcagtatctctgaataaggaggaggctgccagcaatgaacccagtggaagccagtagactcctggctttcatcccagtccaccgcaa

SEQ ID NO: 515707 - DNA, 647 bp, Homo sapiens
tggtgtgaaatgcacaattatttaatgttttgagcctggcttaacgagggaatgtaaaatgatcaagtaatgggaattttgttttgttttttttggttttaaggagcggagagtctaacaggcaagaaggaagggagaagacagaaggaagatgctcgcccatacagagacagagggagggggggctccaaagccgaaagaggaggtccccaagtactgtggacactagccaggtatatatgcagaggctgcaggaggcaatgtctgatttgcctagggctcaggggagagatgaaaacacaaatcatatggaagatgggaaccctcaggcctacctcaacttaaaaatgggtgtaataacagtaccggccttctagcattgttagggagattaaatgtgatcatgcattcaagggcttagcacggggccaggctgctgggaaaggcttgatgatagtatcggcaataaaacctgtacaattactattgttggcattagtatccactcatttgcaaacagattcagcccacattggacagctaggacgcccactccatgctcagtatctctgaataaggaggaggctgccagcaatgaacccagtrgaagccagtagactcctggctttcatcccagtccaccgcaa

SEQ ID NO: 515708 - DNA, 302 bp, Homo sapiens
gctcccttcccaacacttggcttccaaggttggactggagctgggacctgattgaacccctcggtccycagtgcccaagcgtagaagccgtggagccgcatggccctggtgactgggctgcgtgacccctctgtggccccctcctgacctgagaaagtggtgcaaacatccaccgcgtcatctggtcgttaggagcacagagcctgacccacgatagacaccacgggcataataaatgccgctttctgtttgcttcagcaggatgtggacaaaacctttaaatttgtttttatgcattcaat

SEQ ID NO: 515709 - DNA, 513 bp, Homo sapiens
cctgtggagtgccctaaaatctaaactgtgtccttcttttcaggagcagatgacagccgtctgcactgattgtcatacaactgcttgttttacaatctcacttccttgagattcattctgcctctgtgttatctggtccttttctgttattgcttaactgctttatgcacataaaataagacaaaaagattactgttttaaaaatctaaaatgttgaaatattttattttagcgatggagtcttactctgtcgcccaggctggagtgcagtggygcgaactcagctcactgcaacctccacctctggggctcaagcaattctcctgcttcagcctcctgagtagctgagattacaggagcctgccaccgccccagctaatttttgtatttacgtagagatggggtttcaccatcttggccaggctggtcttaatgttcttatattggttatttgagtacctccattgtctcatttataaaggaggatcttgctctaaaattggatgattctgt

SEQ ID NO: 515710 - DNA, 583 bp, Homo sapiens
cctttcctaggattttaaaaattggaaccaagggctgctctgtctatggagtagccatttttttattcctctacttttcttttttctttttttaaagacggagtctcgctcagccacccaggctggagtgcagtggcgctrtcttggttcactgcaaccaccgtctctggggttcaagtgattctcccatctcagtctcccgagtagctggcattacgggcgggtgccaccatgcccggctaatttctatgctttagttgagacggggttttaccatgttggccaggctgatcttgaacttctgacctcaggtgatccacccacctcggcctcccaaagtgctggattacaggcgtgagccacaacatccagcctgttcctctactttcttaacttgctttcacttaaaaaaaaaattggaactaaggaaagagggcagtctctcctgattagtgaaagtggaatgataaaagagtctaggtggcagtctgtccaacccatggaggattatatgagaaactgaggcacacattcacagataatttaaataataagttctgattccagttacccttgtagttag

SEQ ID NO: 515711 - DNA, 638 bp, Homo sapiens
taaattcagtttgaattcagattcctccacaatgtatgacggtttttttttccccacgcaattcttcttttctataataagctaaaagtaattgtgtgtgtgtgtgtgtgtgtgtgtgtgtgtgtgtgtgtrtgtgtttgtatttttcagaattcttaaaacctttaagcaagttctgggccctgatattgatccttttgatatactaaccagattgaaagctccttgagcacaaatatacgtcagattcatcattaaattcatcataattccaggaccaaaagctcaaattggacaatttgcagtccccaaaaggtcagtgctttcagtcactaagaaatgtgcgagttgtgacactacacaggtgctccttgacttactatggggttgtgccccaataaactcattctctgttgaaaataacaagtcaaaagtgtgtttttgacacataggtttattcagacataaccgcgtggtaaattgagaagcatactgaatgtgtattgctttcttcccatttgtcaagtagaaaagttctaatttgaaccaatataagttgggaactaacattaggatgtaacatagattattattcagaaatgtctattttccattcacagtggggtagcagtgaaaat

SEQ ID NO: 515712 - DNA, 492 bp, Homo sapiens
tggggcagataaaatctacaaatcataatttacgttgtcaagaaaacctagttcactgttttaataattattttttactaagaagtaaaagccagattgattttgacagtttttataaggaygataatatcagaaacttatcagatgattattatatatatatttcacagaagatatatatatatatacacatagatggatatagataaatgaaaagttctacagttagaaaatcatttgttatctctaataaaggtgtgaagagaagttcaaataactataataaggtaaaaaatatatattacatttttacctggcatcagaattttgttaggtagtaggctgtctttttttaaaaaaaagtaagtatcttgccaacctcccttgaatcggcatactgagatccaaaagatattatttggaaatcaattaaaaaatagaaagatagcctaagaaccataaatttgaggttggagaacctggagaaagagg

SEQ ID NO: 515713 - DNA, 683 bp, Homo sapiens
ctaattgtacttttaacaagactaaaaaatagaaagccaacacaaagagtttggacgtctttcagttgacctaccaataattccaatttttaaagtctcccagactgacttcattaactcttccaacattccctgccttgctgaatggccgcatcatttcacacatagagaccatattctattttcctgcattgtcttcgccactagttgactttttggactaccaccatcattgaacctcttcaagtaaagcctgtcaaaataggtctctcagtctcctgtttttgtttctgttcatcttttaatcattttaaattgctccaccttgctatagaagattgaactttctgaagggcacatttgatagtgttactcctctgcttacagctttataagtctccttatgttcaaaatggggtkcaaactccttggcaatacacagaatcctagccccaccctgtctctgcccactttgtaacatttccttcactccctctccaacaacaaccggccactgtggactgtctgcagttcccctagtgcaccatacccgctgtcatctcgactactgagtgcctgacctcaacagtctctgacaagcccaacctaagttaggatactctgcacttttctttttcacatcatgtgaaggcatttgaattacattctcttgtttactcatc

SEQ ID NO: 515714 - DNA, 485 bp, Homo sapiens
tgccatctggtggtgatgtctgaggctagtggttcatctgtacctggggtcctccctttggtgactagccmcaacatggcttcctttgggtctgcggacccctggggttttgctgtgactcgtctttggtcccagcttgggccatgtgtactgtagtctccaatgtggaatcacttttccccgttgctgtgaaaacctctggccacacaggctgtgggattgaaggcgagcaggtggtctcaggctgcttcttcccacataggatttgagtgtggctgaggagcgttcccctgaacccctccacaccgccactttactatgccagccacattagagggcttcccttccttagctgttggcttccctgtgcctagatgccttcccactctggaattctgacccagaaatgcagggtgagaacaaacttgtctcacagaccagcttctcttacacaagcctcccttctttctgcaactcatgaggtc

SEQ ID NO: 515715 - DNA, 663 bp, Homo sapiens
ctaatacacttgtgtgtgagtaataataataaataaataatttaccatatttaccatgttggcaaattttgggtaagtacattgttcagagacattacaagaaaacctctctaaagtaaaggatgagttattgctctattcaccccctgccattaagagatagaatgtttgttggggatatttgtattttaagtcagcataagtcacacctgagaatattgccctaattcattttccattaggtgacttagaagactagygttaaatagggcccaagtcaagaaaaggctttgcagcaggtccaagctgtggttcaaccttttttgccacttgggtcatacaatcttgcagatccatgagtaggggagaggacactgtttggagtctctagcaaattccagaagaagagtcacagggttctagagcaagaccacaccctcttcagcaagtaactactcatcacttgaaaaataggtcccacttctagtttccagtgtggcatgtaaggagcttagaagtctttactccatctgaatgataataaaaagctgaacaaactgagaaatcaacaactcttatatccattaaagaagtgaggtcacaggaaaacactgccctcaaaactaaagggacagataggtgaatacaaagaatcacaaccca

SEQ ID NO: 515716 - DNA, 663 bp, Homo sapiens
ctaatacacttgtgtgtgagtaataataataaataaataatttaccatatttaccatgttggcaaattttgggtaagtacattgttcagagacattacaagaaaacctctctaaagtaaaggatgagttattgctctattcaccccctgccattaagagatagaatgtttgttggggatatttgtattttaagtcagcataagtcacacctgagaatattgccctaattcattttccattaggtgacttagaagactagcgttaaatagggcccaagtcaagaaaaggctttgcagcaggtccaagctgtggttcaaccttttttgccacttgggtcatacaatcttgcagatccatgagtaggggagaggacactgtttggagtctctagcaaattccagaagaagagtcacagggttctagagcaagaccacaccctcttcagcaagtaactactcatcacttgaaaaataggtcccacttctagtttccagtgtggcatgtaaggagcttagaagtctttactccatctgaatgayaataaaaagctgaacaaactgagaaatcaacaactcttatatccattaaagaagtgaggtcacaggaaaacactgccctcaaaactaaagggacagataggtgaatacaaagaatcacaaccca

SEQ ID NO: 515717 - DNA, 544 bp, Homo sapiens
cagaagggctgaaaccccaatcagtttgatcagtcatgtccaacataatagctccctcattctctggaatgtggtctttactccacctttcccccattccctcattcacatgttaatctacrtattcagcctagctacaggacaactcatttaggttgcctacatgcacaataggtttgactactttgagccactccgttgtcaaaaacaactttttaatcacatttttaataagtattctggttatgtttcatttatgagataacacatacacacataaccactaaaatatacctgtatgtctagattttcaggagatgatttcattatcctcttgaatggaaattggaagccatttgtgtcttttctctgatttatcaattgaaaacaagagactgaatagaaccacattttatttttgaaaaaagagtaacatttcctttataatacagattttgtgttaaaatgtgtagctttctagaccttagacctgtgccgtccagcagagctctttgtgatggtggaaatttctgtatctatacag

SEQ ID NO: 515718 - DNA, 594 bp, Homo sapiens
aatcctcataatgcccctagtcttaaaattattcccatcctatgtgctatattgtcactactttaaaaattcacagaatatagtcttataacaggattgcaaaataccagaaataaatctttcaaaaatatacatttatggatgtagggctgattctaaaataggtatcaaccagcgctgcctttttctgcttgcttcagatacctgaaatacatacatcaaaaccatctgtacacagaaatggggccattgctggaagcagtattcagtattattcttaaagttacaaaaacgtgaactatctataaaatattctgtctgattcttactgaaaatagcccaatagaaaaaatattcatgtatgcatcattataataatcaagctaggataaggtgacaactaccttgggaaagtagagaagaaaaatgtgaaatagaaagtaaaatataaaagtatggttggtgcacgcctgctacattccacacttctatcttgaactgcatgtgccatacaatttagaagtgtgctaagtacaaacctttayagtgactgcaatgatgaagtcgctaacaaaattctcaagtacgtacatt

SEQ ID NO: 515719 - DNA, 566 bp, Homo sapiens
ctttatgaagcactttctcatatagtatcgtatttmatgcttgcaatactttttgtggggtggatattaatttggcaactttgtttataagaaaataaagtccagtaagaaaaggtaatggaccccaggttggagaggtagaaaatggcaaagtcaagattcaaccctaggactttgattcctaagcttggattcttaatcattatgctttactaccacctaacctaatgagaagatgaaaacaaagttagaaacaagtaacagaggagtcagaggagttcacatttcacagtgatctctgtaacatcagtgactgccatgcaagcgagacattgaacaattgacctcttattcttttcacatttgttaatgtataatacactggaaagtcaaatgagcattgtcaagcaccagttttaggaagtgcgttgaaaagcactcttcccacgtggaagagctctctgctagagaactttgtacatttcgtacaggaatgccagttgtaaatagcttccttttcatgtgtacagaaaactgatagacttaaattccaccaggaaatagag

SEQ ID NO: 515720 - DNA, 594 bp, Homo sapiens
gaggctgccactgggctgaatgtctaggcctcaggtgcttagaggccatatggcctatctccaggtgatggctcaacctccaaggcctctccctgtggtctggctctacagcaggggaaattggacttcctctgtagtggctcaaggcatggccaaagatttcaggtctttgcaatgcctgggctcagaaatccagaaacatcactttctccaaattctattggtcaaaatagtcataggtcaaacccagattaggtggcagtgaatgtataaacatgtaagaggagttttaatgcttacagtgtgaaaaaagagaagaaaaggcacyagaccaaacttggctatttcgcagcttgatgtgtagccagcaccaatgccccacagcacatcatttatgagacaatcctgatgttggggatctgggttgtgaaatggagttgtgtaagattttggagtcaggctcagagccagagagactctaactaatacactcatttcctctccgcaactccacatatgtttttaataatcctttccttggaatgaagataaggcctactttaaagcatctgaaaaaaatgtggaaaaatggcc

SEQ ID NO: 515721 - DNA, 623 bp, Homo sapiens
tgtccagtgttaatcagagcctttcctggacattctttcccaccttctatttcatgactaggaatagtaaagcctaagttttcaaatttatgttaaatccaagaggttaaaaaaatttaaggccagttaagtggagaagaagctgtgtaaggaaggcttactagatgtttatatgccctcaagtcaggactctcaagccagcagtatgcagcatcctctctgaagtcttattatggaagagctctctggatgacccaggcaattctatgcatattttaaagagtgagcatttttcataatggctccttctaataaccaacaactcccagcaatgatgaaagtcaccatcatttgtcaagcaatttggtaacatctaaaaacatttccccaagaactgctcccctccaacacaccayacacacacacacacacacacacacacacacacacacactatagtcttcttgagtccactttcaaagccatctctgttgcaaaagccacctctggcaaggagttggaaatgaatcaatcttggcaaaacaggaaatgatttgggaggacagaattaaacttgggtagtttttctttcctttctcagttgtacttttgttcatagcttc

SEQ ID NO: 515722 - DNA, 593 bp, Homo sapiens
gaaagttaaaaacaaacaaatagagtagctatcccttgaacagagtgtccagagaagcgaatatagagaccattctgaagggtatgtgtggtggaaacagtttagaaacggataaaagggagagatggggattgatttgggtgtatccaagtctaatgtttatagtgactgataaatacaaattcatgataccaacatttccactctctcacttcatgcttcacttttacatttgggtcttggtcttggcaaacattcattcttcttctcaaggggcacaaatgggaagagaaagagcctaaactctattttgagataatgatcatccaagctcctggtttcacagccttagtggagataggttggattgctgaaatgtagtgtggtaaatagaaaaatcaaagacagttatttctacatttaagtcattatatatccacttgcaattgttgaacrtgggtaaattgtttatccttttaccatcttgtaagtatggttctgtgttagtctgtccaggctgctataacaaagtatcataaactagatagcttataaacaaacatttatttctgttagttctggaggctgcaatg

SEQ ID NO: 515723 - DNA, 528 bp, Homo sapiens
gtgatccacttgcctcggcctcccaaagtgttgggattacaggtgtgagccactgcgcccagccctctttttcttattaccaactttaagcactttctcttttttgttgttgtttttttttttgagacagggtctcactgtgtcacctaggctgcagtgcagtggggagatcttgtcccattgcagcctcgaatccctgggctcaagtgattctcccacctcagcctcctgagtatctcagattacaggtgcccgccaccacgacaggctactttttttttttctttgtagtagagacgggatttcactgttttgcccaggctggtctcaaaatcccggactcaagcaatccacctgccttggcctcccagagtgctacaattacaggtgagagccaacgcacccagccagcaatgtcttttaatgtcctgttgggaaagacacaaaatttacctcaaagtagaattcctcagaracatacaatgcttcattgccaacgactaatataagtgacattattattttcag

SEQ ID NO: 515724 - DNA, 477 bp, Homo sapiens
ggtctcctagtctccaaaagcctgcacaacacaggataattgttaagagcatgggctctggggccctggaatctatgtctagctcctgaccacttaacgtctgtgtgaccctgggcaagttactaagctttctgtgcctcaacgggaataatggtagtacctatctcaaagagtggttataaagattaaagtgctgagaaagcttctgcccaatacataagtttttgtagttaatatcatctaaatttttttttttgacagagtttggctcttgtcgcccaggctggagtgcagtggcacaatcttggctcactgcaacctccacctcctgggttcaagggattctcctgctcaccctcccaagtacttgggtttacaggcacrcaccaccatgcttggctaatttttttagttgttagtagaaacagggtttcaccaagttggccaggctggtcttgaactcctgacctcatgtga

SEQ ID NO: 515725 - DNA, 682 bp, Homo sapiens
ccattttaaagtgaacaattcagtggctattagtacgttcgcaatgttgtacagccactacttctatctatttctaaaacattttcatcaccccaaaaagaccctatattccactaagcagttactactcattgmcctctcctcctaggccctggcaaccattaatctgctttgtctctctggatttacctattttggatatttcatattaatgggatcagacaatgcaggaccttttgtgtctggcttctttcacttagcataatgtttccaaagttcatccacattgttgcatgtatcagaacttcattcctttttacggctggataatattccactgtgtgtatacactaaatcctgctttttacaacctgaaaagatgagtgacagctatgatttcagtaaccttcagcacataggagtccagtgcctggaccctggaaccttgggttctgatcttgattctgcttcctgctagctattacccttggaaagacagtttaacttctttatgcctcagtttccccatctgtaaaatggtgacaagaataggacctagctgtgaagtattttgaacagtgcctgacacaccataatgctgagccagtgtctgctgacattaccataactcactccataagatgattccaaatctacacatgcgctaggtcataattcataa

SEQ ID NO: 515726 - DNA, 620 bp, Homo sapiens
gtgtaaatatctgcactaatrtttggctagtatgatggtagtaaccaatattttatctaatcaaaaagaatataagaggagtcaagatagttggtgcctggcaccttgcaaaaccattttattgtaaggtgttggtataagtcaccaatctttctgattggtgattaataccaattgatgtatttttccttaaatgtcacttagttttgaatatattataattccatggtaagcaaaagcaaacaaaaaagaacacaactatgcaatgaattattttatctactcaccaataacatgaactttggcaggcagagtaacattgtaggcatcaggtgcaaatacataatcaccttcatcttcagtgagggcattggctatcactaacttgtggatcctaaggaaacaaggaaaatgtatttctaagactccaaagatctagtttatatatgacccaagctgaaaagacacttgacctttatctgattaacttctttagtgcaggaaagagagggagagagagagagaaagagagagagagagagagaggatgagaagccttaattatcctacttattgattcaaattaaatctttattttggactatatggaattatctcca

SEQ ID NO: 515727 - DNA, 620 bp, Homo sapiens
gtgtaaatatctgcactaatgtttggctagtatgatggtagtaaccaatattttatctaatcaaaaagaatataagaggagtcaagatagttggtgcctggcaccttgcaaaaccattttattgtaaggtgttggtataagtcaccaatctttctgattggtgattaataccaattgatgtatttttccttaaatgtcacttagttttgaatatattataattccatggtaagcaaaagcaaacaaaaaagaacrcaactatgcaatgaattattttatctactcaccaataacatgaactttggcaggcagagtaacattgtaggcatcaggtgcaaatacataatcaccttcatcttcagtgagggcattggctatcactaacttgtggatcctaaggaaacaaggaaaatgtatttctaagactccaaagatctagtttatatatgacccaagctgaaaagacacttgacctttatctgattaacttctttagtgcaggaaagagagggagagagagagagaaagagagagagagagagagaggatgagaagccttaattatcctacttattgattcaaattaaatctttattttggactatatggaattatctcca

SEQ ID NO: 515728 - DNA, 620 bp, Homo sapiens
gtgtaaatatctgcactaatgtttggctagtatgatggtagtaaccaatattttatctaatcaaaaagaatataagaggagtcaagatagttggtgcctggcaccttgcaaaaccattttattgtaaggtgttggtataagtcaccaatctttctgattggtgattaataccaattgatgtatttttccttaaatgtcacttagttttgaatatattataattccatggtaagcaaaagcaaacaaaaaagaacacaactatgcaatgaattattttatctactcaccaataacatgaactttggcaggcagagtaacattgtaggcatcaggtgcaaatacataatcaccttcatcttcagtgagggcattggctatcactaacttgtggatcctaaggaaacaaggaaaatgtatttctaagactccaaagatctagtttatatatgacccaarctgaaaagacacttgacctttatctgattaacttctttagtgcaggaaagagagggagagagagagagaaagagagagagagagagagaggatgagaagccttaattatcctacttattgattcaaattaaatctttattttggactatatggaattatctcca

SEQ ID NO: 515729 - DNA, 602 bp, Homo sapiens
tattagaatgaacaatctacactgtaccaattactacaaatcctgctgtgtaatttactgtacctttcaacataacatttcattttaagatttaaaatttctagtttttaattttaagattactcacaaggaacctgagaaaacattccccacctgagcaaaacaaataaactcttatttctaaaagcaattggtgattctcagtctaaatttttttcccctgaggtactatgaaaataaagtgactagsggttacatgaaaaacacatgtaaatatgtacttaaaaatcattgcaaatagaaatcaaatagaaacttttctaaaaccgaattaacacaactatcattagtaagcccacttagaagacatctaaagaagtcttactaaacttactaaacactaaatatgttttttcatgtaagttgccaatatggcatagtgagaggaagcctgctataaaggttaagagcatccataggctttggggtcaaatagacttgggtaaacttgagtcatccacttagtattaagtacccacttccctacgtgcttacccacatagatctctggttcttttttcaatctcatgagtggaaaaacc

SEQ ID NO: 515730 - DNA, 444 bp, Homo sapiens
gctggtggtggcatttaaattcctcaaaaaatgttattatcattccttgagtgcctacaaggttgcagacaacttgttaaagttttttcattcattagttcattaaatcactacaatggcatcctgaagtgactcttatccctgtcttacttgtgagggaattaaagtccaggragattacagcactttgcttgggataggaaatagcctaactacgattagggtggaggctctcacgtctatgcctttgattataatcattgccacatccttggaatgcatcacttacatgcctttatgaccataaagcaagcaactccttcctttcttcttcctagcccctgtctgtcatttatttatgactgtggtggcagaaagacagcatgatatacttattccataggatggcacatctaactttcctgaaagatgcagtagaatgca

SEQ ID NO: 515731 - DNA, 607 bp, Homo sapiens
cagattaaatgttgaatggctattttcaacgctactacagtgtgcatctaggacatttctgagatgaactagctggatttaaaaaaatattggaagagtagaataaatcccagacaacttcatggtaagaggrcatggataccaaacaaatttttctctattccaagttcttatgaagataaggttcttaaatctggcaaagatgagacagtttaattttggtcaagtgcacagtatcaagataatttaactccgttgatctctcaagagatttgctcaatcacagattatagataaaactgaaacacaatgctaaactcacacacacacatctgagagtagcatgtgtgcagtcacatataaagaaatcaaatatccagtaagttcagatttctatatttctgttaagaaacatgggcccctttcaagatcaaccacaaaaaactagttggaactgactgaaaaatccccttcaccccagcctcttgtatatgtgcctgttttctaggactcaattcacttgtctcctctccagtctctcctgctaccctgcatttcagcacaccaggcttctctcttctttctctggccttcctttgaagaggaa

SEQ ID NO: 515732 - DNA, 529 bp, Homo sapiens
ttttcattcataattctaaccagcaggctgacctattcaaactcacatgccagcattacacatatggtaggtggttactaacttgggctctggagtcagagacctgggaccaaaccctggctctgtggccccaggcaaattatgtagcctttctgagcctgattttctcctctctaaaacgggttgataatgcacatacctggtagttttgagaatttaatgagataaactatatgaagcacaaatataccacagtgtcttacacagttacatgtgtaacctacataaataattattattaattttccaacttctgcaaataacacaaaaaagatatgtttttaaggctggtatctttaatgtgaatgcttaaaaacagccaaggaagtctgggcttccttctgtgttcaccattatagsttgattatttgtttttcaaagcaagttttaaaaactgctggaagccttctatggtagttaatacattatcttaagcaatttaatacaaattaatttttacacaaccttg

SEQ ID NO: 515733 - DNA, 630 bp, Homo sapiens
gtgtgggaatgggtttacaaatacagaattgccaatatctgtccttggtgtgaatggtgctcggtgtaagtcactataggacctcaaagaatgtattctagaatattctattagcattggttctaaatttttagcttatatttgagggtgccaaaagagtcccaaaagagagtcctaactatacacactactgaactgcttagtgtgcaccatgcaaatatgatgactactgagcatttcttgcragagtttaaaggtggcttcctgcctagcaccagacatgcttagttctgagacggggaggaaccatcaagtccatgaatcccaatgtcccggatctacagaggaccagacccaaagcatcgaggagaaatgctttgtctttaggtaaagatccttgggggataaaaatcctttattatgttggtggtctctctccctatggcaagggaaacttctttttcttaattttacagcctgataaagacagtgggccaacctcagtagctcatgcctgatctttggggggctgaggtgggaggatcgcttgagaccaggagttcgagaccagcctggacaacacattgaaaccctgtctctacagaaaaatttaaaaattagcttggtgtg

SEQ ID NO: 515734 - DNA, 630 bp, Homo sapiens
gtgtgggaatgggtttacaaatacagaattgccaatatctgtccttggtgtgaatggtgctcggtgtaagtcactataggacctcaaagaatgtattctagaatattctattagcattggttctaaatttttagcttatatttgagggtgccaaaagagtcccaaaagagagtcctaactatacacactactgaactgcttagtgtgcaccatgcaaatatgatgactactgagcatttcttgcaagagtttaaaggtggcttcctgcctagcaccagacaygcttagttctgagacggggaggaaccatcaagtccatgaatcccaatgtcccggatctacagaggaccagacccaaagcatcgaggagaaatgctttgtctttaggtaaagatccttgggggataaaaatcctttattatgttggtggtctctctccctatggcaagggaaacttctttttcttaattttacagcctgataaagacagtgggccaacctcagtagctcatgcctgatctttggggggctgaggtgggaggatcgcttgagaccaggagttcgagaccagcctggacaacacattgaaaccctgtctctacagaaaaatttaaaaattagcttggtgtg

SEQ ID NO: 515735 - DNA, 607 bp, Homo sapiens
ccttttgctagccagaaaaagtggcagcacctaaggaggaggctcccatgattgtgaggccaagtgtcagagacaaggtagcactggctactatttgagagcactcactgatgtacagaagactttccagtgattctagaaactcaaggggaagaaaaggaaatgcaagttttaggaaagccttcaaggcagaccagtatgctcaccaaggtcttctcccagaatgcctccacaggatgatattcattgccttgagagtagatcatggttcccaaaaggacaaactcagaaattggatttttgtcaggatcttgagaatgaatccatatctcacattatacaagctaaacaaactaatatgtaaaatcagaataccaatayttttttcacaatgagaaattagtatcaaaggggccagaatatataaagtccaatagaaaacaaggattaaatagattttctgtattctggcccctttgaaagccattgttttctgactctatagacaactcttcatggagagtcagttaaaatgtacttaaaagcaagtaatagaaaacccagctcaaatttgtttagacaataaagagaatttaattactttata

SEQ ID NO: 515736 - DNA, 615 bp, Homo sapiens
taagtgcttgtttttaagttaaattatgaaagagcaagtattgtttttctgttgtaaaagagatagggtcaaacaccctaatgacacacaaagaagacatatgtccacatttgggctcgaggaacagaatggaggtgcccccctagtctctcacaatgccctgctttaaggtgaggatctcttctttaagctggcactgctggagaccatttaaattgtgctgctggtgagagacctccaatgccctgactcctcatatacttgtaactaggagttgacagagatcatctgacccagttggtctgaaacaaggyacagccttgccagtgcaaaaaattattctactctcagtgccagtcttctgagaagcttgcatatcagcattagtgccaaccagtagaactcttgcctctctctgcagggccagctcattactggactatttgagggaaagttgctggaggcatccagtagagaaattggcttgtctctcctcatgatcttacatttaagggcttagaggaaacttcactatagtccccaagtactgactgaaaatattgatcatatttcagaaaaaaaaactaataggacagagaaaaatacatcattggc

SEQ ID NO: 515737 - DNA, 668 bp, Homo sapiens
cttctgacccgcaaaactctgaactaggcaatggggaatgttttaagccatgaagtttctagtaacttgttatccataataggaaacaaatacaggaatgtacaggatttgtgtttataaagtgtgtgtgtgtgtgtgtgtgtgtgtgtgttatgcatagctagttcttcaatcttagatttcacattgggctattctgattttatgggtcagttatctcatttgtctgccaagttctttgcagaagcactttacatatatttctttgtttaatagctccatttagtctattactagccccattttccagatgaggaaactgagccacggagtttacttccccgtgataacacagctagtgcatgtcacggtgagtgmgagatggtgttggaacccagacctgtgtgtgccaataaccccttcttccgtaccacacagcacttttgaataacttcatggctagctgacgatttgggtaatggactttacttataaatccaatgagactacaggagatggttgcaagaaaaaatgaggagtctaaaagtagtctcttttaaggccaaagctgtgcacctcttctgttggggagcagcagccttctgatctcagccttttgtgactttcttgtttatttatttgctgttggtcccacccaaggctctgga

SEQ ID NO: 515738 - DNA, 576 bp, Homo sapiens
tgacactgagtcaaagttctggcctctccccaaatgcccttggaccgactttgttcctgtaactgaatttttgctttgttctctccactgtggttctgagtagcaaagtggccttgttccttgtcccaagtcacctaatactatccaagattgacacaaggacaggttctgagctgaatactctttggctgggaacccatctacctggctctaccccagaacaagtctttgtcttcctctggtctatagtcagaaggctggacctggcagcaagacccattccctgtgtcctgtgtgcagtccagcatctcttgctttggggaaacmctttgatatggtttggctgtgtccccacccaaatctcatcttgaattgtagctcccataattcccacgtgtcatgagagggacacagtgggaggtaattgaatcatgggggtgggtctttcccatgttgttctcatgatagtgaataagtgttatgagatctgatggttttataagggggagttcccttgcacatactcttttgccctctgccatgtaagacatgactttactcctcattcaccttccg

SEQ ID NO: 515739 - DNA, 268 bp, Homo sapiens
cccgtttacagcacactgggtccagccccctgcatcctggaaggcccaggtttccccactccccttaactctccctgcctgcacaaggcctgggcttcactcaccctcttccctcaagatrggcatcttggtgatgatgcagcaccctggggagcccacctgtattctcttggccaggtgcctggagtgcaacacaacatgtgagagtgagaatcttcccagaccgcctgctatggactgaattgtctctctaacccccagtgtggtg

SEQ ID NO: 515740 - DNA, 621 bp, Homo sapiens
tgagttttgtctcagcaggatagaataagcaaatccatgaactggtcttctattaatactttgattctaaaaattatttgtttacttgctatggtctgttcattctgggcctaaccttaaaggctcaataacaaatacaacaaatgtaaatatgtttacattttaagacatatgcagtggttcttacagatcagttaattaactccagaaagcaaatgttagactacacatttatttttctccttgatcaagtrtaaaattctgaaacagaggctttaaaatttaaaacctcagcaaaataatccatgaatttactgattcttctgtatcgtgtgtagttaccattatgtaactatacacacatacagctacggatataatgaaaattatctgcaaacacctaaattaaagagaaaaaaaagtagtttgtaaactcatttgtgatctactgaaaagaggttatattaaagcaaattaaaatattttccttctctgtcctctgaaatgactgcagtagatactcttagttatcccatttagggtggttggagggcctttttaatttaattgaccccccgaggtggtcttttgttttaaacagggggcaacagctggatctcc

SEQ ID NO: 515741 - DNA, 548 bp, Homo sapiens
ttttcttttacaaaatagatccgaatttgaattattattaccttatgcaatgtttttcaaccgtatttacagtaattatccagactttctacattaaattaatttccatacttatcaggacttctatagcctgcacatcactttaaaatattttactttgactaatcttccagtcatctgtagtacatctctgaatagatttttttcagataaaatgtaattcttcacagtctctatataagagagaattatttctatgactttcacacatgacttaatgcagaattattgactcacacatagtctttacccatcagtgtattaagtataccgccctatcatatcctrttactctgtgccactcataagaaacctgactttgtgggaatttttttctttttcttcctgaaaatctgtggtattctttatttttgaaattcacagtttcactagtttacatctagttattaacactttttgttacttttgccttaatatggtagagccttttcatctgaagctttgggattttctccagctccagaaaa

SEQ ID NO: 515742 - DNA, 378 bp, Homo sapiens
agctgcagcatacagccccatgttcccgcgcgcctttacggctctgtggcaaaacgcacccggctcggcgcccgacccggacttccggggtcaaaaagcacgaccttccgggaccggaagtgccggtcgaagtcgccctgcaaggcgtgtgtgtgatcgcgcacctgccggggtagggagtgcgacgctgcagcccgtttcgccacttcttctctrgttcttaagtttttgccaatctgatgggcaaataatgggattttactgctgtttaactgaagttactgaggttaaatatcttcacatgtgtattagtcattatatatatatatatatatataatttttttttgacacagagtctcactctgtcgcgcagtgt

SEQ ID NO: 515743 - DNA, 685 bp, Homo sapiens
tgcctcctcgcccagctaccctttggccccattgggccctcgtctgcctctccaggattgtatgtttcaagccttgycctgtgttcctttgtctgacgctctgtgtattgctctttgaatcgagtttggaggaagagttgagttgtatgagtggcggcatgttggtagtgccggacttcctgtttcaagttttctggggcctcgctaattgaatgtggaaagtagcaccacttgacggctacaagtgccgactcctgaattttcccatggtgttctgacttcaagggctggcagccagggagaatgggcccaggggaagcaaagacctcttccctctgccgtttctgtcccacttaactgacctcactggaggctacatcacccaaagtagatgttagaaaacctaaattaatgaaccatatttttaaaatcctatttttcccaaacagggccctctgcagcccagcctttccttccgtccttctgaaaccacataccccaggcccaagcgccttgctgccacgcccaacctctttgggagaagtatgaatgcgtgtgtctaaattaaaagaaaaaaatatttaaacgttttttaacaaaaatttatttttgtatttaagctaaattgccttttaaattccttcaagcttggttcattgaggtggttaagtataaatgctattaa

SEQ ID NO: 515744 - DNA, 583 bp, Homo sapiens
taaatacctgttaggattggagggtctgggtgggcctgggcctagcaatcaagcttctacctgtaccttatgtaaggtagaccctcctagtgtcagcacctgagctagtttacctcagttccgcaggcaggacagccggtccgggaaccctgagtgagtgtgagtgtggatgtgtacagtacacgcactggacggcagcgggaggctgggactttccattacaaatagagacttcattcctgttgagtctagttggaacttttagtatgaatgtgagatttttctcctgcttgtgacattaagaataaaaaactgtgatctatcgtagagtacgttctgcattttatttttgcaggcaacactttgctcaccagcaagaacacagcccaaggaagggacccaataacctttcaaaacccaaactgcttcctgcggtgagggcccagggtcctccacggagaggacaggcatcttcctttcccaccaggaaggagtcagccyggagcctctgctatgtgcaaggcggtgtgcaagcaccggctgcggctctttgctgtctcttctttctctttggggctgggct

SEQ ID NO: 515745 - DNA, 426 bp, Homo sapiens
ttcaccaggatcttgcctgaggttagatgggagagaacagctacaagcttgggtggagtcactcataaacacaccctgaaagctgtggagcagggagagtgcaggctttagagggctctccatgatcccttcccctcctgggggctcaaaggcaagggtcaaagatcttctcggtcaagtttggggtggcttcctgtcttggtcatcttgtctcccccttcctcttcctcctcttcctcctcctcctcctgctcttcctccccttctgttttctcttccccatctgtgatctcctttccagtccaagtttcctgtagacatgctagatcggatgacagaaaacaatttagatattagtcctggaggcaggggaggctatggcttggcaggagaggagttcaacmcttacgcttaccagtttcagca

SEQ ID NO: 515746 - DNA, 540 bp, Homo sapiens
gctacaatttctgactgcaataaatgtgggtgctagttatgagttcagattcagtaaagggagaaggtaggcatttactcttctccctcaggacataaagagacattttgtatattaaattgtgtttccaagactaatagcacctgccaaaattgcacatttgtaaccaggaagtagcccactcttctacgagagccagtttcaatatgtaattagaattctgcttcctcaactccatagtctatcattagaagtatttctagctgcatattgcaaacactattctgtttagtatacgtggctttcttgaatgttttgttctgggaaccatttaccattgatttgtgtccaggtgcatttatcatgttagcccagcacagtaattaaatggctaaagtcrtgctgtgtatgaatacactgtgctcattattaccattttacttaattcagcatcatctgtagacttctaaatattgctcctacatcataatctggtacatcctcaataacaatcttgcaatgtaaatgtctttcatttcc

SEQ ID NO: 515747 - DNA, 654 bp, Homo sapiens
aaaatggccagaatattcctcaccttttagatttttcacatgagaagcaataggtttgtctcacaagytatagttcaaacaagcttgtggaagaatgtttcaaagcctcacttgagtcatttaccatttcaaaaacaatatattctcctcccctttggacaaaggtaaattttcattaaaattatggggaaatcattcttggaagcccaaaccaaaggatgataccaagtgttcctaaaatgaaattacgtgatagaaataatataagattgtggaagtgagagccaactttccaccctcagcttgaactggaagagatgctgcactgagacataataaaagtaccaaaaaccacccataaaaataaaagaaagcaaataaagatataagatttaaaaataaatatacatatacaaatggaaaactatgaacttaataaataatgcaggccaagcacagtggctcacacctataatcccagcattttgggggactgaggtgggtgactagcttcagcccaggagttcaagaccagcctggaccacataatgaaacctcacttcaacaaaaaatataaaaattggctgggcatggtggcacacctatagtcccagctactcaggaggctaaggtggaaggattacttgagcccaa

SEQ ID NO: 515748 - DNA, 654 bp, Homo sapiens
aaaatggccagaatattcctcaccttttagatttttcacatgagaagcaataggtttgtctcacaagctatagttcaaacaagcttgtggaagaatgtttcaaagcctcacttgagtcatttaccatttcaaaaacaatatattctcctcycctttggacaaaggtaaattttcattaaaattatggggaaatcattcttggaagcccaaaccaaaggatgataccaagtgttcctaaaatgaaattacgtgatagaaataatataagattgtggaagtgagagccaactttccaccctcagcttgaactggaagagatgctgcactgagacataataaaagtaccaaaaaccacccataaaaataaaagaaagcaaataaagatataagatttaaaaataaatatacatatacaaatggaaaactatgaacttaataaataatgcaggccaagcacagtggctcacacctataatcccagcattttgggggactgaggtgggtgactagcttcagcccaggagttcaagaccagcctggaccacataatgaaacctcacttcaacaaaaaatataaaaattggctgggcatggtggcacacctatagtcccagctactcaggaggctaaggtggaaggattacttgagcccaa

SEQ ID NO: 515749 - DNA, 654 bp, Homo sapiens
aaaatggccagaatattcctcaccttttagatttttcacatgagaagcaataggtttgtctcacaagctatagttcaaacaagcttgtggaagaatgtttcaaagcctcacttgagtcatttaccatttcaaaaacaatatattctcctcccctttggacaaaggtaaattttcattaaaattatggggaaatcattcttggaagcccaaaccaaaggatgataccaagtgttcctaaaatgaaattacgtgatagaaataatataagattgtggragtgagagccaactttccaccctcagcttgaactggaagagatgctgcactgagacataataaaagtaccaaaaaccacccataaaaataaaagaaagcaaataaagatataagatttaaaaataaatatacatatacaaatggaaaactatgaacttaataaataatgcaggccaagcacagtggctcacacctataatcccagcattttgggggactgaggtgggtgactagcttcagcccaggagttcaagaccagcctggaccacataatgaaacctcacttcaacaaaaaatataaaaattggctgggcatggtggcacacctatagtcccagctactcaggaggctaaggtggaaggattacttgagcccaa

SEQ ID NO: 515750 - DNA, 587 bp, Homo sapiens
ggctcaatggaaagaaggacgctgattgatgagtctgcactgatcagtgagaagggggttgttttattatttggctatttatttactttccagtactgagggttaaygtgtttcctcttagaaaaagaagcattgaatgaaaaccaattaaaaaatcatcaaataacagataatttttgttccacaagaatgaatttctagtggttaatttcaggcagaattatggtagtgttgggtcagagcctccttaaaaatatgcttcacctcaaatcatgtgagtcaacatttttcagttttaggtattaattttaaccaatataatctgtgatttttaatccaaaaacgtggttttctgcttgccttccacttggatctgcctcatctcctgcatgtttatttctgcttaacctttgcatgacaacattaaccaaaggggggttttaggagcacaatatgcatataaattttttgtgtgtgtggtggggagtcagccaaaatcacagatttccagccttacacaatagaagatcttcaatttgaccagcccttcccacccactgtggtgagtattctcttttacagccatc

SEQ ID NO: 515751 - DNA, 587 bp, Homo sapiens
ggctcaatggaaagaaggacgctgattgatgagtctgcactgatcagtgagaagggggttgttttattatttggctatttatttactttccagtactgagggttaatgtgtttcctcttagaaaaagaagcattgaatgaaaaccaattaaaaaatcatcaaataacagataatttttgttccacaagaatgaatttctagtggttaatttcaggcagaattatggtagtgttgggtcagagcctccttaaaaatatgcttcacctcaaatyatgtgagtcaacatttttcagttttaggtattaattttaaccaatataatctgtgatttttaatccaaaaacgtggttttctgcttgccttccacttggatctgcctcatctcctgcatgtttatttctgcttaacctttgcatgacaacattaaccaaaggggggttttaggagcacaatatgcatataaattttttgtgtgtgtggtggggagtcagccaaaatcacagatttccagccttacacaatagaagatcttcaatttgaccagcccttcccacccactgtggtgagtattctcttttacagccatc

SEQ ID NO: 515752 - DNA, 463 bp, Homo sapiens
cagatatgttttaacttagtgctccccactgttcaaaagagcagtttgtgtkttggtttttcttttttaaaatcatagttgcaaatacatggggtcatctttgacttagcctgatagatatcttaggcctacctcctcttggtaattgaagtttcatgtagtataaaagtaaccaatatttaaataggacattttgacatgattttacatatgctgtcttacttgttgcaaaaactgggttatgtgatatgcccattttacagaggaaactgtgatcacacagtaagcggtgacgtagaaatctctgtcttctcactccagtttatctatacttttccctgtcctacactagttcccaccacttcaggttcctcaggttttctatttcatccttcctatcaggccacttccctgatttttttgtgttatggctagagacaatctgtcatagctgagtggcatc

SEQ ID NO: 515753 - DNA, 618 bp, Homo sapiens
gctggggctacaggcacgaaccaccacggccggctactttattttttatgtttggcagagatgggggtctcattgtgttgcccaggctgggtcactcattgtctgacttaatttctgagtgtctatttcctgagatggggacaatggcttaacctatttgtaaagacaaggtacaggacatatcggggatcacatgggaatcacaaagccatcatgaggtgacacctgccatttgtcttatactagaattagttgagtgggaatgggactctgccttaatccatgaactccctgagggcagggacagtgtcccacagggcctarcccagtgttcagcgcagagcggcatcgtatgctctgtggacactgtacaaatgagaagaaacgggactgtatcatttacctgtaatgtgactttggggaggcgacatcatctcttttttttcttttttttctttgtttgagacggagcacggagtctctgtcgcccaggctggagtggagtggtgctatctcggctcactacaacctccgcctcccaggttcaagcgattctcctgcctcagccacctgagtagctggaattacaggcgcccaccaccacgcccggctaatttt

SEQ ID NO: 515754 - DNA, 540 bp, Homo sapiens
cagggcctcagtttccccatacatagggttggtggatttagcaaatacaaatccaggatgccccattaaatttgaatttcagatacacaatggctttttttagtataagtatgtctcatgccatatttgtggcatacttatactaagagattattcataatgcttatctaaaactcaaatttaactgggcatcctgggttgaccctacccatatgtaaaacaggagaggcagggaggtatgaataagatgttctccagtggggcatggtggttcatgcctctaaccccagcgctttgggatactgaggtgggaggatcgcttagacrccaggagtttgagaccagcctaggcaacaatatagtgagaccctgtctctaaaaaataaaaatataaaagatgctctctctcatgaatgctcttagctccagctacaccctgtgaaaaacctcaggtctacctgaaagtggtccagagatgtttgtttgtatcccttgcagaggaagaggagagctgggggaagataggaagtagggtgcagg

SEQ ID NO: 515755 - DNA, 540 bp, Homo sapiens
cagggcctcagtttccccatacatagggttggtggatttagcaaatacaaatccaggatgccccattaaatttgaatttcagatacacaatggctttttttagtataagtatgtctcatgccatatttgtggcatacttatactaagagattattcataatgcttatctaaaactcaaatttaactgggcatcctgggttgaccctacccatatgtaaaacaggagaggcagggaggtatgaataagatgttctccagtggggcatggtggttcatgcctctaaccccagcgctttgggatactgaggtgggaggatcgcttagacaccaggagtttgagaccagcctaggcaacaatatagtgagaccctgtctctaaaaaataaaaatataaaagatgctctctctcatgaatgctcttagctccagctacaccctgtgaaaaacctcaggtctacctgaaagtggtccagagatgtttgtytgtatcccttgcagaggaagaggagagctgggggaagataggaagtagggtgcagg

SEQ ID NO: 515756 - DNA, 496 bp, Homo sapiens
agctgtgctggcaccagtcggggcttccgaaagaccctggagctttcccgtgggctgtccctggggggcccctatgtgactccgctcgaaacctcctcccatctcaacccccacatcagcccagcttctctcctcccagattttgaacctgagttgatgtataagcagccgggattttcatatacgttattgtgtttaatctcacacagcaacctttcccatgtgggaatggtaatccctgcaggtctgctgccggctgcgctcccctactactcacccaacactttgagaacactggctccttcctgccttgcttcaacaagcccagatccattagagcctctcamtgcacgccaagcaccttcctagacgcagccgtgaacaaaacaacaaattaatctcacaacaaaggattatgtccgagtatttattttcttcggaacaggttaggttggccccagtcatccagagaaggtggggacggtacaggatcagg

SEQ ID NO: 515757 - DNA, 496 bp, Homo sapiens
agctgtgctggcaccagtcggggcttccgaaagaccctggagctttcccgtgggctgtccctggggggcccctatgtgactccgctcgaaacctcctcccatctcaacccccacatcagcccagcttctctcctcccagattttgaacctgagttgatgtataagcagccgggattttcatatacgttattgtgtttaatctcacacagcaacctttcccatgtgggaatggtaatccctgcaggtctgctgccggctgcgctcccctactactcacccaacactttgagaacactggctccttcctgccttgcttcaacaagcccagatccattagagcctctcactgcrcgccaagcaccttcctagacgcagccgtgaacaaaacaacaaattaatctcacaacaaaggattatgtccgagtatttattttcttcggaacaggttaggttggccccagtcatccagagaaggtggggacggtacaggatcagg

SEQ ID NO: 515758 - DNA, 407 bp, Homo sapiens
cctcccgccccaaacaaagtcccccgactstaggtccaggatacgttacctgcccggcgctcccggcccctcggtcaccgcatcccccgctggcgcgcctggtacgggtcccgctccccggggctcacaaagtggtcgcccctggctgggcggctgggtagatgcccctctctggacatgttggggcggtttttggggtggagggaacgcgggaagtgaaagcggaggctgggacaaggggaacttactgataaaatggaaaaaaaaaaaagccaacagggcccaggtcctgccgggggcgaaagaggcctgttacctttcggggggtcgcggccgaccaagaagggagccggggagtcgcccgcccccctcccccggcccccggccccggcccccggcggctgcgg

SEQ ID NO: 515759 - DNA, 609 bp, Homo sapiens
ctgataaaaaacaataggaacagtaaatattttttgagttcttagagtctaccatccttggttgagaatggtcttggactatttgaggtcttcaagaacacctccctctcaattattctgtgctaacttaatgggacaggtgtcattaagacgttgactactcttccaagccttcctcagactcactaagatcctgtgattttcaagtttctcccagccatctaccaaggcaatgctggggaaacatctctgagcttaccccagctcagacattcaagaatgtcatgccattcttgaatccttgtagttaagaggacttatcacctccccaaaaccatgctcactaaattttgatctatgatgtgctgacttgttccatctttgwacagctctaactcctagaaaatgttctatatattcatttgagtatttttttataatttcaaaccacttaactcttttgtcatttgaagtcaaacagaaaaaattaacatgagcctttaaagtacttcagaaaaaacatatactttcccaagagcatgatggtggaaatgatgaaggtgtcacccagacacaagctcactcttagtttgcttcttgcctgtgcta

SEQ ID NO: 515760 - DNA, 616 bp, Homo sapiens
gtggtagtaacagggtacggaaccaaactcaaaaatggatccctatagccccataacagttctctcaaagttctgacttggaacatagaagattttgacttgttaataagtgaattgaggatcatttgaacaaattgattttgatagatatgggatgcagcctacaaaaacaaagtcactgtttaagacaagaatacaatattagattttaacaaataaatggattaaatgctaatattgagcttaatacaaaactttttaaagcttatctttaaaattactgccagatcctgccaaaactcaaaatgcaattcgtctaattcctagatgattacatttctttgcctcagtgccagccacaaraagacgacattccaagttaagctctatttatttaacgatacacttaaagtggtcttctcaaatatctaatgcattaaggcatacggggcttaaaacctagatgatggtttgataggtgcagcaaagcaccatggcacatgtatacctatgtaacaatcctgcacattcagcacatgtatcccagaacttaaaaaaaaaaaaagccataagtctggtcccaaaggcgctggagccacacgtgacagaaatggcg

SEQ ID NO: 515761 - DNA, 616 bp, Homo sapiens
gtggtagtaacagggtacggaaccaaactcaaaaatggatccctatagccccataacagttctctcaaagttctgacttggaacatagaagattttgacttgttaataagtgaattgaggatcatttgaacaaattgattttgatagatatgggatgcagcctacaaaaacaaagtcactgtttaagacaagaatacaatattagattttaacaaataaatggattaaatgctaatattgagcttaatacaaaactttttaaagcttatctttaaaattactgccagatcctgccaaaactcaaaatgcaattcgtctaattcctagatgattacatttctttgcctcagtgccagccacaagaagacgacattccaagttaagctctatttatttaacgatacacttaaagtggtcttctcaaatatctaatgcattaaggcatacggggcttaaaacctagatgatggtttgataggtgcagcaaagcaccatggcacatgtatacctatgtaacaatcctgcacrttcagcacatgtatcccagaacttaaaaaaaaaaaaagccataagtctggtcccaaaggcgctggagccacacgtgacagaaatggcg

SEQ ID NO: 515762 - DNA, 576 bp, Homo sapiens
agctgcatagccctttcaccagtggaatgacagaaactcatattaaatgagttrtatttacagtgatattagcacttcaaaaatggcttttttgtcagcaaaaacataagaaggcctacagcaattacaggattatgttcctcttcaggatataagtcatgtcccagaaaggcagataaaattaatgtctcttcttctgctcagttgaatatttgcttttatttttacctctatttcgaatctttgctaaggaaaggaagactttgtcttggatggtttagttaacaacatggcttatgttatgttttatgactaattaaaatggaactgaaacttgcaggatggtgttacaaattagtatgctcccatttggacctctcgtcttaactcagcaggttgtgtcttaatcctggagctctaggcactttcacgtggttattgattgaatccacagattcagtttcatacagcaaatgacactatgtagtcagcctcttaattacttaatgcagtatctgtgtgtcatgacaatatgcacattaaaacaagtagtgtaaatatagctgaaatgagcct

SEQ ID NO: 515763 - DNA, 628 bp, Homo sapiens
tgcatagccctttcaccagtggaatgacagaaactcatattaaatgagttgtatttacagtgatattagcacttcaaaaatggcttttttgtcagcaaaaacataagaaggcctacagcaattacaggattatgttcctcttcaggatataagtcatgtcccagaaaggcagataaaattaatgtctcttcttctgctcagttgaatatttgcttttatttttacctctatttcgaatctttgctaaggaaaggaagactttgtcttggatggtttagttaacaacatggcttatgttatgttttatgactaattaaaatggaactgaaacttgmaggatggtgttacaaattagtatgctcccatttggacctctcgtcttaactcagcaggttgtgtcttaatcctggagctctaggcactttcacgtggttattgattgaatccacagattcagtttcatacagcaaatgacactatgtagtcagcctcttaattacttaatgcagtatctgtgtgtcatgacaatatgcacattaaaacaagtagtgtaaatatagctgaaatgagcctggctgaggcaatttttataaaagctactctacgtgaatggaaggtgtctcaaatt

SEQ ID NO: 515764 - DNA, 626 bp, Homo sapiens
tttgttctgtgaccaacaggggaagtacctaaaccgtgacaacatagacttctccaactagtattcaggataccatgtgagaacactctcatattaaaataatcataacacaaaaagatatggtgttcaattattaatgagattcatctctttgagttaaattgtgataggttatattgatagtgatttggaattcaaattcatatttttaaataaaatcatcagtatactttcttgctgctaagatgaactagttagaaacttttttgagttgtcctgtattttggaaacattgaaaaggactttactataacttattgtctactgactccatggatgaattgagtattgtaatgctttatgtatcaataccttttttcaaagtttttcagcttttcacatgtgttcgataacatttaacttttctatggtggattatattaactttttatcataaattttaccatatattttttaaattgtattttaattttaaaaatttgaaaatgcctttttctgttttcttttttagctcagttttcaaaggatcagccgtgtgtgtgtatcatttatctgatatacagactgtktttaatgggccttttgcccacaaagaagggcccaat

SEQ ID NO: 515765 - DNA, 469 bp, Homo sapiens
tcctctcaccaaccctcaaccttagtagagaggagatgagtggttttcgggattggtggagaatattccatttttagaaaaggaagtggaggttgggctaaagtccaaggctgcatgtagttcctaataaagagcaaattgttgtaaaatggcactacttggagcttccaatgcctggcaggaggtaaccatgagcctaagtrgcacctgaaagagttaaatttacattcagctccaaaacaattttaagttatttcttgtcaaatcaaatgcttccaaatgacttctcaagtcagaaaatgccaagcattaccacgtgggcttgctcagcaggcagaggggcccgcaatgctgtttgacggcattctgcacacagtggaagaaggaccatgtcgcattcctcctaatctgatgaatccttgccataaattcagcccaggcaaccagtggggtggctgctggctcacag

SEQ ID NO: 515766 - DNA, 469 bp, Homo sapiens
tcctctcaccaaccctcaaccttagtagagaggagatgagtggttttcgggattggtggagaatattccatttttagaaaaggaagtggaggttgggctaaagtccaaggctgcatgtagttcctaataaagagcaaattgttgtaaaatggcactacttggagcttccaatgcctggcaggaggtaaccatgagcctaagtggcacctgaaagagttaaatttacattcagctccaaaacaattttaagttatttcttgtcaaatcaaatgcttccaaatgacttctcaagtcagaaaatgccaagcattaccacgtgggcttgctcagcaggcagaggggcccgcaatgctgtttgacggcattctgcacacagtggaagaaggaccatgtygcattcctcctaatctgatgaatccttgccataaattcagcccaggcaaccagtggggtggctgctggctcacag

SEQ ID NO: 515767 - DNA, 469 bp, Homo sapiens
tcctctcaccaaccctcaaccttagtagagaggagatgagtggttttcgggattggtggagaatattccatttttagaaaaggaagtggaggttgggctaaagtccaaggctgcatgtagttcctaataaagagcaaattgttgtaaaatggcactacttggagcttccaatgcctggcaggaggtaaccatgagcctaagtggcacctgaaagagttaaatttacattcagctccaaaacaattttaagttatttcttgtcaaatcaaatgcttccaaatgacttctcaagtcagaaaatgccaagcattaccacgtgggcttgctcagcaggcagaggggcccgcaatgctgtttgacggcattctgcacacagtggaagaaggaccatgtcgcattcctcctaatctgatgaatccttgccataaattcagcccaggmaaccagtggggtggctgctggctcacag

SEQ ID NO: 515768 - DNA, 631 bp, Homo sapiens
gactggttttagattctgggttctgtttcagggaggcatttctgttttcttattgccttccttctttctattccatggaggtcagttccatttcaaaaaggatagtatttaaggttggttttctttatagtaagggattttcatgccacctcatcatgaaggtatttattttgctaagtaaagtaaaaaaaataaaatgatactaagagatgcttgccaaacaaagcttaaaaatayaaatgaagggtcagacatatatgattgccataatccacagacttttctcaattcaatagagagagaagtgagttttcatactcataatcataggcttttaaaattagctcaggaaattaacagtttattatggtcctgttaatgttattactattattcacaacatcctcctctctctatttttctcaggtttatcaattggtctactgtaacttcatttttccagatggatagtgggtataataaatagctttagcaaaagctttaaatgacaagtttaaacataatattccaaatgaaaaaaaataaggaaatggcacacatgcgcacatgcacatacattcacaggtggctttttaacatggatgtagaaaggtgtgtatgaagtggggag

SEQ ID NO: 515769 - DNA, 397 bp, Homo sapiens
atattggtgtcaagatgaccagtaggttgccatcaatttggtctgttgcctagtgtcagttattaaatccatgctttgtttcaaatgttttgtttaaatcccgtattatcatgcttcaagtcattagtaacagttggaaacagcaaagaagcatgagaagcagtcttgcactctcraaatgagtgtaggccacaccctctgattagtggaaactcattgaggaagtgcagattggggtcatctttgtgtgagtgtgtccactattacgcatccatgtgttgaggctatagtccctagggctgtaggtgtggacctaggcgtacaaggtatagatgcagactccagaagcagaccatgttctctgtccttaggggcacttggagcacatggacatcat

SEQ ID NO: 515770 - DNA, 574 bp, Homo sapiens
tgtggggctttttatctgcacatccagsaatgagtatgaggtagctgcaaagtggacggtggacttgagaaggcattctaaagaagaaaggtatttcggactccttcagatgataccatttgatagatgctcacatagccaatgtctttgaggtgtgtgtaaaatgtgcagcttgtggctaacatagggttgcagagaaaggagaaatagaagaaaaatgggggaatgttttctacttgtactcccatgagccaagaaatgtgaagtggatttttttctttctaagcagcgggggattctctcccttttctatcatttccttgctcatcctttcaaggaagccatgtcgtgtgctttattgttttacagtcatggtgaaagaaacccttaaaacaaactctttgctttaaagctttatgtgtttctgcaaacaatgatgcttcttagacagtgagggttcagagtttaagggacacaagaaagtggagccttttaatgctcccagtgtgcagtaaacatgctggaatttcaatggattccaaagcgtaacaataatagcattaagtacatgcca

SEQ ID NO: 515771 - DNA, 610 bp, Homo sapiens
gggctttttatctgcacatccaggaatgagtatgaggtagctgcaaagtggacggtggacttgagaaggcattctaaagaagaaaggtatttcggactccttcagatgataccatttgatagatgctcacatagccaatgtctttgaggtgtgtgtaaaatgtgcagcttgtggctaacatagggttgcagagaaaggagaaatagaagaaaaatgggggaatgttttctacttgtactyccatgagccaagaaatgtgaagtggatttttttctttctaagcagcgggggattctctcccttttctatcatttccttgctcatcctttcaaggaagccatgtcgtgtgctttattgttttacagtcatggtgaaagaaacccttaaaacaaactctttgctttaaagctttatgtgtttctgcaaacaatgatgcttcttagacagtgagggttcagagtttaagggacacaagaaagtggagccttttaatgctcccagtgtgcagtaaacatgctggaatttcaatggattccaaagcgtaacaataatagcattaagtacatgccagagcctttgatgttattgatgaaaaaaaaaaaaaaagtag

SEQ ID NO: 515772 - DNA, 493 bp, Homo sapiens
tttttctgcattgaagaagggagttggactttagcactcagtcctgagtttatttggggagtgtggccctttcctgattttcacttcctgaggacctctggctttggataaagaaacagtgtttattctttggggacaaagatttttctgaaagctcccatacaggagtgttctctagctcttaagattccccattaatgtgtttgtttttccttttgtaaatttgttacattagcatttaattactcttcatgacagtattaaatttcatgagtgatttatagtgatttatagttataatagagacttgtatgatttattacagttgrcatttgaggtttaccaaattcttaagagccataagcactgaaattgcttaatctgaccctgtccagaacaaccacagcatgtgtgaaaacccaaatttaagtataataggaacagctgcaccacccaccccatttttatttgatgttactgtctacgattgtgg

SEQ ID NO: 515773 - DNA, 627 bp, Homo sapiens
tcactagacttaataaagtctgtgaggaagtgaccagaaatgacctgacactagataagaggaatgtctccaaatttctgattctaactggtcacgttccatgatcttagtagacatggcgattatagccataactgtaaagagacaagaaagaagttcatttggaccacagaatagtcagatcagtttccaagtggggcagtgtattaccactgtgtttttcaacattcgttgactttctgtacccaaggaatagttttctttttgttgttgttgtttcattgtttttttgttttgttttgtttttggtttttaagacagagtttcgctcttattgcccataaggcaatggcgctatctgggctcaccacaacttctgcctcctggttcaagcaattctcctgcctcagcctcctcagtagctgggattacaggcatgcaccaccacaccaggctaattttgtatttttggtagatactgggtctctccatgttggtcagtctggtcttgaactcccgacctcaggtaatccacccgcatcagcctcccaaagtactgggattacagacatgagccaccacgccaggcrgaatagtttttcttttacggtttccagcaaggcccag

SEQ ID NO: 515774 - DNA, 512 bp, Homo sapiens
ttaaaatttcaaaagtcagagagcacagaagaagcagagggagatctgggaggagaagactttaggatcttccacagtccgtgacatcagactgtgttgaccacttggtgcaaacaagtggcaccttggtggtataggcgaccgttgcctaagttgtgcctctttctttctgaccgggaagacactagarccacgatggcatcattttatatgctgttccaacttcttgaatcatgatgatgaggctccatgcaggactcagagcagagctcaactgattagcaatgtctactgtgggtacaagagtagtataacattcttgacgctataccagagtttatttcctgaaaaaaatttgttttttttttttgagacgggatctcactctgtcacccaggctggagtgcagtggcatgatcttggctcactgcaacctccacctcctgggttcaagcaattttcctgtctcagtctcccgagtagctgggactgtaggcacaggccatcatgcc

SEQ ID NO: 515775 - DNA, 541 bp, Homo sapiens
tctgcctcatattgttcccattctacaaaaggagctctcagtccacaccttcctttcaccttaagttaaaatatccatagcttatctaagtcacttaggagattcttctgataaagaagtcaagctcagtttccaatccaatttctaccacataccaaattgctcactctctttgaatctcagtgatttcatctgtaaactrgagtcatatataattgctttttataatgagcacgtgcaattaaaaacattccaaaacaaatataaataagtgacaattagttaaaatggcacatgtgaagtacctggtacagagtagaccccaaatgtctgctctcctccttcccccaggaagtttgtgcaattcacaagactaataagcttcactacagtatgttgtcctaaaataagaatgtccatcattcctgacttgctggttggtggaatgtgtgagaaataagctcatcctcatttcctcttacccacccacttgcagaggctggggagatataggccccttgctcatggggagggcgcactg

SEQ ID NO: 515776 - DNA, 589 bp, Homo sapiens
agcaaatggcatagtgcactacctggactttggggctatgtccacacccttgagcaaggtggagagttaagccaattatttaaaatttgtttttgagaccgagtctcgttctgccacccaggctggagtgcagaggcgtaatctcaactcactgcaacctcacctcccgggttcaagcaattctcctgcctcagcctcctgagtagctgggattacaagcgcgcagcaccacagctggataatttttgtatttttagtagagacagggtttcaccatgttggtcaggctggtcttgaacgcctgacctcaagtgatccacccgcttcggtctcccaaagtactgggataatagtcacgagccacggcacctggcccaattatctaaaattttaagccaaagaaaaagtagtttggctttaattatctagttaaaatgtttggaagactgaattggttatacatattcttatcttcacttagtataagcagagtgattttgtgtttagaccatttcaattgayagttattcttcaagatcttttagatactagatgtatctgtgatcttataaagaaaagtagcttcatg

SEQ ID NO: 515777 - DNA, 613 bp, Homo sapiens
aaacctaaagtgtgtaagcatgcaatagaaaaagggtaatcagtaagattgttagatgttacttacacttacttggtataaaattgtgatggcttcccacgaacttctatgctgatactggcattggaaaacagctagataactttttcagccactaaattctgataatcattgcctgccattatccaaatccttatcttcttggcctttgctctccctttccctgtattaggcaagcgaagagattgaagacagcaaagtgcattggaaagaatcacaaatgccttgtggcctgggacatctcacaaaaagctaatttgaaaaatgagcgtaattcttacttcataagaattaatggaggccgggtgcagtggctcatgcctgtaatcccagtaytttgggaggctgaagtgtgtggctcacctggggtcaggagttcaagactagcttggccaacatggtgaaactctgtctctactaaaaatacaaaaattagccagttgtggcggcaggcatctgtaatctcagctactcaggagactgaggcaggagaattgcttgaacccagaagacggagattgcagtgagccgagatcatgccactgtactccag

SEQ ID NO: 515778 - DNA, 237 bp, Homo sapiens
tgtgctataatttaatgtataattgtatgctccaagattttcagtacaatgttaaatagaataatagctacttttttaaacttttcttaagtcaaaggaaatgtcttttatgtttcaacagtaactatgatacttgctatagatttttgctacattctttaatcataaaataaaattaacagattttctcctttttaaaaatamtcaggacaggtttaggttagaatagtttctttc

SEQ ID NO: 515779 - DNA, 468 bp, Homo sapiens
taaaaatatggagttgttaaagtgaattaagaaacacatcaagtttattattatgcatgtaaactacagatttaaaacaaattggtaaaaaaaarggcaaaaaatattaagttaatcaaaaaataagacaaaaaagtagagaagatgaaggttttttggttttgtttttgatttatttttgagacgaagtctcactctattgcccaggctggagtacaatggcgtgatctcagctcactgcaacctccgcctcccaggtgcaactgattctcctggctcagcctcctgagtagctagaattataggtgtgcaccaccacacccagctaatttttgtatttttagtagagatggggttttaatatgttagccaggctggtcttgaactcctgacctcgtgatctgcctgactcaacctcccaaagtgttgggagtacaggcatgagctaccccatctggccagaagatg

SEQ ID NO: 515780 - DNA, 464 bp, Homo sapiens
atctctcaaatcacctgctgggccctcttccaagtgttctttacttcctttttaataaatttttactcccactctaaaacttgccttggtctctcactctgccttatgcccctcgattgaattctctcttatgaggaggcaagaattgagctggctgcatacccataaggatttgtaaccgctaagttgttctaggtggctattactattctacagcagtggaacaacctctctcagttaccattataagcaataataatgcagtaagtagcaacattagtgacaaaagcataatttcagtacaaaatggtgaatcaaatccatacctgccccacccgactccaaaattttaaaakaagtatatcaaatagacacaagtaagtgctagaaacttcacatgccagaaactttaaggactttctggaagatatagcacagcaaagactagaaccagaaaaggacct

SEQ ID NO: 515781 - DNA, 601 bp, Homo sapiens
tgaaacatctgttcctacagagaatcaaaaaaagggggtagaaatatattgcaaatgtcttcaacataaaaaagacatatagatagatcttacagattgatagaccttatttttctgacgatagatagatgataggtaagtagaccttacttttcttcatgtaaaaattctcacttgaaaatcaaattcagcaaactgatattctaaaatcattttcttttcttgacaatctctcacttagaaactagatgtatcaaacaaaccatttttctttggragactgaaaaaaaatgtttccaccaaccatatgcctcattcatctagaagcaggagtatttggtgaaaacagaatttacttctgcttcctcattcatctagaaatgaaattccatattctattccagcatgaatctttgtgattagacattaaacataagtatctttcatcctagagcaaagatttagaagggaaataaatccacactaacataaggcaaataccaaaacagccacctcaaaatgtcaagttaaggaccttaccaaaattagagcagtctaggaaataagccaactatctgttatgatataaaaaagatagagc

SEQ ID NO: 515782 - DNA, 279 bp, Homo sapiens
tgtttcttccttgcatttaagagctaaccaaagacttcatgttttctaattatcagggaacacagagaaggtgttggtgcagagtcaaaaacagtgtctggttggttttaccttgaggttgggtaactcatgcaatatgagtttgtgaccaaaaattgaatttatgagacctgtgacaaacatcttgggatcacrtgggtaaatgacaggatgacatcaatgtgaaaacaacagagcagagagattggcagaaaccagggtaagcaagaacttcacctg

SEQ ID NO: 515783 - DNA, 279 bp, Homo sapiens
tgtttcttccttgcatttaagagctaaccaaagacttcatgttttctaattatcagggaacacagagaaggtgttggtgcagagtcaaaaacagtgtctggttggttttaccttgaggttgggtaactcatgcaatatgagtttgtgaccaaaaattgaatttatgagacctgtgacaaacatcttgggatcacatgggtaaatgacaggatgacatcaatgtgaaracaacagagcagagagattggcagaaaccagggtaagcaagaacttcacctg

SEQ ID NO: 515784 - DNA, 495 bp, Homo sapiens
agaactgattgatgacagtaggagttagaatagtggttaattttagggggctaagatgagaggtgggtaattttaccaacaataggtattggtaaaattctatttctgggtctactttgtggctacatggggatatttgctttgttaaaaaaaatgaactgaacacccatsaatttgtctatttttctgtatgtctgtgatatttaaagtaaaaagttattgtttctgatagagtagattatttaaattttgaatcatttcaatttgttataatgcctttattagaaaatgatcatttaaatttcaaatgtattgacttatgtacattctactgactgttagctaatgagatatacttttcttgtcctatagctagacattggctaaattctataataatagctaacattaagtgagcattcgttatgtgacagataccagaacaaatgccttccgtgcaatatctcacttaatctccatgacaaccatatatac

SEQ ID NO: 515785 - DNA, 574 bp, Homo sapiens
ttttcacctttaagctattgtgagtaatactgaggttcacaatagtactattatattcatgtgtactatttgtgcaccagtagttgtttcagtaccagttttcaattattttstgtgtacacctaagagtgaaattgctgggtcatacgttaattctatacttaactctttgaagaatcaccaaatcactttctacagtggctgcatcattttacttccctactatcagtttcttcacatctttgccagcacctattattgtctctcttttttttattatagtcatccaattgggtgtgaagtggtatatcattttgctgtcatttttccaaaacaaaattactctggctgctatggtgagaatagtctgtatgagggtaaggatggaagctacagtaattggaagaggatgtatctttttcggtaataactactctggtagaatagcaaatgaatttgcattgtctgttaaagagatctagaaacgtaccaaatgaaaaaccatagatctacagttttccacacatagaaaatcatgtacgttgtgttaaaagaaagaagaaaaagtaaaagt

SEQ ID NO: 515786 - DNA, 503 bp, Homo sapiens
tactgaggttcacaatagtactattatattcatgtgtactatttgtgcaccagtagttgtttcagtaccagttttcaattattttgtgtgtacacctaagagtgaaattgctgggtcatacgttaattctatacttaactctttgaagaatcaccaaatcactttctacagtggctgcatcattttacttccctactatcagtttcttcacatctttgccagcacctattattgtctctcttttttttattatagtcatccaattgggtgtgaagtggtatatcattttgytgtcatttttccaaaacaaaattactctggctgctatggtgagaatagtctgtatgagggtaaggatggaagctacagtaattggaagaggatgtatctttttcggtaataactactctggtagaatagcaaatgaatttgcattgtctgttaaagagatctagaaacgtaccaaatgaaaaaccatagatctacagttttccacacataga

SEQ ID NO: 515787 - DNA, 532 bp, Homo sapiens
ttttcacctttaagctattgtgagtaatactgaggttcacaatagtactattatattcatgtgtactatttgtgcaccagtagttgtttcagtaccagttttcaattattttgtgtgtacacctaagagtgaaattgctgggtcatacgttaattctatacttaactctttgaagaatcaccaaatcactttctacagtggctgcatcattttacttccctactatcagtttcttcacatctttgccagcacctattattgtctctcttttttttattatagtcatccaattgggtgtgaagtggtatatcattttgctgtcatttttccaaaacaaaattactctggctgctatggtgagaatagtctgtatgagggtaaggatggaagctacagtaattggaagaggatgtatctttttyggtaataactactctggtagaatagcaaatgaatttgcattgtctgttaaagagatctagaaacgtaccaaatgaaaaaccatagatctacagttttccacacatagaaa

SEQ ID NO: 515788 - DNA, 541 bp, Homo sapiens
gggcagtgtttcaagcccgtattgccctccgcctggaaatggtatgggggctcttacagggtacacagtgggattgagaccggcaggtcagtttgtgtgggagctgggtgaggtctgtgactgctggctttctcccactttccaggcaacctgtatgactcatcagaggcaggcaaaatcctcctaggtacacaactccagtgacctgggaatctcacccccattccccacagcagccacaggaagacctgcccaaggagagtctgagctcagacacagccagccctgccccccsctgataatccttccctacccaccctggttcctgaagacaaaggccatataatcttgggagttctagggtcccacccaccaccaattcctccccataataccatagctgatgctctctggaaagctctacctcctggcaggaggccgagcagcacaaaaatagagcattaaaccaccaaagctaagagcactcacagagtgcaatgcacccctcccacccccaccagaacaagcactggtatccaca

SEQ ID NO: 515789 - DNA, 541 bp, Homo sapiens
gggcagtgtttcaagcccgtattgccctccgcctggaaatggtatgggggctcttacagggtacacagtgggattgagaccggcaggtcagtttgtgtgggagctgggtgaggtctgtgactgctggctttctcccactttccaggcaacctgtatgactcatcagaggcaggcaaaatcctcctaggtacacaactccagtgacctgggaatctcacccccattccccacagcagccacaggaagacctgcccaaggagagtctgagctcagacacagccagccctgccccccgctgataatccttccctacccaccctggttcctgaagacaaaggccatataatcttgggagttctagggtcccacccaccaccaattcctccccataataccatagctgatgctctctggaaagctctacctcctgscaggaggccgagcagcacaaaaatagagcattaaaccaccaaagctaagagcactcacagagtgcaatgcacccctcccacccccaccagaacaagcactggtatccaca

SEQ ID NO: 515790 - DNA, 626 bp, Homo sapiens
attttcattgttttaagccatccagttgtggtgggttgttatggcagccctagggaattaacacagagatatggtagtgcacaagcccctgcatgcttgccctaggagcagaggctccaggaggcagagggagagtctggttccatctggaatccctccaggacatcacccttactcttgccccagtcacagaacctcaccctgccagccagccacaccttccactgcccttccagagcagctcctagcctgtgtctgtgctaggtcctgatggaagaagcagcccccagccaactgtgactgcttactggaagggatcatcacatgtgccagacacaaggatgaatccaagtgcctgtcaagctctgggaggtgccaggaactgtgctaggccctttcacatacattctcctttaaacctcaggaccaaccagaggcaggaaggaaagagaagctctgagaaagcatgtgacctgctcaggatcccacarcatgtccgtggcagaaccctgctccacattcaggctgtctgcatgaggcctgttgggttctcagcacacccagtgcccgattcccccaggactgaagcacctgcctctcgacagaactgtctcccactcgctctg

SEQ ID NO: 515791 - DNA, 526 bp, Homo sapiens
gtaaaaatcatcaacctttttcgggtagtccaaaatgaattaaattcaaaccctctgagccatcctttacactccatggtgagcttattccaatcttaatggccttatatacagactttwttttttttccatatcccacatccaattcatcaggatgaattagctttgccttacaaatctttctagaatcgcaccacttcttacaacctccacagcttctagcctaagagtgttctctcatctgtcacctgggttgctactgtcttcctaaccagcctccccacttccactcttgcacacttcagtctgttctcaacatagtagacaaagtgatcctctgaaaagttaagtcacatcatgtgactcctcctctccaaaccctgttgttcacagagtccttacaggggcccacagtgcctaacaacctagccctgttacctctttgacctcactttatactgaattgttcctcgaattacaatggggttatgtcctgataaacccaccataaattgaaaatatcata

SEQ ID NO: 515792 - DNA, 526 bp, Homo sapiens
gtaaaaatcatcaacctttttcgggtagtccaaaatgaattaaattcaaaccctctgagccatcctttacactccatggtgagcttattccaatcttaatggccttatatacagacttttttttttttccatatcccacatccaattcatcaggatgaattagctttgccttacaaatctttctagaatcgcaccacttcttamaacctccacagcttctagcctaagagtgttctctcatctgtcacctgggttgctactgtcttcctaaccagcctccccacttccactcttgcacacttcagtctgttctcaacatagtagacaaagtgatcctctgaaaagttaagtcacatcatgtgactcctcctctccaaaccctgttgttcacagagtccttacaggggcccacagtgcctaacaacctagccctgttacctctttgacctcactttatactgaattgttcctcgaattacaatggggttatgtcctgataaacccaccataaattgaaaatatcata

SEQ ID NO: 515793 - DNA, 526 bp, Homo sapiens
gtaaaaatcatcaacctttttcgggtagtccaaaatgaattaaattcaaaccctctgagccatcctttacactccatggtgagcttattccaatcttaatggccttatatacagacttttttttttttccatatcccacatccaattcatcaggatgaattagctttgccttacaaatctttctagaatcgcaccacttcttacmacctccacagcttctagcctaagagtgttctctcatctgtcacctgggttgctactgtcttcctaaccagcctccccacttccactcttgcacacttcagtctgttctcaacatagtagacaaagtgatcctctgaaaagttaagtcacatcatgtgactcctcctctccaaaccctgttgttcacagagtccttacaggggcccacagtgcctaacaacctagccctgttacctctttgacctcactttatactgaattgttcctcgaattacaatggggttatgtcctgataaacccaccataaattgaaaatatcata

SEQ ID NO: 515794 - DNA, 678 bp, Homo sapiens
aaaaatcatcaacctttttcgggtagtccaaaatgaattaaattcaaaccctctgagccatcctttacactccatggtgagcttattccaatcttaatggccttatatacagacttttttttttttccatatcccacatccaattcatcaggatgaattagctttgccttacaaatctttctagaatcgcaccacttcttacaacctccacagcttctagcctaagagtgttctctcatctgtcacctgggttgctactgtcttcctaaccagcctccccacttccactcttgcacacttcagtctgttctcaacatagtagacaaagtgatcctctgaaaagttaagtcacatcatgtgactcctcctctccaaaccctgttgttcasagagtccttacaggggcccacagtgcctaacaacctagccctgttacctctttgacctcactttatactgaattgttcctcgaattacaatggggttatgtcctgataaacccaccataaattgaaaatatcataagttgaaaatgggctgggcacagtggctcatgcctataatcccagcactttgagagtccaaggtatgaggatcgcttgaggccatgagtttgagaccaacttgagcaacaagttgagaccccatctctacaaaagagtcaaaaaattagccagg

SEQ ID NO: 515795 - DNA, 594 bp, Homo sapiens
gcatcatggaccccatgccttgggcaggctggctggctggatttcttattttatgaccctactccccctcccttccatcttcttcaacaaacactgtactctggagctgagcttctctttcagaagcccagattattggaggcagcagggaaaccctcagagacgttcaaagtggagagacctccagtgaaggtggaagcatttgcagggccattaaaagactgttaggagcgatttttctctctgctggcaagtggcaaaagcagagcccaaagaacaaaacccagacctgggaaagcagagcaggggaagagaaactgaacaagccttgctgaaccatgcagaagttgatggagggaaaaaacccaatacgcgcscgcacacacacacgcacacacacacatgcacacacacacacatacacacacgcataacaaagaggagaaattcttagcctgcagcagttggtagcattatgtaaaatcccaagcccacaaaaatatcatttggatgataaaaagttaaatttagctaagtacagagtgactaatactatgagggagaggcagcacccccagttgcctggagctgata

SEQ ID NO: 515796 - DNA, 561 bp, Homo sapiens
ctgctgcaggcccagcccaggctccttctctggggagctgactctggctccagccctcagaggcctctctgctgactcccaaaccccagtgagcaggtcagcgccaggcctggccaagctctcaccggttcaaggagaaatgagaacatggctaatgggccaagctgttcaaagagctccagtttggtggggtatggtggcacacacctgcgatcccaacactttacgaggccgagatagaaggatctcttgaactcaggagtttgaggctgcagtaggacatgatcatgccctccagcctsggcaacagaacaagaccgtgtgtcaaaacaaacaaacaaaaatcaaaaagctccacttagtttctttattcttagatctttcctacttcttagtgttccttttgttcatgagatgatagctacagtgaattatacctttttttgtgtttgtggttaaatacgcataacataacaattaccataataacttttttatttttattttattttatttgttttttgagacagggtctcactctgtcatccaggctggagtgca

SEQ ID NO: 515797 - DNA, 615 bp, Homo sapiens
tccttttccccagctccctttttttgctagggggtagggacaccaaaagcgtcatatcttgttgctgggaaatataaaagctctgctcttatattcattctgtatcaagttaaaaaaawttttttttgcattgtatttgtgggtgtttaaggatttttccctcttacttccctgccctccccccagcacctccaccccaaatggagaagcatctttgaatttctagtggttttccatctggatctgcatccggatccggattaccttagcaggggaaataatagatggggttgcaggttcatctccctggagagcttgtgttttcctggtgtaatagcatggtgattggaatccaggtatttctgttgccagttggaaggggcagtccttgactgtttcaatgccccatttgtcgtgggtgatgggctgagccactggggaaaagtccatttagttaggtccggttaccctttgcattcactcctgtccctgaaggaaatggtccctgtttttgtgtaatgctttataaaagcaggccctagaaagtgggaatctagcagaagcggaatactagataatattcctgttgcactctctaagcttttcagtttgtaa

SEQ ID NO: 515798 - DNA, 615 bp, Homo sapiens
tccttttccccagctccctttttttgctagggggtagggacaccaaaagcgtcatatcttgttgctgggaaatataaaagctctgctcttatattcattctgtatcaagttaaaaaaatttttttttgcattgtatttgtgggtgtttaaggatttttccctcttacttccctgccctccccccagcacctccaccccaaatggagaagcatctttgaatttctagtggttttccatctggatctgcatccggatccggattaccttagcaggggaaataatagatggggttgcaggttcatctccctggagagcttgtgttttcctggtgtaatagcatggtgattggaatccaggtatttctgttgccagttggaaggggcagtccttgactgtttcaatgccccatttgtcgtgggtgatgggctgagccactggggaaaagtccatttagttaggtccggttaccctttgcattcactcctgtccctgaaggaaatggtccctgtttttgtgtaatgctttataaaagcagrccctagaaagtgggaatctagcagaagcggaatactagataatattcctgttgcactctctaagcttttcagtttgtaa

SEQ ID NO: 515799 - DNA, 490 bp, Homo sapiens
ctacagtgagccatgatcgtgccattgtgctacagcctgggcgacagagtgaaaccctgtctcaaaaacaaatttagtgaggatgggtgatattgttgaggagtgttttcacatttgcaccagagggtgctatctgcttccttgatagccacaccgatgttctatgtgatgagataagtggagttaactagaaccatgtgaccaatttattacaccaccatctctgaatgtcaaaatcatatgttttccctcagattcagcccaaatgttgccaccaccataaaacctctctgaaccgcygcctctcctgcactctcaccaactttaagtcagctcttctccatccaaactgtcaaagcatcttatacttttgttgtggcatttacccctttctgcctggtacctagctactgcagtacaagttgctgtattggtttcctaagtgctgccgtaacaaataaccacaaactgagtggcttaaaacaacaaa

SEQ ID NO: 515800 - DNA, 621 bp, Homo sapiens
cacaatatcccactcacctcttttgccttctctctttcatttttttttactatttttaaagagatggggtctggctatgttgcccaggctggagtataatggctattcacaggcataatcatcacagcacaccctgtgttaatggggaagctggggcagccacttggaggtggggggccctrcaaacaaatgtttcttcctggcctacttgaccttctacatcccatcttccatttgaagggagtaaacaggcacaatggagggaatgccctttatctatcgcttcctggaggcactgacagacctcacagtggggtctaacttgggcccccattactggtatctctggccccctacctggtatgccctttgtccactttggggtacttcctgtcttgctgcgggcatcctggcgtccttggcactcctctcttccctcccttctgccaacactgatcttacaatgtacttcggactttgctttaactccctcctgggcttggtatgtcttgtgctctaactactgaagagcttgctttcgatgcatagaaatccaagcaaaatttagcactggatattttaactctctcctcaaactttcaacctctcctcctctatttt

SEQ ID NO: 515801 - DNA, 612 bp, Homo sapiens
gctgtaaaaaagaatgaggacaatgtctacaagtcaatatggtggaatttccaagatatatccattaggggggaaaaaaagcaaagtacaaaacacatgctactttctgtgtaagaaagaagaaataagaaaacatacatgtctatttttggaaaagaaacacagaaataataaatcaaaaaacatgaaaattggttacttacaaaaagagcagggacgggaaagtagaaaaggaaaggactgactgtacattttttgtgtwggcagttctgaacttttataagcacattaatgttctacatattcaaaatgtaaaattgaaacaaactgggttggggcagagggccaagaattaaatgtgctaacgctgggagctaccattctcgctatggaagaataaagacaaaaatgggatgaggggaaggcaaggaagaaccctgtaaactggactggaagtggagctatcagtatgaactcatgtttcatatatatttatacacagctatacacacatatacagacaacatacacatgcctatccacttcttaaaacacaagaacctctgaaggattagggaaatagtggtcattcagactacataacaaattagg

SEQ ID NO: 515802 - DNA, 612 bp, Homo sapiens
gctgtaaaaaagaatgaggacaatgtctacaagtcaatatggtggaatttccaagatatatccattaggggggaaaaaaagcaaagtacaaaacacatgctactttctgtgtaagaaagaagaaataagaaaacatacatgtctatttttggaaaagaaacacagaaataataaatcaaaaaacatgaaaattggttacttacaaaaagagcagggacgggaaagtagaaaaggaaaggactgactgtacattttttgtgttggcagttctgaacttttakaagcacattaatgttctacatattcaaaatgtaaaattgaaacaaactgggttggggcagagggccaagaattaaatgtgctaacgctgggagctaccattctcgctatggaagaataaagacaaaaatgggatgaggggaaggcaaggaagaaccctgtaaactggactggaagtggagctatcagtatgaactcatgtttcatatatatttatacacagctatacacacatatacagacaacatacacatgcctatccacttcttaaaacacaagaacctctgaaggattagggaaatagtggtcattcagactacataacaaattagg

SEQ ID NO: 515803 - DNA, 538 bp, Homo sapiens
tgatttgcattttctgttttcttcctccagttccttttctatggagttggcttgatttttattttcttttattccttggtagtttgtgaactaggttcttagtttaagaatgcttattgtcaaaatagtgaagtacatctttttaatggataatgatggtagtgaagaggaggcaggagtttatgtgtctttctctttggtttctataagatccttaattttctcttcttttcctttactgccatatctccaagggacacctcccttctctgtttatcttctcccccagaagccctaattgtgcctgccatttccgctgctattccctttcaatctcttgtatagctgatattgtgaaatatcaaattctagtrtttagtattttgtcagtgtgtgttggactttcttttctatgggtgattttgtctgtacttcctctatgtcctttggtccccttttctcttttgtcatagagtcttaagcctcccctctcctacgatgtaccctcagatttgcattggccaagggagttttgttg

SEQ ID NO: 515804 - DNA, 548 bp, Homo sapiens
tggtatggtttaaacatttatagatagaaaagctcagatatggtccaagttttatcgtaatcaaatgttaactrggttgtgcatgctacctagtatttgactactgtggacatttaagagtaattactgtcaatgaatcttggcttttttttttcctttagaaaacgattactagacactgtgctatgttctgggacacaaccacacccttaatttgctaatattctaatagaaaagcatttgcttgacaactgtttattgaatggatgcaaagatgcataagatataatctctgcattctgagacattaccgtctatgtgaagaggcagatttttgaacaaaaatttcctctacaatttggtgtcatgaaaaactagagtcattaaaaaataattacaaaggaaaataaatatatatgaggaaagtcagtgtaggccttacagagaaagtggcatctaaactggaagaatgaatggaaagaatattacaaacagaaatatgcaaatctcataaacaagcaaaccataacacattcagggaaaagtga

SEQ ID NO: 515805 - DNA, 670 bp, Homo sapiens
ccaaggggtaattgtttaaaagcatttgttctcatgactaggtgcctcacttattattttcatgctcctgcaatttgagatacaaagaacaatgtatagacgatcaatagcatatgttattttgatgtaaattcttggtaaaaaatgtatgaactgcctcttcccttttgctttaaaaagccacttgtaactgctgctaatcagagtgtacatttagtacaacttgaatctatgatcctgggtagccatccttaagctttgagatcagataaactatatttaatcatattttctgaatctcattattttaaggttgacactatctatgaagttaaatgaggacttactgtrgtttaatgctttgcaaaattcattgctctgtaataccttggctgcttcctcctctctctgcctgaaggtggtgtcttctattacctgattgctccaggacttaggaaatggtatattattgttgggaaaatacaattaaaagcaaaatcttcccagcattttgggaggccaaggcaggaggatcactagagcccaggagttcaagaccagcctgggcaacatagtgagaccctgtctctcttaaaaaaaaaaatctcccaaccccaaaatcctctccacaatggtagtagagatagaaaacagtttcattattgaatga

SEQ ID NO: 515806 - DNA, 670 bp, Homo sapiens
ccaaggggtaattgtttaaaagcatttgttctcatgactaggtgcctcacttattattttcatgctcctgcaatttgagatacaaagaacaatgtatagacgatcaatagcatatgttattttgatgtaaattcttggtaaaaaatgtatgaactgcctcttcccttttgctttaaaaagccacttgtaactgctgctaatcagagtgtacatttagtacaacttgaatctatgatcctgggtagccatccttaagctttgagatcagataaactatatttaatcatattttctgaatctcattattttaaggttgacactatctatgaagttaaatgaggacttactgtggtttaatgctttgcaaaattcattgctctgtaataccttggctgcttcstcctctctctgcctgaaggtggtgtcttctattacctgattgctccaggacttaggaaatggtatattattgttgggaaaatacaattaaaagcaaaatcttcccagcattttgggaggccaaggcaggaggatcactagagcccaggagttcaagaccagcctgggcaacatagtgagaccctgtctctcttaaaaaaaaaaatctcccaaccccaaaatcctctccacaatggtagtagagatagaaaacagtttcattattgaatga

SEQ ID NO: 515807 - DNA, 654 bp, Homo sapiens
gaatactgtggaccatggctgccggtcaagggatctgcctcagacgctttttctaagatctattaaccagcagggagttttggaactttataagcgctgccccataatcttgctaatgatacaaaatggtgttctgtgaaccttaaaacatctattttcaactaggaaaacagaactttcaactcagaagaagactttctcttctttcagcttgcttgataatttgtgcattccctagtggtgttaaatgttrcttagatttataatagaaagcaattaccagacaaattcaccatctccagctaatatggtttccttcaaaatgcaatgtttctgaagaaacagataaaagccaggcttaagtgatcacattgtgtgaggcaattccttttatatctttttaagagtgattacagacaaatctgctttgccaaaaaagccaacgcctagtacacttgtactttatttttttggcatccctaagtcccttatttttttgtaattagagaaatatttggtgaccataacttctctcgcttggatgaggttatcccccttcccttcttcctccctacccggcccctccaaactgtacagcttttcccaaaattctgtctgtgggaaattccagcctctggcccctgcagcttgctt

SEQ ID NO: 515808 - DNA, 581 bp, Homo sapiens
tgattcctgctgtccagccttctgaagtgcccttggttggttccattttccaagatagaccctctagctccacaatgatgctgtgaacccctgacgtcctttcaaaaattccctttttgcctaagaaagtcagagtgcttgcaatcragagccctgactaatacacttgatatcagtggagaaagaatgtttacacatacttcgtacatcctcggccaagctggccaccccgatctcccctccactagctctgatgcaatggctgaagtggccacacccttggcaagatctccatgaacatgtcttgtgaatttacgacaatccaaccaaccagtcctggtcattcgttggccataaaatgcacattggcagagaaggatccatgaagccagtgctgaattccaagagcaagctcagatttctgagcgtaagtgataaaacttgattctgggaggagaaaggtcaggataatgcctcctctgtctgagcacatggacctccactctgaagagagaagaacaggagagatggccagagtgaatgctcaggggacagagttttgttccctccattcagccctg

SEQ ID NO: 515809 - DNA, 431 bp, Homo sapiens
ttctgatattttgagcccagggacatgaggaatagaggtaccactggctaggaatgaaarcttaaccagcagtttagcactgtggagtggaaattgactgattgcttgttcaacattcattcacccttctttgagttccagattctgattttcattctattccttacccactatatcagtcagtataggttgtaggtatatgctatagcaacaacagttccaacatcttagtggcttaagacaacaaaatttcatcttaattttgctcacattatgtataaaacttggactgctggagggggtcagctcattggggtcagctcattggagtcactcagttgaaggtttcatccactcactcacaagtttctgcagtcaatgaggcagtgaaaacttgagtatggtcttccatatggaagtgacatgtatca

SEQ ID NO: 515810 - DNA, 631 bp, Homo sapiens
ctgggccctttcccagcgtgagcctgggctkagcggcaggggcgtggaccagccaccctcctccagggagtgccaccccagccaaggcgccccagggttgggttcgggtgggtgcgccccatgtttgaaacggcaaagcactcagagaggaaagccttcaacaaacaagtgaccccctcagagtccacacagccagcctccaggaccagatgttcagagctgtcccttgtcagagctccctgcagggaacaggactcatttgtctttgaacaatctttccatctcaggcacggccatcgtgaactctgtgtgactttttcacaactttctgaataatgaccgaagatggtctagaccgggaaatctatttttatggaaaccctcctctcaggctgagctggcttttcccccatttccccggcgttgaaagggtcaccccgtgagggtcctggtgggactgggggctgagctggagcctgcaggggccaggagcacagggctctccgcaccgtcccggctcagcgggcagtggctggaggagcacagggctctccgcaccgtcccggctcagtgggcagtggctggaggagcacaggactctccgcaccgtcccggctcagcgggcagtggc

SEQ ID NO: 515811 - DNA, 616 bp, Homo sapiens
tcaagggacctcagtgtttttccttactgcttttaaactcatttttaaattttatcccatttttgctgagggacacctatatattgcaaggttaaatggatcactagtggttgcgtaattgagctaggctgtataaacccctaagtcagactgcttgactggaaacattaattttggaagccaatcaccttacagttgaaagagcagtcagtttttgtgttgaaaaggatcacagggtaagattgacagggtcagaactggcttctatgctgatctaataaatgcctcagttgctactaccccttttgctttgagcttcatgttgagccatgtaggctctggaggttatcagataagacaataatttaactatgattcttgtgggtatatgtttcacaaacagcttttaaygatttttttaaagtccagctacagacgaaatgctgattttaatgtttataagaaatcaaatgtttgatgaggtatttttaaattaactttaattttccattaaaatggcatgcttttcctcccccaaagaagacaattcatttaaaaatccaaacaatctctatgtctagaaaaggtctcatcttgggtctgttttgttctgaaa

SEQ ID NO: 515812 - DNA, 515 bp, Homo sapiens
ctctgaggctggtcacacagaccagcacaaccagctctccctccagagcttcacttatcgccctggaactcctgccatgggtcagggatgtctggtgagagcaggcagcaattgcaggctggcagatggagagctacttttctccttttatctcagcatctttttttttttttttttttttttttttttggctattttcttccttgaggtgtgaaccacctgctagggtgtgaatgggcgagagttcacaacaggtgtctggagatcttaattacaaggcttgcatctcctgtccaccccacacctgttgtgcctgctttgtgggcarcgtctgtccatccctggcctcctggccttctcatttcctcttgcagtggccgtgacagtggaaggagggccgaggacagcttgctcactcatgctccccacacacacctcccttgtctcccccacacaggcatgggtcactgcccgattgactcctggttgtcagcagtacttttccaaaagcttcc

SEQ ID NO: 515813 - DNA, 571 bp, Homo sapiens
tggccttgcagcccttccttctgcagggtttggtttgtgtgctttcctacctccctgctctctttctttcggtcccttttccagccttggtgctgccctatccctaggccttatctcaccacctggctcctgaattggaggggaaaacacggtgctgtttgcctggcattcagagggttgggccttccatcaggtgctgaatgcaaagagggaaggggatggaaggaggagggggccaagaattcacgttcttcttctaccactgtgtgactctagacaagcctttcaaccttctagctctgttttcttgtttttgaaatgattataacattatctgcttcatctttagctggaccatgtacctccttgtctggacctgtttgacctaagctgaaccctcagaagtgaatgatcacgcatccatccatcctcctatcarttcaaccatcttatatcccccagaccccttacctgtccccctgcccatccaatcaccctctgaaccatccatctattcaatataagcccacctaccatccatccactcatccatcccatccaccccatccac

SEQ ID NO: 515814 - DNA, 496 bp, Homo sapiens
ggagagaaggtggagtctacttttcagagcaaattctgagattgccactgtgtctgcctcacagtttgtgcgagaacacatcatccatatgcctcaagaggattacatcagctggctgcagagccggatcaacatacccattgggccctacagcgccctgaggtaggctgggcctgggttgaccagctgtctcagtggaggagtgtttgcctatatcatgttcctgtatcctgcctgtgttcctgcctcctgactaccctcatggatgctctttatggatgaccctttacagtagggtcatctggagactgacttccagcaacatttttagagggggatggccccggtggccctcccctcaattccacaccccagacccaacctaccagtctctgttcttcaatgatccagcctgactctacctacttcctcttcagattccttcaccctatttaccttcctcaartactggagaataaaattgaactgaatgttt

SEQ ID NO: 515815 - DNA, 590 bp, Homo sapiens
aagcacaataggtaataacagggatggcagggtggagcttgcattctcgaaaaaaacatattgaaccggtttatctcagaactgaaaactgactgctgaacaactgctatgcacaatactttgcttctgccctcctcatgtagggtagctgcctgggtgctgacaggtggcaggaagtcacagtggctaagaaactggctcctgagaatygcctgaacccgggaggtggaggttgcagtgagctgagatcgcgccattgcactccagcatgggcaacaagtgaaactctgtctcaaaagaaaaaaagaaagaaaagaaagtggctactgagtctaatagaggcaaacaggcaaactcatcgaggcagagagtataagaatggttgccggggtggggtgggggagggatggagtggaatggggacatgtttgtcaagggtacacattttcacttatgcaagataaataagttctggagctctaatgtacagcatgatgcctatagtaacaatactttactgtatacttgacatttgcttagcaggtagatcctatgttgtcttatcaccaaaaaaaaaaaaggtaacaatg

SEQ ID NO: 515816 - DNA, 634 bp, Homo sapiens
gcaggtccataagagcaatccctcccattccatttagtcattaagcacaataggtaataacagggatggcagggtggagcttgcattctcgaaaaaaacatattgaaccggtttatctcagaactgaaaactgactgctgaacaactgctatgcacaatactttgcttctgccctcctcatgtagggtagctgcctgggtgctgacaggtggcaggaagtcacagtggctaagaaactggctcctgagaatcgcctgaacccgggaggtggaggttgcagtgagctgagatcgcgccattgcactccagcatgggcaacaagtgaaactctgtctcaaaagaaaaaaagaaagaaaagaaagtggctactgagtctaatagaggcaaacaggcaaactcatcgaggcagagagtataagaatggttgccggrgtggggtgggggagggatggagtggaatggggacatgtttgtcaagggtacacattttcacttatgcaagataaataagttctggagctctaatgtacagcatgatgcctatagtaacaatactttactgtatacttgacatttgcttagcaggtagatcctatgttgtcttatcaccaaaaaaaaaaaaggtaacaatgac

SEQ ID NO: 515817 - DNA, 634 bp, Homo sapiens
gcaggtccataagagcaatccctcccattccatttagtcattaagcacaataggtaataacagggatggcagggtggagcttgcattctcgaaaaaaacatattgaaccggtttatctcagaactgaaaactgactgctgaacaactgctatgcacaatactttgcttctgccctcctcatgtagggtagctgcctgggtgctgacaggtggcaggaagtcacagtggctaagaaactggctcctgagaatcgcctgaacccgggaggtggaggttgcagtgagctgagatcgcgccattgcactccagcatgggcaacaagtgaaactctgtctcaaaagaaaaaaagaaagaaaagaaagtggctactgagtctaatagaggcaaacaggcaaactcatcgaggcagagagtataagaatggttgccggggtggggtgggggagggatggagtggaatggggacatgtttgtcaagggtacacattwtcacttatgcaagataaataagttctggagctctaatgtacagcatgatgcctatagtaacaatactttactgtatacttgacatttgcttagcaggtagatcctatgttgtcttatcaccaaaaaaaaaaaaggtaacaatgac

SEQ ID NO: 515818 - DNA, 605 bp, Homo sapiens
tcacttgtaaggcagttccaatagaggaggaaagggatacaaatttacaaagacaataaatttaacacccttttctcattattccagcacttgtaagaggattgcattacaggtctagcaactctagggcatctgaaatgcggtctcatttacaaacattttgtttacactgcatgatttcatgaaccactgattgcataaagcaggccaactggcctcctcctctcrtcttcaatttaatgccattttacctttgcagaaaactcaccaatgaagaacagcagacaggtgaacaggctggccaggaagtgggtcagatggtaatacatttagtcttcttttcctctagggcttcagtttccccatctgtaaaatcagagagctagattatgagggtcccaaatctacatttcaaccaagaccaggcaagtaatacgaatgaatggaaggaatggggtctaatattatgtgccgaatatttgacaggcactgagagagaaaggtactgggagcagaaagggagacaagccatgatccttgctctggtgaagcacttggccttgtgagagatgtgagcacataggcagctaccgacaaatatgata

SEQ ID NO: 515819 - DNA, 503 bp, Homo sapiens
ctgggtgtggtggtgggcacctttaatcccagctactagggaggctgaggcaggagaatcgcttgaacctaggagacaraggttgcagtgagccaaaatcatgccactgctctccagcctgggtgacagagcaaaactccatcaaaaaaaaaaattaactaaagaaacctagatgtgtttaccagatggtttagatttttccaaaaacatgtagatgaacacagttcatgtacccttaagtgtatggaaggaagacctctcttggaagacatcaggtaggaaagcattcaaatgactcagtcataaaaagctggaggcagaagcagtcaggtggaccacatttcattaaaaagttaggcggggttctgttccaagtgtccaatgacatctagtatgtagtctctgattcaacctttcacatattcccagtaatgtaccaccttccaatccatgccccaaactagacagattaccaggatcaaggagctttttcactagattta

SEQ ID NO: 515820 - DNA, 527 bp, Homo sapiens
ctgatgggtccaggggagcccatagaggacactgcctttgtaggcrtccaggacccagctttaatccatagcagatgcatacagtcatacaggtttgatttttgttggtccatggaggatttgtcaggatctcaggggaaagccagaggtagaaggcatctcacattttgagcatttattgcttgcaaagctgtgcgctacacactacaaatgctgtttcatttaaccctaacaacccccatacactgcctgtttgtaagaagtggagaaaacttaggctcatagactgttcaaatgacttgaaggtcacacaatgctaataagggattgaatcacatttgaactcaggtacatatgatttcaaaccctcatcctttctactacatggcacagccttcctcacaggctgacatgcactaagcaatttaatttaggagactgggaagtaaaccagaaaagccatgcattatttcacaatgtgtttcaaacctttccagtgagtggaatacttaaatctgccattttgg

SEQ ID NO: 515821 - DNA, 527 bp, Homo sapiens
ctgatgggtccaggggagcccatagaggacactgcctttgtaggcatccaggacccagctttaatccatagcagatgcatacagtcatacaggtttgatttttgttggtccatggaggatttgtcaggatctcaggggaaagccagaggtagaaggcatctcacattttgagcatttattgcttgcaaagctgtgygctacacactacaaatgctgtttcatttaaccctaacaacccccatacactgcctgtttgtaagaagtggagaaaacttaggctcatagactgttcaaatgacttgaaggtcacacaatgctaataagggattgaatcacatttgaactcaggtacatatgatttcaaaccctcatcctttctactacatggcacagccttcctcacaggctgacatgcactaagcaatttaatttaggagactgggaagtaaaccagaaaagccatgcattatttcacaatgtgtttcaaacctttccagtgagtggaatacttaaatctgccattttgg

SEQ ID NO: 515822 - DNA, 573 bp, Homo sapiens
tgtcaggataactggagtaacatcgaggcataccagataggccaaggaagtgctgtgggaaaaaagttaaattcacacttacaaatataatagcaaagtgagttttagcatagatttgattgagtataacctgaaaatagagggaatcagtgaacaaagcctcccataatggcaaatatggttccttttgataagrcataatggaaatgggctacaacataatatctatcatgtagtacaatatccagtgatgaattggctagtacgatgccggttaggcctcctgttgtaaaaaggaaaataaatcccagggctcagagcattgtgggggatcatttgatactactgctgtgaagtgtagctagccagctaaagactttgacaccagtaggaatagcaataattatagtagcagaggtgaaatatgctcgtgtatctacatctattcctcctgtaaatatgtggtgggcccatatgataaaccctaagaagccaattgatattatggctcatactatgcccatatacccaaatggttcttttttttccagaataatatgttacgatatggga

SEQ ID NO: 515823 - DNA, 600 bp, Homo sapiens
tgcagcccacctgccgacctcagtaccatctgtcccagcacccactcctgctccatccaccaagaycagtcaccctgcaggacccctgccctttgcccacgtggcacaacaccccaactccccaacctgtccccttcctcctgatgctccagggctcctcctgcccgggatgcggtggagcaagggttgagagcagcaattctgcagccagactgccctgactcagcccctggcctgtgcatcactgcccatgtgatgaccaagcctttctgtgcctctggagagtctcatctgcaaaacaggaccatccacgcccacctcacaggatggagaggacaccttagcacagtgcctgcacatggcgagggctggggggagtcagccctggagaccacaggtctcactgctgttggacactcccttttcgaagctgccactgctctgagtctgggcatgttcactttgcctgggacctgcagccactctgtgcctcatctccaatcaactcttcacaacagcggcttttccttgacttttcctataggctcctcaacccatcagcagccagaaggtgccgtttatagagagaggagcataatt

SEQ ID NO: 515824 - DNA, 608 bp, Homo sapiens
tggaacagtttcaaacatcacacccacatcccagatattagaaagacaagggaaaagagaaggggcaaacagctaaaatctaggtcacctgagtctgtccggtttttccagaagtcttgtatgttggtatcattccattggccacaaggtctcatgactagctctagccagaaggaaactgagaaggcaaatctttaggctttacagcttctccagcaggagtaaaaagaggttataaattgattttgtgttgctaatacaccgtgatgattacccagatgattttatctaaataattttctaactggacagtattaatattagyaggtatcgtgatgaatcatgctgtatccccaggcactctgccaggttatttacattcatcacttcatgaaacttcactctgactgtattttgtagacattggtattattccctttatggatcaggaaagtgatggtaattaacttgcctaaggacacagagttggtagatatcagagaagggattaagaacccagaactattttactcgaaagtttctgctacacatccactgcttcttccagtgtaaagatgtagcactcaactgtaatggacatattaact

SEQ ID NO: 515825 - DNA, 643 bp, Homo sapiens
ccagggctggaacagtttcaaacatcacacccacatcccagatattagaaagacaagggaaaagagaaggggcaaacagctaaaatctaggtcacctgagtctgtccggtttttccagaagtcttgtatgttggtatcattccattggccacaaggtctcatgactagctctagccagaaggaaactgagaaggcaaatctttaggctttacagcttctccagcaggagtaaaaagaggttataaattgattttgtgttgctaatacaccgtgatgattacccagatgattttatctaaataattttctaactggacagtattaatattagtaggtatcgtgatgaatcatgctgtatccccaggcactctgccaggttatttacattcatcacttcatgaaacttcactctgactgtattttgtagayattggtattattccctttatggatcaggaaagtgatggtaattaacttgcctaaggacacagagttggtagatatcagagaagggattaagaacccagaactattttactcgaaagtttctgctacacatccactgcttcttccagtgtaaagatgtagcactcaactgtaatggacatattaactgtgattcattaatgatgattaattaact

SEQ ID NO: 515826 - DNA, 643 bp, Homo sapiens
ccagggctggaacagtttcaaacatcacacccacatcccagatattagaaagacaagggaaaagagaaggggcaaacagctaaaatctaggtcacctgagtctgtccggtttttccagaagtcttgtatgttggtatcattccattggccacaaggtctcatgactagctctagccagaaggaaactgagaaggcaaatctttaggctttacagcttctccagcaggagtaaaaagaggttataaattgattttgtgttgctaatacaccgtgatgattacccagatgattttatctaaataattttctaactggacagtattaatattagtaggtatcgtgatgaatcatgctgtatccccaggcactctgccaggttatttacattcatcacttcatgaaacttcactctgactgtattttgtagacattrgtattattccctttatggatcaggaaagtgatggtaattaacttgcctaaggacacagagttggtagatatcagagaagggattaagaacccagaactattttactcgaaagtttctgctacacatccactgcttcttccagtgtaaagatgtagcactcaactgtaatggacatattaactgtgattcattaatgatgattaattaact

SEQ ID NO: 515827 - DNA, 406 bp, Homo sapiens
gctgtcctgctgtaagttactccatgcagttgcrgggtctttcttggtgtggggttgttgctcagcacctgagcccaggtggtcttcccattgaatgtttggctggggtgaggtgagcacagggctttttccaagcaggggatttctcccatctgtggctttaatctgtaaccagcattggctgtcacttgtaactctttaatatagtgtaaactaaatgtccagccttccagacctttgttaagcaaacataaaacatctgtaatttttttttcagcaattggttgaagcttcagagacattgaaatcccaagccaaagaactgaaagatgcccatcagcagcaaaagctggccctgcaggagttcttggagctcaatgagctcatggcagagctctactcccag

SEQ ID NO: 515828 - DNA, 390 bp, Homo sapiens
  misc_feature (1)...(390): n = A,T,C or G
tctcagctgcttgataaaggtactcttgccactctctcctgtccggagcagcagcagcttgagctcccggcgggcatcccgcttgtccctgcggagtgccgctcgatctcgtcgttgatccgccgggcttccttggcctcctcgctcaggcagcacgccatgatggactccagagtcattcttccaragtgcctccgctgcagccccgccggcaccccctgctcacatcgcgcacacacgccttcccgccatcgctcccccgaggcagcggtggctgagncccccgccgcctgggccgcgtccgggacgagctccgggaaccgccgcggggggcacaagaggccggggcaccaggtgggccgggggcgcggtggaagcggatggtctggg

SEQ ID NO: 515829 - DNA, 390 bp, Homo sapiens
  misc_feature (1)...(390): n = A,T,C or G
tctcagctgcttgataaaggtactcttgccactctctcctgtccggagcagcagcagcttgagctcccggcgggcatcccgcttgtccctgcggagtgccgctcgatctcgtcgttgatccgccgggcttccttggcctcctcgctcaggcagcacgccatgatggactccagagtcattcttccagagtgcctccgctgcagccccgccggcaccccctgctcacakcgcgcacacacgccttcccgccatcgctcccccgaggcagcggtggctgagncccccgccgcctgggccgcgtccgggacgagctccgggaaccgccgcggggggcacaagaggccggggcaccaggtgggccgggggcgcggtggaagcggatggtctggg

SEQ ID NO: 515830 - DNA, 390 bp, Homo sapiens
  misc_feature (1)...(390): n = A,T,C or G
tctcagctgcttgataaaggtactcttgccactctctcctgtccggagcagcagcagcttgagctcccggcgggcatcccgcttgtccctgcggagtgccgctcgatctcgtcgttgatccgccgggcttccttggcctcctcgctcaggcagcacgccatgatggactccagagtcattcttccagagtgcctccgctgcagccccgccggcaccccctgctcacatcgcgcacacacgccttcccgccatcgctcccccgaggcagcggtggctgagncccccgccgcctgggccgcgtccgggacgagctccgggaaccrccgcggggggcacaagaggccggggcaccaggtgggccgggggcgcggtggaagcggatggtctggg

SEQ ID NO: 515831 - DNA, 396 bp, Homo sapiens
gttagaatttccctgaccctcacsagattattaacaccttcagtgttcttcccagatgcccagccagtatagctcacccttgtttccctttctatgagcccagggctcttgctttgttagatctgcctgacagcagccttttctggttccaagaacatctctttgagcttaagaaagaatagttcttagagtcttcagctcctaggtcaaactatcttcagttgtattcttgccaatgtgacagcttcaggttccaaggcctccatgctggggtttgctgcagcacagattggagaggagggctggggtccttctaggatatgaggcacctgtcacagctttcttctgcagcaagctcttgtcatctcagattctgaggagatcatcgctgcagag

SEQ ID NO: 515832 - DNA, 543 bp, Homo sapiens
  misc_feature (1)...(543): n = A,T,C or G
aagaagggaacggccctagccttgggaagccaaagcacacccctggctcctgccgacaccgccctccttcccttcccagccgcggsgctcgctcggtgctcggctactctgccgggacggcgcgcggctgcagatctgtggagagtcctgctgccctccagccgggctcctccaccggcccttgcagggcgcagagagctcggcgcgacccttccgctcgcctttttcgtcagccggctggagcagcatcggtccgggaggtctctgggctgaggcggcgacagtctctctagttccaccatgtccgcgggcgagacttcgggaatccgctgaggaaattcaagctggtgttcctgggggagcaaactntgcaaagacatctttgatcaccagattcaggtatgacagttttgacaacacctatcaggcaataattggcattgactttttatcaaaaactatgtacttggaggatggaacaatcgggcttcggctgtgggatacggcgggtcaggaacgtctccgtagcctcattcccaggta

SEQ ID NO: 515833 - DNA, 543 bp, Homo sapiens
  misc_feature (1)...(543): n = A,T,C or G
aagaagggaacggccctagccttgggaagccaaagcacacccctggctcctgccgacaccgccctccttcccttcccagccgcggcgctcgctcggtgctcggctactctgccgggacggcgcgcggctgcagatctgtggmgagtcctgctgccctccagccgggctcctccaccggcccttgcagggcgcagagagctcggcgcgacccttccgctcgcctttttcgtcagccggctggagcagcatcggtccgggaggtctctgggctgaggcggcgacagtctctctagttccaccatgtccgcgggcgagacttcgggaatccgctgaggaaattcaagctggtgttcctgggggagcaaactntgcaaagacatctttgatcaccagattcaggtatgacagttttgacaacacctatcaggcaataattggcattgactttttatcaaaaactatgtacttggaggatggaacaatcgggcttcggctgtgggatacggcgggtcaggaacgtctccgtagcctcattcccaggta

SEQ ID NO: 515834 - DNA, 543 bp, Homo sapiens
  misc_feature (1)...(543): n = A,T,C or G
aagaagggaacggccctagccttgggaagccaaagcacacccctggctcctgccgacaccgccctccttcccttcccagccgcggcgctcgctcggtgctcggctactctgccgggacggcgcgcggctgcagatctgtggagagycctgctgccctccagccgggctcctccaccggcccttgcagggcgcagagagctcggcgcgacccttccgctcgcctttttcgtcagccggctggagcagcatcggtccgggaggtctctgggctgaggcggcgacagtctctctagttccaccatgtccgcgggcgagacttcgggaatccgctgaggaaattcaagctggtgttcctgggggagcaaactntgcaaagacatctttgatcaccagattcaggtatgacagttttgacaacacctatcaggcaataattggcattgactttttatcaaaaactatgtacttggaggatggaacaatcgggcttcggctgtgggatacggcgggtcaggaacgtctccgtagcctcattcccaggta

SEQ ID NO: 515835 - DNA, 552 bp, Homo sapiens
  misc_feature (1)...(552): n = A,T,C or G
ggaagaagggaacggccctagccttgggaagccaaagcacacccctggctcctgccgacaccgccctccttcccttcccagccgcggcgctcgctcggtgctcggctactctgccgggacggcgcgcggctgcagatctgtggagagtcctgctgccctccagccgggctcctccaccggcccttgcagggcgcagagagctcggcgcgacccttccgctcgcctttttcgtcagccggctggagsagcatcggtccgggaggtctctgggctgaggcggcgacagtctctctagttccaccatgtccgcgggcgagacttcgggaatccgctgaggaaattcaagctggtgttcctgggggagcaaactntgcaaagacatctttgatcaccagattcaggtatgacagttttgacaacacctatcaggcaataattggcattgactttttatcaaaaactatgtacttggaggatggaacaatcgggcttcggctgtgggatacggcgggtcaggaacgtctccgtagcctcattcccaggtacatccgt

SEQ ID NO: 515836 - DNA, 285 bp, Homo sapiens
aagaacttgatagaaattgactgttttcasttagtgggctgatccccttgtatctgtgtcagataaaatcatagcacttattatttgttaccatggataccatgaagatactgccatccactaaatagtagtagaggaagacaacataattttctggaactagtcccgttttgccttcataagttgcctttaaccatcctggttccactgatgggtccacgctggaaaatatcgctccttgtgggaaggaaaactcatgctgtgctctgctttacaggagtacat

SEQ ID NO: 515837 - DNA, 498 bp, Homo sapiens
atgttcaacctctcccctgtgggccagttacaggggaaggaaggaagggggggagggaggaagggagaaagggagggagggagggaggaagggagggaaatttagtcctggggatacactaacagttccagaaacagaagcaatttattttctcaatttctttcttaccttcttttacactatcattcactaattaattcaatcaccagcatggttttacatgtccagcttctttccttttcttaaaaatctcttccaatcacaccgtctttttcttaaaagcttcaaatttcccatagttattttattcaaaagccacraggttcaacatgattttggcatacactctggatcacagaatagaattagaaaccttggcatggcccaacacacacatacacacacacacacgacacagctttctgatcagcagcttttggaaatggagtactgctgtggaagtagaaaggggattttcctattattagggacctacaa

SEQ ID NO: 515838 - DNA, 701 bp, Homo sapiens
caagaaaagtgccataaaggtaatacttgttatgtaaatttaaaataatgttaagagtttttggggttgggaggtggtaccacacrcttttaaataactagatctcacaagaacttactatcatgagaacaacaccaaggggagcaatctgcccctgtgatccaatcacctccaacattggaggattacaacattgagagacctcactccaacattggggattacaatttaacatgagctttgggtgggacacagatccaaaccacataattcctcccctgacctttccaaattttatatcctcacattgcaaaatacaatcatgccttcccaacagtcccccaaagtcttaactaattccagcattaactcaaaagtccaaagtatcatctgagacaaggctagtcccttccacctatgagcctgtaaaataaaaaaaacaagttagttgcttccaagatacaatgcaagtatgggcattgggtaaatactcctgttccaaaaggaaggaatccaccaaaagaaaggggctacaggccccacttgaagtctgaaacccaggaaggaagttattaaaccttaaagctccaaaataatcttgtttgactccatgtcccaatttcaagacacaccagtgtgagaggtgggctcccaagtccttggacagctctgctcctttgactttgcagggatcagcccct

SEQ ID NO: 515839 - DNA, 701 bp, Homo sapiens
caagaaaagtgccataaaggtaatacttgttatgtaaatttaaaataatgttaagagtttttggggttgggaggtggtaccacacacttttaaataactagatctcacaagaacttactatcatgagaacaacaccaaggggagcaatctgcccctgtgatccaatcacctccaacattggaggattacaacattgagagacctcactccaacattggggattacaatttaacatgagctttgggtgggacacagatccaaaccacataattcctcccctgacctttccaaattttatatcctcacattgcaaaatacartcatgccttcccaacagtcccccaaagtcttaactaattccagcattaactcaaaagtccaaagtatcatctgagacaaggctagtcccttccacctatgagcctgtaaaataaaaaaaacaagttagttgcttccaagatacaatgcaagtatgggcattgggtaaatactcctgttccaaaaggaaggaatccaccaaaagaaaggggctacaggccccacttgaagtctgaaacccaggaaggaagttattaaaccttaaagctccaaaataatcttgtttgactccatgtcccaatttcaagacacaccagtgtgagaggtgggctcccaagtccttggacagctctgctcctttgactttgcagggatcagcccct

SEQ ID NO: 515840 - DNA, 537 bp, Homo sapiens
agtactttatcctctttttcttggaactattccgtatttttgctgcaatattagttaaaatgggtttcttacttaamctaaaaattcaaatgtggtttatagcttgtcacaagtaaactacagcatttttaaaaaatgatttacaaaggtactttggggaagatattcatgactgaacagagacttcataaaacaaaacgagttgaaatcattcaaggaaaagacagaacttctcatcagaaagcatttatagctaagtctaagcctaaaattaaatagttaaaatttccagcacttctgctgttgtatgaggttgatgatcgccctgctacatttgccagttgggccattagaaatggaaaggtacaaaagtgcagaacaagcatctcgtgcacactcgccagtgctgggtgctgctcaggcctgtgctctatcaaatgcaattggactgcaaatatgtatgtatatattttttataatgaatttaataagtagccaacatctcataatatagaatttaactgtcattgttttcag

SEQ ID NO: 515841 - DNA, 534 bp, Homo sapiens
agtactttatcctctttttcttggaactattccgtatttttgctgcaatattagttaaaatgggtttcttacttaaactaaaaattcaaatgtggtttatagcttgtcacaagtaaactacagcatttttaaaaaatgatttacaaaggtactttggggaagatattcatgactgaacagagacttcataaaacaaaacgagttgaaatcattcaaggaaaagacagaacttctcatcagaaagcatttatagctaagtctaagcctaaaattaaatagttaaaatttccagcacttctgctgttgtatgaggttgatgatcgccctgctacatttgccagttgggccattagaaatggaaaggtacaaaagtgcagaacaagcrtctcgtgcacactcgccagtgctgggtgctgctcaggcctgtgctctatcaaatgcaattggactgcaaatatgtatgtatatattttttataatgaatttaataagtagccaacatctcataatatagaatttaactgtcattgtttt

SEQ ID NO: 515842 - DNA, 548 bp, Homo sapiens
ggggggcagtgctgcatgctggccagcaggccgcaacgctggctgccatcccggctgacccacggccacccgagtgaccttggagtcactcgccctctctgtgcctcaggctctccacctgcaagctgggtacacatctcatccrtggtgactacacggtatgacacacacaaagtgcctaaaacagcgctggacccttcgcttctgtgctgaaggggcacggagcgctgagggggccgaggacatacccgcgctggccgccacgcagtgtgtgtaccctagagacgtgtgacgccccaggaccggagttcacagcctgggctcagggggtctgaacaccaaggtcaccagtaactggggagcagatgcatctgtgcatcttcctcacaggaggctccacagcctttgcaaatgggcactgactccaaaagcaattcaactcagcaaaggctgtgagtcccacaacgcgtcagacactgctaagcccagagggcgtgatgacaatggtgaatgagaccaaaacagacaagcaattgagtcctcatgat

SEQ ID NO: 515843 - DNA, 571 bp, Homo sapiens
gtgaatggtgactggcccgttagtcccggggtcactgcaggaggaacggaggctcctccctcttctccttctgctctgtcgggccacgatgtcactgagagtgactgtccttatgttcctacataatcagatcatgcaggtaataggagctctggtccttttaaaaataatttgagggaaatgtttttaggagaggattggaacaaacgcttcttgggtttcttctagtttactgcacagaaaccatttactactagcagcttaatgaatcccgattgatcgcgaaccgtaatgtcagggtaaccgtcctcattttctctgttttcagatttattttggttactcagatatttacctctgctcctcagaggtagtgagctgatagtgtatttttcatcaatttagaacaatgcatgagaaagcaaaattctggcttccccgcaccctctcacttcwctgattaacatccagatacaattcacttctgagcaaaaaggttccgctcctctgtcattttttgcagcatgctgtgctccctgaagctgcaggtatgtcccctgttgtttacggg

SEQ ID NO: 515844 - DNA, 571 bp, Homo sapiens
gtgaatggtgactggcccgttagtcccggggtcactgcaggaggaacggaggctcctccctcttctccttctgctctgtcgggccacgatgtcactgagagtgactgtccttatgttcctacataatcagatcatgcaggtaataggagctctggtccttttaaaaataatttgagggaaatgtttttaggagaggattggaacaaacgcttcttgggtttcttctagtttactgcacagaaaccatttactactagcagcttaatgaatcccgattgatcgcgaaccgtaatgtcagggtaaccgtcctcattttctctgttttcagatttattttggttactcagatatttacctctgctcctcagaggtagtgagctgatagtgtatttttcatcaatttagaacaatgcatgagaaagcaaaattctggcttccccgcaccctctcacttcactgattaacatccagatacaattcacttctgagcaaaaaggttccgctcctctgtcattttttgcagcaygctgtgctccctgaagctgcaggtatgtcccctgttgtttacggg

SEQ ID NO: 515845 - DNA, 462 bp, Homo sapiens
ttttgctaagttttaagcatttgaacaaatagacacctcacccaataattacaggckgcctttgtacgcaggaagatcttcatcacttagcactgctagagattccgggtgcttttgaaaccttttttgaggaatgcaacttctctgggcttatacatataacttcccaattagagaacttcttcagtttctttttggggagctcatactctctttctctggtgtctgtctgtggtactgaaggttctctggcgttgccgcaggaaactactcaactctcctttgttctcagtgaccccaggcatccaaggtcgctagcttcccagcagttccctgagtcaagtaagacagataccagtccctcgagtagccctccaaaaacaggaacactgagtgcctgtttcattcctctcttccccactcagagggagatgttatgaaccagggtgttctctcttggtg

SEQ ID NO: 515846 - DNA, 462 bp, Homo sapiens
ttttgctaagttttaagcatttgaacaaatagacacctcacccaataattacaggctgcctttgtacgcaggaagatcttcatcacttagcactgctagagattccgggtgcttttgaaaccttttttgaggaatgcaacttctctgggcttatacatataacttcccaattagagaacttcttcagtttctttttggggagctcatactctctttctctggtgtctgtctgtggtactgaaggttctctggcgttgccgcaggaaactactcaactctcytttgttctcagtgaccccaggcatccaaggtcgctagcttcccagcagttccctgagtcaagtaagacagataccagtccctcgagtagccctccaaaaacaggaacactgagtgcctgtttcattcctctcttccccactcagagggagatgttatgaaccagggtgttctctcttggtg

SEQ ID NO: 515847 - DNA, 462 bp, Homo sapiens
ttttgctaagttttaagcatttgaacaaatagacacctcacccaataattacaggctgcctttgtacgcaggaagatcttcatcacttagcactgctagagattccgggtgcttttgaaaccttttttgaggaatgcaacttctctgggcttatacatataacttcccaattagagaacttcttcagtttctttttggggagctcatactctctttctctggtgtctgtctgtggtactgaaggttctctggcgttgccgcaggaaactactcaactctcctttgttctcagtgaccccaggcatccaaggtcgctagcttcccagcagttccctgagtcaagtaagacagataccagtccctcgagtagccctccaaaaacaggaacactgagtgcctgtttcattcctctcttycccactcagagggagatgttatgaaccagggtgttctctcttggtg

SEQ ID NO: 515848 - DNA, 437 bp, Homo sapiens
cctcttcaaccctctgtccacctctgtactctcctccacactggagccatcgtgatttcttcctcactctcaccaacctgctgcttcctggtctgcatagacccctcctcaccttcatccccactgcacataaacttatctttcaagactcagcatacacatcacctcctccgcaaattgaaactgcctttgcaaaattatgactgagacagtgaaagagatctaacttaactgactctatcttgcctctaacctccaagctgtccttgttcattcctgggygtaggctaaactaactttgggagaaacttagtttatagtttaaacaaaggtaataacagccctttcccaaagcagacctcctttttgcctggggactagattacctttgtaggactaacattagccacaacattagaaattatggtttaggagtc

SEQ ID NO: 515849 - DNA, 619 bp, Homo sapiens
cttggggtcggtgcagtgggaacgtgttatagatataaatgccttaccgttgataactcagaataagatataggatatcatcattaagtctgattatctaagcttatctgtgagccttacagaaaacaaaaacgaaagatcaggaccacaggttctttgactaccatttccctatttttttcatttgtcctgaacagggcctaacacaaagatagrcacatgaggcagggtagtacaaatgagtttttcccccgtatgaagtgacaatcacatggattatatgtgaccttgacattgttgagtttctaaagactttttaaggatgccatacccacccccaatagatcacaacctatttctctcattctaatgttggtcatttgattacatagtcctttgtggctctgtttgcttgagactgcaaaataaacaaaatgtttgcaagtccaggttgaccctaaaagctcttcattctgtaggccaaagccatgattcagagaacctgtggtctccacagtcaagattgtggttgatacaccccccttgaaggcagatgttttggttttaaggcatcaggaatgtgggcatgtgcatcaggattgatgtgttttggtgtggg

SEQ ID NO: 515850 - DNA, 619 bp, Homo sapiens
cttggggtcggtgcagtgggaacgtgttatagatataaatgccttaccgttgataactcagaataagatataggatatcatcattaagtctgattatctaagcttatctgtgagccttacagaaaacaaaaacgaaagatcaggaccacaggttctttgactaccatttccctatttttttcatttgtcctgaacagggcctaacacaaagataggcacatgaggcagggtagtacaaatgagtttttcccccgtatgaagtgacaatcacatggattatatgtgaccttgacattgttgagtttctaaagactttttaaggatgccatacccacccccaatagatcacarcctatttctctcattctaatgttggtcatttgattacatagtcctttgtggctctgtttgcttgagactgcaaaataaacaaaatgtttgcaagtccaggttgaccctaaaagctcttcattctgtaggccaaagccatgattcagagaacctgtggtctccacagtcaagattgtggttgatacaccccccttgaaggcagatgttttggttttaaggcatcaggaatgtgggcatgtgcatcaggattgatgtgttttggtgtggg

SEQ ID NO: 515851 - DNA, 325 bp, Homo sapiens
gtaaaaagggagatttagatatctaaacattattagtattattgtagaaaaaaccatgacatccatccccaatcagggttcttttatggggaagacaaacctgggagactggggactgtatcatttctgaggtttatattggggttaaggtgcataaaatyggctgccctcggtcacccttgaaggggacagttgagattccacaatgcattcactagtagaaactgcattttagggagattttcagtgaagttgttctaggttagtgcctttcagatgtaaagttgtcaaatgtaaagttgtactgatactgtagctctgaaat

SEQ ID NO: 515852 - DNA, 558 bp, Homo sapiens
atacaaatctggggagatgcaaacatccaggccatgacaccctgtgrttcaggagatggagacctgggcagtggccccagcagaggcacttggcttgaccctccctggctttgctgtccttattaggctgttacaaaactgtttccagggggcaggagaaggatgggttatgtgggtccacttcatgtgcacctgcttgggtgatgttttcctcccatcttttgtcatcaataaccagctggagtagagcgctgtgggctgcaagctgtcactggctgtgggctggaggctaacagaatgccatttcccggtgagcagacccctggtgtttggtgccccagggcacgcagaggccagtgcacgaaggaaagggcaaggggtcctaggagcctcacccctcctggcaagggttcaatgctgtggcttccctagaatatctggccctggacacttgctccaccctttaccagctttgcaccccgctttgtgcctctgtttcgttacttcttctgcaaaatgggaaaaataattgtaaaaaataaaaatattgtaccatgt

SEQ ID NO: 515853 - DNA, 558 bp, Homo sapiens
atacaaatctggggagatgcaaacatccaggccatgacaccctgtggttcaggagatggagacctgggcagtggccccagcagaggcacttggcttgaccctccctggctttgctgtccttattaggctgttacaaaactgtttccagggggcaggagaaggatgggttatgtgggtccacttcatgtgcacctgcttgggtgatgttttcctcccatcttttgtcatcaataaccagctggagtagagcgctgtgggctgcaagctgtcactggctgtgggctggaggctaacagaatgccatttcccggtgagcagacccctggtgtttggtgccccagggcacscagaggccagtgcacgaaggaaagggcaaggggtcctaggagcctcacccctcctggcaagggttcaatgctgtggcttccctagaatatctggccctggacacttgctccaccctttaccagctttgcaccccgctttgtgcctctgtttcgttacttcttctgcaaaatgggaaaaataattgtaaaaaataaaaatattgtaccatgt

SEQ ID NO: 515854 - DNA, 622 bp, Homo sapiens
cgtttttgggatcatttccaagaaatccttgcccaaatcaatgtcttggagcatttcccctstttttttttttctaggagttttacagtttcaggtcttacatttaagtttgtaagccattttgaggtgattttgcaccgtttcatatttaatggatgtttctatctctctccgtagggtgattgttcaagtttttgccaattttgctcttcagtttttaactcataaaaccttttatgtattctggatatctcttctttgttggttatatagagcagagatctttatggcttgtcctgtcattacagtgtcttttaatgaacaggagttgatttttaatttttctgctaaaattcaccttttttagtaaacaagtctgtgggttttgacaaatacacctaatggcataaccaccaccacaatcgaaacacagaattgcaccacactccaaaattccctgttgtcactcctttgtagccaccactcctgatccacagccccgagcaactactgatttgtttctgtcaaggaaacttttgccctttccaggattccatataaatggacacgtactgtttgaagccttttgagtctggcttccttcacttagcatcatgcattt

SEQ ID NO: 515855 - DNA, 562 bp, Homo sapiens
aatataattcacccatatacccttcacctagatttgacactcattaagattttgagacatatctttctgtgtatttgtgtgtacacatatagacttttttttctttaccatttgagataacttgtggacaacacgacacttcaccacgtgtggcataataaaatatatatatttgatytctgcctctggtttctgacacagagctccttgtaatttcctgagtgatagtggtgctaggggcatcttttgttcaaacatttgttctttgatctggttcctgacacagagctcctaaaaccctcataatttcctgtgtgatggaggtgatagtaacatcctaacacagagctcctaaatccatttgaatttcctgggtaaacaggaaacacccggctaatttttgtaattttagtagagacgggtttcgccatgttggccaggctggtctcaaactcctgacctcaggtgatctgcctgccttcctccgcctcccaaagtgctgggattacaggcgtgagccactgcgcctggcccgtctagacaattttggggggaatatttt

SEQ ID NO: 515856 - DNA, 597 bp, Homo sapiens
caactcttgataggaggaatatcaaaatgagaagaacatatggacaggaagcattggtgcagctatttatggaaaatacaatctgccacaactcccaaatagaattcyggcctgtagtccatgacaacaaagggaagccaggattggagtggtcagttgtccttccaaagcatgtgagctaatatccctctctcagaaagagttcagtagcatggctctctactactagaaaaaaagtccaaaatcctgtctaatctggcttcagcctatttgacaagcttgtctccaactacctccctgtgctatattcacattagatgatttacagtccttgaatttgtcctaaactataaattcttccttgccttctcccaggctgattcttaaactgggattgttctccttttgacatgctttgatgttaaggcaaactgtagcaagttgcctatcttagccttccttggaagacaagaagttcccattaagggacagttaccatccgggaaaggcagacagctgactgtgaggctagttgatcgctgtgcttgtcaccctcaccccaaaatgagtcctaatcactgccccaactactgcctt

SEQ ID NO: 515857 - DNA, 477 bp, Homo sapiens
gactgtgaggctagttgatcgctgtgcttgtcaccctcaccccaaaatgagtcctaatcactgccccaactactgccttttctgtaggattgtcttctctgtgcaaccrttaaacatccttgcacctcagaggtctgtccttccagaggtcaaagtaccctgattccaaccataaaatccccacaaattgaagacttgtctgattatcctgacttggggctggttaatggctgagccagaaattgggccttgtactgaagcacttggaggccaagctgaattgtcctgcgtgcagacaccatgactgagaagatgacttcaattaaaatggagttaattaagctttgagtcttgaaatctctactgaatcactaaattggaaggatgaaataaaccctctactcactcagcagcgttgggtgaagggtccaatgatgggatcaggccctacagataatatttccccttagagggtcc

SEQ ID NO: 515858 - DNA, 627 bp, Homo sapiens
tgtaagtaacgttagcacttggctcaaaatatccccaatatatacaagggatggagtagaagacagaagtgcatgatggagacaggaacaaccctctaatttagccacttctgctataatgtataaggaaagtaaatggttttggatggattctatttaatcccatacctgtcaaaattattacctgtcagttctatacacactacctaacacttgaaatgtgatgatttttatagaaaaacaatgastatcacaggatttaatataaaaattatgtgaccaaaacaatcaagatttaataaaaacttaagaaggctggcttgtagcagcatgtgttaaatcattttggagtcatatgactctctgaaacacatacagttaatttattacgaacaaagctgatgaaagagtcatcactataggccttccatacaatctcctgtactctgttagtaatacaattttaaggtgctgctatactagagaacaggaatagaccagaacatgtatagctgtctgtattctctttctgtttttaaaatctccagtgaaggaattactgtttagaacaaaattttgcaaactatggctcaaggaccaaagctttcccactggctgtttttgaaa

SEQ ID NO: 515859 - DNA, 537 bp, Homo sapiens
cctcacaataaaccttcctcactgcaaaattccagtctttgtctttctgttgtttgggcaaatggacccagtttagtttggttacaatgtcatctgattttattcaactatcctscataattcctttcattatttcctttgtcctccttttcctctttgtccccattttcccaagtaacactctgtattctaggagttaccatagaaatatgtgaaaagatgatatctattttttatcttgctgtacagttgagaaaggactgctgaattctgttggcttctcttacaagttctaagagaaagtggtcagccctagactatggaatgctctaggtacataaaaggcagcactaggaaattccaaatgcatgccttccaggggctcctgagacccactggcaactgtgtggaaaaaatagtgttgtatggcagtgttaaaatatatatatatatatatatatatatatatatatatatatataagagatcatggcggacaggaggcaggactagattgcatctcctgacagagcactg

SEQ ID NO: 515860 - DNA, 530 bp, Homo sapiens
tcagctgcctcacaataaaccttcctcactgcaaaattccagtctttgtctttctgttgtttgggcaaatggacccagtttagtttggttacaatgtcatctgattttattcaactatcctgcataattcctttcattatttcctttgtcctccttttcctctttgtccccattttcccaagtaacactctgtattctaggagttaccatagaaatatgtgaaaagatgatatctattttttrtcttgctgtacagttgagaaaggactgctgaattctgttggcttctcttacaagttctaagagaaagtggtcagccctagactatggaatgctctaggtacataaaaggcagcactaggaaattccaaatgcatgccttccaggggctcctgagacccactggcaactgtgtggaaaaaatagtgttgtatggcagtgttaaaatatatatatatatatatatatatatatatatatatatatataagagatcatggcggacaggaggcaggactagattgcatctc

SEQ ID NO: 515861 - DNA, 657 bp, Homo sapiens
ctgtcattatcatccagcttggcacatgcccctagggttttcctgttgagcaagggactgaaccgtgctgcccatgcttcctcataccaattataacttctgtgcagttatctaaaagggagaaaaatttatcaacatcctttctagccttgtaatgaggaagcaattttcccttattataactgactaaatatgtgccggctgaccctcaaggcccctcatcaccctcctcctgtccctctggaaatcatgcccaagactcacaattcatttcagatttccttgactcccttatgtgtttcatttatttctattaatctcacacttgttccatcttcatcttgcctgtgctgaatgccttttctcactctatgcccccattacatcactttctgatggactgctcattaaggcctgactcctgtttctcattttttgattttctgtcactgggctttctcaccaaaactgtacttcttgggcacaagaagaggaggatccttgtgccatgcaaattgtgtagtaggttccactcactttttcttttgtcaattttaagatgcttatgtgtcwtagactctctttttgttcaaagaatttttagattgtgtgtgtctgttttagccagaaacagtgacatctgttggctgcaagcaa

SEQ ID NO: 515862 - DNA, 657 bp, Homo sapiens
ctgtcattatcatccagcttggcacatgcccctagggttttcctgttgagcaagggactgaaccgtgctgcccatgcttcctcataccaattataacttctgtgcagttatctaaaagggagaaaaatttatcaacatcctttctagccttgtaatgaggaagcaattttcccttattataactgactaaatatgtgccggctgaccctcaaggcccctcatcaccctcctcctgtccctctggaaatcatgcccaagactcacaattcatttcagatttccttgactcccttatgtgtttcatttatttctattaatctcacacttgttccatcttcatcttgcctgtgctgaatgccttttctcactctatgcccccattacatcactttctgatggactgctcattaaggcctgactcctgtttctcattttttgattttctgtcactgggctttctcaccaaaactgtacttcttgggcacaagaagaggaggatccttgtgccatgcaaattgtgtagtaggttccactcactttttcttttgtcaattttaagatgcttatgtgtctwagactctctttttgttcaaagaatttttagattgtgtgtgtctgttttagccagaaacagtgacatctgttggctgcaagcaa

SEQ ID NO: 515863 - DNA, 241 bp, Homo sapiens
ggaggtaaactttctaaacttataatsaaaatattatagtgataacacaattatgctatataagatatgtgtatgtgttatatacagtcttgcttaatgatggggaaacattttgagaaatgcattgttaggcaattttctcactgtgtaaatattatagagtgtacttacacaaaactagatggtatagcctggtacccacctaggatatatggtataatctattgttgtttctatgcta

SEQ ID NO: 515864 - DNA, 241 bp, Homo sapiens
ggaggtaaactttctaaacttataatgaaaatattatagtgataacacaattatgctatataagatatgtgtatgtgttatatacagtcttgcttaatgatggggaaacattttgagaaatgcattgttaggcarttttctcactgtgtaaatattatagagtgtacttacacaaaactagatggtatagcctggtacccacctaggatatatggtataatctattgttgtttctatgcta

SEQ ID NO: 515865 - DNA, 241 bp, Homo sapiens
ggaggtaaactttctaaacttataatgaaaatattatagtgataacacaattatgctatataagatatgtgtatgtgttatatacagtcttgcttaatgatggggaaacattttgagaaatgcattgttaggcaattttctcactgtgtaaatattatasagtgtacttacacaaaactagatggtatagcctggtacccacctaggatatatggtataatctattgttgtttctatgcta

SEQ ID NO: 515866 - DNA, 611 bp, Homo sapiens
tttttccattgattcttaagagattacttacatattgagtgtcatatttttatcaataattcttgcaaatatttatctaacatttttatttgtttacttttacactctctcaattcayaaaagtattatttttgttaaataatttgttaaattatttttgttaaatctatcactattttcctcaatgaatgatgtctttcgtattatgtttaattttctttgccccaaaactttttaaatatttagcaatgttttcttctagtagttttttaggtgaaactttttaatgtagttaatccatcttgaatgtatttgagaaaaattgtgaagcagggatccatattcactatttttgtcatacacctagctattgaattaacactatatttgaagccaaaacaggtttgaataatgcctaacattatcactgagaagtgagatagtctacaaactgtgaaaatggttctcttattcttcagttttaagatagaatggttgtgatgaaagcctgactcaagtgagttttcaatagaatagagaggtttggagacaaaaaaaatgtaaattattgtgaagagttttagtgtaaactgcagcaaagaaatatagta

SEQ ID NO: 515867 - DNA, 611 bp, Homo sapiens
tttttccattgattcttaagagattacttacatattgagtgtcatatttttatcaataattcttgcaaatatttatctaacatttttatttgtttacttttacactctctcaattcataaaagtattatttttgttaaataatttgttaaattatttttgttaaatctatcactattttcctcaatgaatgatgtctttcgtattatgtttaattttctttgccccraaactttttaaatatttagcaatgttttcttctagtagttttttaggtgaaactttttaatgtagttaatccatcttgaatgtatttgagaaaaattgtgaagcagggatccatattcactatttttgtcatacacctagctattgaattaacactatatttgaagccaaaacaggtttgaataatgcctaacattatcactgagaagtgagatagtctacaaactgtgaaaatggttctcttattcttcagttttaagatagaatggttgtgatgaaagcctgactcaagtgagttttcaatagaatagagaggtttggagacaaaaaaaatgtaaattattgtgaagagttttagtgtaaactgcagcaaagaaatatagta

SEQ ID NO: 515868 - DNA, 619 bp, Homo sapiens
atctaatcagaacttgcagtgcttcaytgaaggctacataaacactctgttaatattcacagcagcagctttgtcaataactacctcagaatcttcaaatttataacagaaatcagcaaactattgattctctgacattgatagatctatccagattcactgcctcctttctcttgcctctgtcccaatagagggcacaaatgccagttgctctattaggctcctaaacactgaaagatcattattaaagtatggctggcatccctgatcattaattataatcgtgtgcacatatgcagagtgattgcgggaaataatcagctttctctgccaaattggcaacatctagaaattaatttgttatgacacagcatcaaagatatttaaacaacaaactcaaggctctactgctctgtgtacattgttaagatatcagataacatcattaaaaaatagttaacttatccagagggaggtggtatatatccttgaacttcctttctagtgggattctaaaaaataatttctgtgtgtccttgatcccacaattcatgtactggggactcccctccagagtgcctgctactcagggactattgacttagattgcccagaagag

SEQ ID NO: 515869 - DNA, 632 bp, Homo sapiens
acaacactgtagtacaattgattatcttcatcattttcaagttacaatccagtgcccatgggggtccacttttaatacgatcgtcatggcaacagcaacaagagattgcatgatatacacagtcctctcaacctttcaaagttctttcagagtttgtgccaaaaaagaggtgaggaggtttgggttaggacctggctccgctgaggactttataagtcaccgcacctctgaggctgcgatttctaggtctcgggtgacaggtaccaggccagaggatgtaggtggattattacaacccattaccctgacctgggaaagaaaagaaaagaaaagaaggaaggagagagagagagaaaggaaggaaggaaggaaggagggaaggaaggaaggagagaaagaaaaaaagaaagacagaggtgggggagggagggagggaaaataaaagaaaagaaaaaaaaacagaagaaaagaaaagaaaaggaccaaggacacagtctcaagggaagtagccaaagtgataacaaaaggcagagctyggagccctgacttgtgaaggcgtctgttcagggagttttgtttggtgggatttgttacatctgcattagcaaagcagtgctcctctaggctggcag

SEQ ID NO: 515870 - DNA, 651 bp, Homo sapiens
tagggttattgggagcattaaataaaataactcaggtaaagcactgagatgagtaccttcaataaatggtggctatttttaaaaatacccgttgattgatagatcttttcttgctgagcacccatgcatttattgacctgaccatgtttgtggtataccacctgatgtcgccacatggtcttagactcctctgatggcggggcatagtcctccttagggcatgagtgctaagagatggtttctttatgggaaaataagtaaaacaggaatctctcagccaggcagtaataacttctgggaacttgagaagggcagaacaagcaggtttcaaagggtgaaaacgtagcacagcttaccctcttgaaaactggcacccacggtgggtcaggattcatagacatctgaaggcccatatcatttcattgcctccccagcagcaggaattcacgttctcatgctctgctgttgatagggttcagtgacactgttcccacctgctgtaccttcagatcaaattgaacatagagagagaaagtaattggttggactttatcatyttcacctctgttgggcttaactctcataccaagacacatctggccagcttgcgggttggatgtgcctgagtcaggagcctgctcctagtccaag

SEQ ID NO: 515871 - DNA, 656 bp, Homo sapiens
cccaaacctttgaagaggtagatgtgtggaaaggaactgtgactcaaagttagggacaaagctgatgaagactaggagagaaatttctctcttcactgggaactgggaaacaggttgaggggttagaatgtaattagtcattccagcatctcataaagtcttttaaaaagagttattaatgccagtaataggaaaaaaagaacaacagtttccctctttttctcttctgaatccctctccattttttctccttccacccaacatgcgaagcatgtacctttggccttcacatgattgaaatgtttgctatctattttcttctgsattcaagttttcagctggttatctacataataattgactttttttctatacagaacctgagggaaaaatacccttcaccatcaaacactgcagcctccacccacccccatcttgctccctacccctaagcagacacaatcctttaaaacacacaacataatcttctttatttaattgtttaatcagtttacattccacaactgacagattatttattttttccatgaacaagtcatttaattaattaccagacacttgtttttcttcaatcaatggaaatacaatatttctgccaattcgaaaaagaaaattgcaagatgcagtcagtttca

SEQ ID NO: 515872 - DNA, 538 bp, Homo sapiens
gcatggaaggcaaccctgctggtgtgcaccagctcttcctatctgcactgaaatcacctctcactcagaaacatcgtatttccctggaaagggctggctgtgtcccctgggatggatgtgtcccctgggatgggtaagtcccctgaagacagggaacattttcagaaaagcaacttcactttaactacaagaatcaaccaagtatcccccacaaaccacaccaaaggatgaccagagtgtatctcttcccactccttcccccagatatttgaaaaatcacttaacactcagcacataatccaggtgaagagagagtccattctaaatgcctctgggtgatgtacctgagttcattattctgaatttgacccaggtgggcatctttggagacctaagcagcacatcctcccactaaatcaagacagctacacacagtgcattcatttccggcatcttatcatragtgtggatgaatattgagatatagggcccagtctcagagtcctaggatatcctaccctcttgtcacaggagaggc

SEQ ID NO: 515873 - DNA, 536 bp, Homo sapiens
actctgcttgttgcccctctgacctacaccaagggaagctgcttgaaaagatgttcttttgccaacaatcattttaccattgtaacccacaagtggaaaaacaaactattggctcctcttcagaaaacctattctcacattgccagaaccaggtagataaagaaagcaagccatagagttcttttaattcctgtctcattttccagaatgatctttaaatttttgttaccccagggaggcctattattcatggcatgtatgaaatggggcttatatatatgtcaacaattggtcactagtaaccttcccccaaataattaaattcatctagggaggctttaggaccactcttcccccagctcccaattccttctccctccttctgttcccaccccttactttaggatgtataagcccttctcatttgaaagtagaaacctctcacctgaattctcctctagctgttgccctatcttgtttcttttcttcacccagcttcyggagctgatgaattcctattaagtcaaatggaaatt

SEQ ID NO: 515874 - DNA, 630 bp, Homo sapiens
tgggtattgtactttttcccaaatgcttcacgtctcttaattgtctactcttcttggattatatggtttccaggttattatcagtttctgttgactatagcctgactttgggacaagtttgggatgtagacaggagctgaacatgatttgtctgatgagctctttggtcttcctgggggtcggtagctacttgggcattaccctgcttctccagccccagtgtatgatttgattcatgccacagttaccctggcttaacatagcagggaaacagaaagggaatgactggtttgctgctccacatgcagttccctaacttttcaagttgataaatggcccaaggcttcttctacctcttcatattcattgactctaggcttgtagtcctatcagacctactatcaggtcatctctacacaggttaggcttttgtttcctttagttttgttcttctaaacgtgagttctttagtaatatctttcaaaatttatttaaaaatttttttttctgatcataagtttccctgctttctaactctattaaaatggatttcattrtctatatttatctacattttatggactttagagggcaacagggagtggctgtgtgtgatcagtccaccatctt

SEQ ID NO: 515875 - DNA, 332 bp, Homo sapiens
cacaaaaataaatgatattaaattttaagtcataaagaatgaattgacttttcctcattgaaaccacttaattgttcagtggaacaattaattgttcttagttcttaattttcattctttttagtttttctttagtttttttttttagtttttttgggttaatggctgtctctctgaaggaaaastcacatttttcaggggaggctaaatgctcttgtggaggcggtttttagaatctgcaaacaaatctcccactccaggcccagatagtacttttgacttaaagaagagtaccctagggacagaaggctgatgctgtgatacctaaatca

SEQ ID NO: 515876 - DNA, 644 bp, Homo sapiens
ctgctgatgaggttgataaattatcatctccatctatttctaaatggagaaacagcttgcatctgttgagatgattgtaggtcatcctgtgagtacagagattagatcactcaggaaatgaagatgattctcataatacttattggctgaagtgagattttaaagctatggactggaattatatacaggagaaaasgagatttctagcaggtttttacacccacatcatatggctcagaaactgttgtgaattgggcttccatactaggcattgctaatgttccttctctccctcaagtaaaaagttattatgcagatcagttagacaaaagcttggaggtgttctgggatcatctcttcctttgacttcttgaccttggtaagcaattcacatcctcaagggcctatatatttaatgtacatcacatgagaattaaaagtgttttgtcattactcccattagggttaacctattttcctgctgacctggagatgattcaaagcccaatcttggccacaaatacacaccaaatattaaataggagtttaggattcaaaaggcagcaactcacatagtagttaagaaaacttactcaatcatatcttttagtgtaaatatgatgatgttcttcctgctattcctg

SEQ ID NO: 515877 - DNA, 535 bp, Homo sapiens
tttgtctttgatctgcatgcctttttatttccttgccccattctactgacctccagtaaaatgatgaataggagtagtgagtgcagacatttttgcmttatttctgattacaggaggaacatgtttttctttcacagttaattatgatgttgactctaagtttcttgtagatattctttttctaggttgagaaaattgccttctatttctatattgctgagagtttttatcatgaaagaaagtgaattttgacatttttccctgcatctagtaagattatcatattttctttttttaatttagtctattgaaactggattttttcatttaaagaacttagtaagagtccatactggataatcacaagataaatgtttcatgggagaagatggagcctgtttccagaggtttatacactatatatttatggaatgaaatcagacttcaacctttcaatgacactccataatccatcccttgtatatacttaggagacagataccaaaaagcttttttagtctctgtaagtcttaaa

SEQ ID NO: 515878 - DNA, 626 bp, Homo sapiens
tgaagagtacaagggaaagttggcagtctgcaagctggaagaggggtctcaccagagcctgaccatgctgccaccctgatcttggacttccagcctccagaactatgggaaataagtttctactgtttaagcccccagatctgcagtaattcrttaatagcagttggaactgactgaaacatctggaaccatgatatatctggcaatacagcagccacactgcaaccacatttttataaagtaagtggtaattagaatgatgggagtggatatcatgtaagaaaaacagaaaaaatatagagtatgaagtaaatatgttggaaaacaaattttaagcaacttcaaacttaaatggtttattagaagaggaaatgttgaaagaataaatgagaatgagtagctgaaaaggctggaaggaaattgatgaggtggaagagaaaaaaaacatgagaggagagaatgttttggcaagagggagtggttggtcatcctaaatgatgtaaagaaattaataaaagtaattaatttttgcatctagaaaatccaagataagtaagcaataattaaaactgtatggagagttccagtagtaaatcagatgtaagacaacaatcaaattctctcca

SEQ ID NO: 515879 - DNA, 563 bp, Homo sapiens
agggaccagagcatccatgaattttggcatccaagggagttctggaacaaatactcactgatactgagagatgactatataaatatatgcaaaatatatataagaatataaagctagatatatttctatccatctatgtatctatcatatatctatctaatatatctatctatatttttatttaaaagttttcctgaggctaagaatcacgagcatttatttttctaatgaccttaacttaccatctcttcttatttctagtgtaaaccaatttttctatatttccaatatacacaattgaggttttttttcaacatttttgtggtcttttttttccttaaccaagactttccccccacctccatggcacgactgctctccctaacactatcagcattgatcttcttcatggttcctgtttcatgcagcatgtacatgcacatacacacatatgcatgagttaagwgaataatttttttagaaaatgagtagaaaaagtactgttactctacactcttcatatcaaccaccagcctcttttctttggaagtccatacaatcca

SEQ ID NO: 515880 - DNA, 513 bp, Homo sapiens
tttttgaggttgggtatcctgaaaaactgaattgtcacttctgtgcttaattaaacctgaaactgcaaagataaaaatgtgttgtcatcctagatcaactaaatctgtcagaaaaaaagtacaaaataaataaaaaatggaagaaaatgtctggcctgatcaaataaactgaaaaaagaagagctggaagtaaaatgatttttcttcaaagaatgggctccctttttttctccaatggggacacaattgccctttgaacaaagtaatcatctgggcattcacctcaggcgtctcttctagcacagaatattattcccttatgctcctctaaagcatttccccctgttctattcagtttcttacctgggatgaggaacacattctgcaagtgtccgtttcatctataatatcaaagcagggaaacctttgcaacaggaaacaccctgctgagatygaataataaagttgcaaattataggtttggatgctaggccctgtctctcagcctttgtg

SEQ ID NO: 515881 - DNA, 558 bp, Homo sapiens
atcaagcctctgttttctcatttctagaataggaactaatgataatactttcttctgagagtttatgtgagaagaaaatgtgacaataaaatacgtctttycagaaatcttaacagcatagctcctttcaaatatgcatgcaaatcttgatgaccaaatcactaagtgatagacattggcacattagaagatataattctagctgccagaaatttccaaagacaatgaatgctattgggcagttgtgattgctgccactggggagccttaagcatatgaccaattggatgaaatgttgcatgagagatctgagtattagatgggtacgtggactaatttcaagacctcattctctaattctattatttttgcctattatttatgcctcacaccctcttcctggaagaagtttctattttacgtttttcctagagttaatgaaaagagaaaccagccgtgatttgtactttcagcccaaatgccctggaaaaggctgtgtggagctgattcttctggagtgcccagcctatgaacttggaatattcaaaagaatcaggt

SEQ ID NO: 515882 - DNA, 624 bp, Homo sapiens
ggtcagcaccccacaaccctcatgttgctcaaagttcaactgtgcaaagaaaacatgataatagaaagaagtttctcagaaggcaggggaaggtaaagttggaaacacaaaagcataatcattagaaaataaaatgatagcttttgtattgcattcaaagaggaggaagaaagaatacatcacctaatgcaggaaatctgtagattttttaagggtttctatgaagtgacttatcctttcttgtcaaagttagaaggtaggttatttgcttagacttccttgttcttatacacaaatgcaatttgttgagttttgtaaatcaaagtacratattttagctattattagctgaatttggcgaggttagaactgaggattagttatttcagcttagtcttcaggatctacagtcagtggtggaggtgggatggggccgagttgagtgcgggtgggagctgggggtgttcctgcattccaaagcctggtctctgactcctgagcagggctgctgctatccttccatttccacatacattgaacaacaaactttttttcagttttcagcctgtgttttgaaagtgtgtgggagacaacactttcacttggtgcattcacttaagtgtc

SEQ ID NO: 515883 - DNA, 618 bp, Homo sapiens
tgtgtattcagtattagggtgcttataatgttagctcacatttatattatggtgcctgtggtggatcatttgatataaattagcctcaytcccactctgaaactctaagtttgatcctcctctttaccatttcttcttctctgtttcaaatctgaatgcaggccaggctcagtggctcacacctgtaattccagcactttgggaggctgaggtgaaaggatcccttgaggccaggagtttgagaccagcataggcaaaataatgagaagttgtttctacaaaaataaataaataaataaataaataaataaagacaataagcttttctcctcaccactctccctcattttcactttgaattgtgactgtagtgcctttaccttcaacccaggctgagacattgaacatcctgggtaacattgtataacagagtaacttttacagaaatgttggtgccagattaattaaatgagattctctggaagtgaatctccaggttgttgtagtttagtttgtacactttccctaggtaatcctaatatgcagccagggttgagaattatgactgtagtacactgattctcaaacttggctgaattttggaatcccctgaggagt

SEQ ID NO: 515884 - DNA, 575 bp, Homo sapiens
tgccaaaagttcatgaggggttttcaaggaagactcaagagaagagaaaaatgtagttgcctatgctgaaggtcaccaaggtaagactccccagaaaggtctgtggcaggaagagagttctgagccatcacatagctctaagggcaaaatatggcagccagcagatcggaagaccaggactccttagcatcaggtttgaatgattgcctgtcaggcagatgtgtttgtaaacgtaatgacgtttcacagtgtgatgagattgaaaatgaagcctaattgcttccggctgatttaacccttggaatgcttccaggcatgctcacagccatgtgwctttaatcatgtgagttaatcaccgttcgagggatacatcgagaaaagcagtggcttataggaagcctgggaagcattgcagttgtgttattaagcctgcacttctgggggctgtcatctcttcaaataaggacactgagaggttggccgtgtgcccttacactagtttttgttagtaacaactgacataggcaattacagaaaaaatgaattaatatttatgaatttttaagtgactttaa

SEQ ID NO: 515885 - DNA, 657 bp, Homo sapiens
ccaaaagttcatgaggggttttcaaggaagactcaagagaagagaaaaatgtagttgcctatgctgaaggtcaccaaggtaagactccccagaaaggtctgtggcaggaagagagttctgagccatcacatagctctaagggcaaaatatggcagccagcagatcggaagaccaggactccttagcatcaggtttgaatgattgcctgtcaggcagatgtgtttgtaaacgtaatgacgtttcacagtgtgatgagattgaaaatgaagcctaattgcttccggctgatttaacccttggaatgcttccaggcatgctcacagccatgtgactttaatcatgtgagttaatcaccgttcgagggatacatcgagaaaagcagtggcttataggaagcctgggaagcattgcagttgtgttattaagcctgcacttctgggggctgtcatctcttcaaataaggacrctgagaggttggccgtgtgcccttacactagtttttgttagtaacaactgacataggcaattacagaaaaaatgaattaatatttatgaatttttaagtgactttaaagaactcctaatggtagtggagtgaaagtagcaagtcaccttgatccttctaaggccaccatgaacttcagtccagctctggaa

SEQ ID NO: 515886 - DNA, 458 bp, Homo sapiens
aaatctgcacaaagtatgtacaaagatattaaagtgatatatttgttaagtgtgtagctggataaaatggtgatattcttttgcaatagcaaaataactcagttacctytgaaggtctttaaatagttttgattgagaccatcaggaacaggaaaataaaatattgccagtctctttagtcattgtatgaagtgtactcattaaagggttacctcttaagctgagcccagagaacagtcagtacaatgaaaggtatggcaaccaattttccaggtacactgagcactgctttttagagttattagttttattacctactatataggttagctggtgacagagggttacatctttggtgcacaccacacatgactcagggcaagctgccaccaaccgcaacatgatggcaaagagtaccagccatccacctgaaaggaaagtagagggcaatgtatatc

SEQ ID NO: 515887 - DNA, 608 bp, Homo sapiens
agtttttcagctccttgaggctcatttgctaacacaattgtggytacaaggaaagagtgaaaagcatcatgggcgtattagagtcagagcaagagaaccagcttgctggaaccctaggcacaaggacagttcaagaaaaggcctgaaatgaatgtagcaaaaggattctctatggaaaatgccatgatcaatacattctagatacaatctcagcacaaaggagtgttttgagatctgtgaaatgatgccaactaaaccactttttaaggttttgaggagaatagcataaaggtcaccaaagtcccccttcaaccaagaattcaagttagattaagaagagtgtcagagtagatcttaaatgttctcacaacacacacaaaaaggtagtcatatgaggtggatagatatgttaattagcctgattatggtaatcatttcacaatgtatacatatgtcacatcaccttgtgcctcatacgtataacttttatttgttaattatacctcaataagggcagaaaaaagagtgtcctttttaagaagtaaatcaaagctgagatagtccaaagagagcttactcttccccagaattagtaaatttaattgtgg

SEQ ID NO: 515888 - DNA, 608 bp, Homo sapiens
agtttttcagctccttgaggctcatttgctaacacaattgtggttacaaggaaagagtgaaaagcatcatgggcgtattagagtcagagcaagagaaccagcttgctggaaccctaggcacaaggacagttcaagaaaaggcctgaaatgaatgtagcaaaaggattctctatggaaaatgccatgatcaatacattctagatacaatctcagcacaaaggagtgttttgagatctgtgaaatgatgccaactaaaccactttttaaggttttgaggagaatagcataaaggtcaccaaagtcccccttcaaccaagaattcaagttagattaagaagagtgtcagagtagatcttaaatgttctcacaacacacacaaaaaggtagycatatgaggtggatagatatgttaattagcctgattatggtaatcatttcacaatgtatacatatgtcacatcaccttgtgcctcatacgtataacttttatttgttaattatacctcaataagggcagaaaaaagagtgtcctttttaagaagtaaatcaaagctgagatagtccaaagagagcttactcttccccagaattagtaaatttaattgtgg

SEQ ID NO: 515889 - DNA, 241 bp, Homo sapiens
cttccccagtgcagccatcctagtgagattcatcccacactttayactcttatctggaatttgctggctctgaaagtaaatctggtctggtatcgcatgtccatattttttttttgtcctttagtttgtatctcctctaagccttctggctccttttgataaacatttgttttagctttcatttgtgttttgcacagcaatgtgcacattacattctaaatactcaggaaatgtgtgttcc

SEQ ID NO: 515890 - DNA, 584 bp, Homo sapiens
ttaccttgaaaaaatagtttagaggattaataatactgtatataaagtatctcaggaaattgtagctgttataataatattatacttggttttaataatctgtgagtgtttataactgttctccccaacttaattaggaaataatagccaccttaagatattcattgaataartgaataaattcaaaaatgagtgagtgaagaaatggaaaagcacaagcaggctggaagatccaagttattcttaaagatagagatacaggaaagtactccaaaccaagaaaggaagaaaagcactcacacttggtaactgtttctttcctacttgaccctgactttttacgttacagagaaatgctggcattagaacaagtgcctcctcagactaatattgaatttaatcattaattactaaacaaattgtgtactctgtgatttttccaataggtaggaaacagacttctcaactcagccttcttggaaatgtttcatcacactagagacgtgtccctaacttatccagtggccgacctttccctgaacacctaaaaatacatacattgcagtgccagcttctggacagat

SEQ ID NO: 515891 - DNA, 570 bp, Homo sapiens
cttgtaggaagagagctaagtactgaaaagaagtggttactttatgtaagtgggagcttgatgtctaatttcacatattggtgctttttgccttctttccatttgataggctggctcacaccttccatgaaacactttatttatggggttgcagacacaccaccttcctttattattctaccttttggcctgcttctttcccatctcctttgctcatcttcctcaatttcctgacttccaaattttggattaycccagggctccttccgtagatttttttttaatcaagtttatttaactcactctgtaagtgatctcatactgccccatggctttaaataattgtctaaataatgatgactcttatatttataaatcttctatctctgaccctgaatgaatccttcctaatcatggggctcattacttagcttccattcaacatcttctttggatatctaaaaggcactggtctatagagagctgtacttaagtccaaaactgagctccagattacaattccctcaacctcctcttccttcaatcttccccatttctgaggtaaacaac

SEQ ID NO: 515892 - DNA, 643 bp, Homo sapiens
ttacttcgtgtataaataaatgcctctgtgaagacttccgtgtgatgccaatctcccaaatttcaccaaacagtatcagtagtccctacatcactttcttctcttactatgcatgtacttttctcatctttctatgcctggtacccagtacctacgttgcaataaacacacyttggtatatgaggaaagaatgaataattaaattaatgattagtgaatcagtaaatattatatcttgcctcagaagcaactttaccaatttttctcaagaagtttaaaatatacaggttactaaatcctatctctcacttccctgaaagtctttaggagtaggacctgtgaatctgtatttttagtagtcaaaacagaaataagaacctgggtttaagaaaaagttgtgcccaacatactgattcagctcacataaaactcccaccttaattcacacttacaatatcagagagcttgataagaccaagctgagggcatcaatgggaaaggagggactcatctcatccttaaatcctacctcataggagagctgcttacctcgtaaccaaccctacctggaagaaagcctgaatgtgcttcacatttcaggcacattatataatattctttgaataatatcaacataagaaat

SEQ ID NO: 515893 - DNA, 634 bp, Homo sapiens
aaggtagccactgccaggattgtgaaaaggttgaggaagggaatgtcaggatagggataaatactgcaacctctctccctctcaaatcctgccctccaatttcctacctgtgtctgccacttgcccaaacaacaaaaatccagagtataaggaattctggataatgcagtccacagaggtcagctcctgggacacagaataaggcagagaagggaatatatttaaagggcagagaataaccaacacagaaacttattcaatattttaaaaagacatactggtgaaaaagaaacaaacctggactgacaaagtgactgtgtgagactttaaattgtcctggagcccccagtcttctgyaggccaaatgtaggaaagctgctcatctctcttgagttgaagacttggagcctaatcaagcaatatttcccatcacctggggaccatcccttctgcccagcacatacgtttggtttctatggatcagtgattcctgtgtatctccctttccttccctttctgaatggaagtatttatgaagttatcatgctcttgcttttgccattgcatatcagatgtataggggacaggtaacttgtcttatagttcatagatctctgggtcataaggaaccaca

SEQ ID NO: 515894 - DNA, 613 bp, Homo sapiens
ctgagagtgtaggatgtttacagtatctgtcgctcagtgctctctaggatggggttggcagtcagcagcacaagcctcaggaaacccagtaccatttgaagataccataatatgtcacaggaaaagatcagaaaagtatacttgggactaaattatggctcttttaggagtagggttggaagggtgggtggggaggctatatgacacttacttagtgctgcctgctcagttcttgttttcttcctgttttgcacatcctaagatattcctaaggtctctagctttgagcttgcacactcacggatttggttaattttggattttcaatattctatgctttcccaaaagggtttcaaaatattcgccaawctccttccttaaacagtacataatccctttctgactgttgggagacatgaaatgcagcttctcactctctgggctatacaactttgtttcagctcactcctgcacagaactgagaataatggctaaacagaagaccaacagtttaattactgaaaattagttaccttaatgatgggatacacagtaataaatttaatcaaatgagcaaaaagtaaatatgttagaatacaactttacatgcata

SEQ ID NO: 515895 - DNA, 642 bp, Homo sapiens
acacacattggtgcctgtgtggtgggaggggggacaggagagcatcaagaagaatagctaagggatgttgggcttaatacctaggtgatgggctgatctgtgcagcaaaccaccatggcacacatttacctatgtaacgaacctgcacatcctgcacatgtaccctggaacttaaaagttgaagaaaagaaatattacagagcttgtgacgacttacagtcgggggtcctagattattaaaaactgaggaaatgtcaaaaaaaattcataaaaattgtgttatattttgagttgccacatttaacaaatataaaccactagcacacacacataaaaatgctgtccctaaagaagatatccaggcagtatgggccaccaatagtgcatgtttaagactgtgtgatgaatagctgaatgatgacataccctgtcagtgtgtttatgtgactctctatataatatcatttggagataatgccaaaagcataactttgaagtggcaataaatgctaaaccatagcaaaatggctgtttgcyacacacacctccctgctcatgtacacctggagcaggtgactgcaaactgaacgtggtaggcaatggataacatgtagggtagattttaaagaactaccagaacta

SEQ ID NO: 515896 - DNA, 650 bp, Homo sapiens
atgcaattccaactagatttaatggtagtgcstcctccccgcaccccaagaactctttaaggtcttctgggtttatcttattaggataaaaccccctaaattagttgattcataatgcgatttaaatgatatactttcaaagagaggataaatgaatcatcgagctatttctccatcccaaccccaggcttatacagagattctatttttaatgtcttaaatttaaaaagcaaaaattatcttagtagctgtgggcagttgaaactttaatgaaatttgattaagccaacattcaattagaagacaatgtaggtcacaactagaaatgatttataggatgtatagcaagatccctcagccctgttaagattaatatttttgagagcaggctgcactcactctcctcacctcctctccccgctggctccatctgcattctgctgccattgttctagtgaagctgccctctctgaggctacagtggcaatggctccatcagtccttctctggctcagactcaacattcttcacttttggtctcctttcttggttcccatggcactgccttttcttggatcacttcacctgctctctcaacagattcctttcacttccttctcttcttttccccatttcttagagacaaaacc

SEQ ID NO: 515897 - DNA, 650 bp, Homo sapiens
atgcaattccaactagatttaatggtagtgcgtcctccccgcaccccaagaactctttaaggtcttctgggtttatcttattaggataaaaccccctaaattagttgattcataatgcgayttaaatgatatactttcaaagagaggataaatgaatcatcgagctatttctccatcccaaccccaggcttatacagagattctatttttaatgtcttaaatttaaaaagcaaaaattatcttagtagctgtgggcagttgaaactttaatgaaatttgattaagccaacattcaattagaagacaatgtaggtcacaactagaaatgatttataggatgtatagcaagatccctcagccctgttaagattaatatttttgagagcaggctgcactcactctcctcacctcctctccccgctggctccatctgcattctgctgccattgttctagtgaagctgccctctctgaggctacagtggcaatggctccatcagtccttctctggctcagactcaacattcttcacttttggtctcctttcttggttcccatggcactgccttttcttggatcacttcacctgctctctcaacagattcctttcacttccttctcttcttttccccatttcttagagacaaaacc

SEQ ID NO: 515898 - DNA, 602 bp, Homo sapiens
tgaaaataaaagagaataaattctattccactgtaagaagttgatttcttttcagctttctttgtatatcagtaaagaacacgaattgtttgaaaataattttaagtctgataagtatggatagcatgttacctaagcttttaatttgtacattttgatgtctgatcatttgcatggaagagacaatagtgccacgtctgaattgttctcttgtgcttggttaatatgtacttctctagattgttcaaaaagtttcaaatgacattccttactctttggttttcagaggcattcaagcaaaatatcacagtggtcttttgttttctgaccaatctaamaatacctgtgattaaatttaatttgttagtgtaaataaatttcttgccaatgagtattattgttgttagacaacgaatgcaataaaaagaaatactgaggtctgttgaagcaattttttttccctcttccattttcaccttcaactaaaacaagccttgactgggtaaacctgtatcaattgtcaaagcatatatctgtcaatcaggagcaaagtgcacatttttcatggaaatgaaactaagtcttaactgtggtaaagtgta

SEQ ID NO: 515899 - DNA, 558 bp, Homo sapiens
tgtactgccttgcaacactgtgccattttctgcataaacctgtgtcactttaggttcttctgttagaatgttctggattcgaagcacctgtggaagaaataacattgggttaatatttttgttaagtcacttaaaacaaccttatgcataatagggtcatcctccataagaagccatataatcttatacaatgagataaatcctattttgttccaaaattacacttaacacacctgtttcttcatttgggaacaggtgggtactgatctcaagtgatctttagcagaggtggagagtatctagacctacagggatgaggcaggaaatgcaaatgagcagcgcatcctggatgtgggacattagggagcagtggggatttcagtaaatgtggagggaggaagctgttactcagtatgatrgttaatactgagagtcaacttgattggattgaaggatgcaaagtattgatcctgggtgtctgtgagcgtgttgccaaaggagattaacatttgagtcagtgggctgcaaaaggcagacccacccttaatctgggtgggc

SEQ ID NO: 515900 - DNA, 449 bp, Homo sapiens
accagcgtcatggaacaaactccctgggggattagagatcatgaatctgccccagggagagaaggcaagagatgatatcatgaggyctgcatcaggagcaagccaaatccccaggatagatgcatccttttttcttcagacttggagtgtatgtgtgtgcggctcacaggaagctatatatgcctgggctggagggaacttaaggaagcacacaagggatgcctcaagagatttctgagtttcccaggtgggagcagtacagagaaaagaactgagagagttcccctagaccacgagtctcccacccacgagtctcccacctttgtagtcggctgtatgtgccgcacaagtccagggaatgccttggatgatggtagaaacagctcccctcccctaccccaacttgggctatggaatgttgcagcatctgtatggcaacttccttgtcc

SEQ ID NO: 515901 - DNA, 618 bp, Homo sapiens
tgctatgacaatactgtatcactagttctctaaaaaaaaaaaaaaaaaaaagtttattgtttaaatctcttggttgtgctaacgtcgtctgtttctttcaaatgcagcatcagtagcttcgctctgctcaggcagccggctggcacttccctctcacatctgttcatttttcctttgtcctttactcagacattttctatggtgtttatgcactcatatctaataagtcgctcctgtgtatgtgtgtgagtgcacctgtgtgtgtgaaatgcctttttacatgcaggccttgtgtatgattttctgaagttaaaaatcctttcaacgtacctgtatttttcaagcactacatcacaaagcagatgcccagtccaggctgcggagtcagattgggcagatgagtaggaggctgcccatctgtcagcaactctaaaacatcaatggaataaactggaaccatgttgccatttacccggactttccacttaggagtccttacacactgatgaaattgctcctgttcctrccaaagtacacagagccctagagaggatattatgtatctcttatgtgtacctatccacctctgctaaataaaaactaaatattgtacccaga

SEQ ID NO: 515902 - DNA, 571 bp, Homo sapiens
ctggttccaaccaaccagctttgttatttgaagacaattggtttgagatcatgcttttgtgtgctttgggtgtttctttttctttttttttttttttttgttcttttagaattattcatctcagttgattaaggctcaggaggctagatcagatgacttagtaccactaaatttcactagatatcttatggtgcgattgttttctagaaaaatatgatattgatatcaaatatcactgggtttttgaaaagcaaactttccactaagtgtagaaatacctatcaaatagttcatttttctctagataaattgaaatgttaaaaatttacatgtacttaaagtataactaacttgaagacagtaatatttaaccgatgtttataattagtagtaaaaattcatattcttgatcamctaaaatgtatccccattttaactcaactatttggaatttgcttatatcttcaatatggctttccaagggtttaattgatttggaagtattaagtatcaacatatatttgtaatttaccttgtatctttagaaaacaagttcttttcaaataatcat

SEQ ID NO: 515903 - DNA, 528 bp, Homo sapiens
gactgtctcagaggactggcccacattgtcagtcaatgggtttctgaatgcctcctctgtagtcctgggagcccccctagaagtcccctatgggctctttgttgggarcactgggagacttggcctgccctacctgaggggaaccagccatcccctgaggggttgcctccatgcagccgctctcaatggccgcagactcctccagcctctgacccccaataagcatgagggctgtgctgaagagttttctgccaatgacgatgtggccctgggcttctctaggtcccactctctggctgccttgcctgcctggggactcaggatgaaggaaccctggagtttacactcaccacacagagctggcaggcacccttggccttccaggcagcaggctggcatggggacttcatccatgtggacatatttgagggccacctgtggtccatggttgagaagggccagggtactgtattgctcctcaacagtgtgcctgtgactgacgcacagccccacaaggtcagcatccac

SEQ ID NO: 515904 - DNA, 528 bp, Homo sapiens
gactgtctcagaggactggcccacattgtcagtcaatgggtttctgaatgcctcctctgtagtcctgggagcccccctagaagtcccctatgggctctttgttgggaacactgggagacttggcctgccctacctgaggggaaccagccatcccctgaggggttgcctccatgcagccgctctcaatggccgcagactcctccagcctctgacccccaataagcatgagggctgtgctgaagagttttctgccaatgaygatgtggccctgggcttctctaggtcccactctctggctgccttgcctgcctggggactcaggatgaaggaaccctggagtttacactcaccacacagagctggcaggcacccttggccttccaggcagcaggctggcatggggacttcatccatgtggacatatttgagggccacctgtggtccatggttgagaagggccagggtactgtattgctcctcaacagtgtgcctgtgactgacgcacagccccacaaggtcagcatccac

SEQ ID NO: 515905 - DNA, 528 bp, Homo sapiens
gactgtctcagaggactggcccacattgtcagtcaatgggtttctgaatgcctcctctgtagtcctgggagcccccctagaagtcccctatgggctctttgttgggaacactgggagacttggcctgccctacctgaggggaaccagccatcccctgaggggttgcctccatgcagccgctctcaatggccgcagactcctccagcctctgacccccaataagcatgagggctgtgctgaagagttttctgccaatgacgatgtggccctgggcttctctrggtcccactctctggctgccttgcctgcctggggactcaggatgaaggaaccctggagtttacactcaccacacagagctggcaggcacccttggccttccaggcagcaggctggcatggggacttcatccatgtggacatatttgagggccacctgtggtccatggttgagaagggccagggtactgtattgctcctcaacagtgtgcctgtgactgacgcacagccccacaaggtcagcatccac

SEQ ID NO: 515906 - DNA, 287 bp, Homo sapiens
ctggccatacaaatccaccgcagcacagggctgcatctggcccagggctctgccatgcccatcttgcctaccaacctgttggtggagaccagcgccgtggggcaggatgtgaccgtgctgttccrtgtcaccggaggcctgccgttcagggagctgcagaagcagggggctggtggggtggaggatgctgagtggtgggtcacacaggcgttccaccagcaggatgtggagcagggccacgtgagatacctgagcactgacccacagcactacaccgaggacaccgt

SEQ ID NO: 515907 - DNA, 287 bp, Homo sapiens
ctggccatacaaatccaccgcagcacagggctgcatctggcccagggctctgccatgcccatcttgcctaccaacctgttggtggagaccagcgccgtggggcaggatgtgaccgtgctgttccatgtcaccggaggcctgccgttcagggagctgcagaagcagggggctggtggggtggaggatgctgagtggtgggtcacacaggcgttccaccagcaggatgtggagcagggccacgtgagrtacctgagcactgacccacagcactacaccgaggacaccgt

SEQ ID NO: 515908 - DNA, 515 bp, Homo sapiens
gaggtgaggagctggaggtggtgagcggggtgtggaccaggtagagggccttcctcccagcctccatgccgggaacacatgtgacttgggctgtacctgtggtggtcccagcttgcgtgtgtgcacgtgcctcagatatgctcccatatatgttgtgttcccaagagtttctggggagcttgctgtacacccatcctcctgggagtggtgtgtgcctctagagctggtgcccactcatgtccatggcatggctgagcatgcagattcctggacgccacccagccctacagaatctctgaagtggagcccgagaatctgcattgcagtcagttccctgggagggcatcacgggtcctgaacttttgggattgctggccgtggagacaggccgctgcctctcagacccctgtgtaccccgctctcttctcagagcccagaccaggaccaggagggtctgtcaagggcttctgctyacccaggaacctcacagagcagccacgggccttccagagatc

SEQ ID NO: 515909 - DNA, 627 bp, Homo sapiens
cagagtggggtgcaaggtcctcaacccagaggttccctaggccccacttgccccagctcatgagagcctggttctgagctctgccaggacyggggctcagcactgcccatgaaaacaggcgtggcagggaagaaaatcataaccaaatatttgtagtcattccagaacctcccttctggaaagggaggttcccaggtttgtgggctctttgcctcctggacattattgtgtagtgaagggagaaaggttgagatgcagagttggagaaactaagagaggccgaactggtccatttgaggaaagatgactgatcccagaaggggaggaggggacaccctggggaagcagggggcttccagatggtccaagaaggggagggcaggatatagaaagtcagagcatggttttgagttttggagacaacaagagaaaagagggagggatttggacaactatggagaggactgggctgtggagagaaatgtgtagagatttggaagatggtgtgtcatgcgatgtattgtgaaaaccccttcttcatatccctaaaagaccaccgctgatggtgattcatggtacaattgatgattgtatcatgatataattcagtgcttttgcagagggatt

SEQ ID NO: 515910 - DNA, 657 bp, Homo sapiens
ctgcagagtggggtgcaaggtcctcaacccagaggttccctaggccccacttgccccagctcatgagagcctggttctgagctctgccaggaccggggctcagcactgcccatgaaaacaggcgtggcagggaagaaaatcataaccaaatatttgtagtcattccagaacctcccttctggaaagggaggttcccaggtttgtgggctctttgcctcctggacattattgtgtagtgaagggagaaaggttgagatgcagagttggagaaactaagagaggccgaactggtccatttgaggaaagatgactgatcccagaaggggaggaggggacaccctggggaagcagggggcttccagatggtccaagaaggggagggcaggatatagaaagtcagagcatggttttgagttttggagacaacaagagaaaagagggagggatttggacaactatggagaggactgggctgtggagagaaatgtktagagatttggaagatggtgtgtcatgcgatgtattgtgaaaaccccttcttcatatccctaaaagaccaccgctgatggtgattcatggtacaattgatgattgtatcatgatataattcagtgcttttgcagagggattggtgcctttttaaaataataatgatgc

SEQ ID NO: 515911 - DNA, 274 bp, Homo sapiens
gggtggccctggcctactgtattctaagtttgttcgaaacaccagctctgcagtgcgttgctgaaaaatgaaacttctctcagccatgataacaacacccagtagcacagaaagagtggaagcaatgcaattttagggccattgtgtcttctgttgcctccttcataaagctaatgctgtgagtgtgtgtgtgtgtgtgtgtgtgtgtgtgtgtgtgtgtgtgcgcgcgcgcgcgtgcgcrtgcgcgtgcatgctcataagggctgagttcaca

SEQ ID NO: 515912 - DNA, 525 bp, Homo sapiens
ctgccatgtctcactgctgggcagtctagggtcccctgtagatgagtgactcttgaatattgagaggtcatatctctcactgaggatcctctagagcttgatggcctgaaggtgataggaaacaaattggttatttgatttagaagacatggaccaaaaaggagcaaacgtacaagactaacaactggtcctaaaaggggaagaacccagccgaaccatttccagcttccttcccaatttaactaactctgggaggcttatttccatacactagaagtggcttggtttgggagctgtctgacattgtcttccacttttcctgattgatttacccaaaggcaacattttttatctagggataaacaaattcctctctgtacttccattaayatatctgatcctcaatgattttggaggacaacaccagataaggagtccatttgttcttgcacaattgttaagattttagccatggcatcaatgtttttggctatttcctttgagagctggctacaggctaaggag

SEQ ID NO: 515913 - DNA, 537 bp, Homo sapiens
agcatggccagaataaaagcaggcagaagaacatggaaacactagattgctttagtcttctggcctacatctttctcccatgctgaatgcttcctgcctttgaatatcagrctccaagttcttcagctttgggactgacactggcttacttgctcctcagcttgcagacagcctgctgtgggactccaccttgtgatcatgtgagtcaatactccttaataaacacccccttatatatacatctatcctattagttctgttactctagaaaacctagactaatacaaccactgtgtgtgccttaaaaagaagcccaaaggaggacatgttaaaatagtactttgttgcttttttaaaagttgcaggaatatgatgctttttattatttttatccctattttcctcaaatctttagtgagcatcaattagtttttaataaaactcattaatgaatacaaagtggagattatatatataaatgtatttataataaattacacaaattattacaaagaatttataatttgatatagtatt

SEQ ID NO: 515914 - DNA, 651 bp, Homo sapiens
gcttactgagatactgaaaataattttggtgcctatgagaaggctaaagagggtgttcagggcaagatgtagcaagagcatttagttttcctagaagtagtagggggttgggatgtgtggatctccacatgtggatttgtttgggaatggatgtatgtgtgagtgaagattttcagggtctaagttggcgagtcaggtggcttgaagaagagcaaagggtccttgttttaatcagcaaggtaaggaagagcttaagttctaagaagatccagaagatggaaagtaggtattcagaggctaggtatgttggaaaaatgagaagagattctgtgctggggaaggggctgtagatgctatgctgacctattcctccttccatttcctgttgttttacctcctgctcccactctctcttttgtcccctgcccctcaacagaaggtgctggggctgctgctggcacattcagcagatgtgaatgcccgggacaagctgtggcagacaccactgcatgtggctgctgccaaccgggccaccaagtgtgctgaggctctggcacccctgttgagcagcctcaacgtggctgacaggagcgggcgcagtgcyctgcaccatgcagtgcatagtgggcatcttgaggtgaggactgttcc

SEQ ID NO: 515915 - DNA, 421 bp, Homo sapiens
acggtcagctctggatgaagtatgaggagagctctgactcagggaggtgctccaggaaccagcaaacaagaggctgctcccgcaggaggcagtgtgaagggagaaagaaggctgcagtaggggctgctgctggactcggtggggagcaggtgcaaggagctctggctcccccatggacctgagctggagagcagagcgcagctccagcccattcctcattcttccagggcacagtcctcaggatgtttcggggagaataggagccagaacctgagcccctaagcyattcccctcaccaatgatggggtccccagtgagtcatctgctggccggcttctgtgtgtgggtcgtcttgggctgggtagggggctcagtccccaacctgggccctgctgagcaggagcagaaccattacctggcc

SEQ ID NO: 515916 - DNA, 564 bp, Homo sapiens
gtcctgtgcttttgcattctttccatgagtccagtattacctgaggtaatttgagggagtttctatttcctgcaaccagataaacctacctagaacagttcttagcacrttgaagggaacatgaaatctgtagttagagaaaaaatgtgtttatgtagagggtctagatgagacatgtttcattgtgattttcttttcttctgaaaaagtttctgggctccgaaaattctggcatatttagagttccaatgaatccaagatttattgccattcatccacaacaaggttttcagtggatgctgattgtcctcacatacaacaaggtaggtgtactcggtttcagccaaaagccagaactttctttagttgagtagggagcatttttatacattgtacctttaacgcttgataatacagctctaattgtatctgttatctaattattgaaacagtatttctgagaattaccattgcttttagagtagcagagctgaagttcttaaaattttttctccaaggattaaaaatacctggtgttaaaggaaacccatgagagtgattgtt

SEQ ID NO: 515917 - DNA, 564 bp, Homo sapiens
gtcctgtgcttttgcattctttccatgagtccagtattacctgaggtaatttgagggagtttctatttcctgcaaccagataaacctacctagaacagttcttagcacattgaagggaacrtgaaatctgtagttagagaaaaaatgtgtttatgtagagggtctagatgagacatgtttcattgtgattttcttttcttctgaaaaagtttctgggctccgaaaattctggcatatttagagttccaatgaatccaagatttattgccattcatccacaacaaggttttcagtggatgctgattgtcctcacatacaacaaggtaggtgtactcggtttcagccaaaagccagaactttctttagttgagtagggagcatttttatacattgtacctttaacgcttgataatacagctctaattgtatctgttatctaattattgaaacagtatttctgagaattaccattgcttttagagtagcagagctgaagttcttaaaattttttctccaaggattaaaaatacctggtgttaaaggaaacccatgagagtgattgtt

SEQ ID NO: 515918 - DNA, 639 bp, Homo sapiens
atcttatgaagtcttaggaggccctggggctcttttgcatttttcctcacaaagcagtagttttctttaccttagaaaagtcttatttgattagagaagaagcatccatgcaactgtggggggaaaaatactggagacaagtagctcatgcttcgctgtgaatctggacaggtgaaatgaacaagctgagtgtggcaagaaggaacaatgagaaggtctaccttcccagcagtcaagcaacaaacttttatcacacactggtacctgctcagcctgaatcaggaccctacaaggggcattcaagtaggcctttcagtctagacaggaagacaaaacatatttatgggggtgtgtatgtttgtgtctgtataaataagtaaaatatcatagaataccayaaaataaaaagtaatcttgtttgatttagacaattagtggtgcatgagttctgaaggaagggatattagcaaggtatacaatagtttggagattttggccaacccattatggttcccagttacttttgccacttctaggaggtcttcccactaccctgcagtgcaagagggggcaggagcaccttgaaatcttttcatttatgggcaagttcaatttttatagaatataaagtttgaaggg

SEQ ID NO: 515919 - DNA, 514 bp, Homo sapiens
atttctaaataaggtggtgagaaaatgttgggtgaggggttgggtaggagtaaatggagcraagcagatcccagaaccagaagacattagtagtatatggagagagacactcaacaggagctgtgggctggaacagaaggacccagccaactgtaggactaatcccttcaagcttactcccccgctgccctctcctcttctgccaacgtgcccactgacagaaaccaaccagcagcaaaaggtaaggggaccccaacaacacagctcagagaagtcagcctttcaggcagcagagtggagcagagaagggtagaaaaccaatttttgcaacatccagtataatatacgtgcgtgcttcaaggggtcaaggagaggaatcaatgattcctcctccttccctgctcttccaaggcgccctgctcacatcctgcacctgctctgccttctcggagctgcccttctcggcacagctgaacaccttgaccgaaggagccagtgtccatcttcctgtccc

SEQ ID NO: 515920 - DNA, 470 bp, Homo sapiens
agctggttaccatgggcaactggagcacagtcccattggggaactcaggccctggtgtggaatgactctgcagagttatcccacatagcagagagggagctggggaatttatataccaacgtgtcctggcattgtggagggctgctccctgatgtgctcattccccagcacttccagcctgctgcctccatgggcagagtaggctttggccaccagtgaaagtcctcaggcaacgggatgcaggtgctggccgttggaagtgggaagggcaaggggttggactgggggcactgggcacagaccaggctcttcaaacacattcatgggtgaattaatgaatgaaygaacacatgaaagaatggatgtctctatggtgggcagaagaaatgcccagcttttctgagtggactccactcttgtggccttgttccctgtttacacagacagcctccaactaatgccactgaaga

SEQ ID NO: 515921 - DNA, 470 bp, Homo sapiens
agctggttaccatgggcaactggagcacagtcccattggggaactcaggccctggtgtggaatgactctgcagagttatcccacatagcagagagggagctggggaatttatataccaacgtgtcctggcattgtggagggctgctccctgatgtgctcattccccagcacttccagcctgctgcctccatgggcagagtaggctttggccaccagtgaaagtcctcaggcaacgggatgcaggtgctggccgttggaagtgggaagggcaaggggttggactgggggcactgggcacagaccaggctcttcaaacacattcatgggtgaattaatgaatgaatgaacacatgaaagaatggatgtctctatggtgggcagaagaaatgcccagcttttctgagtggactccactcttgtggccttgttccctgtttrcacagacagcctccaactaatgccactgaaga

SEQ ID NO: 515922 - DNA, 426 bp, Homo sapiens
ttaccatgtattgagcacctattatatgctttcttttttttttttttttttttttgagacggggtctmactccattgccaggctggagtgcaggggggcaatcccggctcactgcaacctccaccttctgggttgaagtgattctcctgcctcagcctcccaagtagctgggactacaggcgggcaccaccatgcccagccaatttttgtatttttagtagagacggagtttcaccatgttggccaggatggtcttgatctcttgacctcatgatctgcctgccttgcaaagtgctgggattacaagcataagccaccaagcattactctatttaatctccataagagctggggaggtgagggggctgtggtaggggtgaagatctcatttcagtccagagagtagtgatctgcccagggcccaca

SEQ ID NO: 515923 - DNA, 426 bp, Homo sapiens
ttaccatgtattgagcacctattatatgctttcttttttttttttttttttttttgagacggggtctaactccattgccaggctggagtgcagkggggcaatcccggctcactgcaacctccaccttctgggttgaagtgattctcctgcctcagcctcccaagtagctgggactacaggcgggcaccaccatgcccagccaatttttgtatttttagtagagacggagtttcaccatgttggccaggatggtcttgatctcttgacctcatgatctgcctgccttgcaaagtgctgggattacaagcataagccaccaagcattactctatttaatctccataagagctggggaggtgagggggctgtggtaggggtgaagatctcatttcagtccagagagtagtgatctgcccagggcccaca

SEQ ID NO: 515924 - DNA, 426 bp, Homo sapiens
ttaccatgtattgagcacctattatatgctttcttttttttttttttttttttttgagacggggtctaactccattgccaggctggagtgcaggggkgcaatcccggctcactgcaacctccaccttctgggttgaagtgattctcctgcctcagcctcccaagtagctgggactacaggcgggcaccaccatgcccagccaatttttgtatttttagtagagacggagtttcaccatgttggccaggatggtcttgatctcttgacctcatgatctgcctgccttgcaaagtgctgggattacaagcataagccaccaagcattactctatttaatctccataagagctggggaggtgagggggctgtggtaggggtgaagatctcatttcagtccagagagtagtgatctgcccagggcccaca

SEQ ID NO: 515925 - DNA, 426 bp, Homo sapiens
ttaccatgtattgagcacctattatatgctttcttttttttttttttttttttttgagacggggtctaactccattgccaggctggagtgcaggggggcaatcycggctcactgcaacctccaccttctgggttgaagtgattctcctgcctcagcctcccaagtagctgggactacaggcgggcaccaccatgcccagccaatttttgtatttttagtagagacggagtttcaccatgttggccaggatggtcttgatctcttgacctcatgatctgcctgccttgcaaagtgctgggattacaagcataagccaccaagcattactctatttaatctccataagagctggggaggtgagggggctgtggtaggggtgaagatctcatttcagtccagagagtagtgatctgcccagggcccaca

SEQ ID NO: 515926 - DNA, 550 bp, Homo sapiens
ctgcagcatgtttttgtcctctctgagcctcaatctcctcaactgtaaaatgggcatactatcacctgcttcctagggttgttgtgggggtggcaatgaatattggcaaactttgactgggccccctgatagtcactgtgttctctccaatgatgtgccctctactggagacacgtgatggtccctgtattccacatagagaaaaaaccgatgctcagagaggtgatgtcactcaccaagatggtattgtcaatggcagaagctaaacttgaacctggcctgccaggccctgaagactgtgctctcaacactgtaattcctcctgtcagcccagagatggccacacagccaacccttgattaacaggtacttctactgtgatcttggtgaaaaatattaacttttggtacttcctctgatgtgccccrggcaagatctcacttgcatggggaggaaaggagaacaagatagcaggtttccagttttcaacggggtgtggtggctcatgcctgtaatctcaggactttgggaggctgaagtgggaggatca

SEQ ID NO: 515927 - DNA, 631 bp, Homo sapiens
cagcatgtttttgtcctctctgagcctcaatctcctcaactgtaaaatgggcatactatcacctgcttcctagggttgttgtgggggtggcaatgaatattggcaaactttgactgggccccctgatagtcactgtgttctctccaatgatgtgccctctactggagacacgtgatggtccctgtattccacatagagaaaaaaccgatgctcagagaggtgatgtcactcaccaagatggtattgtcaatggcagaagctaaacttgaacctggcctgccaggccctgaagactgtgctctcaacactgtaattcctcctgtcagcccagagatggccacacagccaacccttgattaacaggtacttctactgtgatcttggtgaaaaatattaacttttggtacttcctctgatgtgccccgggcaagatytcacttgcatggggaggaaaggagaacaagatagcaggtttccagttttcaacggggtgtggtggctcatgcctgtaatctcaggactttgggaggctgaagtgggaggatcacttgagctaaggaatttgagaccagcctgggcaacatagtgaagctctgtctctaccaaaaatttttaaaattagctgggggtg

SEQ ID NO: 515928 - DNA, 588 bp, Homo sapiens
ctgtgctcacacgcaactgatctcatctctcccatgagctcaattaacacagaccctctgcacttctcaaaagggccccaatgtggcccaaacactgccccattccctgcccagtgagtgaataagggcacragctcttaggaacaaatatgaactctgtcacttactagccctactatcatgggtaagggactttctctttgtgagcctcagtttcttccactgaaaaatggagataatagtagaactcagctcatctggtggttgtgaaggctgagtgagatatcaaatgtggcatgcttaacacagttcatagcaaatattcagccaccatgatggcaacgatgatgatggtggtggtcttgatgatgagttcttgtgtctgtggtttctctgcctcaaatgctgttagaggttaggctcacagcctcagagcctgaccacctgggtttgaatctcatctttgccatttatttggtcaagtgatgttccctatctgagcctcagtttccccatttgaaaaatggcggtagtaacagttccagcctcacttaactgtcataaggataagtgaaatgatgtaagcaa

SEQ ID NO: 515929 - DNA, 588 bp, Homo sapiens
ctgtgctcacacgcaactgatctcatctctcccatgagctcaattaacacagaccctctgcacttctcaaaagggccccaatgtggcccaaacactgccccattccctgcccagtgagtgaataagggcacaagctcttaggaacaaatatgaactctgtcacttactagccctactatcatgggtaagggactttctctttgtgagcctcagtttcttccactgaaaaatggagataatagtagaactcagctcatctggtggttgtgaaggctgagtgagatatcaaatgtggcatgcttaacacagttcatagcaaatattcagccaccatgatggcaacgatgatgatggtggtggtcttgatgatgagttcttgtgtctgtggtttctctgcctcaaatgctrttagaggttaggctcacagcctcagagcctgaccacctgggtttgaatctcatctttgccatttatttggtcaagtgatgttccctatctgagcctcagtttccccatttgaaaaatggcggtagtaacagttccagcctcacttaactgtcataaggataagtgaaatgatgtaagcaa

SEQ ID NO: 515930 - DNA, 539 bp, Homo sapiens
gacaggggtggtggcaggaaagtaactttgaccccacctctgccctctacccccagggctcactttccttccctgcccagcacaaagagcgggaagtccaggaaccctggagaccgggaactgcgattacgatagtcaatagcaatgataataaaaaacaacaatgaccagctccttgtccccgagagcttaataaccagtcccagtgccaagttcattataagcagccaataaatattaaatgagccggaatcatgcttgtgatatagatcctggtcataaacaaaagctctggagtcagaccggcaggaatctcagactgagcaggactgggggacctccaggaggagcctgacgtggtcttgggagaaggggcagggagggccycctggaggagtggacatctgagctgaaacttcgagaacatagtaaaggttccatatataaaagttacttaaaaaaaaatctctatgacaagacaagctggtggtctttgacagtgtatagacctagacccagaagatttaacagaaccgacc

SEQ ID NO: 515931 - DNA, 644 bp, Homo sapiens
tgcgatgcctccagcaggaatagtggtcctgagtaaggccggctgcagttcatccccaggaacctctgcaggaaagagagagagaaggagaaagagagagatagaaagagagagagggagggagaggaagagagaggtgtcagtgctggggctckgggtttcaggtcctcaaagctgttccctccatgtgctcaattcgaaccctcctctccccccattttacagattgggaaactcaggcccagggaaaggaagcgtctgtaccagataataaatataacactcacagatgacaggaataatgtctggtaaactatattatctcatttattcctcaagacaaccctatgaggaaggcattgttaatatccccattaaagaaacaggcactgagaagttaaactacccatccaccatcacacatggggtagagttagaatttgaaacatgttgatgccagagcttacactctgaacctctgcactatgtggcctctgaggatcacattcatccattcctcattcaacgaacatttatttagcacatactgtgtgtgccagacacctttttaggcactcgagggatattgcagaaaacagaacagacaaaattcctgatgtcctagagcttacactttaggaggg

SEQ ID NO: 515932 - DNA, 644 bp, Homo sapiens
tgcgatgcctccagcaggaatagtggtcctgagtaaggccggctgcagttcatccccaggaacctctgcaggaaagagagagagaaggagaaagagagagatagaaagagagagagggagggagaggaagagagaggtgtcagtgctggggctcggggtttcaggtcctcaragctgttccctccatgtgctcaattcgaaccctcctctccccccattttacagattgggaaactcaggcccagggaaaggaagcgtctgtaccagataataaatataacactcacagatgacaggaataatgtctggtaaactatattatctcatttattcctcaagacaaccctatgaggaaggcattgttaatatccccattaaagaaacaggcactgagaagttaaactacccatccaccatcacacatggggtagagttagaatttgaaacatgttgatgccagagcttacactctgaacctctgcactatgtggcctctgaggatcacattcatccattcctcattcaacgaacatttatttagcacatactgtgtgtgccagacacctttttaggcactcgagggatattgcagaaaacagaacagacaaaattcctgatgtcctagagcttacactttaggaggg

SEQ ID NO: 515933 - DNA, 644 bp, Homo sapiens
tgcgatgcctccagcaggaatagtggtcctgagtaaggccggctgcagttcatccccaggaacctctgcaggaaagagagagagaaggagaaagagagagatagaaagagagagagggagggagaggaagagagaggtgtcagtgctggggctcggggtttcaggtcctcaaagctgttccctccatgtgctcaattcgaaccctcctctccccccattttacagattgggaaactsaggcccagggaaaggaagcgtctgtaccagataataaatataacactcacagatgacaggaataatgtctggtaaactatattatctcatttattcctcaagacaaccctatgaggaaggcattgttaatatccccattaaagaaacaggcactgagaagttaaactacccatccaccatcacacatggggtagagttagaatttgaaacatgttgatgccagagcttacactctgaacctctgcactatgtggcctctgaggatcacattcatccattcctcattcaacgaacatttatttagcacatactgtgtgtgccagacacctttttaggcactcgagggatattgcagaaaacagaacagacaaaattcctgatgtcctagagcttacactttaggaggg

SEQ ID NO: 515934 - DNA, 581 bp, Homo sapiens
gaaggacaatgcaggtgtaagcctaggacattgatgtggagccccagaagaacatgtattctggccgggcacggtggctcatgcctctaatcccagcgctttgggaggctgaggagggtggatcacctgaggtcaggagttcgagaccagcctggccaacatgatgaaaccccgtctctactgaaaatacaaaaaaattagctgggcatggtggtgggcacctataatcctagctaatcaggaggctgaggcaggagaattgcttgaacccgggagacagatgttgcagtgagccgagatctcgccactgcactccagcctsggcaaaaaacgtaaaattccacctcaaaaaaaatattctataagcttatatataagcctatagaataggacagcttcactgtgtgctttttttgcagtgtgaaaaacatgctttcatgaagggattgactaagggatgtggagcagaggaaggaggaatgaggtgcgcctgggggtaggggcacttttagaagaggtcatagttaggggccagggacgggagagtgatcaccaggaaagaaaggaaagggagctgcctt

SEQ ID NO: 515935 - DNA, 581 bp, Homo sapiens
gaaggacaatgcaggtgtaagcctaggacattgatgtggagccccagaagaacatgtattctggccgggcacggtggctcatgcctctaatcccagcgctttgggaggctgaggagggtggatcacctgaggtcaggagttcgagaccagcctggccaacatgatgaaaccccgtctctactgaaaatacaaaaaaattagctgggcatggtggtgggcacctataatcctagctaatcaggaggctgaggcaggagaattgcttgaacccgggagacagatgttgcagtgagccgagatctcgccactgcactccagcctcggcaaaaaacgtaaaattccacctcaaaaaaaatattctatargcttatatataagcctatagaataggacagcttcactgtgtgctttttttgcagtgtgaaaaacatgctttcatgaagggattgactaagggatgtggagcagaggaaggaggaatgaggtgcgcctgggggtaggggcacttttagaagaggtcatagttaggggccagggacgggagagtgatcaccaggaaagaaaggaaagggagctgcctt

SEQ ID NO: 515936 - DNA, 616 bp, Homo sapiens
gagagattttattggatcttgaagagaactaggagcagcaattccccttttgtgtctctggatgcggctggccaccatcttggactgggagggaagtcaccatragaggacaacctgttgaggctggggtaggaagatgaagaacctggatctttggtgttattactgagccattgtattaaccaaccgaggaactgccctttcattggaatccctgctacataagataatacacgtcagtgttttaaaccactttgaattgagttatccactttgtatggccaaaagcatccaaagtcatgtttgaggggctggttttctcgtctaaacacagccccggctcagttaagcataggatgggatgaggaacaggaacacaggaggcaaggaggaatgtccctgaaaatgtttgtaaatgtggggtcgacaccaagaggcagaggggaaactcaattaaaacttaaagactgcaagttgtcaccattgtagacgtctcagctttgcaagaagtcaagaattttccaaatgccactcttcaagagacaattgggcagatgtggatattattccaagatatgggaaaacctaatgtcaccattaacctttgaatgagata

SEQ ID NO: 515937 - DNA, 623 bp, Homo sapiens
ttttgtaaattatgtctactaacctctttttccatcatatatattacaaatattttttcacaattggcatttgactgtgggtgtggtgtttcttaccacacaaaaagtattaaatttttctatagtcaagtatttccatttcttccttttgggtgtattggtagccaggcccagtggcatgcacttgtagtacctcccagctactcaggaggctaaggcagaaggattgtttgagccaggagtttgagattgtagtacacaatgatggtacttatgcatagccactgcattccagcctgggcaacacagtgagacccccatctcctaaaaaatgatcaaaatgcaaacatacaaatttttttttttttttgagacagagtctctctctgtcacccaggctggagtgcagtggcacaatctcggctcactgtaagctctgtctcctgggttcatgccaytctcctgcctcagcctcccgagtagctgggactacaggcgcccgccaccacgcctggctaattttttttctattttttagtagagacgggttttcaccatgttagccaggatggtctcgatatcctgaactcgtgattcacctgcttcggcctcccaaagtgctg

SEQ ID NO: 515938 - DNA, 623 bp, Homo sapiens
ttttgtaaattatgtctactaacctctttttccatcatatatattacaaatattttttcacaattggcatttgactgtgggtgtggtgtttcttaccacacaaaaagtattaaatttttctatagtcaagtatttccatttcttccttttgggtgtattggtagccaggcccagtggcatgcacttgtagtacctcccagctactcaggaggctaaggcagaaggattgtttgagccaggagtttgagattgtagtacacaatgatggtacttatgcatagccactgcattccagcctgggcaacacagtgagacccccatctcctaaaaaatgatcaaaatgcaaacatacaaatttttttttttttttgagacagagtctctctctgtcacccaggctggagtgcagtggcacaatctcggctcactgtaagctctgtctcctgggttcatgccactctcctgcctcagcctcccgagtagctgggactacaggcrcccgccaccacgcctggctaattttttttctattttttagtagagacgggttttcaccatgttagccaggatggtctcgatatcctgaactcgtgattcacctgcttcggcctcccaaagtgctg

SEQ ID NO: 515939 - DNA, 647 bp, Homo sapiens
tgcattacaacaaacatgtacacacactctacttaactactctaaactagtcacaaatactaaacgtcatcctaaatcagtgattcttaaactttttggtatcaggactgctttatacttttaactagcattaaagaatccaaagaatttttgtttgtatggattatgcctattaatggataccatattggaaattaaacccataaacttcttaaaacacaagtctatacagcatacattctgttagtgttcagagtgattatgtaattgtaagtcaaatagcttctggaaaactgcatgacactcaagagagaatgaaagtaagaaagcaactaacatcctggaatcattcattataaaaktttgaacttttgtctcaaagaactccatgagtcccataaactatatgttgtgcatctgtactgtagactcttcataattactaagtatcagtcttgaaatttttgatcctaaaatcacttcatccccaattgtatttttttctagaggcctagttctcatgtcaagttctctatgaagcatttgttgacctagttattacataatgatggaggtgatgacaaaaaaatcaataaaatctatattaaagtaactagattaaacaaaatatatttataataaagtaa

SEQ ID NO: 515940 - DNA, 657 bp, Homo sapiens
gctatatatagttgttcatctaaaacattgatgatagtacattacaaaaaagaataagatcagcagcaatattagtagccagaaatgtgttcctggatattcttgtttctctgaattttttaatcccacaagaaacattcagaatgataaacatgcattagaaattgaactttgtaaatcaagtgtttggaattcaagaacctgaacatcaaagaaggtcaaatggcatactgtttcacagagccctaaaacgactaaatatgtggaaaatcacatattaagatrcaagtaaacacaatttactaatgatcatctctagtgacattatggctttgcaagtacacaggctttgcttgtatgcagattcaggaaaataacagtgatttgccattttacctgatagaagttgccttaacttccagttccatcgctgtgaaaatactccttcaagcttttcttacaataagaggaggatggctcatctccaaatgttgagctgagacacttgagtatgttctgttagatcaaaaattgcagaaataagcttattcactaggaaacctacttgtagagaaattggaaaaccaagaaatgttaagaggaaatagttgtaaaacacaatggtggtggagatatagagtaagaataggtatataa

SEQ ID NO: 515941 - DNA, 620 bp, Homo sapiens
ctgggttcatccatgttgtggaaaatggcagaatttcattcttttttatggctgaatagaatttcattgtgtatatataccatattttttaatccattcatctgttaatggacacttatgttgattccatatcttggctattgtgaakagtgatataataaacacagaagtgcagatatcttttgacattattgatttcatgtcttttggatatatgcccagtgttgggattgttggatcatatggtagctctatttttaattttttcaggaacctccatattattttccataatggctgatacagggcttttcaactgccttcttagactgggtttgcaacaactgaactttgagctctgtttacttcatctcaagaggatagtatattctgttcataataagggctttcattcattattatttgtttatttataaaattctaccacacatctctggaaaacgcataacatgggtctctgaaattgggatgtatagccaatgtttagtcacttaacacaactctatccaacttgaggccacatagtttattccttctacacttatctctctttgtcttaaagtcaggtgacatgacatgaagatgaacagaatgtgaaa

SEQ ID NO: 515942 - DNA, 620 bp, Homo sapiens
ctgggttcatccatgttgtggaaaatggcagaatttcattcttttttatggctgaatagaatttcattgtgtatatataccatattttttaatccattcatctgttaatggacacttatgttgattccatatcttggctattgtgaatagtgatataataaacacagaagtgcagatatcttttgacattattgatttcatgtcttttggatatatgcccagtgttgggattgttggatcatatggtagctctatttttaattttttcaggaacctccatattattttccataatggctgatacagggcttttcaactgccttcttagactgggtttgcaacaactgaactttgagctctgtttacttcatctcaagaggatagtatattctgttcataataagggctttcattcattattatttgtttatttataaaattctaccacacatctctggaaaacscataacatgggtctctgaaattgggatgtatagccaatgtttagtcacttaacacaactctatccaacttgaggccacatagtttattccttctacacttatctctctttgtcttaaagtcaggtgacatgacatgaagatgaacagaatgtgaaa

SEQ ID NO: 515943 - DNA, 545 bp, Homo sapiens
aacattcaagtttagaactaacctgtaattcagcgtgttaactgtacaatatgcagaacagaaaccaaaacaaacagtaaatagacaagggctactccttttattttttccttgtgagaatcagggggaaaaatacaaaagatccaaagcactgatcagagcatttatatacctaacaactgaggctcataaagcaccacaaaacaattttattctttccccccattgcccctgcatatccagcctatagggcttgtccatctctattcccttggatgtaactgaaaatcagtgactcgactttcagattgttcccagataaaacattccttctttcatttcagtagaaaaaaagaaaatgctacagactcaagtaaaatcaggtctaaggcagagtaataattaaaactccagtatccacctgagctaatgcttctcccctcacccagccttggaaggcagccrgatggcagcctgcagtaggacctggcaggctcttctttctgcccagccggcttcctcatcctcatcctccctccacctta

SEQ ID NO: 515944 - DNA, 489 bp, Homo sapiens
ctgtgctcactctacccaaatagagtacacaggaaacccatcccttttgcctgacataagggcaagtgcagtcacttgccctattttattttagtcctctgaaagacagattcagacacagtgttttatatttctctgctgtgaagcagttcactacatcaccctaactccaacggaacatagcaatggttttcctatagcagcagcacacttcattagagttgaagcaaggagaaagtatataaaccctcaccctgggcttgcatatttaaaagaacaccaaaaagtctctatgcttgtattccctacctttcttttaactctcttatattccacatggattagggatactccactcgaatccagcacagggggtgtgacaactcttactttggaatatggagtaattggctccyctttgcatggaggcttcagtcaaaagcaagagtagaatacatttatttttctatattgcaacagtaattaaaa

SEQ ID NO: 515945 - DNA, 275 bp, Homo sapiens
tgaagcaataattatgaggaatttttcaacattatatgttaatatcagaaaacattaaatatccaaatcaataagtctaatatatccaaagagggcataaaggagaaaaattaagataagaggtcaataaagttgaaataaataactaaaaattttagaaatcaataaaaccacaatctagttttttgaaaataccaatataattgactggtctstaacctgactgatcaaagaaaaaaaacgtacgacacaaattactaacaacaggaatgtaa

SEQ ID NO: 515946 - DNA, 484 bp, Homo sapiens
actttggttcttgtataagacgaagagagcatttatcttttctgtttaaacccgtgggatatttttttttattaacacagcaagggcgggcagckacacggggggaggaagtatattaaacagcagagtagctcatctgttgtcgactggctttcttggctcaaacccaatatatcacgggtggttttcccaacacatttttaaattcttattactggctaggatatgatgtcacaaatgttattataataattcattagtatcttacataaccagtaatacagactgaacctttgccaaatgcattgttataactttttggaatggtggccgcattaattaatcattgcttgtggagtgcctactatgagcaagagaatttgcatttttgttctttcatttctcatgacagcccaataagggaggtaggattatctcattttaaccaaaggagactctgaggccgagggaggctgagcggctt

SEQ ID NO: 515947 - DNA, 646 bp, Homo sapiens
tgggctgattggcagaaagggcagaaagggctacgcctcccaccgggcaccacagagctttgtaagtggagaagagtttggacctcagacagataatgtggtttttagaggcacctactatactgtgtttgctaaggacttttgaatgtgtgaacattttccccagcagtagaagaagcctggagggttactggaaggcagggagaggtgcccatgactgtgtgaaggagagctgtgactacttccatgacattttggataccaagtagcttgatggcgtagaactaacactggattctagtactagctgtagaaggttcggggagtccagggccactgaggcaggtgactttggacaagtcaccttcttaggcctttgtttcttaatatttatctcatgaggctgggtgtggtggctcacacctgtaatctcagcactttgggaaactgagacgggaggatcacttgaggccaggagtttgagaccagcctggccaacatggcaaaaccctgtctctactaaaaatacaaaaagtagccrggtgtgttggtgtgcacctctaatcccagctactcgggaggctgaggcacgtgaatctctttaacagggaggtggaggttgcagtgagacaaagcaagactccat

SEQ ID NO: 515948 - DNA, 480 bp, Homo sapiens
ctctgtgaaatctgctttcctggccctccagattttgaccttcctgcctcccccgaacctggctgcctggcctctagccccttgtgggctcctccgccttgtctgcctcctgagtgaaagcattctctagagttctgtccccaacctttctcttgtcctttcttttctttttatacattcttttccttggtgttctcttcacctcccactgtccaattatcacctctgtgggaatgatgcctaaatctgtttccagccttgactatttatccaaaaatctcatcttgcatctataattgccttcacagtattaccagctctgtcttccttgccccgacataaaatctgtctctcaggcctgctgatctgttgattttaactttgctatttcrtaccactccttttcatctccaccacctgcatcctagtttggtatttattgcttctcactcaaactagcagaacaaacaattagttaat

SEQ ID NO: 515949 - DNA, 643 bp, Homo sapiens
ttgccccaatctttatttctcatattaaacttccagaaatatctttttmattttacattttcatcatttcagaattgtatagactcatggctctgaatttcactctggctcattttattaatcactcatgcattaagattttagtaagtggttatatatagcagattgtataacaaacaccctgaattaaaagaaaaatgaaattttattcctgacctcaatgtgcttatagctagaatggaaggaatacaattataaataatgccattagttaagaaataaaatatgtgccaagagcttgagaaaatagatgtgtgaacgattagcttggaatccagggattcccagaagaagtgacacttgaactgaaacttgaaatatgagtaggaatttataagttaaaaagcagtggagatgatagtgtagagaaaacagaatctgtaaaagtcacagcattatgcaagaacatggcaagttagaatgttaggtaaagaattgagaagataattttttttcatgcaggaaggggataaagggatgacaaaataaactgtcatcagattgagaatgatccagaatgtggtatctaaaggcgatagagaagtggaggatgactaaagtttttagcttaaacaactggcag

SEQ ID NO: 515950 - DNA, 518 bp, Homo sapiens
gtgaatggataaacaaaatggtatatccagacaatggaatactattcagcaataaaaagaaatgaactacggytcatgcaacaacatggatgaggctttataatattacactgagcgtaacaagtcatgcaaaaaactgtgtattgtatgatttcattttacaatatttataggaaaggcaaaactatagagacaaagctagttccatggttggttgggatggaaacaataaatgactctcaaacaggcacagagaaacttttggtgaaggtggatacattctaaaattagactaaagtaatggtatacatatatacatacttatagctaaacatgtctgtatatatgcacgtatataatatacatacatatatatgcatacaatcatacctgtttcctcaaaattattaacttgtaaactaataatagtgaattttgtggtttataaactgtaaaaaactatttaaaataaaatggatacctttagataatttgtctagaaacacttggaatataaa

SEQ ID NO: 515951 - DNA, 518 bp, Homo sapiens
gtgaatggataaacaaaatggtatatccagacaatggaatactattcagcaataaaaagaaatgaactacggttcatgcaacaacatggatgaggctttataatattacactgagcgtaacaagtcatgcaaaaaactgtgtattgtatgatttcattttacaatatttataggaaaggcaaaactatagagacaaagctagttccatggttggttgggatggaaacaataaatgactctcaaacaggcacagagaaacttttggtgaaggtggatacattctaaaattagactaaagtaatggtatacatatatacatacttatasctaaacatgtctgtatatatgcacgtatataatatacatacatatatatgcatacaatcatacctgtttcctcaaaattattaacttgtaaactaataatagtgaattttgtggtttataaactgtaaaaaactatttaaaataaaatggatacctttagataatttgtctagaaacacttggaatataaa

SEQ ID NO: 515952 - DNA, 543 bp, Homo sapiens
gttaaatgcggctgctagttaaggtcttgagattacttggaacagcctctgcagtgacctcaaaagatggatacatgtacctagggctctggaagagcaggaactatgtttctcccaggtgctcagccaataatgtgactgcaactctgacttgggcttttttttcttctcataaattggcttattttccctttttactatgcttgtctttttcctgaaagctcctgaatactcagggtttctgagtgcttttttttttttttttgagayagtctaactctgttgcccaggctggagtgcagtggcacgatctcagttcactgcaacctccgcctcccataagcgattcttctgcctcagcctcctgaggaggtgggattacaggcacacgccaccacgcccggctaatttttgtatttttaatagagacagggttttgttatgttggtcaggctggtctcgaactgctaagctcaggttatctgctcgcctcggcttcccaaaatgctgggattacaggcatgagccaccatgcccagcctc

SEQ ID NO: 515953 - DNA, 628 bp, Homo sapiens
aaaacgaccattacgtcttgtgggtttactaaagttgcctctgactggtatccccaattcttagattgycctttccaatcttttcttcataatattactagagtgatttttaaattaacaaaactttttgttataacaatttttagccatacccaaaagtagaaaaaatagtgtaatgactcccatttagccatcagccagattcaacagttaccagcgtctcaacacacttgcttcttgcttgttgtatctgtcttctcccttttttcattcttttttcctttttatttttgagacagagtcttgctttgacctaggctggagtgcactggtgccctcatacctcactgctgcctggaattcctgggctcaagggattctcccacttcagcctcccaagtagctgggactacaggcatgcaccaccattctcagctaatttttaagtttttatttttgtagaggcagggttgctccatcctgcctaggcttgtctcaaacttttgggcttacatgatcctaccaccacagcctgccaaagtgctgggattacaggcatgagccgctgcgcttggcctctgttttcttttttcccctttctctctcctgttctaatttttagaaacat

SEQ ID NO: 515954 - DNA, 548 bp, Homo sapiens
gtgaccacagttctccctactgtccttcaacttgcgagtttgtttcaatcatattatgtccagaattggtgggttcttggtctcactgacttcaagaataaagccgcggaccctcgtggtgagtgtcacagttcttaaaggcagcgtgtccggagtttgttccttctgatgttcggatgtgttcggagtttcttccttccggtgggttcatggtctcgcaagcccaggagtgaagctgcagaccttcgtggtgagtgttacagctcttaaggcggcacgtctggagttgttcgttcctcccaatgggttcgtggtctcgctggcttcaggaatgaagttgcagaccttcgcggtgagtgttacagctcataaaggcagtatggacccaaagagtgagcagcagcaagatttattgcaaagagcgaaagaacaaagcttccacagtgtggaaggggacccgagcaggttgccactgctggcsggggcagcctcgttttattctcttatctggccccacccatatactgctaattggtccattttacaga

SEQ ID NO: 515955 - DNA, 657 bp, Homo sapiens
ctttggaacttaggagccttgcagaataggaggccctaagtgttaactgaaatgagaaatgttttaaaagaagaaaagaattttgcagagacatactactgatacatacgtacacacacacacagtcagaatgatcgttgtccctgcttgtctgttttcaaatagtgtcaacttacataaatcttagtgttatttattggcagtcaacaacctaagccacaatacaggggactagacaacacactgttaatttggatgtccaggatgttctgaccgcaacctatattgaatatgtcatcacctatagctataatttttcattaggtaaaagtaaaacaatgaagatagccctggttatgacatacttaacaataccatgcttactctgtaatatctaattcagacactgatcatttattttactcaagattttatttcgcattttcttgggactgyaaactctttcatgagtaatacattaagtagttaccaacacttgggtgtcactcttgaagttcaacaagcaggccttacatcatgaaatagcctttgcaaataaatcttctgagtactttgaatttcaaaaaggctgtatctgaaatgagtgtttcaaactaaatcaaaaacacttttgtaatgtaagttattatgatatag

SEQ ID NO: 515956 - DNA, 555 bp, Homo sapiens
aacctaataaagaacactacaagatatttcttctatggatatgatrctgtctagttagacccaaaacatagtttatgaaatttgtaaaagggtaaactcccaaagtatagatccaaaaggtaattagacactccacctaaaatcatgccggtttcctttttgataccttgtgctatggtctgaaggtttgtgtcctcccaaattcatatattgaaatcctaacccccaaggtgatggtattaggaggtggagcctttcaagaagtgattaagctttgctccatgaatgggattaacgccctttaaaataggccccagagaaacccctaacccttctaccacgtgaagatgtagcaagaaggcactatgtgccagaaagcagccccttgccaaacaccaaatctgccttgattttggactttcccgcctccaatactgtgagaaataaatttctgttgtttataagctatccaatttatggtattttgttatggcagcccaaactaaagtactttgcaggtctgagcttctcagataaatactctaaaaaggaaca

SEQ ID NO: 515957 - DNA, 618 bp, Homo sapiens
aaggagtttgataagaaaagcctggtctctattacctcaggtcgagctacctgaggatgagaggagaagaagaaaatggaggagagcaaggcaaagtttgagaacctctgcaagcttatgaaagaaatcttagataagaaggttgagaaggtgacagcctccaataggcttgtgtcttcaccctgctgcattgygatcagcaccctatggctggacagccaatatggagtgaatcaagaaagctcagacacttggagacaactctctaatgggctacatggtggccaaaaagcgcgtggagatcaacccgaccaccccattgtggagatgctgcagcagaaggctgagacagacaagaacagcaaagctgtcaaggacctggtggtgctgctgtttgaaactgctctgttttcttctggcttctcccttgaggatccccagaccctccacctgcatctaccacatgatcaagctaggtataggtattgatgaagatgaagtgacaacagaggaacccagtgctgttgtttctgatgagatacccctgcttgagggtgaggagaatgggtcttacatggaagaagtagactaggagtttatatttggaaaccttgtgcc

SEQ ID NO: 515958 - DNA, 538 bp, Homo sapiens
ctctcccacacacctactgccataacagcagaaatccagaaatgtaaagatagggactttcatccaacttgggcaatattccagcatttgctgtcaacagagaacactgaagcctgagaccttacctgttgagatgatccggaaggttgcaaagaggcttctaactatgtctctaagcttttattccaaataaagtaaaagccaaacaaatgcctgcttcctttatcatcagccagaagaaaaataagagatcatgccatctcacagctctccattcctggcaggatgcaggtctaagtacttcttgaagagttacggtacattctcatcagcagtgtaccctagacccaacawgtgattagccttaagccttaatgaaaagactggactgtgtcccaaatgagggtgaagtgcagttgacagcatcaggccatctacactcgtgaacttgtttgggccacttggagaaatatttattgcatacctactgtgttcatcgtcataaaaatgtgcctaccatcaaaagattgagtatgaa

SEQ ID NO: 515959 - DNA, 542 bp, Homo sapiens
ctgtctctcccacacacctactgccataacagcagaaatccagaaatgtaaagatagggactttcatccaacttgggcaatattccagcatttgctgtcaacagagaacactgaagcctgagaccttacctgttgagatgatccggaaggttgcaaagaggcttctaactatgtctctaagcttttattccaaataaagtaaaagccaaacaaatgcctgcttcctttatcatcagccagaagaaaaataagagatcatgccatctcacagctctccattcctggcaggatgcaggtctaagtacttcttgaagagttacggtacattctcatcagcagtgtaccctagacccaacaagtgattagccttaagccttaatgaaaagaytggactgtgtcccaaatgagggtgaagtgcagttgacagcatcaggccatctacactcgtgaacttgtttgggccacttggagaaatatttattgcatacctactgtgttcatcgtcataaaaatgtgcctaccatcaaaagattgagtatgaa

SEQ ID NO: 515960 - DNA, 585 bp, Homo sapiens
taggcgtcgcggggagcctctggaaacagagcagtgtagggaataacgaagatgagcacagaaagtggacgagaaatgggtggaaggatctagggagcacaagcagagcagggcaggtgcgcccccgsggtgggcagcgcagcaggagcaggtgttgctgaggaaaggtaggaaggaagtccggtatgggggaagggaggagatcatcaaataaggaggatttcccaaaccgcgacttgctgtttccaacgtgcaagttcccaagttcagtttgagaagtgaagggccgctaggtgtaggggagtctggaatgggaacgttagggaaatgcctccccgaggcgcattctcctacccattctcctctttcttcccccccccccactccccttcctcttcctgtccctattcgtcttccttcagctttgattaatatgcatgtctatgctccgtagtgcgggccaccgcctcccgttcgacccctggcactgggagactgagctgtagcgaccaaaggcttgggatggggaggctgagcgctcagagcgcggagtctgaggacccctcgccgcgccctgtatcccac

SEQ ID NO: 515961 - DNA, 660 bp, Homo sapiens
gttatgaacagaggcaggatttgaacttgtggcattctaacctcataacccatgtccctcccacaaaagcacaagatattgtcaagtcgggaaggattaggggctccaggactcaattgtagattatgtttggaagctgtaagaccactcaccagaggagctagcatccatgcttcctgctgtataataatacaattgtatttgtgtagctctcaaaagttgacaaaatgcatgcacactcatcatctcatttggctttcatcatgcccatgatgagacaaactaaagtccctttactcatgagattattatattcatgtgtttacytcacaattgttatgtgttccaggcactgttctagttaatggaaatgtagaggtggaccaaacagaaacacattctggcatgacagaactcatatttgaatgggggcagcagaataaaaacagagatgatgataatgtcatgtcatgatggtaccatgaaaaaattaaaacaagaaaagatgatggtgatgggcaaacatactagtgtttttttttttttaaattaggggtgagctcaggaaagatgattgcatttaagcagggaagtaaaggcagtgagaacagaagttttttaagtgtctggaagaagaatgtcccaggcagaatcaagagc

SEQ ID NO: 515962 - DNA, 599 bp, Homo sapiens
aataggcttactttacaacatgcacagaagccaacattatggttccctcttttgaggaagaaaaaaaaaaagctttataccaagtcaactggcaaggagacaagaggcaatgctcagatctgtctctgtgattggggtgggtcaagwttttatggcatttccagctagacccagatgatgccaatgcaggcctgtcaggctggtgatgataacaattagaaattaaagctttttgcattgcatgtgccaaggcaattttggctgtgtgtgtacctgcaacaacttaagaaatggttaatttgtttgagctggtcccacagttacaggtaccccctttttgtgcactcctcaatcttgagggaagtggggtgatgaccattctagctacttcatgctttcaagtcacgcaggtctgagtacaaagaatgcatgagtggggctactgacatacaagatagctctgctccatctgtaccttgacaagaaggaaaaggaatcccaacatacatacaattatagttcttaacttaattagaccctcaaaaatagatcttatccatgatggcatgaacagaggcctggttggcatcttgagtgag

SEQ ID NO: 515963 - DNA, 485 bp, Homo sapiens
tgtgattggggtgggtcaagattttatggcatttccagctagacccagatgatgccaatgcaggcctgtcaggctggtgatgataacaattagaaattaaagctttttgcattgcatgtgccaaggcaattttggctgtgtgtgtacctgcaacaayttaagaaatggttaatttgtttgagctggtcccacagttacaggtaccccctttttgtgcactcctcaatcttgagggaagtggggtgatgaccattctagctacttcatgctttcaagtcacgcaggtctgagtacaaagaatgcatgagtggggctactgacatacaagatagctctgctccatctgtaccttgacaagaaggaaaaggaatcccaacatacatacaattatagttcttaacttaattagaccctcaaaaatagatcttatccatgatggcatgaacagaggcctggttggcatcttgagtgagctgtttccttca

SEQ ID NO: 515964 - DNA, 600 bp, Homo sapiens
tggagagaaggcctggtggacagaagacaaaggaaggcaaaattcctaagggagaaattcaaaaaaatgatgggggtgctgccctctgctgggcctctttggcagtcgacttcaacttaatgcattagcgccgtaaggttgtaagagaagcaactctggcttgatcttagaaaagctgattttctttttggcagcatatttccggtgagaactgatgggaaaggtggtgtggattcgtggacgaagtctctaacgtaatcttgactactgaagggtaaakacttgcccacaggttagagattacatgaattatccacaacgaatggtagcagatgatgggtcaggggtattttaattgtacagcataacactttagagagctgggaagtatgggacatcattcccgtctttcttcactcagtaactgattatcttgtttcttgtccacagatatttaacctaaataacaatgctttttgaaggttgtttggctaacccagaggtagtaaaagacttcataagtctttctattactgaagaggagcttagtaataactacaagtctatttatatatgtagcagatggtaacaatctccaga

SEQ ID NO: 515965 - DNA, 600 bp, Homo sapiens
tggagagaaggcctggtggacagaagacaaaggaaggcaaaattcctaagggagaaattcaaaaaaatgatgggggtgctgccctctgctgggcctctttggcagtcgacttcaacttaatgcattagcgccgtaaggttgtaagagaagcaactctggcttgatcttagaaaagctgattttctttttggcagcatatttccggtgagaactgatgggaaaggtggtgtggattcgtggacgaagtctctaacgtaatcttgactactgaagggtaaatacttgcccacaggttagagattacatgaattatccacaacgaatggtagcagatgatgggtcaggggtattttaattgtacagcataacactttagagagctgggaagtatgggacatcattcccgtctttcttcactcagtaactgattatcttgtttcttgtccacagatatttaacctaaataacaatgctttttgaaggttgtttggctaacccagaggtagtaaaagacttcataagtctttctattactgaagaggagcttagtaataactrcaagtctatttatatatgtagcagatggtaacaatctccaga

SEQ ID NO: 515966 - DNA, 389 bp, Homo sapiens
agtacaattgtttgtgatttctacaagaccatttattgcatattttaaaggtttatttacttgactttttgatgatattatttactagcaattgtggggtaatattctcaggaagtactctgcgagatgaaaagatctggcrtggtctcaaatataaaacgaggctgggcctggtggcagctcacaacaacaatcccagcactttgggaggctgaggtgggaggactgcttgagcccaggagtttgagactagcctgggcaacatatggagaaactgtctcttcaaattttttttttctaaaattagccatgtgtggtggtgcacatgtgaagtcccagctacttgtgaggcagagggggtggatcactagagcctgagaggttgaggt

SEQ ID NO: 515967 - DNA, 389 bp, Homo sapiens
agtacaattgtttgtgatttctacaagaccatttattgcatattttaaaggtttatttacttgactttttgatgatattatttactagcaattgtggggtaatattctcaggaagtactctgcgagatgaaaagatctggcgtggtctcaaatataaaacgaggctgggcctggtggcagctcacaacaacaatcccagcactttgggaggctgaggtgggaggactgcttgagcccaggagtttgagactagcctgggcaacatatggagaaactgtctcttcaaattttttttttctaaaattagccatgtgtggtggtgcacaygtgaagtcccagctacttgtgaggcagagggggtggatcactagagcctgagaggttgaggt

SEQ ID NO: 515968 - DNA, 572 bp, Homo sapiens
gaactttaaacacagttttataaacaacactttaaaagtgcccacctgtcatcaaaaacctgagataaaatgttcactgtatctcataaacctgattattcctcacctgaaaagttctgatttaggatttcttgacctattatccatggatcttgttgttccagtttgaacattgcatcaggtttgagaatttgaaaacctgtckattggaaacacagaggacttggacctaactgcctgggctaagagtcttaaatatgtagaatgttttattataaaggctgcaaaataaagcaagtgaatgaaaatctttcaattcagtataaaagtcaaataatctttgacatgtaaaacttacatccaaaataagcaaacacctcacaggccagttactggccatacactaagttacataagaatgttcttacccaagaaaaccagattgctatagttctccaacatcacatctctgtacaagttcttctgagtaggattaagtagctgccattcctccagcgtgaaatccacagccacatcctcaaatgatatctggaaaagcataatccctgtta

SEQ ID NO: 515969 - DNA, 645 bp, Homo sapiens
acatcagtaacaccatgacactatcaacaccatgacattaacacagtgacatcatcaacacatgacactttcaacaccatgacatcatcaacaccacaacaacacatcatcaataccacatcattaacaccacgacaccatsagcacatcatgaacaccatgacagtatcaacacaataacatcatcaactccatgacatcatgaactccacaacataaacaccatgacatcaacaccacatcaacgccacgacatcagcaccacgacatcatcaaatccatgacatcatcaaccccatgacatcatccacactgcatcaccaacaccatgacatcagcaccatgacatcatcaacactgtgacatcatcaacaccacatcaataacatcacgacatcagcaccatgacgtcatcaacacaatgacatcaccatgacaccatcaacatcacatgattaacaccgcatcattaacaccatgacatcagcacgacatcattaacaccacgacatcaacaccacaccaacaccatgacttcatcaactccgcatcattaataccaggaaatcatccacaccacgacctcagcaaccccatgacaccatcatcagcactatgacatcgtcaaaaccacgatattatcaa

SEQ ID NO: 515970 - DNA, 696 bp, Homo sapiens
  misc_feature (1)...(696): n = A,T,C or G
catatgtacgggcatacacagaagatctttgtatctcccttttctcttaattctagcacatttttttgcatatttcagtaagaattctccatgaacaaagtttaggttgcctatggttgcctaaaaggctgacctatgaacactccataatttaatcaactgaaccagtcccttcctgttaacagttcaactgttaaagctgcttccagcatttcagcatcacatataacactgcaattaacctgaatttggtggatccaaaataacagctttcctagatacatccactagacagagtgggatgcagtaagattttacacatgactgayatctctcttggagaatgcaagagtctgtaactacctgagtctccacaaacatagccatgtccatgaacatctcatgcaactctcggatgctggtctccagcttcatgatgtccttgtgacgtgactcgatttcattgagagcttgtctagtaatttgtgaatctgatataatcttggaatcccntnctctctgattctcttactccccttatgatgggtttggaagttaaagggtttttaaaaagctctgtctacagaagaggacatggagccacagggccgcacccccactcacgtcggaagtgaagatggatggcttcccgctctccagcatctcttctagctcgtcgtctgtggtggttctccc

SEQ ID NO: 515971 - DNA, 653 bp, Homo sapiens
  misc_feature (1)...(653): n = A,T,C or G
tacaaaaataatttctttctttatatcctcatctatttgcttttccctatttgatttttttgtttgtttgctttttaaactttgctgttaaaagctaagacataaacacacacgttcacctaggcctccccggggccagcatcatcacatcaccgccttccacctgcacgtcctgtcccgctgggaggtctccaggggaataacacaaggtgtgccgtcgcctcccacgatggccatgcctgctgtcggatccctcctgaaggacctgccggaggctgttccacagctcacttttgtttaataagtagaaacaatacactytaaaatcatgataaaagttacagtaaatccataagccagtaacatagtcatttattatcatcgagcatcatgtccatgcatgactgtatgtgctggacgttcacactccaggcagcacagtgggttcacccacaccatcgtcactaaacacgtgagactaaagcttcaagctgagcagctacgacagccacactgggatggggatctttcaggtctgttctaatcgcacagccaccgcagtacgcatggtcttcactgatggaaatgtccttcttatgcagggcgtcatctgggagattttcttcaaggaaagatggatccacacanggagc

SEQ ID NO: 515972 - DNA, 536 bp, Homo sapiens
gctgggcacgttgtaggggaaggtgtctgagcaaggaaggcgtgagactgtgagaccgactgtagcacctgatgctgacttgagccccctcaaagccatgggacacaaatygctcctgcttgacagtgtgggaagctgcaaaattcattgtttttcttcaagatctttgggccaaataatagcacgtctttaaataacgcatccttcaactcagtgggcaaaacaagttatacctgacaacctgccttaaaaccaaggagccgggatcagggttgccatggcccaccccttcccataatgcttccttcaccccgctggaggtacatgcagcccacacacgtatgttctagaaggaacagatgctctagggaagggactgcaggcacaaggcccaccaaaacataatgcggcacgaaagaggcccccatgtggatgttgctccctgtggccagccaatttcagtcaataatccagtacgaggatgagcccagcccacaagacacatactcttcctaactaaacaacaagggtcccag

SEQ ID NO: 515973 - DNA, 587 bp, Homo sapiens
ggagtctgagctctggtggaatcccaagattaaaaaacaataataagaagaaaacaggctgggcacggtggctcaggcctgtaatctcatcactttgggaggccgaggcggacagatcacctgaggtcagaagttcaagaccagcctggctaacrtggggaaaccccgtctctactaaaaatacaaaaattagctgggtgtgatggcacacacctgtaatcccagctactcaggaggctgaggtaggagaatcgcttgaacccgggagatggaggttgcagtgagccgagatcgcgtcactgcactccagcctgggagacagagcgagtctccgtctcaaaataaaataaataaataaataaataaataaataaataaaagcaaacccactgtgctaaaggaatgtaacaatgccctgacagtcatctcgctaagcctctcttgataagatgaggctggccaggtagtgaaagggtttagacctggttggaaagcgactgtgtctacatgaaatgggggttattttatcctcaggctgctgcggcatccacatgcctgctctgaggtggcgggacacggttcgtgac

SEQ ID NO: 515974 - DNA, 671 bp, Homo sapiens
ctgccctgcagagaaggaacccgggaaggggcaggggcacacgctggccactggctgtttccacgcatcactcttaatacacttccccagagaagcaaaaagccgcttagaacccacgtgcctggcgcttcatcaggctcagcccctgtgctcacatctacaaagacatcatgttcaaacccagaagtcccagagacgcggtttctcttattttatcttccttctgcttagagtgtgtgtgtttttcttcagtccctttaagaacaagagctgtttacagactttggaatttctccaaaaattataaaaagaatgatttgaagcccaacatagcgaagcacagataaaccctgaaggagattggttggagacatttctgacggccttagacagctctgaattgtttcatctccttgattacgtgaaaaaaaaaaaamacactgagaatatttcacctaaaagcagaggagacccatgttcatgaacaaggagcagtagagacattttggactttttttttcctttggtacagaaatttcaaaaatgtatgtgtcccaccaattacagagaaggccccagcgatgaaaccagcatcagtttacccagctcgtcaggaaacccaataaactcaaataaaaagcactcgtctttcttgatactgctttagcaga

SEQ ID NO: 515975 - DNA, 531 bp, Homo sapiens
tgccgttagcaggcttccctgtgcttttcctgaggcagtaggtgtcactgaaatagactgaagtacagctttctcgccatgcagagcggtgacacggcagttgcattcctgaaaatccactggatattgaaacgatgcagatgaaaacagggcttatttgtaagctggagtcaggttctgggctcaggaaaacaggtcttttctcctgcctgagtgagcagcgtgcatctggcagttatgcaggccagtgggtgatgtgctgaygtaatgaggttcgagggtggcacatctcacacgcgcacgaacaccccgtcgtcacgctcaggaactacaggaggatggaggccagttctttgttgtgtggtgctggctggtgccattcctggcttatgtcttctggatgccagtggctctcccttttttatgatgactggaaataccccacaaatttcagaataccccttggggtggtagaaagattcccctgagaatctccctttagaaacatgttcacagaggagaatcacgaaa

SEQ ID NO: 515976 - DNA, 584 bp, Homo sapiens
gtcttcaaggaggaaagcagacagaggaggggcaagtgttaggggagggctaagagtttcaggagttcagttgtgttttttgttttgttttttgagatgaggtcttgctctattgcccaggctggagtgcagtgacatgatcacagctcactgcagcctcgaactcatgggctcaagcaatcctcctgcctcagcctcccaagtagctgggactacaagtgcacaccaccacacctggctaatttttaaatttttttgtagagatggggtcttgctgtgttgcccacgctggtctctaactcctgagctcaaacagtsctcctgcctcagcctcccaaagtgctgggattacaggtatgagccactgggcctagcccaggagttcagttaggtctcggctgtgatcagatatgcaaggggatatgggggaagcatttggacactcaacactggctctggggagagggccgcaggatgaatgacaggagcacctggctggtgagtgacagggggaagacaaggggcaggagtgagccctggacccctgatgctcccaagttaggaggggaggagcggccagccag

SEQ ID NO: 515977 - DNA, 623 bp, Homo sapiens
ggagtgagccctggacccctgatgctcccaagttaggaggggaggagcrgccagccagggaggggacgtcccagaagccaggaggttctgtgtttcatttcctcaccggaagcagagagcatgggcacagagagacctttctttactgggcagaagcagcagtgccagcccagggtacatgacaagtgcctcagcatgtgggatcagggagtggggatgctggcaattgtggattggaggctctgggtggcaggaggctgccttggggctatagctgttgccatgtacaaataagagccaagggctgctgggcatcaaacgttcaagagaaactggaaattatgagattttgattggcttttcaaaatgtccatttcattttaaaaacaaaaacctacatgtgcctaaccacacaagtctgtgtccccacctggcctgtggcccgtcactgtgttctgctttctaacacagggagttactgccaggggcatggagtctctgtcaggccttttcctaagcaggtgtaccctgggagaggcatgggctgttcagggtgtcggtgcacctgcactggtgttgacccttagtgtgatgccaggcagggccctcagccccccaggatc

SEQ ID NO: 515978 - DNA, 623 bp, Homo sapiens
ggagtgagccctggacccctgatgctcccaagttaggaggggaggagcggccagccagggaggggacgtcccagaagccaggaggttctgtgtttcatttcctcaccggaagcagagagcatgggcacagagagacctttctttactgggcagaagcagcagtgccagcccagggtacatgacaagtgcctcagcatgtgggatcagggagtggggatgctggcaattgtggattggaggctctgggtggcaggaggctgccttggggctatagctgttgccatgtacaaataagagccaagggctgctgggcatcaaacgttcaagagaaactggaaattatgagattttgattggcttttcaaaatgtccatttcattttaaaaacaaaaacctacatgtgcctaaccacacaagtctgtgtccccacctggcctgtggcccgtcactgtgttctgctttctaacacagggagttactgccaggggcatggagtctctgtcaggccttttcctaagcaggtgtaccctgggagaggcatgggctgttcagggtgtsggtgcacctgcactggtgttgacccttagtgtgatgccaggcagggccctcagccccccaggatc

SEQ ID NO: 515979 - DNA, 604 bp, Homo sapiens
ggctccagcacattccttggtggggaaattagagtgaaatgagtggagaaaaaactaaaacatgccagagaagctcaggtgggctgtgaaataaaaaagctgaacaagaggaggaaacccaggagggactgaaactcacagaaactgggtgccaggaagagtatgttttgggggataggtgggccgggtagggagttagtgagagaaaagcagcagaacagattgcaaagtgcggaagaaccgagggtgaaagggaaggagatgttagatgttactgctgcaacttccctgtaaatctaaaattattccaaaataaaaagtagaagaccaggcrcagtggctcatacctgtaatcccagcactttgggaggccgatgcgggtggatcacttgaggtcaggagtttgagaccagcctggccaacatggtgaaaccccatctgtactaaaaatataaaaattagccaggcgtgttggcaggtacctgtaatcccagctactcaggaggctgaggcaggagaatcgcttcaaccagggaggcggaggctgcagtgagctgagactgtaccactgcacactagcccaggtgacagagtgagactccat

SEQ ID NO: 515980 - DNA, 457 bp, Homo sapiens
ctgcaaggtctgattgttaaaaagcccggcaatgggcgtggtgatgggtgcctatattcccacctactcgggaggctgaggcaggagaatagcgtgaacccagggggcggagcttgcagtgagctgagatcgcaccactgcactccagcctgggcaacagagcgagactccgtctcaaaaaaaaaaaaaaaaaaaaagcccggcaatgtcctacccttccccactcccccgtcccactccatgtgctacrcctgctccccttcccctttctccatgagtggaaggagcccaaggcctcaccagttgttggcacatgcttcttgttcagcctgcagaatcatgagccaaataaacctcttttctctatatattgcccagcctcaggtattcctttagagcaatgcaaagtggacttagatagtcaatgaaacaaaggggatgtgaggctggtggccca

SEQ ID NO: 515981 - DNA, 550 bp, Homo sapiens
tccaatgcattattactattatgatgccaagcaagacattctattttagatcaattaagagtaagaaaaatcaaagaccttaccacctcgtattccctccccaacactcttgtttctatagatctgagtttctgacatactgtttttcttttcccgcaagaacttcttttaatgtttcttgcagggcaggtctggtggtggtgacttctctcygtttttatacatttttttttatttctatagctttcaaggtacaagtggtttggggttacatggatgaattgtatatcggtgaagtcggagattgtagcacacctgtcatccaagtagtgtacattgtacccaatgagtagtttttcctccctccctgcaaagcctccccttcctgagtcgccagtgtccactctatcaccctgtcgacctttgcatacccagagcttagcacccactgatatgtgagaacacgtggtccttgttttccattcctgagttatttcacttagaagaatggcctcccgctccatccaagctgctgtgaaagaaattctgt

SEQ ID NO: 515982 - DNA, 446 bp, Homo sapiens
gtgaaaagctcggacagagatggaggcaaacagctctcagccaygcggggcttggggttggtgcttttctctccatccctgggaaaacagcacaggatcttccctgcaggaggccgggggtctcctgcaaccgacaggcaaccgatcagcacatcaaagtaaaagctgccctgggctctactccaggaagctcagaaactcaagcgccctcagaattaagtgatgaagaggagcgacccaagctgcctgggtctttgctctcctgtccggctcccctccccaccccaagcctccagtggccccgcagattcccccttcccacagaacttcaggtggtggcacagatatacccgctacctagcaaccgggtggtgcaggagggaaaaaaccctgggaaacacgcacggacttcacacacttgcttccttccctggggtaaaaatccc

SEQ ID NO: 515983 - DNA, 446 bp, Homo sapiens
gtgaaaagctcggacagagatggaggcaaacagctctcagccatgcggggcttggggttggtgcttttctctccatccctgggaaaacagcacaggatcttccctgcaggaggccgggggtctcctgcaaccgacaggcaaccgatcagcacatcaaagtaaaagctgccctgggctctactccaggaagctcagaaactcaagcgccctcagaattaagtgatgaagaggagcgacccaagctgcctgggtctttgctctcctgtccggctcccctccccaccccaagcctccagtggccccgcrgattcccccttcccacagaacttcaggtggtggcacagatatacccgctacctagcaaccgggtggtgcaggagggaaaaaaccctgggaaacacgcacggacttcacacacttgcttccttccctggggtaaaaatccc

SEQ ID NO: 515984 - DNA, 446 bp, Homo sapiens
gtgaaaagctcggacagagatggaggcaaacagctctcagccatgcggggcttggggttggtgcttttctctccatccctgggaaaacagcacaggatcttccctgcaggaggccgggggtctcctgcaaccgacaggcaaccgatcagcacatcaaagtaaaagctgccctgggctctactccaggaagctcagaaactcaagcgccctcagaattaagtgatgaagaggagcgacccaagctgcctgggtctttgctctcctgtccggctcccctccccaccccaagcctccagtggccccgcagrttcccccttcccacagaacttcaggtggtggcacagatatacccgctacctagcaaccgggtggtgcaggagggaaaaaaccctgggaaacacgcacggacttcacacacttgcttccttccctggggtaaaaatccc

SEQ ID NO: 515985 - DNA, 619 bp, Homo sapiens
cgctgctctcaacagccaaagggtagaaatgacacaagtgcccatcaatggatgaatggggaaacaaaatgtggcatatccatacaatgsaatattattcagccaggaaaaaggaatggagtatgtgattcctgctaccacatggatggaccttgagagcaccatgctggggaaagaagccagacacaaagcccatctatcgtatgagcccatttttatgaaatatccaaaataggcgaattcatagagacagaaaggagactggtggttgctgagggctaggaggagaggagatgaggagtgactccttactggagtggggtttccttttggggtggtgagaacacattggaacaagagagaggtggcagttgcacaagactgtgaatgtattaaatgccgctgaattgtttactttaaaatggttaattttatgtgatgtgaactttacctccataaaaacatatgaaaagaccgtagaaagtgcctgtgaattgggccccactgacccagtctgccccttcctgactccatctgtgtggcctggagcaggtcagtcttttcccacatctgtaaaacgatcgtgtctgcttatcacataatgtctacttcacggggc

SEQ ID NO: 515986 - DNA, 581 bp, Homo sapiens
aaatgccgctgaattgtttactttaaaatggttaattttatgtgatgtgaactttacctccataaaaacatatgaaaagaccgtagaaagtgcctgtgaattgggccccactgacccagtctgccccttcctgactccatctgtgtggcctggagcaggtcagtcttttcccacatctgtaaaacgatcgtgtctgcttatcacataatgtctacttcacggggctcttctaggggacaaatgaaatatttgacagaaggaaataaagctattcccccttagataggattcaatcttttaaaaggtcattcagtggcatgaaaatgactctccacctttgttttctcagcagagaggaaattaattgttaaggaatgccatggaacatttaggccaaaaagccaaggttcgaaaacaaataagctgcaaaaaatgtttccattcaaagatgctgggttctccccatacagggccattgctgtctgcaccagccccactgagtctctgtcatggctgcactgtcgtctgcagtatyccatgtgtgtggggctgcatgtcatgggtctcggcgtgaggagccc

SEQ ID NO: 515987 - DNA, 611 bp, Homo sapiens
ctgtcctactaaattcatacatctacaatgtctaggatgtgaattacattgccttaaacatgtccatgggcagtgcacaacctgcacaaccttactcagcagtmctgagtgtgttcagacatgcttaggctgggcggacactcaattgggacagaacctgatcctactgcagccaagctggatggccctgtgcccctccactgacctctactggaggaatgtgctcatgattccccaggccatccctatgtggctttatctactgagacattttacattctaaaactgtaaaatggatttcaagtaaaatcacaccaagtagctactagctagaagttcatccacatcgtgaggttaacccatcatccaaaaagcagatgccacaaatcttttagggaaatacaacagtgacattctgggaaaagtgagctgagcaaagggaggaagccccttctggtgagggaaggcatgggggggatccagggagtatgatgaggtggcttttgcaaggcgacttttggttttcctaggatgggattgcatcatacaatgactctctggggtcagaactgtgctttgtctagatcacggctccaaactatgctgccccc

SEQ ID NO: 515988 - DNA, 611 bp, Homo sapiens
ctgtcctactaaattcatacatctacaatgtctaggatgtgaattacattgccttaaacatgtccatgggcagtgcacaacctgcacaaccttactcagcagtcctgagtgtgttcagacatgcttaggctgggcggacactcaattgggacagaacctgatcctactgcagccaagctggatggccctgtgcccctccactgacctctactggaggaatgtgctcatgattccccaggccatccctatgtggctttatctactgagacattttacattctaaaactgtaaaatggatttcaagtaaaatcacaccaagtagctactagctagaagttcatccacatcgtgaggttaacccatcatccaaaaagcagatgccacaaatcttttagggaaatacaacagtgacattctgggaaaagtgagctgagcaaagggaggaagccccttctggtgagggaaggcatggggrggatccagggagtatgatgaggtggcttttgcaaggcgacttttggttttcctaggatgggattgcatcatacaatgactctctggggtcagaactgtgctttgtctagatcacggctccaaactatgctgccccc

SEQ ID NO: 515989 - DNA, 621 bp, Homo sapiens
tagttacttttattctaatttccctattgttctttcctgtgttattcattttcagctatttgtggatgccaaccaaagtccatagacytcagtacattgggtgagggtgtggagtctggagtcagactgcctggtgttactcctggctctgacccttatacctgcatgactccagacttgttatttaacttctgtttctcagtttcctcacctacaaattgaggatgagaattatacttcctagttgtccagagaattcaatgaaatatatctgcgaagcacttaaaatcatacctggcaaaaagtaagcactaaaaaattattgaaaatttctagaaattactattgtattattgcaagtatgctaaaatactgaatcaaatatattcctgatgtattatagatcaaacatagcacaggttttttccagcttacttggtagtccacagtgggcattcctgagtatgaggtaactctcctcaatggctgcagagccccagaggccccaagagccttccatcctcaggctctgccatcatcttgggctttatcgttgtctgggtctggtaaagagagcatggaggaggcaaaactacttcttaaaatcttttggtccagagg

SEQ ID NO: 515990 - DNA, 615 bp, Homo sapiens
ttctcttgcagagcattacagaatatctgaaaatcagtttttagcagtctctattctacatccctctgatcatctctctttttattarcagtatattctaagtgaatttcatgtgtgttgtggaagtgaaaaaaatcagaaaatgttcatatcctttattcagtcccattttgatttttaaactgctcttctgtattgtctctcccatggggagtactgccaaaaggagcctgcaggacagtgtctctgggcttcctgggactacgggggtccagaataagaatcgacccgaagggagcacagtgtgttgttcatagagagtcatgattaatatctacctctgactctttgctcttctcctgtgagagcaagcctgtatgaaatcactccacatgcctggatggtttgttttgcacgtcaagctccaacagctctcagtgaaaaaccaagattacatcctcaaacccaggctgaagagagggctgtctttaagggtagcagaatgttcagatttgctcctggcaaatcctgttatcttagggggaaaaaaaattgagggtattgatgaagaggcccctttctttaagagggctgtccagtaaagagatgagagac

SEQ ID NO: 515991 - DNA, 591 bp, Homo sapiens
ttgaaatttgcaggttggaggtgaaaatggaatgatagcttgtctgacaggggcgaggattttcctctggtatgctgagacccattattatgcacccataattgccaaggccccccactgacctctattcactcttccccaagtaatcttggtttcagctctccccacagcacctccccttttcccagtgaaaggtgttagctactctgctatctgcagcaatattctgctaaacagtagtatgtatgagaagctgactgagctccttaggaatgcaaggagaagcactgttttgcattgagcattttttggaaacagagcagaaggtttccttgcagagtgacttcaggagacaatctacaagcaagtagggagggcaggagaaagtagagagagaagagcctgaaaatgtagttatgagtgaatccaaaaacaaagggtgtgtgtctgccgggttggggggaggggggaggggagagagggtggatgtcagaaaygagagtggctccccagagttgtcacaaattgaggcaagtgggaaggggaggtgtgcagggatttgcattcctgggtctgtcaatctttggccac

SEQ ID NO: 515992 - DNA, 501 bp, Homo sapiens
gcagctccctcgcccaccctcccaaacccagcctgtctcccaaaacctcagggggacactctctctgctccccacccccaccccaggtgccacctaggactgtctcctgtcccctccgggagcacctggccctggccgggagcccctgatgggaacagagagcccacgtcccacatcccatgcaggctgctgagagcctgctcgcccaccctgcctctgtgtgtctgcacggctgcccgcgagcactcacattttgatgttctcatgatactgccgggtgtcggagggctggttgtacagcggctgcaaagggagagagagaagcacatcagagcctggctggccactsgccactacagagcccaccggtaggagccacagccctggcacggaggagctgtcctctgggtgagggctcagccgcaggcaggcatgaaacagaacacagggacccagcacgcagccccagccaggaacaggctgaaactggttcctcgggaa

SEQ ID NO: 515993 - DNA, 486 bp, Homo sapiens
cttctgggggttcaagcccgggagtaccccgagatggctgcaggcggcaatgctgctatgagtgtccctgccttggagacgggccgggccaggctgccctccacccccaccctgcaccccactcctctcagacagacacctctgggggccctcagccctgtctcacggtgtgggggaaggagcgcggtggaccagactgactcagccaggaattcgggctgtcagcgcgttggaatgaggacccggaggcaaatgggtcctgagcgagtggctccccygccccatttgacctcacagctttagggctgccgtggttggggagggacaggtctgggggggcgggggcggacgtctcagccccagcatcctggagggcttgaggcaggccacgggaggctgagacccttccctcctccacaagcacagaaggtgcaggctcgcctcgccagcgtgtaaatggcctctgaggagcagccgcttcttcca

SEQ ID NO: 515994 - DNA, 313 bp, Homo sapiens
ggcctgcagcctgctcgccgccgtgggccgcgctcctgccagcgccgccgscctccgccctccgccctccgcggctcccgcccgccgggcccagcctcgcctctgcgctgcgctgcgatcccgcaggccggcccagccccgaggcgcacgttgccgcccggccctctccgcacctccccggcccgcgcctccttttctaggcgcctcctcctcccccttcctctccccgccccggcctgcgcggtgggcaacagccccggcccggcgcctccgccgaggccctcccgctcctgggcactgcgcgcccagccag

SEQ ID NO: 515995 - DNA, 568 bp, Homo sapiens
tgtcaggggaagaagcgcggactcagatgggcttcaacaggaaaggaatggctgtagctggaaatgtctgttgggtgtagatggcaggaatagtctttcaactcaagtcttgccttcatttcatttcattacatttcatttcattttatttrtttatttatttattatttatttttgagatggagtttcgctctgtcacccaggttggagtgcagtggcagggtctctactcactgcagcctccgcctctcgggttcaagcaattctcctgcctcagcctcccaagtagctgggattacaggcgcccgccaccaagcccggctaatttttgtatttttagtagagaaggtttcactccattgaccaggctggtcttgaactcccgacctcaggtgatgcacccgcctcggcctcccaaagcgctgggatcacaggtgtgagcactgcacccagccccttcattcctgtgcagttttttcaactccttatgttagaacattgacaaactgaacctgaattcccatagcaggtgggagccggagagagctgtgctttctcggatggtatc

SEQ ID NO: 515996 - DNA, 695 bp, Homo sapiens
agtcacagcaggggctcgcccgcgtgccagcctgtgaacacccatttgccagcacacacgcagtttagcctggtgcagggggcacccaaacccacgcaaattctgcccctgccctccgccacagcccccatgaagccaccttcaggagcccctccgccccccacctccctgtacccggctggcctgggctgccctccaggcctcctgtgagtggaccctggtggtcccaggctgcgggctggtgggcctggccgaggcacaatgtctgccttcacaccgagggccggggtgggggcccggaggtccagcctattgatggagcggccaccgagccctgcgccacatgttcctgttttcctaataagtccccagttgtgagtggggaggaggcggggaggccccggggcagcccagaaataatcacatgattgtgaaacacaagaatcctagaaagggtatctccgagcgcctctatctcaccctccctcctcctcctcctcctccttccctcgctggctgcactagctctgaggtaattgtagacaacccaaccagcttccagggygagggaaggcatctcagggctggcagtgtcggctgggctggtggggagcggtgcccacgtcgctgggccctgggggagcgaggcctgcgcgcctgccggggagcaggcttcagtggacccggcgcatttg

SEQ ID NO: 515997 - DNA, 491 bp, Homo sapiens
catctgtcaggacagtcctcacctgttcaaggatcccattcccatcccagccatcacccattctccaaaattcagagtcccttacagccttcaagatgcggttcaaatgctcttgctacatgaatggtttcccagcctctcctcaagttgtgaagtcttccaactccctgttcgcgtaacacacctctcttcttccacttaccccatctgtgtgttccccaccagcccaaggaacsaagacccacagcctccattctcccaaggcctggcctctgcataccctctgtaaacattcatccatgaagctcagtccaaacacgcaagttccagaaccatgcagccaacacacacgtggctttgcagaaaacatatgttcccaaacacacggaaaagccatcagaacgggctacagttaagctaaaaggagttatctcggcagcagggcagaagagggtatttttactttcttctttttatttgcccgttatttt

SEQ ID NO: 515998 - DNA, 590 bp, Homo sapiens
ctctagtgtagattccgtttctgtgaaaagtccagaacgggccaatccatcggggacagaaaggagatgagtgggtgccagggctgggaggagggaggataggggtgactagtgatgggcatagggtttctttcttagtataacactgaatatactaagaagaactgaatgatacacgttttttttgagacagggtcttgctatgtcactcaggctggagtgcagtgctgtaatctcactgcagccttgaccccctgggctcacgcaatcctcccacctcagcctccggaattgctgaagctaaaggcacacatcaccgtacctgactgatttttgcatttttttcttttttktggtagagccaaggtttctctatgttgcccaagctggtcttgaactcctgggctcaagctatcctcctgctttagccactcaaagagctaggattgcaggtgtgtgccactgtgcctagcctaaatgatacgctttcaatggtgaaatgtatggtatatgaatgatatcttaataacggttacaaaatgaaatgaggaccatactatatgctagccataaagggttcgacgtatcag

SEQ ID NO: 515999 - DNA, 590 bp, Homo sapiens
ctctagtgtagattccgtttctgtgaaaagtccagaacgggccaatccatcggggacagaaaggagatgagtgggtgccagggctgggaggagggaggataggggtgactagtgatgggcatagggtttctttcttagtataacactgaatatactaagaagaactgaatgatacacgttttttttgagacagggtcttgctatgtcactcaggctggagtgcagtgctgtaatctcactgcagccttgaccccctgggctcacgcaatcctcccacctcagcctccggaattgctgaagctaaaggcacacatcaccgtacctgactgatttttgcatttttttcttttttgtggtagagccaaggtttctctatgttgcccaagctggtcttgaactcctgggctcaagctatcctcctgctttagccactcaaagagctaggattgcaggtgtgtgccactgtgcctagcctaaatgatacgctttcaatggtgaaatgtatggtatatgaatgatatcttaataackgttacaaaatgaaatgaggaccatactatatgctagccataaagggttcgacgtatcag

SEQ ID NO: 516000 - DNA, 169 bp, Homo sapiens
gtctgatcctagcccttggggacttccatccctgaaacagagactggctgctgtcctcaactgcccagccttcacgtgctgctggctatagygcctttccccatctccccccagcccaggcacaccagatgtgcaagattcaatgtgccatgcaagaccccggtgatgc

SEQ ID NO: 516001 - DNA, 602 bp, Homo sapiens
catcacagggtcagggtcaggccgtccacttctcacacgcatgggcgcggttcctgttggcagtggttcctggggaccctgagattttgttttgtggaacctatagagatccgggtgaacctcagttcctagggaatgtcctaggacttccccctttaacatggcccagggtgaaccccagggcagagacaagggccccgcatgaccctgcgggtctgattttcctccctcgcttgctctgcccaggaccattccaagggacttgggaggggagaaaacagaccacactgtagttgaaataaaatggcctgcctgccccaccagaaaacaattcctccagccatccagatgtgagcaggacgcagtctccgcgggtctgccctctgccaaccgagattggccctaacttgggtagccatctttggttytgggctggaggccttgaggcccaaagcatctgtgctgaaaatgggtaaaaggtggcattctcagggatgtggggtcacccaggccaggagcaaagacagaggccagaaaggaaagaacacacctcagagacatcaacacccaaacaggacgacactggggtcctccaggccacc

SEQ ID NO: 516002 - DNA, 625 bp, Homo sapiens
cccatccaatgcctggtgtcctcagaagaagaaagtgtggacacagagatgcacagggcgaaggtcatgtgacagcagagccaaagacggagtggcatgccagcaatcacgaccgccagcagcggccaggagctggaagaggcgggatggatctgcccagaggctcggaggctggcgtctcggcctgcatggwgcccccaggctcctggcctccaggactgtatttgttaaaagccacctggctcgaactaccttgtgagggcggccctaggaagcgagcaggctgcctggcacactctctccctagcgctgaccagggctgcctcctctgtccgggtctcagcttggatgtcacctcctggggaggtcctaccggccacacctccgccccttcctggcctgcatctctcattcctggactctactccaagtctgcctccctaaccacacctcgggctcccccaaagcaggcagagccagactgggtgcggctgtctaagtaggtagtcgctgctcagtgtctgcagacaaaagccaaggttagggctgcctggcgcccactcaccggttcttgtcgccgccctcggcctcatccacctcgtctgcactgcaggtagcactggag

SEQ ID NO: 516003 - DNA, 302 bp, Homo sapiens
cggcgcccagggtggctgggggcttgggcccattctgccctgtgtccttggcggcctcagtgtgaggagaggggatgctctcggtgtctgagctgttgttgacagtggctgtgcagggcgagaaggaagaggggatgagcagggtctggcggggcctccagaagagatgcatggccctgaccctcsggatgaggccgctctgtcgcctgatgccaaaacagccccgaggctcctacacacctgggctgctgcctagagccccacccctgagacaaagcccctgaccaggcccctacccacag

SEQ ID NO: 516004 - DNA, 666 bp, Homo sapiens
gcgtgttccagggctgcgcagggggcaccaggctcctgacctgattctactgaactcacattgttcacaatcttcagggagggaaactgagkcccagagaggccaggcaggcttccaaggccacaggactaaacatagtgacgagtaactgcctccgttgaatctttgtgagggtccaggtgcggcctgaggatgttgcatgcgttcattgtttcaccccctagcaatgctctgaggtcgttttcttaatgaccttatttattgctgagtaaattgaggttcagagaggttcaacgactcacccagagtcacgcagcaaatgcagttgtgaaacccaaattcagatgttcctacagccgcagcatccactgcacccaccagcaggttgcaccacaagaggccccagtccccccaggcggccccagctcagtaggggaagttccgtgccgatggtacgaggacgaggagctgttcggtggaaagcccctgaaggccactgtccttccacatgggcagaggtggcctcttgtgaaggggaaggagaatgggagccaccacggggctgtggggctgtgaggcggaaggactggggtgggtgtcccgggaggggttccagcttgtaggaaggttttgaagccagggagaaggcagaagcagtaagatccc

SEQ ID NO: 516005 - DNA, 421 bp, Homo sapiens
gcaggagatgccccggctcgggcttgggagcagaagaggaggtggtaccgagagaacctgagcattcagaaaagggttccatggcyggtgctgggagccgaggagggagtgcctgccaccagctctgctggctccaggagtgtgtgccgtgctctccaggagggtgatctggccggtgggcagcctggcctctctcctccctgtggctacagccctggcccaacacctcccgcaggcatcatcgacctgtcccaagtgccacacctgcctgtgctcgtgcccccgacaccaggcaccccagccaccgccatggaccgccttgcctacctccccaccgcgccccagcccttcagcagccgccacagcagctccccactctccccaggtagcgccactgcccagtctggggtggggaccccgg

SEQ ID NO: 516006 - DNA, 487 bp, Homo sapiens
tgtggggcctgggcacctcagggccatagtacagaaggagagagcagtgcggtacaagttcagtaagtcagggacacggctgatcagctcctgccacctccccgattcagcttcctgacagcccctgggggattgattaaaggactttccatcctctttgggggcgccgtgtatgcctgcttcagcaaaagggccggtggggaggctggcctcccgtcctacattcactgaacgacagcagcccctcacctgaacacggagggacatccctcttcccctaaggtggcttgagacatgctctggggacagaaataagaagggactcccaaagggcccacactgactttgaagtggaagactcgggatggggctcagaagaatgaaatatgcattaaaaaaaaaaaaaaaaaaaaaaaawatatatatatatatatatatatatacaataaaatatatcttgtatacattttattgtctgtatatcgtg

SEQ ID NO: 516007 - DNA, 476 bp, Homo sapiens
catcttcctgtcctctgccactcccagctccccctgccccacctctctgttccctctgcctggagcatcctccacattctttctaggggaccctggtgcccccagctagcttaggtcctctcctattccctycccttgacttttgcttttcttttatagcacttcattcaacaaatattttttcagtacttactatgccaggctgttgtgacatagcaattaacaaaacagacacaaagctcggtccttatagaactggtaatctaagctcattgccattgtgttgatgagtaattattcagcaattggtttgttaacttgtcttctccactagactggaagctccatgaggacagggccatatctgtctcgttcacagtaccatgaatccccagtgcatagtaggcactcagtaggttcctggggaatgaaagacattctgggattgatggctgccatttggccatctaggctct

SEQ ID NO: 516008 - DNA, 614 bp, Homo sapiens
gctgtatgctaggtactggttctaatgataggtgaacttattaagttgttgatggttattattttaaaaraacaatacatatgatgacatctttctgagattacctttggaaaataggtgaagattctctgtatttccgtaaaggtaattgagagtaaattttgtacatatttgaaaaagagtacatgaatactttgatttgctatctgatttctgagtgcatagacagactctggggtctgacaaattgaagcagtgtgagaagaggtgggactcactccacagactccttccaaagcaattgtcagctttgagcatctctaatagcatcttcacatcagggtaaatgggggtatttatctcctcaagcacttatgctttgtgttacaagcaatccaattatacttttctaattatttaaaaatgcacaatgaaatgactttttactatagtcaccctgttatgctagcaaatattaggtattcttcattttttctattagtttgtacccattaaggctctctacatcccctgcaaccctccactacccttcccagcctgtggtaactatccttctatcctctgtctcctgagatcaactgttttaattttta

SEQ ID NO: 516009 - DNA, 386 bp, Homo sapiens
tcagctaaaagcttcctccctggcaacactcattgtttcagtgattggctttctgtgcagcaagaccaaacccctggcattttgataacaaaagactcagagacagagtcgtttcctattttaatatatcatcttttctgaaagtgtttgagaaatggaaacaaagcacattaactctaaagccggtctgtggcagggcagagcacatcattgcgcagcctccagtggcctgggttttgcgttgtgttgatcacctcctcctaccttgttaggtgattattccatgatgcaragctggtgttggcatgctggtgagtcgctggagaaaagctgtttgatttctactttagacccttatgaaagagacacacgcctttgaattatcc

SEQ ID NO: 516010 - DNA, 692 bp, Homo sapiens
gtaacctgtgctcacataggaatttgtttttaatatcactttaggaaaataaaaatcttagtaagtttaccttcccttgcttaaatatctaaaaatatcagccaggtagagaatagttgtactaacattctcaatctatcaatatcttgtaaatagtaaagttttggtatttctttatataaaaatttcttatataattaaaaagttaaatagattagaaaatacgttagaaaaatttgaaatactaaagtttaaaaacctccctgacaatatctattatggaattaataatgcatttaaaatttttgaatctacatatatttggaaaataatacaaatatgtgtaagctatattacagacaattgttatgtgaattagtggctctcatatttactatccggaatctgtaaaatttaacagtgacttgcttgatctctaacactaactttgtggaagaattagatttggtaaaggagttctaagaaaactggaactgtattgttttctggatagtttttaaaactgaacctgtgtgtgtcataaattaagacaccaaatgaaagaaacattaaatgaaaagtctgagtgactgcggaaacggtgataaacataagycaccatttgttctttaaaaacatgtctttgatatattagtcttttcctccaataaattattaagtgggaagattgg

SEQ ID NO: 516011 - DNA, 534 bp, Homo sapiens
tctctattattctcactttgacattaatcaggggctcaaatacataatccaattaactcggagattgcatttgtggaggttctctcagcaagctctctggcattttttctcctctcctctaatattagtagtttgaaaatgttttgtctaatttctatcacttttttttcagatgaaaaaatagcaaatggagaaaagtcattttatgaatttctgatttatgcatgctagtcaggatcattgctagtggcctcaaaattatatctatccggtatcaggatatatatgtcttcttatttgtcatgcacgtatgcttatatacaggctaactacataagagatgcttagtagggaaaatcattatcatactaatttattatacttcaaggctattttaaaagataaaacagcttgctcttatttaagaggattacaaatraagtgatttttacagtttgtatttatataagtgccctagaattattcaaaacatctaattagagacagagttttacttaaacaaatatataccat

SEQ ID NO: 516012 - DNA, 563 bp, Homo sapiens
ctgcacctgcttgcagacatctgaggctggtaagacctgacggacctgctcaaaaccttgagcagctccatattgcccaagggatgatattgccacatcttagcatatcctacaggtcctcctggtgcctctgcagcctctgccactccctttatctcatgctctgaacttcagaatgacacaatcatacatgatgttgctgcatctctccctgtttaaggaaatggaaactaccttcctctcctcagtcctctgccactcccactctatacactctaatgttcccagcaaaataagaatacttcaaaacccggctcagatgcccccttccaaggatcctctgtgcttgctctctcatctgaatgtctgtcattcctgtgtggatgtcactgtggcttaacttagtgcgggagattcttgcctttcttcctacagggagacttcctggagcttaaggatcaagccttctttatatctgtacctttagttcctgccaacatgtctakaaatgattactttcattaaatccttgttaaattgaaataatgaaaatgaaatgtatc

SEQ ID NO: 516013 - DNA, 505 bp, Homo sapiens
tttcttctattattaatctaatttcttcacacccatttttcctttacctccttttagaactcctagcacatctcatgttagggtcttccaaatccatcttttaattctttatctttccttaaggatttctttttcctttttgtcctccttctgtgtggatttttcttatacatcactgtttgtatctaaacagtggctatcctcttactcaatttatacctctaatattatcttcaggaaaccattcttcttggtttgagaaagtcctgtgtaggcatgtgcttctctgtttttttgttttgttttgttttgtttttaaytttaaagtgtgtattcctgcagcacctttatttttcataaatattggcactgtttgggtttttctctggttgctgggaccccaggacatgtgtttgttattgctgttttgacagatcagataagtatgttgcctatcaactggacgaagttccgaatcaaagcacattctgcctctgtagggcag

SEQ ID NO: 516014 - DNA, 505 bp, Homo sapiens
tttcttctattattaatctaatttcttcacacccatttttcctttacctccttttagaactcctagcacatctcatgttagggtcttccaaatccatcttttaattctttatctttccttaaggatttctttttcctttttgtcctccttctgtgtggatttttcttatacatcactgtttgtatctaaacagtggctatcctcttactcaatttatacctctaatattatcttcaggaaaccattcttcttggtttgagaaagtcctgtgtaggcatgtgcttctctgtttttttgttttgttttgttttgtttttaattttaaagtgtgtattcctgcagcacctttatttttcataartattggcactgtttgggtttttctctggttgctgggaccccaggacatgtgtttgttattgctgttttgacagatcagataagtatgttgcctatcaactggacgaagttccgaatcaaagcacattctgcctctgtagggcag

SEQ ID NO: 516015 - DNA, 505 bp, Homo sapiens
tttcttctattattaatctaatttcttcacacccatttttcctttacctccttttagaactcctagcacatctcatgttagggtcttccaaatccatcttttaattctttatctttccttaaggatttctttttcctttttgtcctccttctgtgtggatttttcttatacatcactgtttgtatctaaacagtggctatcctcttactcaatttatacctctaatattatcttcaggaaaccattcttcttggtttgagaaagtcctgtgtaggcatgtgcttctctgtttttttgttttgttttgttttgtttttaattttaaagtgtgtattcctgcagcacctttatttttcataaatattggcactgtttgggtttttctctggttgctgggaccccaggacatgtgtttgttattgctgttttgacagatcagataagtatgttgcctatcaactggaygaagttccgaatcaaagcacattctgcctctgtagggcag

SEQ ID NO: 516016 - DNA, 690 bp, Homo sapiens
cctgagagacacctcttgtcagctagctttttgatgggctctcacaaagtttttatttcttcgttatccttttctttctttgtatctatgtctgagaaagaaatctgcttaattattgagtgtttttattctgtttgatgataacataatcgatttcccttgggatgccttctgtcagtggttttattctgctttacatccttgatcttttcacagtcaagagcagttaataacagaacatcaaccacattgacttaaccatattcatcgttatttgtagtaagaatccagaggtaactggttattggcattccttaagaggtcctaggcctgacagtgtgggtgttcccaaagtggctgctgtagctccacccaatatatatatgttctaggcaacaactaagaaaagcagagaaaagcaaaaagagcacatgccaactgtctgttccctcttaaagtagctttctgtcagagtcccacccagcaacttgtacttaggtttatttgtcacctggctacaaagaagtctaagaaatgtagactctagctgggcactttgctacttaaataaggttaggtttctgttcccaaggaagatagggrtcatggttgtggagtgggaagcctgcagcctcacttattcacctgactggattcttttcctccattgagggtaggtcgttaggttga

SEQ ID NO: 516017 - DNA, 627 bp, Homo sapiens
tgtctgtaagcatctaccaaaaggaaaaacttgtcttatcatcaatatatgtggaaagtttacgttgttttaattaattcattatgagatatcagtgaaatatgtaagagtaaaaagttaattcaatctaacaaactattaaaagaaatatatgcgttcttctgactacaaggcgttttgatgactttctctctctcttcctcatcaatctaycctgaaaaaatgtatttttctcaatattaattattactctatgagtaatagatgccaattgtagaagggttttacatttttaaatagggtaaagaataaaattaaaataacttataatcctatccaaaaccaatcagaagtaatcactgtttgcatttggatcttaattctgttgagaattttctctacatgtatgcattattattaagttttatattacatatcttcagtttaatgggtaattcttgatcttccattaatttttcaccacatgcatgcaaacatttgcataatctatgtccttcactacaaccggtgctcacccaagttcttttcttcattgtgtgcattcaatattttcatgatcttcctttcagttaatatctcaaataactacctcctggcattctttct

SEQ ID NO: 516018 - DNA, 678 bp, Homo sapiens
tactcgtaattaagaattaatatagatttttcattctgtttttctttccctcgggtattaagtagcattagctgcatgcactcagagaaaagccacatatgtagataaagcaagaggtactctgctataatggtgcagattatctcttctgctgtattagcctctgagagtccaattgaggggttagaaaacakacctttcacctctttgtatctcttataagcacttttaatcatggcacaacgagaactctcaataatttttgttggatgaataagaatctgtgctccttagtttatctgaaatagagtagcaatgaagtaaatatctctagaaaagtacaaaatggaataattactgcaaaagtcaatatgttgtactaaaaatggaaagtatcaggcattctaatccctgcaattaaaagaatattatcttgtggtctactgagaaaaatgaagaaagttttaaattgctttcctaaaactaatttgcaacgaaaggcatttaaggattgataattattagtttgttgtattatggtaaaatatagcagcctgaaagaactgaaaaaagagcaaattcctttttcctttaaacttaatacttaaattacacaaactgaatagtagtctactgaggaaaagcctattgttttattacccagctaagctcataatt

SEQ ID NO: 516019 - DNA, 609 bp, Homo sapiens
ggagtctcactctgtcacccaggctggagtgcagtggcgcgatcttggctcactgcacatgccgcttcctgggttcatgccattcgcccacctcagcctcccaagtagctgggattacagcgcaccaccacgccctgctaattttttgtatttttagtagagacggggtctcaccgtgttaaccaggatggtctcgatctcccgaccttgtgatcygcccgcctcggcctcccaaagtgctgggattacaggcgtgagccactgtgcccggcagcaacccagttttgaaaccagaaatcaaaaaatggttttctgtgtaaaattgtcatatgtggattcctggctagaccttaagatgcggtgtgtggagaagatccaggtgaatgataatagcttttttccttaggtaattttttgagaaaaattttgcagcctgctcttgacttgcttggcagtgaagatgatgatagcgctccagagacaacaggccatggatttccccatttttcagaagcacctgcaagacaaggattttctttcaataaaatgttcacagaaaaggctacagaggaaagctggacatcgaattcaaagaaactggagaggctg

SEQ ID NO: 516020 - DNA, 636 bp, Homo sapiens
ttggcatttgcatctctaatcctagatactgggatggccatccatgtccagatagtggtttctgctccaacatgatttatttcagtttcctggaaagtgcatgagaggcctttccatttcaagccttatctgcaatctcatttctggatttctgacctttgcttcggccttgctttggggcttcggtcccaggtcgtatcaaagatggcttgtttattgttccaggcagagcktcagggttgggataattctagatgtacgagtctgaaagtgaaaccagattatttatctcaggcctgggcccaggtgtaaaacaaagtcagtccaaaggagaaacacatagttagaatgggaacaccatatgaaggtctgaataaaagccaaatcctgagtgcttatcaaagcaggggtgggacaagagtccaaacagcagatgattgactgaagctcaggtaacaggtaattcagttcagagctgctagcgtcttagagtttcacggccacctagagtaaaaggcgtggacatggtcactaaagcactggcatgaaagccaggaacctgatttctggattaggggaaggtggccacagagacccagcatgctgttttcacaaggctctcgtcacctgcctgtt

SEQ ID NO: 516021 - DNA, 536 bp, Homo sapiens
ttttatagttctcaaagccctttctcgttytttcttggatcaccctcacaacaacccaataaggaggactgggcagggagtctcattctctcccagcagaagaaaattgaggtccagaaaagtgaagtgacttacccaaggtcaccacctagttgatggcaggccctggaacagaacacaggtcccctagcccctgggttcacaggatctattgaagaagaggcaggactgcatctcataccctccctctgccccatgcatagcttcttagagcatcattcatgttctttgggataacacacccctggaccaagcctactgcttgtccctccaaactcttgcacattaagcatgcaccccaccatggtattgagcaccctttccaccaagtgaccctgcagtgacctctaataactatgaatgccccaccagcttggctctgctcttctacccatggtgtctcccggctgcagccccagagactcagggaccccatctgaccagaggaatcaccatcacaaaccaccacaaactgt

SEQ ID NO: 516022 - DNA, 629 bp, Homo sapiens
gaaggcctcttggacagaccttacctctctgccgccctcagcttttctgcgccccgggtgtaaactgcaatcgaccagtccacacagcgtgcgaaaccttccttcaggaggagctctgtgatgttgccattctgaaaaacaaggtacatgagaggcaggcacggattagactctgttgtaaaagaatccatttctctagacttctgacacaattaacacagtcacaaactagtctgcagtttgtttgtttgtttgtttacagtagagtagcttctctcactacgaaaccactcctaagatgggagagatgccactctgagactcctttcaatagccttggcttygtatccccacaatatccaccataataactcacttaataggagtaggataaatgctagtggcactgaatggaattgacatttcaatagctcttcttgtgggcagaggaggatgttaatctttaatagagattacaccttattcttccctcccttaagatcagcacttcctccccctttcataagagctgaagaacaggctgagcagggaataacggaagctacattttgcccagtgaattaaaattcacactgtactgtaacacagagccatctggcagggcacag

SEQ ID NO: 516023 - DNA, 650 bp, Homo sapiens
gcctgagaagcaaaagtcaggcatggtgactcaccccagaagcggctataagtataaaccttcaaatcctctagaaataactaggtaggaagccacaggaaaaagacagaacttcagtgaaatctacaaagctctaaaaaggatgaaaatggccagaagcaatacaagctttttctcagaaacaatatagcgagcatcctgtgtgtcacacagaaaggagaaccaggaaagtcattgagctgaagggtccatgatgccattcttcaactgtcacaacccaaaggctgcacatgcagggactctacgtcagagtggcaaagaagcaggccagggactcccctctggacaaggtgttttctacacctaaaaataccatcaggggatggggaaggagctrctgtaaaaagaggaggcaaagtttggtcctaatggataccctttaatgaaatgaaaacatttaaagaaactgaatgaaagcaagagtaactaaaaagaaactcaattggggaatatttcaaaatgcatatcaggaaaaagcttcctggcagtcagagctgttgcctccacaggaagaatcatctcttgaaaattaaaaagtcatttagacaaagcaagcaatcccaaaacaacataagctgtgtggtctggga

SEQ ID NO: 516024 - DNA, 525 bp, Homo sapiens
caccagggtaccagaaaaattaccatctccactgcctctcttccttttatcacccttaaacacatatattacataataactcaggttaaacccaaactatttacmtgggatactgaacgtgaaggaactgaagagctactataaaaactctaaagaataaatcataggccaagtgcagtggctcatgcctataaacccagcactttgggaggccagagtggagaaggtcacttgagtccaggagttcgagaccagcctgggcaacatagcaagaccccatttctacaaaaaagaataaaagattagccaggtgtggtagcacgcacctgtagtcctagctactcaggaggaggctgaggcaggaggatcccttgagcccaggagttcaaggctgcaatgagccatgattgtgccactgcattccagcctggcaactaagtgaaatcctgactgaaaaaaataaaaaataaaaaataaatcatcaatggtggaaaccccaggggctttgcatttgctgtttcctcg

SEQ ID NO: 516025 - DNA, 664 bp, Homo sapiens
tcctttgggtccataacattttctaacatcgtgaggcatttcctttagcatattgatgcgtctgtattaatatattagattgtgagcagctaggaggtagtgttaaatattaaacatttcatacatgaattatattgttaatatcctttctttagtttttaaaatargtatgctaaaatgacactcaataaacaaatttagaggcattaatattaaaggagaaccaatgaattcagactcatgacaaaacgtgtatttgttcatttctcaagggagacatggcttcatgattattaatatagtagttaaagatgtactttgaaatggaaaagctgaaaataccttaagtagagttagacagtaagacgtcctttcaaagcgttggaagtcaccaccttagggaactgttctcttcccatgtgggtaccaggcttctcagaggtgcaggattagatgactaatgagctgtgacatcctctgtgacacagacattgtacatcttgttttaggaaacatttaaaatgagagagagggactctctcagaggtggtgagagtttcattgggttaaagaagccgtctctccatttgtcactgttaaaatttgtggtgaaaagcataaaaacacatttaggttggagctgaatgattttggacaggctgac

SEQ ID NO: 516026 - DNA, 664 bp, Homo sapiens
tcctttgggtccataacattttctaacatcgtgaggcatttcctttagcatattgatgcgtctgtattaatatattagattgtgagcagctaggaggtagtgttaaatattaaacatttcatacatgaattatattgttaatatcctttctttagtttttaaaataagtatgctaaaatgacactcaataaacaaatttagaggcattaatattaaaggagaaccaatgaattcagactcatgacaaaacgtgtatttgttcatttctcaagggagacatggcttcatgattattaatatagtagttaaagatgtactttgaaatggaaaagctgaaaataccttaagtagagttagacagtaagacrtcctttcaaagcgttggaagtcaccaccttagggaactgttctcttcccatgtgggtaccaggcttctcagaggtgcaggattagatgactaatgagctgtgacatcctctgtgacacagacattgtacatcttgttttaggaaacatttaaaatgagagagagggactctctcagaggtggtgagagtttcattgggttaaagaagccgtctctccatttgtcactgttaaaatttgtggtgaaaagcataaaaacacatttaggttggagctgaatgattttggacaggctgac

SEQ ID NO: 516027 - DNA, 508 bp, Homo sapiens
aggcccagctgtcaggtggaaacaggggcctggagttcaaagagagtagtgagttgacacagattttgggactcgcagcaagtgcaggagtcctgtgmttgtgagctcgtgagctcacccatgagagtccagaacagaaacacgctgtggacagagactgaggaacatgctgaggaagctggtgggaagggcgggatgagtccagcaatgagacaggaagggcctgatgaaactgtggggaggggccgggaaggtgagctgatgtccaaaacaagagaaaggagagcttcaatgacaaggaaaggatcccctgtcctcagcatcctagagaagtcaaatcagaggaggactaaagagcctctgtgcggtgaatatttttatttttatcattttacaaatagaaaaactggggctcagtgaatgaagtatgatacttcattccatacaaatatcaagcccagtgcaaacctcagtgcgccttgccctctcacagttctgttatctaaag

SEQ ID NO: 516028 - DNA, 508 bp, Homo sapiens
aggcccagctgtcaggtggaaacaggggcctggagttcaaagagagtagtgagttgacacagattttgggactcgcagcaagtgcaggagtcctgtgcttgtgagctcgtgagctcacccatgagagtccagaacagaaacasgctgtggacagagactgaggaacatgctgaggaagctggtgggaagggcgggatgagtccagcaatgagacaggaagggcctgatgaaactgtggggaggggccgggaaggtgagctgatgtccaaaacaagagaaaggagagcttcaatgacaaggaaaggatcccctgtcctcagcatcctagagaagtcaaatcagaggaggactaaagagcctctgtgcggtgaatatttttatttttatcattttacaaatagaaaaactggggctcagtgaatgaagtatgatacttcattccatacaaatatcaagcccagtgcaaacctcagtgcgccttgccctctcacagttctgttatctaaag

SEQ ID NO: 516029 - DNA, 508 bp, Homo sapiens
aggcccagctgtcaggtggaaacaggggcctggagttcaaagagagtagtgagttgacacagattttgggactcgcagcaagtgcaggagtcctgtgcttgtgagctcgtgagctcacccatgagagtccagaacagaaacacgctgtggacagagmctgaggaacatgctgaggaagctggtgggaagggcgggatgagtccagcaatgagacaggaagggcctgatgaaactgtggggaggggccgggaaggtgagctgatgtccaaaacaagagaaaggagagcttcaatgacaaggaaaggatcccctgtcctcagcatcctagagaagtcaaatcagaggaggactaaagagcctctgtgcggtgaatatttttatttttatcattttacaaatagaaaaactggggctcagtgaatgaagtatgatacttcattccatacaaatatcaagcccagtgcaaacctcagtgcgccttgccctctcacagttctgttatctaaag

SEQ ID NO: 516030 - DNA, 454 bp, Homo sapiens
tcaggcccagctgtcaggtggaaacaggggcctggagttcaaagagagtagtgagttgacacagattttgggactcgcagcaagtgcaggagtcctgtgcttgtgagctcgtgagctcacccatgagagtccagaacagaaacacgctgtggacagagactgaggaacatgctgaggaagctggtgggaagggcgggatgagtccagcaatgagacaggaagggcctgatgaaactgtgggraggggccgggaaggtgagctgatgtccaaaacaagagaaaggagagcttcaatgacaaggaaaggatcccctgtcctcagcatcctagagaagtcaaatcagaggaggactaaagagcctctgtgcggtgaatatttttatttttatcattttacaaatagaaaaactggggctcagtgaatgaagtatgatacttcattccatacaaatat

SEQ ID NO: 516031 - DNA, 586 bp, Homo sapiens
tactcccttgattaatttttagagggcaaagaattcttgaattgtaaccaactcagaaataatccaggcatatagaagtatgcaaacactatttgttgaataaaaggaaagaaagctaatttctctgcagtgaacattaaataatctgttggctggatgacgactctcttctttacaatcaaggaaacagaagtgcagtacaggtgcatggctgaagactttgtattgtatctcaagaaatccartagtaaacaaggtgaactctactaaagattttattagattttggaacctgagctttctccttggtaatgtaaactggaatgctactgttttccttggagaatttagggagatagattcccataggcaggggcagaagggcagcctgctctcacactcttccctaaggattcgatgaaaataagtagcctttgtaatatgaccaagccaacgagaaactcagccacgagcctctttcctttttctcagtgctgctgaccctcggatttctgtaagtgtaagtacttagtcttggagtcttgatactccgatgtaatgcggatcacattaaaaaaatcatgga

SEQ ID NO: 516032 - DNA, 586 bp, Homo sapiens
tactcccttgattaatttttagagggcaaagaattcttgaattgtaaccaactcagaaataatccaggcatatagaagtatgcaaacactatttgttgaataaaaggaaagaaagctaatttctctgcagtgaacattaaataatctgttggctggatgacgactctcttctttacaatcaaggaaacagaagtgcagtacaggtgcatggctgaagactttgtattgtatctcaagaaatccagtagtaaacaaggtgaactctactaaagattttattagattttggaacctgagctttctccttggtaatgtaaactggaatgctactgttttccttggagaattyagggagatagattcccataggcaggggcagaagggcagcctgctctcacactcttccctaaggattcgatgaaaataagtagcctttgtaatatgaccaagccaacgagaaactcagccacgagcctctttcctttttctcagtgctgctgaccctcggatttctgtaagtgtaagtacttagtcttggagtcttgatactccgatgtaatgcggatcacattaaaaaaatcatgga

SEQ ID NO: 516033 - DNA, 513 bp, Homo sapiens
tgggaaagctatgtaacctatcttttaagtctcggttagctgaaacagtagtgcctatttataggaggttgtaaaaattaaggtggtttctgttaagcagttaacacagtggttaattacacaggaaacattttaaaataaggagccatcttctaatggtagattttcatatattatggtttgataatctgcatcataaattcattgtaaagaaaaagcagaattagaaacatgcttttgtaagagcctgcacaatgatggatgatacggaaggtattaaacttagactatgattctgtcatcagcgccttctttaacagaacttggctattttatagaaggccattcagaagaaaaaaaargagcaaacatttcttcatcgggaatctgtttcccaatggtctcagggttctgtttactgggctttctgtgtgtaatctcaactactgcattccctgaggagtgggagcggcagaggtggttctgcacaaatgcaagctttcgaggcagacc

SEQ ID NO: 516034 - DNA, 672 bp, Homo sapiens
agctgaaaaacctgttgttgatgtttctttttcaggttgtcaaaaaccagcccccaaaaaacctgacaggcctcgttcattcctcctccctcagcaatccacaagtgactctgcttttcatacttggttagaagttctgcctcttagggtttgtaatttggttgtctgccttaggattttacctataagaaaagcgaacggggtagaaaaccaacaaatcttttgaagaattattttgttaattggatttattgcaagatatatttctcttactaaattactagctttattactaatgacatgcaattacaagagtgaatattttaattcacctacttagtaaagtaaaatagttttagtaagttagatcccaaaggataactctggaggataacctattgcacgacatttatcaaaacttgctttttattttgygtggacattatatgttttatctccctagctaggtgatatgcatctgaaggaaagtccatatctcagtgccatctcagtgccttttgtgctgtgcaaacatatgaaatctggtgatgtaaaatatccctcttcaataatatgttgatctttcaagtagagatatatttgaagaaagtgatgtttttaaaaccatatattgtgactactttcttttcatttaggaaatagctatcaaat

SEQ ID NO: 516035 - DNA, 422 bp, Homo sapiens
gtttgccagagataacttaggagaagacactgaagcctgccaaagaccagaaggaaacccaaacactgactccagcaactccttcaaaggggcccaaatttgaatgttttagtctgaggagaaatttatatccccaagagcattgttaaaaacattagagcaatcagcccacaattagtggtgcttracagctagatgcagtcagggaaagaaactatcaaaaagagccctgaaaaagctatgatcatcccagggtaactgtgagcattcctaaggctgcaccccttgaggagcaacattagagacttaatgctgtgcagggggtgtggggagcctccactaaaataatccagtcagttgttaaacaaataagcaagtgacaataagaaacctttggggaaagggtgcatgctcagagttgc

SEQ ID NO: 516036 - DNA, 648 bp, Homo sapiens
taactcagaggaaggtattaagagttgggtcttctctgtggtgggaaggctctctaatgccagggcagcctggtttggatgaaggggaatagtgcctggggagtagcagtgttgtttgaacgcagctttccgattttcacaattacaggaactcttcaaaatcatgctcgaaaatacaatttgcctatagatgagctgagtttcaaatacagcgtaattcccacctatcgggatcaagctgcagtgatagaagctgccaagacagtgcaatttggacaagaactgcccatggacatggaggtattgtccacctggctgttatggcaaagcagcttctatcccactgtcyttgaagatttcagacaacctcccatgccccactcccccaccacctcccattggcaggagcaggaagggcagggtagtaatcacacctccaagataagctccccaattagcaatgaccagatgggaactgcctaaactagtctaagttatagaaatatttttaaagcaatattttttttattttttagctacctttagtaaccttcttcatcttacagaatcaatatagcaagaagttaaaagcaagggtttaaaaacgagagaagcctgagtttgaattctgacactacctttcaccag

SEQ ID NO: 516037 - DNA, 648 bp, Homo sapiens
taactcagaggaaggtattaagagttgggtcttctctgtggtgggaaggctctctaatgccagggcagcctggtttggatgaaggggaatagtgcctggggagtagcagtgttgtttgaacgcagctttccgattttcacaattacaggaactcttcaaaatcatgctcgaaaatacaatttgcctatagatgagctgagtttcaaatacagcgtaattcccacctatcgggatcaagctgcagtgatagaagctgccaagacagtgcaatttggacaagaactgcccatggacatggaggtattgtccacctggctgttatggcaaagcagcttctatcccactgtccttgaagatttcagacaacctyccatgccccactcccccaccacctcccattggcaggagcaggaagggcagggtagtaatcacacctccaagataagctccccaattagcaatgaccagatgggaactgcctaaactagtctaagttatagaaatatttttaaagcaatattttttttattttttagctacctttagtaaccttcttcatcttacagaatcaatatagcaagaagttaaaagcaagggtttaaaaacgagagaagcctgagtttgaattctgacactacctttcaccag

SEQ ID NO: 516038 - DNA, 485 bp, Homo sapiens
ttcccagttttcaaacatgtgtggtctacagagaaagaaagaawgaatgaatgaatgaatgaatgaatgaatgaatgaatcagactgtgcacagtggctcatccttgtaatcccaacattttgggaggccaacatgggcaattcgcttgagcccaggagttcaagaccagtctgggcaacacagcgaaaccccatctctacaaaagttttaaaaaatagccaggcatggtggcacacacctgtagtcccagctactcaggaggctgaggtgggaggattgcttgagcctgggaggtcaaggctgaatgaacagtgattgtgccactgcactctagcctgggtgacagagaaagactctgtctcaaaaaaaaaaaaaaagaaagaaaagatgccagatataagataaataggttaaaaggtcttagaggaggtctgacaggttgggatcagaggttctgggtgaggcccttgttccgctaacaaaa

SEQ ID NO: 516039 - DNA, 569 bp, Homo sapiens
ctgccactctccacctgtcagcaggctggaaaacacaggaaatgctcctgaaggtgaggttgctgttcttagaacagagaagagaaagagatggggttcctgttgggctaatctgcagagggcttagccagttcctccctcctccccctggggtaatggatactatgttagttttctattgctgctataacaaattatcacaaactcaatagcttagaacaacacagattcattattgtatasttctggagatcagaagtctgacacaggtctcactggctgaaactaaggtgtgggcagggctgcattcccttctggagggtctagataatttgttttcttcccagcttctagaggctgcccacattccttgacttgtggagccttccatcttcaaagccagcaatattgcatctctataaccattcttccatagtcatatccccctctgaccacagacgggttctctgcttttaagggcccgtgtgattggattgggcacccctggataacctgggctactctcctcaacttaaggtccttaacttaatacacctgcaaagttcctt

SEQ ID NO: 516040 - DNA, 668 bp, Homo sapiens
gcacccctggataacctgggctactctcctcaacttaaggtccttaacttaatacacctgcaaagttccttttaccgtgtaaggtaatgtgttcacagcttccaggggctaggtcatggacatctttggggatctggcagatgtccatttggttacacagcggggtgctctaaggttctggtcagccctgctagggtttatacagcttcattcattctcagaagactgggagaaagggggatgcacttgaartaaggatctactgtgtgctcagcactgtgtgaaacatggtgcttgggctgttttaatcctcacagcaatgaggtaggataggttaattttatgcaaggggcagaggctcagaaaggtcaattatcttgtctaaggctccaagcctggggtcttttccttgtcaaccagtgtgtttctttcttggagacttccatgaagtgaggaggctgcatgaaatgcaggtagggggcaaataagctatcagcacaagggggtagccctatattgtagccaaaatgaccatgggcttagcttttgtgggtagaagtttagctaaactgtgagaatccaggtgggtcaaaacatggtaatctagatcttgagcctgtgatggcatccagcccagaggctctatgatggattgggtgtgttcagca

SEQ ID NO: 516041 - DNA, 599 bp, Homo sapiens
tttaccgtgtaaggtaatgtgttcacagcttccaggggctaggtcatggacatctttggggatctggcagatgtccatttggttacacagcggggtgctctaaggttctggtcagccctgctagggtttatacagcttcattcattctcagaagactgggagaaagggggatgcacttgaaataaggatctactgtgtgctcagcactgtgtgaaacatggtgcttgggctgttttaatcctcacagcaatgaggtaggataggttaattttatgcaaggggcagaggctcagaaaggtcaattatcttgtctaaggctccaagcctggggtcttttccttgtcaaccagtgtgtttctttcttggagacttccatgaagtgaggaggctgcrtgaaatgcaggtagggggcaaataagctatcagcacaagggggtagccctatattgtagccaaaatgaccatgggcttagcttttgtgggtagaagtttagctaaactgtgagaatccaggtgggtcaaaacatggtaatctagatcttgagcctgtgatggcatccagcccagaggctctatgatggattgggtgtgttcagcag

SEQ ID NO: 516042 - DNA, 599 bp, Homo sapiens
tttaccgtgtaaggtaatgtgttcacagcttccaggggctaggtcatggacatctttggggatctggcagatgtccatttggttacacagcggggtgctctaaggttctggtcagccctgctagggtttatacagcttcattcattctcagaagactgggagaaagggggatgcacttgaaataaggatctactgtgtgctcagcactgtgtgaaacatggtgcttgggctgttttaatcctcacagcaatgaggtaggataggttaattttatgcaaggggcagaggctcagaaaggtcaattatcttgtctaaggctccaagcctggggtcttttccttgtcaaccagtgtgtttctttcttggagacttccatgaagtgaggaggctgcatgaaatgcaggtagggggcaaataagctatcagcacaagggggtagccctatattgtagccaaaatgaccatgggcttagcttttgtgggtagaagtttagctaaactgtgagaatccaggtgggtcaaaacatggtaatctagatcttgagcctgtgatggsatccagcccagaggctctatgatggattgggtgtgttcagcag

SEQ ID NO: 516043 - DNA, 280 bp, Homo sapiens
agctgcagcatttcaggttgtttttctcactgcaggtcatttcatgggcaacaacacagtgctggatgttttgcggcgtgaaggctatgaggtagaacacgcccctgctggacgacccatccacaagtaaccgtcctgtgcttctatcttggctggggagctgagaccctcatggggctgcctgggcaccagggtgggctgctatcttgaggagctccagagaacccctgcctcgtcatttyccccacacttgaccttacatggacatttggcaccagct

SEQ ID NO: 516044 - DNA, 516 bp, Homo sapiens
ctgattgcagccaccatctgcaccacacaaagaaaaatcaaacttggcagtacaaagccagtctatttgagacatatttgtcttctgtgtttttaataacaggcatctattttgcacccatggctgacagcctacaagagtttaaggactacattgaaaatctgcctttgatygatgacccagaaatttttggaatgcatgaaaatgctaatctagtcttccaggtatgtggcctttcatcttaaaatacatatttatgttgtgtatgtaaactcaaaacatcaataatcacccccactcactctggaaattataatcttcctaaataaacaaataaaataattgtttcaccttgacttcaacatttggttccaatttagcctgttacctctgggtccttcacagaatcctaagaccatcatgcattttccctgtcactggccaagcccctacatctccaggccttctgcctagtccatccataatctacctgatcacagtccaacaattacatga

SEQ ID NO: 516045 - DNA, 487 bp, Homo sapiens
ctggctctgtgtggctggggctgtgtcagacgtggttggcaggatggacactttgggctgcaggggccacactggcgttttcctcagtggtgtttggcaagcgggggaaggtgaagggaaggttgcccaggggttgaggggtaggggaaaggaggagtaattaggcttaatgcccagtgtcctttgccctaggtgttttggaagttttcgggaggcaaaatcgggccatgacagtggtaaacaggccagaggggttaggggtgcagggagtgcrtgtctcacccttctcaggggcaggagaaagcaccttttctctgagctgtttcctcctccctaggtttatttctctctctttttttttttttggccaaactgccctctgccctttcagacctttctgtaaagaactcaggaggcccagcccccagccctcagcaatgctgtccacccactggcctcccaactggtcgtccatcctggtgggccc

SEQ ID NO: 516046 - DNA, 554 bp, Homo sapiens
gctagttatctaagcagttaataagggagggtggggaagcttccacaaaacctggctgaaagtactgactgaagaaaaaaccaaaacagtctcatacttattcctcactgaattcagataacccaatgtgccaaatatacagaggtttgtttattttaaataaggggaaatcagtgcatgttggaagaacctgggtggagagagggagagccatggagaggcagagattgaagatgttctgagttgaaggtgatgacagaaataaatgacttgcttggcaacactaagacatctacatagctagcataaaaatgccatgaacagaatcacctttacaagtaaattaagcaaataaaatatccaactgtcattttattacatgcactatttatgtcatttattagcttaatgaataatttgtgtgggacaaactaaaataatgattcttacctagaatattttttctttttctctccagttttgactcaatgatctcttgtgtccttgcagatgaagtttgagcagaaaaattyagataaacagggacatagcca

SEQ ID NO: 516047 - DNA, 656 bp, Homo sapiens
ggtttcacctgcgaagttccttagagttctaaatgtcagtgattctggaatttcaaaacagaaagttattgtcaaatattagtcacctatcttaatcctgtaatttgtaggaaagtgcaaaaaacccttgagatagtggggcagtatgagttttgaagccagacagatttaacttagaatctggatctgccatctattatctgcataggtaatcttgagcaagttatttaacctatctaacccccagttacctatatgataaggtatttgtggaggttcartgaggaaattcatgtagcatgctcagcatgggtactagagcttaaataaagctacctattgttactagtgtataatttattagtattacatcaaactggggcttgcagtagtcacaataataaaagccatgactttcattagagtgtcctggagatatttgaggactgggcagagatggataccaggggctgagttgggcaacttagggtgcccacaggtaggttcaggctatggcccagggtgcagaaaatgtgcaagagactgtcagaagagaactgaatgaagcaatgcaagtaaagcccatagccaggtgcctgcagagcccaagcaatcagtatgtagttggtgagtggatgtgatgtcactaggagcag

SEQ ID NO: 516048 - DNA, 670 bp, Homo sapiens
atgaaaggacatacatgctgagaacctccackggccaggcaccacaacattcacctggactatctcaggcagttctcacaaaaccatgtgatacaggcagtgtgatcctcatttctggatgaggaaaatacagtccaggaaggttaagtgatctgctcagccactcagctaggatgtaatagagcccagatttgaaccctgtccccaagggcagtcggtgctcttgatggatgcagaaataccagcatcaactcagctcataactcagtttggatctcaatcagccaatgtgatgcatgtctgataatgccattccatcttgcttcagacctcaggcaacagatgatgctctccttcctcatctgttcctcacatgcagattcgggccaaatcaacagacagtgaactcctacaagaaggaatagacaccactgttaattgtaatgtacatttctccaaggattgctaaacatcatttagttgcattacttcatttatacctcacaacaaccctatgaagtcggtattagtattgccattttactgatgaggaaactgagcacacagttgtggcacagctgagaactatacttggggagtgtgagctcggagcccacacttcactgcacactcccatttgggcctttctcttgtggatggatggatgtct

SEQ ID NO: 516049 - DNA, 670 bp, Homo sapiens
atgaaaggacatacatgctgagaacctccactkgccaggcaccacaacattcacctggactatctcaggcagttctcacaaaaccatgtgatacaggcagtgtgatcctcatttctggatgaggaaaatacagtccaggaaggttaagtgatctgctcagccactcagctaggatgtaatagagcccagatttgaaccctgtccccaagggcagtcggtgctcttgatggatgcagaaataccagcatcaactcagctcataactcagtttggatctcaatcagccaatgtgatgcatgtctgataatgccattccatcttgcttcagacctcaggcaacagatgatgctctccttcctcatctgttcctcacatgcagattcgggccaaatcaacagacagtgaactcctacaagaaggaatagacaccactgttaattgtaatgtacatttctccaaggattgctaaacatcatttagttgcattacttcatttatacctcacaacaaccctatgaagtcggtattagtattgccattttactgatgaggaaactgagcacacagttgtggcacagctgagaactatacttggggagtgtgagctcggagcccacacttcactgcacactcccatttgggcctttctcttgtggatggatggatgtct

SEQ ID NO: 516050 - DNA, 489 bp, Homo sapiens
atgaaaaaaggtgtgttttcctacctctttaggatacacagtccaaaccagcaccaaataayggaggagtttggcaggggggcaggtttacatgactttgaaatttctgaataaaaatatcatcctgaattacacacaaaagacatattccatgtgcttctgtttaccctgtttctgctaacgagatattacttataaatgtaaaatgttaaggatgttgtcttcagcctggagagaaagaacgtgtaatttgcagcttttgctcagagtgataaccttattaagtaacgggattcgctgattaactgctgctaacaaaacattgttgccaaacctgatagtctgaaaccggcaacagagctactgtcagaaccacttctccatcccaccaaccctgtggggattttacagagatatttctcatttaaataaccttcacctttcagtattttttattgcttccactaataggctaacaataagttagga

SEQ ID NO: 516051 - DNA, 603 bp, Homo sapiens
ctggcctgcctgtgtgaggagagagcatgtctctagaaacaaggagagaccatgggcttgaagtcaagctgagctgagctagattccttcttggccaccagaagacactgtgacctcctagcaagcactgttacctctgctgggaagcctccagccatccctcctccctgctgaccctccctggttgtctttcctcctgcttattccagccagctccactgccccttctctgggaagcctttccagactccgaagggtaggctcagccactccctccccatctgattctcccacagcatccacacttctccctgayagcaatcatcacaactgtaatgaaattagtgtaataatttgttgacatttgtctccctggagttgcaaaccctcagagaacagggccggtgtccatcttgttcacagctctgtcctcagatgtgagaagagcccctggcacactgtgcccaggaagtctctgctggctaggaccaaccaaaacctgagtcttaactgcctgctctataaaacacctcgttgagctgttgcaaggattaaatggcataatgttgtaaagcattaaacaggattactcattaggtagtt

SEQ ID NO: 516052 - DNA, 542 bp, Homo sapiens
  misc_feature (1)...(542): n = A,T,C or G
gcaggctgtcttctaagtgtttttcggtagtatttatttggatctggtgccataggacaattatcgtcttcattttattgatgaggaaaccaagacagagacattaaagtaacttgcccaagattttaccaaattagcagagttgagatgcaaatccaggctgtctgactccagagctgcattttttaaaaaaccactgtaggagaataggctaattagtttctttattaccctacatactaaaattgttttacccacctcagtgggtaaaacaaccctcagttgtcataggggaaagtttcttaaaaaacaaacaaaaactragtctacctcctaacttctctaagtgttcagacagttgaattcttgtttctgcagcaccaacaagcctaaattaccaacccattactccacagtgggaaatacaaacgtggagcacagcacttgctgggnntgtgtccagtccctggtctctaagttgggcccctagcatagccaggagattgcttgggaagccagaccagagcaaggagacttgtcag

SEQ ID NO: 516053 - DNA, 483 bp, Homo sapiens
cgcttgatgtagggttgctaaaaaccttcaatttgttaaggaaaaaaaagtgcattatctatgaagtgcaataaatcaaagtgtaataaaatgaggtacacctgtactttgtcttcatmgagcacttctcatatttgccaagttcccactgattgctgagtaataagaataaagttaaaatattttaaatactgtatcatcacagctcaatgggatgttgtgcctaacagtgacccagaatagaattattacatttcaaaatgcaactttccacttctaaactatacaactacagctactgtctgttaatatacatacaactccagttaacagcttctattagcaaagtaaaatgtaattactttgcctgtaaggtacagattaactttttccccacaggtctatcttatacttgaaatgtaggtgaacactgagtcctgtacctgtttctaattagcctgaattagttgcacgtatttagaa

SEQ ID NO: 516054 - DNA, 483 bp, Homo sapiens
cgcttgatgtagggttgctaaaaaccttcaatttgttaaggaaaaaaaagtgcattatctatgaagtgcaataaatcaaagtgtaataaaatgaggtacacctgtactttgtcttcatcgagcacttctcatatttgccaagttcccactgattgctgagtaataagaataaagttaaaatattttaaatactgtatcatcacagctcaatgggatgttgygcctaacagtgacccagaatagaattattacatttcaaaatgcaactttccacttctaaactatacaactacagctactgtctgttaatatacatacaactccagttaacagcttctattagcaaagtaaaatgtaattactttgcctgtaaggtacagattaactttttccccacaggtctatcttatacttgaaatgtaggtgaacactgagtcctgtacctgtttctaattagcctgaattagttgcacgtatttagaa

SEQ ID NO: 516055 - DNA, 483 bp, Homo sapiens
cgcttgatgtagggttgctaaaaaccttcaatttgttaaggaaaaaaaagtgcattatctatgaagtgcaataaatcaaagtgtaataaaatgaggtacacctgtactttgtcttcatcgagcacttctcatatttgccaagttcccactgattgctgagtaataagaataaagttaaaatattttaaatactgtatcatcacagctcaatgggatgttgtgcctaacagtgacccagaatagaattattacatttcaaaatgcaactttccacttctaaactatacaactacagctactgtctgttaatatacatacaactccagttaacagcttctattagcaaagtaaaatgtaattactttgcctgtaakgtacagattaactttttccccacaggtctatcttatacttgaaatgtaggtgaacactgagtcctgtacctgtttctaattagcctgaattagttgcacgtatttagaa

SEQ ID NO: 516056 - DNA, 483 bp, Homo sapiens
cgcttgatgtagggttgctaaaaaccttcaatttgttaaggaaaaaaaagtgcattatctatgaagtgcaataaatcaaagtgtaataaaatgaggtacacctgtactttgtcttcatcgagcacttctcatatttgccaagttcccactgattgctgagtaataagaataaagttaaaatattttaaatactgtatcatcacagctcaatgggatgttgtgcctaacagtgacccagaatagaattattacatttcaaaatgcaactttccacttctaaactatacaactacagctactgtctgttaatatacatacaactccagttaacagcttctattagcaaagtaaaatgtaattactttgcctgtaaggtacagattaactttttccccacaggtctatcttatacttgamatgtaggtgaacactgagtcctgtacctgtttctaattagcctgaattagttgcacgtatttagaa

SEQ ID NO: 516057 - DNA, 652 bp, Homo sapiens
acatgcaaagttcaggggatccctaagatcaccctaatttctgacataaactgcaaattctgggatccccaagaccactcttaggttcaataattcactagaagtgttcatagaactcagcaaagctgttgttctcatggttacagtttattacaacaaaggatatagattcaaatcagccaaaggaagaggtccatagagcaggggccaggagaaatccaggcatgagcttccagttatccttccctggtagagcctcgcaaacagtgctaatatttccctgaaatgatgtgtgacaacatgtgtggggtgttgacacagggaagcttactcaatccttggtgtccagttttattgaagtgtggccatatagacatgattgaccactcatatggctgattttagactccagccccttcagaggtcaagttgatatcatgtatatcaaggcctcaaccataaatcacgttgtkagtgtaggatatttggcatggtccaagattccaaggtacacaaaaacaatgtgattaggcaggaccttccaaggacatagaggtacctcccaggaatggaaggcaaaggtcaaacctctgtttgggcaagattaattctttgtcacacaccacaaaacttttaaattccagtcatattt

SEQ ID NO: 516058 - DNA, 636 bp, Homo sapiens
atcacagccacatggaggtgttttggataaattatactcctggtcagggtggcagaggttttatgcctgacacagaaagaaaaagaaagaatgaatcagaaaacaagtcaaaaaaggaaaaagggtagttgatacattygtcaaaacagacatctctttcacacacactgttgtgcctctctggacagtgtacttgaatctgctaatccacccagttaggaaccgaaagcataaaacgacgaggtgacccagaggccttacccctaaagataactgtgaatgccaaggatggtgcccacctagaaggaggttcagttgaccctctcagaagaaacaggaataaattctacccaataattaaacgtatctacacacaacaccattaatgtacactgattgcttaggagacagtgagagttctatgcccctgagagtcttccagggaaaaagactgggcacaagtgttgttaaaaacatagaaggtgttatctacccagaagtgttaaaatcattactgtacttgcagtgtcatccccaaacaatcacaaataggttagctctttttgacttccctatcacctgctggtggaatttgggatcaaacctagggattaaactgggcaagtctgcacttga

SEQ ID NO: 516059 - DNA, 585 bp, Homo sapiens
ggcatggaagctccacacctcttcccacaggcgtgtgtcacgcatcctttccctctggctgctcacctgtatcacctgtgacaccctttataataaatcagtaaatgtaagcatttccctgagatctgtgagccatcctagcaaattagtcaaacctgaggagggggactgtggaacccccaatgtacagccagtcagtcaggaacacgagtcatacaccagggcttgtgattggcgtctgaagaggggacagccttgtgggayggagcccttcgcctgtgggatccgacgctacctccaggcgacagtgtcagaactgagtggcattatagaaacccagttggggtctgttgaagaattgcttggtgtgtgggaaaaaaaaaactcacacatctggtgtcagaagagtggtgttgagtgtataagaaaggcacttcaggtttcctatccttacatcctccctcatatgagtgatggaataccgtgttccactgcctgccctggcacaagccctttcctggagagcttccctccccataatgcctcctgcccaaagtgcccaccggcatcaggtagctcatcacg

SEQ ID NO: 516060 - DNA, 574 bp, Homo sapiens
ataactcaagcttctccctaacgccccaattcaaaagcctctcccatttgcctgttcgtgactcaggatcaccatcaatcctgtgcttgcagaaaggccctcagctccttctcccatgaggcgaacaaacagccgcgatgttatccttgacctggtgttttcacacccaaccacagagtaaatatgaacaaattgctcaaccttgaaaagcatcgtcagtgatccacatacaggtatgccatcagattaggggctttgaaargtcaaggggagaatgatgctgtgggattacctgttcttttagctgaaatgcgttgaaagcacctacctccacctgaggcagccctggaggtccctgtctgccacaacccccgatgcctggcttccctctctgcgcctgttcctggagccagttctttcctccggctccccagggagagttagcagggggctcaggactacatctgattccggttttctggctggcctcactcccagggccccttgcccactttggtaagcagatcactgattaggcacggagctgtgggggcacacacagtccataccctgg

SEQ ID NO: 516061 - DNA, 294 bp, Homo sapiens
actggaagaaaacgagagaaaataatagcttctattgtctttgggtaataagatcatgtgtggtttcccctttatttttatttattttctccatttttttcccctacattttctgagtgttctacaacaggcctgcagttcttggataatcagaaaaamagcgagagagagagagagagagagagagagagagagtgtgtgtgtgtgtgtgtgtgtgtgtgtagcagcatgcagatgaggcgaaacttgtttgcttgctttggtgggagaagttgtcattttaaagatgcaggt

SEQ ID NO: 516062 - DNA, 550 bp, Homo sapiens
tggtcatacacagccgtcctgaaacccggctcagatttctcctccctggtctcctggtgttttgggctgaattatatccccctgaaaaagaaccatttgaagtcctaacccctagtacctccgaatgcaattctcatttggattaagctcattacagaagtaatttgttgggatgagttcatactggagtaggttgggcccctaattccatatgactggtgtccttagaagaagaggagatacagacatgcagggagacagaagcagggayggcagtgacgcgcctgtggcccaaggaatgctgaggactgctggccaccactgggcactgaaaggcagtgagggactctccctcacaacttcagagggggcgtggctgctgacaccttgattttggacttcgagcctccagaactgagacaatatacatttctgttgtttaagactcctagtttgtggcactttctgatgacagccctagggaatgaagatacttggccatagggaccctctggtaggacatgagggtcagctttgcgtggcagcctgg

SEQ ID NO: 516063 - DNA, 602 bp, Homo sapiens
agtaatttgttgggatgagttcatactggagtaggttgggcccctaattccatatgactggtgtccttagaagaagaggagatacagacatgcagggagacagaagcagggatggcagtgacgcgcctgtggcccaaggaatgctgaggactgctggccaccactgggcactgaaaggcagtgagggactctccctcacaacttcagagggggcgtggctgctgacaccttgattttggacttcragcctccagaactgagacaatatacatttctgttgtttaagactcctagtttgtggcactttctgatgacagccctagggaatgaagatacttggccatagggaccctctggtaggacatgagggtcagctttgcgtggcagcctgggaacctgggggtgggtggatggtgctcacaggtgccagttaggccaagaccgaggggccggggagggcggtgcagcgaggggaggggagtgagagccagcttacctgtgccttcaggaccttctcaagcacagccgtgtacatgccacctccctgatgactaactgcggccgagacacccagcctgtgactccctggctcacacaaggct

SEQ ID NO: 516064 - DNA, 602 bp, Homo sapiens
agtaatttgttgggatgagttcatactggagtaggttgggcccctaattccatatgactggtgtccttagaagaagaggagatacagacatgcagggagacagaagcagggatggcagtgacgcgcctgtggcccaaggaatgctgaggactgctggccaccactgggcactgaaaggcagtgagggactctccctcacaacttcagagggggcgtggctgctgacaccttgattttggacttcgagcctccagaactgagacaatatacatttctgttgtttaagactcctagtttgtggcactttctgatgacagccctagggaatgaagatacttggccatagggaccctytggtaggacatgagggtcagctttgcgtggcagcctgggaacctgggggtgggtggatggtgctcacaggtgccagttaggccaagaccgaggggccggggagggcggtgcagcgaggggaggggagtgagagccagcttacctgtgccttcaggaccttctcaagcacagccgtgtacatgccacctccctgatgactaactgcggccgagacacccagcctgtgactccctggctcacacaaggct

SEQ ID NO: 516065 - DNA, 527 bp, Homo sapiens
ctgtcctggcttaggacagttacacgcacactgactccagaatgttgaaaaactgtaccataaaayggcactgactttgctatagttgcaccatagtaataaaatctgtccattctaaaattattcctttcttcctaagcctaatagcctcaaatccattctcacatatattccccaagttttttatttatttatttattttatttttagatggactctcattctgttgcccaggctggagtgcagtggcgcaatctcggctcactgcaacctctgcctcccaggttaaagcgattctcccgcctcagcctcgcaagtagctgggaccacaggtgtgcactgccacaccctgactaacttttgtatttctagtagaaacagggtttcaccatgttggccgggctggtcttgaactcctggactcaagtgatacacctcacttggcttacaaaagtgctgggattacaggtgtgagcaacgtgactgaaaatatacaaaagtttttgaaaaataaattggcaaatatt

SEQ ID NO: 516066 - DNA, 683 bp, Homo sapiens
agctgtcctggcttaggacagttacacgcacactgactccagaatgttgaaaaactgtaccataaaacggcactgactttgctatagttgcaccatagtaataaaatctgtccattctaaaattattcctttcttcctaagcctaatagcctcaaatccattctcacatatattccccaagttttttatttatttatttattttatttttagatggactctcattctgttgcccaggctggagtgcagtggcgcaatctcggctcactgcaacctctgcctcccaggttaaagcgattctccygcctcagcctcgcaagtagctgggaccacaggtgtgcactgccacaccctgactaacttttgtatttctagtagaaacagggtttcaccatgttggccgggctggtcttgaactcctggactcaagtgatacacctcacttggcttacaaaagtgctgggattacaggtgtgagcaacgtgactgaaaatatacaaaagtttttgaaaaataaattggcaaatattgctttttgggaggcatactcctcctatctccaaaagtgggtacttaccggctcctgcgtcctgctgggtgacaggtctaaaggcaatgggtgcgctgtgcacaaggtctccagctcaccagacaggaagaaggggctgctttcgtttgcaaagg

SEQ ID NO: 516067 - DNA, 641 bp, Homo sapiens
tgttaacagcatgttcccagggtagggaaacaccgaatgaatgctgggrtcctctgacctggcttgaatgctgcctcactatctgcgtgacttgagttcatctctgagtttatgtcttcacgcgggaaacctattttacaatcctcgtaaagtcagtaatacattccaatatcaaaagcgcagtgtggagccagtccccactctcggcccaggcctctggttcttctgcctagaggcaacctctgttacccgtttcttacaagctcttccagaaatatgccatgcatatgcaagtatgtatgtacacacacagtttgttggggtttgattttgctttttacacacacagtagcatactacacgtgccccttgctttgctatcctcactgaatctagcttggagcttgttccttatcagtactgatgaatctgcttcattccttaaccactgtatatcccgttccattgacaatttcatcagtacctgcttgtgtacaagagattgtttacaaatgatgccacaatgaataattttagaagagtatcatcagagaaattcttagaactgctgggtcaaagataatgtggattattgatattatcaagttccctccaaagagactgttgctctaatttacttt

SEQ ID NO: 516068 - DNA, 572 bp, Homo sapiens
catcaacttcaagccagaacatggttggaatcctagttctcctgtgtgaccccraatatgccacttcactttcagagcctccattttcctcatctgtaaaattggggataacaacagtcactcatagggttgtcttaacaatgtatttcgaggagacagcacaggcaaaaaaaagccacgagccccgtgctcggcacacagcagatgcttggttgagtccaagtatgagggaagtgagagttttccaagcgagagggttgaggagcagaagcattctgacctgagaaatgggtgtgcaggctttgctcagctcacatgaagttaagccagtaccagggtgaaacttctgagtcagctcggataactccccataacgcctgtaagccgtacaacatgtatttaacacagacgctgcaactgattgaggtctccctgtcaatcacgtcctggggcggggcggggaaaccagcagggcgccaccgtgggccaagccaggcctgagacagtcgacttgcggtcttgttcagacttagctactaactgctttggggccttcggcaaattacttaact

SEQ ID NO: 516069 - DNA, 572 bp, Homo sapiens
catcaacttcaagccagaacatggttggaatcctagttctcctgtgtgaccccgaatatgccacttcactttcagagcctccattttcctcatctgtaaaattggggataacaacagtcactcatagggttgtcttaacaatgtatttcgaggagacagcacaggcaaaaaaaagccacgagccccgtgctcggcacacagcagatgcttggttgagtccaagtatgagggaagtgagagttttccaagcgagagggttgaggagcagaagcattctgacctgagaaatgggtgtgcaggctttgctcagctcacatgaagwtaagccagtaccagggtgaaacttctgagtcagctcggataactccccataacgcctgtaagccgtacaacatgtatttaacacagacgctgcaactgattgaggtctccctgtcaatcacgtcctggggcggggcggggaaaccagcagggcgccaccgtgggccaagccaggcctgagacagtcgacttgcggtcttgttcagacttagctactaactgctttggggccttcggcaaattacttaact

SEQ ID NO: 516070 - DNA, 600 bp, Homo sapiens
tccccagtgagaccccattttctgcctccctgagggacacaccactgaggccaccagyggggagccaggcctagtcacacatctgggagggaacatgaggtgactcaggccacgaatcagcttcgggaaggagcatgctcttgcggcttggagacgcttagataagaagtagattgggaacgggcaagcaagcagatctgattaaagggagctgagtgagcagccctgagcgagccgggctggtgagcctgttctgtgcctatagcctccattcagcctctcagtgcctgtcagtagcagggcaccccaagtccctgcagtcccagtgaagagctctgaaagcagagcccaacccttccattgtacaggtcaggagactgaggcctggagctgggaccagagcctggccctccttggttccttgttcttggcctgactggcatctgagcatcatccactcccccagtttccaggtcacccagcaaagccatctgcatccttctctacaggccctgcccaagaggccctgggggaagaataaatgagaaaccccctcccaagggagagggcagagcaaaggcctcaaggaggagggctgca

SEQ ID NO: 516071 - DNA, 600 bp, Homo sapiens
tccccagtgagaccccattttctgcctccctgagggacacaccactgaggccaccagcggggagccaggcctagtcacacatctgggagggaacatgaggtgactcaggccacgaatcagcttygggaaggagcatgctcttgcggcttggagacgcttagataagaagtagattgggaacgggcaagcaagcagatctgattaaagggagctgagtgagcagccctgagcgagccgggctggtgagcctgttctgtgcctatagcctccattcagcctctcagtgcctgtcagtagcagggcaccccaagtccctgcagtcccagtgaagagctctgaaagcagagcccaacccttccattgtacaggtcaggagactgaggcctggagctgggaccagagcctggccctccttggttccttgttcttggcctgactggcatctgagcatcatccactcccccagtttccaggtcacccagcaaagccatctgcatccttctctacaggccctgcccaagaggccctgggggaagaataaatgagaaaccccctcccaagggagagggcagagcaaaggcctcaaggaggagggctgca

SEQ ID NO: 516072 - DNA, 600 bp, Homo sapiens
tccccagtgagaccccattttctgcctccctgagggacacaccactgaggccaccagcggggagccaggcctagtcacacatctgggagggaacatgaggtgactcaggccacgaatcagcttcgggaaggagcatgctcttgcggcttggagacgcttagataagaagtagattgggaacgggcaagcaagcagatctgattaaagggagctgagtgagcagccctgagcgagccgggctggtgagcctgttctgtgcctatagcctccattcagcctctcagtgcctgtcagtagcagggcaccccaagtccctgcagtcccagtgaagagctctgaaagcagagcccaacccttccattgtacaggtcaggagactgaggcctggagctgggaccagagcctggccctccttggttccttgttcttggcctgactggcatctgagcatcatccactcccccagtttccaggtcacccagcaaagccatctgcatccttctctacaggccctgcccaagaggccctgggggaagaataaatgagaaaccccmtcccaagggagagggcagagcaaaggcctcaaggaggagggctgca

SEQ ID NO: 516073 - DNA, 600 bp, Homo sapiens
tccccagtgagaccccattttctgcctccctgagggacacaccactgaggccaccagcggggagccaggcctagtcacacatctgggagggaacatgaggtgactcaggccacgaatcagcttcgggaaggagcatgctcttgcggcttggagacgcttagataagaagtagattgggaacgggcaagcaagcagatctgattaaagggagctgagtgagcagccctgagcgagccgggctggtgagcctgttctgtgcctatagcctccattcagcctctcagtgcctgtcagtagcagggcaccccaagtccctgcagtcccagtgaagagctctgaaagcagagcccaacccttccattgtacaggtcaggagactgaggcctggagctgggaccagagcctggccctccttggttccttgttcttggcctgactggcatctgagcatcatccactcccccagtttccaggtcacccagcaaagccatctgcatccttctctacaggccctgcccaagaggccctgggggaagaataaatgagaaaccccctcccaarggagagggcagagcaaaggcctcaaggaggagggctgca

SEQ ID NO: 516074 - DNA, 514 bp, Homo sapiens
ttgaagcgtatctccagccatcgtgtgcgggctgcagtgaacagtctccctgtgcttcaggagctcattgttatctcttagccacagcaattatgtgaggggcatgatagtagccccattttgcagatgaagaaactgaggcttggagggagtacctgtcctaggtggggtcacctagctcataaggacggaggctgacgccacctctttccaccgccttccgctacctctgtttggaattctctggcaagttgtgcaaagtgtagacctgcacctgcccttcagttttacatgcggggaaaatgaggctctgaggggcggctacacaactggtatagagactccaaccagcccgtcagcctccaagcccagcagtctctctagaccagccacttccaatygcacgttctctgtcccttggttccctggctcttcccagacccccagagccctggccctaacaggccacctcatagtccccctgccaccatgggaaccagacctcagacagagg

SEQ ID NO: 516075 - DNA, 559 bp, Homo sapiens
cctttccggaaacttcccgtacgccaggtccatcctgtgacccaatgaccatcagtgagttaagctccgagaattcccacttccagatgagaaaacaggctgggctcatataacggcccctcacaaagatgggatttgggtgcaggccttttcagctttttcagctttgaacacgcatttctatcacccaagtctatgcctcttaaagtcaaaagcaggcaggtgctttcttaagaatggamaatgcccatcactagtggcagaaaggctttcactccctccctcctcccttcttcccttctccattccttcctctctcctccctcccttcctccctcctccctcctgcctcctccctcccttcctcctttcttcctccctccctccttccctccttcctttcttcctctttcctgcccttcctcccttccttccttcctctctctctctttgcccttccttttggaacatgtgtctccacctctctctgtctcagtgtgtgtctctgcatgtctctgtttctgcagtcgggaggcagggcccgggctctctttctccc

SEQ ID NO: 516076 - DNA, 483 bp, Homo sapiens
cactcccctgtccccctgggtaccagccaccctggtcttcttcagctcactgaacacaaacgccctgcctctgtctttcgtcccgggctttgcgcaagctgctccctctgcctggaacacccccctctgccttgtatcgcagctcaccccggttcaatcctcagggccagtcttctctgaccgccggcctccygccccagctgtcatgggtgcctctcagtgcacagcctgtacctcccatcacagctcatggcacgaaacggtcctcttgctagtctgcccctgtgggcggtggtggctggagttgcgtctgcatgctgcctggtagtgttcccctccccctgcctccggctggccccgagtgggtacccgttgatgaagaggtgaaaatgttcccaaagctcatcacagggggttctgggggatccgccaagggagctgcaattcttttctgagccgtgagtcacctgcagcctcacagtt

SEQ ID NO: 516077 - DNA, 534 bp, Homo sapiens
  misc_feature (1)...(534): n = A,T,C or G
agtgtgctggagagagactgggaggccgcgatgccagtcaggcctgcttagccaggaacagagaccccagaccaggcccgggggtgggccggtgagaaccccanccccccagggctgctgccactgagtgcgggacgcatctcgcctgggatcttggtgctgactatttttggtgtattgatgtccaggcccacaaacatctgggggaagggcttaacatcagacaaaacaagtgaccgagaaacaggagagagggaagcctcttggcggggagtttttgggggaggcaggggtgcaggcagcctgggtcagttttgaaaggggtcagcggtccccagcagaggcaggacgcggggaggccgcacaggcrgccggtggaggacgagtccgccagcaaggcagagcctgctatgttaggagtcagcgtgcgcagatgagaatccccacaagaccccaaagacagacacatctctaaacctgtcttcaagctccagaggagagcttttaaaaatgtactggagctgcgtctggggg

SEQ ID NO: 516078 - DNA, 635 bp, Homo sapiens
ggcacagtggctcacacctgtaatcccagcactttgggaggcggaggtgggaggataatgaggtcaggagattgagaccatcctggctaacaaggtgaaactccatctctactaaaaatacagaaaattagccrggcgtggtggtacgcacctgtagtcccagctacttgggaggctgaagcaggagaatctcttgaacctgggaggtggaggttgcagtgagctgagattgtgccactgcactccaccctggcgacagagagagactccgtctcaaaaaaaaaaaaaaaagaaaagaaaagaaaagaaaagaaacacctgggcccctaccagagttttgcatttaatggttatgaggtggggccttgtcattgatattttttaaaaccattcatagctggaaaggaaaggcattggcagaccagtcaaaactcactgcacgcaaaggccaattcatgatcaccatcaaaaaagtattttagcaaggaggaagaagggtctattagtccattttcacactgctaataaagacatacctgacattgggcaatttacaaaagaaagaggtttaattggacttacagttccatgtgattagggaagcctcataatcatggcagaaagcaaggaggagc

SEQ ID NO: 516079 - DNA, 577 bp, Homo sapiens
gagggattagcaggcacaggctcctctgtctgggcagagaatatatagctcttaagggcaatcatttccacccaatggaaggaaagaaagccacccaccatgggcttacccagttactggaaatgtggttctttgggggtctggacagaaaagagtagatctctccctgacactgattctcatctttraatagaagaactatcagaaatgcacgcacccatctcaggacctggcgcaggcaggtgagcagatttctgaaggcctgagcccctctaggccttttcctttggaaatggattccctactcgcttgcttcatctctctcttttttcatatctcctcacctctctcagcaggtcagccacacactcgctcgtccctgatgctctctcaaggatggagaaaaccattactgaaaagttactgtctgggaattctcagttgtttggattcctaccaagccaccatctctggtcacactcactggttcccatcaaggagttgccagtgggtggccttgcttccttcatgcagctttgccctcgggagaaagtggaggatttttaccaacttgagg

SEQ ID NO: 516080 - DNA, 577 bp, Homo sapiens
gagggattagcaggcacaggctcctctgtctgggcagagaatatatagctcttaagggcaatcatttccacccaatggaaggaaagaaagccacccaccatgggcttacccagttactggaaatgtggttctttgggggtctggacagaaaagagtagatctctccctgacactgattctcatctttaaatagaagaactatcagaaatgcacgcayccatctcaggacctggcgcaggcaggtgagcagatttctgaaggcctgagcccctctaggccttttcctttggaaatggattccctactcgcttgcttcatctctctcttttttcatatctcctcacctctctcagcaggtcagccacacactcgctcgtccctgatgctctctcaaggatggagaaaaccattactgaaaagttactgtctgggaattctcagttgtttggattcctaccaagccaccatctctggtcacactcactggttcccatcaaggagttgccagtgggtggccttgcttccttcatgcagctttgccctcgggagaaagtggaggatttttaccaacttgagg

SEQ ID NO: 516081 - DNA, 654 bp, Homo sapiens
ggctcactgcaacctctgactccccggttcaagtgattctcctgtctcagcctcctgagtagctaggattacaggcatgcaccaccacgtccagctaatttttgtatttttagtagagccagggtttcaccatgttggccaggatggtctccatctcctcaaatcgtcatccgcccgccttggcctcccgaagtgctgggattacaggcgtgagccacagtgcccggcctacgttttcaaacagcaatasgattcgcctcctctgtcagtttaacccccatcacaactcccacttttggcacctaaacagttaatttcccagttcatgggccttcaaagtcctgctctagtctctggaggaactttcacctacagaggaaggtgtaagggaaactagttcatggatttaagtagaaacattttaggtgtagctttcacatacagaggagtgagaaaaaactgattcatggatttagatggaaacattgtagtatgaacccagcggagggtctgggagcgccttctggtggtgagaattagaaccgcagcactttctgcaatgtgcccaggccagaaagctctaccttctgataggacccacttctgaccctagaatgggggaactgatggaggtgtcaagccactgtggtccca

SEQ ID NO: 516082 - DNA, 654 bp, Homo sapiens
ggctcactgcaacctctgactccccggttcaagtgattctcctgtctcagcctcctgagtagctaggattacaggcatgcaccaccacgtccagctaatttttgtatttttagtagagccagggtttcaccatgttggccaggatggtctccatctcctcaaatcgtcatccgcccgccttggcctcccgaagtgctgggattacaggcgtgagccacagtgcccggcctacgttttcaaacagcaatacsattcgcctcctctgtcagtttaacccccatcacaactcccacttttggcacctaaacagttaatttcccagttcatgggccttcaaagtcctgctctagtctctggaggaactttcacctacagaggaaggtgtaagggaaactagttcatggatttaagtagaaacattttaggtgtagctttcacatacagaggagtgagaaaaaactgattcatggatttagatggaaacattgtagtatgaacccagcggagggtctgggagcgccttctggtggtgagaattagaaccgcagcactttctgcaatgtgcccaggccagaaagctctaccttctgataggacccacttctgaccctagaatgggggaactgatggaggtgtcaagccactgtggtccca

SEQ ID NO: 516083 - DNA, 544 bp, Homo sapiens
tagtcccagctactcaggaggctgaggtgaagggatcacttgatccaggtgttcgaggctatagtaagctgtgatcaccccactgcactccagcctgggtgacagagtgagatcttgtctcaaaaaaaaaaaatttttttttttaaaggatcagggtaggtacrtggactcctcctattccttctggcaccatcagtggttgaacacacaaactttggttcaaatcctgcctcttccaatttgctagctgtgtgaccttgaaaaagttacttaacccctcttatccttagtttcctcatcttcagaataaaaatagtgcttgcctgatgggggagatgatggatgtaaagggcctcatagagggcttggcatttaccaagtgtttgagaaatattggctgtttttattcaaggcctgctcattgctagcatgagctacctgcaacagccacctctaggcctcttttgcttcctatattccagccacaccaagaaaccatgatggcctgaatcctctctgactttgtcagcctccgtgcctttat

SEQ ID NO: 516084 - DNA, 559 bp, Homo sapiens
gagccagcgtgaacctgggaccccagggaccgagatcggctcagggcagagttctgagatgtctcactttacaaggatggaatttcacgacttgtrtattttaattaaatttttatttttatggaattttagcaagagttcccccactcctgcagctcgctcattgttattaaaaaccatgacaagatgagggggaaaaaaaaccaacaaaacgctgtccaagtggccaaaatgaggccatattttagcaaagatctgaccacagtgtacacttgaaacccgctccctgccttcggatgctgattccacccccgtgacttcatagaccagattttaagtctgtggcttattgctttctgagcctcctggggcttataggattattctggatttaatcctttaataatttttcctccctcctatctaaggtctcattttccagttgaaattggcctgggtggagcagcttgcttctagccctgatggactcccctctcagactgctgttctctgtcactgaaagaaaattaaggaaggggcatgtgtaaagctgaccatt

SEQ ID NO: 516085 - DNA, 711 bp, Homo sapiens
gtggcagcaaacaattagaagccactggttctaggaccttaattaggaatttctccgtgattactgctttcgttaaaagacatgagcacatctccagctaatcagtcaacaaatatttactgagcacctactatgttccaggctctgttttaggtacttggggtacatcagtgggacaaataaacagtaggaatataaataaatgagccttgaagsgctgcttttatctctctgcccatctcggtcctggggaaataaatgatgggctgtttcaggccgaacatccaaatgatcaacttttttttgagacagggtctccttctgtctcagggtctcctccttcaccaggctgaagtgcagtggtgcaaacacagctcactgcatcctcaacctcctggactcaagcaatcctagcacctcagcctcctcgtgtagatgggaccacaggcatgtgccaccacaccaggctaatttttaaattttttgttaagaaaaggtctcaccatgttgtccatgctggtctcaaactcctgggctcaagtgattttcccgcctcagcctcccaaagcactgagattagaggcataagcaccgcaacaggccatcatcaacttaattctaaggcatttcccacccccaccctcattccctgaactcccatcctcctttgatcctcagtcaaggccaacttcgaaaactccttggtaatca

SEQ ID NO: 516086 - DNA, 711 bp, Homo sapiens
gtggcagcaaacaattagaagccactggttctaggaccttaattaggaatttctccgtgattactgctttcgttaaaagacatgagcacatctccagctaatcagtcaacaaatatttactgagcacctactatgttccaggctctgttttaggtacttggggtacatcagtgggacaaataaacagtaggaatataaataaatgagccttgaagcsctgcttttatctctctgcccatctcggtcctggggaaataaatgatgggctgtttcaggccgaacatccaaatgatcaacttttttttgagacagggtctccttctgtctcagggtctcctccttcaccaggctgaagtgcagtggtgcaaacacagctcactgcatcctcaacctcctggactcaagcaatcctagcacctcagcctcctcgtgtagatgggaccacaggcatgtgccaccacaccaggctaatttttaaattttttgttaagaaaaggtctcaccatgttgtccatgctggtctcaaactcctgggctcaagtgattttcccgcctcagcctcccaaagcactgagattagaggcataagcaccgcaacaggccatcatcaacttaattctaaggcatttcccacccccaccctcattccctgaactcccatcctcctttgatcctcagtcaaggccaacttcgaaaactccttggtaatca

SEQ ID NO: 516087 - DNA, 638 bp, Homo sapiens
cgtaagtcctgcctgattcaaggaaaacagggaattttggggtcctgtggctcctccaacgttcttttcctttacctccttgtgtaaatgtggcctgatttgtacttggagcataagtagacccctacagagcgtgtgtgtgtgtctgtgtgtgtgtgtgagagagagagagagagagtgagagagagagagasagagagagagaaagggacctatttccttctatccctctgtctgtcttactctcagactattaatacaagccctgagtctggctgtacccccagaacatgtgccccgccccctacaacaaatgctgccctctcccagtctaggtctgttgtttgttccttttctgattggcgccaggcttatagaccccatgtaggtagaatataactttccataaataacctctaacccgacctacaatttagccttcagttttttttccccctcgtggtaatgggattgcagcctgggctgatccatcctgtatcttcaggtcccagaaagcagaccctaggtttggacattgcttggaattcctggtacccccatgttgccttgcacatggcaaggactcggtacatgttgaggaatggtggattctcttctacccatgagcagccatgcac

SEQ ID NO: 516088 - DNA, 554 bp, Homo sapiens
tgctctcctgagaaggccatggggcgggcaaagcaggtctctgctgggcaatgactggcctcctcactctggctgtggagatgacggattctgctttgacctccccaagatatacktcatgctctccctaactctccatatacaattgcaaccagtgaaaagaattgaaagataatgtgattgaagtcttggatgtgacaaagctacaacatagagaaaaaattatcttcaagaagctcacaggtctaaacctcaaaggttcccttctacgctcctggtgtgccattactgggctagggcagttcactccctatttctggtcagttccagtatttcagagtccagtggaaactgacccacattgcccagagaggatattttccttccatatttaaagacagcctgatttctccccttttatgattaacactgatttcaggggaagccccctcactgtcactccctagaatgtgatctgacttcacagactttaggtttccaaagactgaactattcagacttccctcatgcctatacagaacaccagctagcca

SEQ ID NO: 516089 - DNA, 649 bp, Homo sapiens
tcaaccaaaaaataagtcacactatgaagttgcaaaaattaaatgggaggcatatcagcacaggaataaacttatagastaattaaattgaaaacaatattcagtagaagcccgagatgtatatataactttactactttataaaggcagcaattcagatcagttagaaagattattcaatgactactgttaggcaactggctgatccattagaaaaatatagttagattattttctcataccacatatcgtgcagaaataaaaaatttaaacaacacataaaattgctttcaaaatatagacaaatatttataaatttctggtatgcaaaaagccattcagagaatgactcaatttcttcaaatagtaaaatttttattaaaacaagcaaacaaaaagtaatgaagtctatttatttaaaaaacaatagaacaaaacctgctttttatatatgattgaaaaagtaaaaaccatttacaaccagtatttttttagttactaaaaatctagctgtgtggcatcaacatgcaacacacacatgtactttttttcctttagaagagatatggttttgaaatgtatgtgtgtgtatatgtacaactgtctacacacaaatacatacacatacgtatgtatctctaaagttttt

SEQ ID NO: 516090 - DNA, 677 bp, Homo sapiens
ggatgttatctgtccacgttgaaggtggatcttccccaccaagtccactgactcacagtccaatctcctctagaaacatcctcacagacacacccagaaatgatgctttatcactatctaggtatcccttagactagttaagttgacatctaaaattaaccatcacagaacctctgtgtgaatggtggactcctctttggtggacattacttgtaagcaactttaagcgggcactggcttatcactaggcatacccaaatagcttatctttggggtggttcagtttctctggagaagtgttccttttttattatctaggttgtggaagctcgattgcctgataggtattctgaagggtctgggtcaggggacagctttcattttgtccccttcttacagcctaactgcttatccttgcccattttaagtatawttgtctccaaagcttctctggtttcgtttttctagaaaacagacctaccgtctcctggtaagagacaaagtaggtaaggggtaatcacaggtccaattgttacaggaactttctaataagccccttacttttatagctttatccctttatggcatcctcccaatagccttgctttttattatcctcatcagcacacatttggttaaaatagatctttgtacaatattttatttaacaaaaattt

SEQ ID NO: 516091 - DNA, 677 bp, Homo sapiens
ggatgttatctgtccacgttgaaggtggatcttccccaccaagtccactgactcacagtccaatctcctctagaaacatcctcacagacacacccagaaatgatgctttatcactatctaggtatcccttagactagttaagttgacatctaaaattaaccatcacagaacctctgtgtgaatggtggactcctctttggtggacattacttgtaagcaactttaagcgggcactggcttatcactaggcatacccaaatagcttatctttggggtggttcagtttctctggagaagtgttccttttttattatctaggttgtggaagctcgattgcctgataggtattctgaagggtctgggtcaggggacagctttcattttgtccccttcttacagcctaactgcttatccttgcccattttaagtatatttgtctccaaagcttctctggtttcgtttttctagaaaacagacctaccgtctcctggtaagagacaaagtaggtaaggggtaatcacaggtccaattgttayaggaactttctaataagccccttacttttatagctttatccctttatggcatcctcccaatagccttgctttttattatcctcatcagcacacatttggttaaaatagatctttgtacaatattttatttaacaaaaattt

SEQ ID NO: 516092 - DNA, 622 bp, Homo sapiens
agctgggattacaagcatgtgccaccatatgcggctaattttttttttctttttttaagtatagatgaggtttcaccatgttggccaggctggtctcgaactcctgacctcaggtgatccacctgccttgaccacccaaagggttcaatatattggaaagtgatggtcttttgagcaagcataagcctgatttcatgacttacccagtgatttctgagcagtggtggggggcgggggacggcggggcacagtggtgttaagtacttatgaaggtgatgccccaggagaagatgagtgcttcaaagaactaagcagcctctccaggggagatctcagtcaagggatgaacaaattatccaattgcccaccatccacacatttaagggaaaaaaagagttatttcttctgacctactatttggaaaatgggatgtgaagttgcctcactaaaaggcgagagtggaatcttcgatgttgctgataatgctttattgagagctgcagaggcactggccccagtcaaataagagacttaattaaagtttggaaatcattttactggattgcataaacagagaaaaccacctstttctcaagctactcactcccatgcagaaacatcc

SEQ ID NO: 516093 - DNA, 590 bp, Homo sapiens
cagggctcttattctcctctttaggcatcatggccaacgggaggrtcaaggcagtaacttccagatgccaccctcacagacttcttgctttccccctcctcagaatgtggactggattttcatctcaaacgctccattgactacgcagcctggcctcccagcactctgtgctatgcccatcctggtgggaatgtcagtccaggattcattagcacacacaatcatcattcttcaggtactaagggcaggcatgaaattacactcaagacacaaaataatgggttattgaaaaaaattcaaagaaaataaggcaatcgcagacataaaacagtagttctcaactcgttttatgctctaacacacctcaatggcatggcattccctcaactgattagagatcaataaatctctacccaacatcactcccccccccatatttcagttactgtcatatgctgtaaaccaaacaaagaaactaaacccctatatgatggcaggtcagcaggcttaaaaattatggatgtcgtgcacagatgtggatatgttcagtaactacttttgctatagttatttcttagtcatttggactg

SEQ ID NO: 516094 - DNA, 523 bp, Homo sapiens
ttgcttaaaggccattgttctatcttaaacacattatgttacattttgagaaatggggataatgatattgttttgtwttcataatccaacttggcagtagatcattcctcaagtgataatcacctcaaaaataggcattaataacatatattaacttttgattcttacgtgtatttacaaattatagtttaaaaagctatgaggtgatacaagaatttaagatagagtcaatcatagaaacttatcttttaaaatttataagcttacatagctctctaaatatgcttctttcatttaatttcttctatatcacatagctgttttattcaaaagtgttcaacaactttcaaatcacactttcaaacagaatataatcattctagtttgataaaacattcttcttcagtgctaggagacttctgtatctattttagttacaaggccatttatgttctctccaagttagaagcaatgtagatctgtctctgtggcaggaattatctcccttacttttcccaaaatt

SEQ ID NO: 516095 - DNA, 581 bp, Homo sapiens
ataagttgagatcaactgagaatatcaagtttgcttaaaggccattgttctatcttaaacacattatgttacattttgagaaatggggataatgatattgttttgtattcataatccaacttggcagtagatcattcctcaagtgataatcacctcaaaaataggcattaataayatatattaacttttgattcttacgtgtatttacaaattatagtttaaaaagctatgaggtgatacaagaatttaagatagagtcaatcatagaaacttatcttttaaaatttataagcttacatagctctctaaatatgcttctttcatttaatttcttctatatcacatagctgttttattcaaaagtgttcaacaactttcaaatcacactttcaaacagaatataatcattctagtttgataaaacattcttcttcagtgctaggagacttctgtatctattttagttacaaggccatttatgttctctccaagttagaagcaatgtagatctgtctctgtggcaggaattatctcccttacttttcccaaaattaatttaatcaactatttaaaaatattta

SEQ ID NO: 516096 - DNA, 581 bp, Homo sapiens
ataagttgagatcaactgagaatatcaagtttgcttaaaggccattgttctatcttaaacacattatgttacattttgagaaatggggataatgatattgttttgtattcataatccaacttggcagtagatcattcctcaagtgataatcacctcaaaaataggcattaataacatatattaacttttgattcttacgtgtatttacaaattatagtttaaaaagctatgaggtgatacaagaatttaagatagagtcaatcatagaaacttaycttttaaaatttataagcttacatagctctctaaatatgcttctttcatttaatttcttctatatcacatagctgttttattcaaaagtgttcaacaactttcaaatcacactttcaaacagaatataatcattctagtttgataaaacattcttcttcagtgctaggagacttctgtatctattttagttacaaggccatttatgttctctccaagttagaagcaatgtagatctgtctctgtggcaggaattatctcccttacttttcccaaaattaatttaatcaactatttaaaaatattta

SEQ ID NO: 516097 - DNA, 586 bp, Homo sapiens
tcgggtaaatttaccaaaagatactgtttgttgacttatttttaaatattcttatgtttattttagcctcgggcaggtgtgcaggctttgttgatttatttttaaatatgctaatgtttattttagcctcaggtstgtgtgcaggcttggtatataggtaaactagtgactagggtttgtcctacagatcatttcagcaccgggtaccaagcatgggtacctgacagttttgttaaaatggttttctgagcctctccctcttccctcaggccggccccagtgtgtgttgttggcccctttctgtccctgtgttctcatcattcagcttccacttgtaagtggggaagtgtagtgcccgggattctgtccccgcattagtttgcgaaggataatggcctccagctccatccaagttcctgcaaagggcatgatcttgttcctttttatggctgcatagtattccgcggtgtatatggaccacatcctctttatccgtctgccgctgacaggccccagcttgattccatgtcggtgctgttgtgagtggtgctgcagtgggcatttgagtgcgtgtgtcttcatggta

SEQ ID NO: 516098 - DNA, 586 bp, Homo sapiens
tcgggtaaatttaccaaaagatactgtttgttgacttatttttaaatattcttatgtttattttagcctcgggcaggtgtgcaggctttgttgatttatttttaaatatgctaatgtttattttagcctcaggtctgtgtgcaggcttggtatataggtaaactagtgactagggtttgtcctacagatcatttcagcaccgggtaccaagcatgggtacctgacagttttgttaaaatggttttctgagcctctccctcttccctcaggccggccccagtgtgtgttgttggcccctttctgtccctgtgttctcatcattcagcttccacttgtaagtggggaagtgtagtgcccgggattctgtccccgcattagtttgcgaaggataatggcctccagctccatccaagttcctgcaaagggcatgatctygttcctttttatggctgcatagtattccgcggtgtatatggaccacatcctctttatccgtctgccgctgacaggccccagcttgattccatgtcggtgctgttgtgagtggtgctgcagtgggcatttgagtgcgtgtgtcttcatggta

SEQ ID NO: 516099 - DNA, 527 bp, Homo sapiens
gtggccggatcgctcgcgtgccggcgccaatgtggccccttctcagggctcgtttctgtgcatgtggtgttcacagtcatcacttaggaaaattcggaaccgtggagattggtgtccagtccagggacctggtgccagagccagtgccaggctggctttatggagccccgcgtgtttgtcccacgtttcctgttggcttaaattcacaaacctgggaaatgatgatggtttttatttttgccagttctttttgttggggtatgactagcacgttacccaccttggacatctccaggaagagccagtgtgttgtggcgaagcctcacgctggggagcacggctcacacagggcccgtgtcacacagatggacgggtggggtgggcggaaaggagctgttgggtctctgctgcctcagtcgagtctacgggaaccttttaaaatcaaattagtgtcatttcttctctgtgtctcttgccaggagttaaagrcataaaggaaaaacatagttttcatgcagttgtatttt

SEQ ID NO: 516100 - DNA, 462 bp, Homo sapiens
gtcagtgcggcccctccagggctgtgggagtcgggagggctccgggcagtactggttttcaggagatgaggggcttccggagggctccgctrggcaggatggggtccagcccccgacttcctggtgctcactcccaggcttcctcctgctgctgctgcttctggaagcttctgtgccaggccctgggatgcccttgtgtgcgggtgtgagccttgggggcccattctgcaccagggcagggctgccgaccctgtgggtgccccgccctgaggcgcgttggcaggcgtggttgtcaaagccgtccctggcacctgcctctcatccacaggcccccggcttccacacatgcggccttcggtcctcccgtgactctgagaggccgctgtgtgaccctggggtcatgggacgctgggtgctagggggcaactcctccgtggtcacacagccggagcggctcaggca

SEQ ID NO: 516101 - DNA, 462 bp, Homo sapiens
gtcagtgcggcccctccagggctgtgggagtcgggagggctccgggcagtactggttttcaggagatgaggggcttccggagggctccgctgggcaggatggggtccagcccccgacttcctggtgctcactcccaggcttcctcctgctgctgctgcttctggaagcttctgtgccaggccctgggatgcccttgtgtgcgggtgtgagccttgggggcccattctgcaccagggcagggctgccgaccctgtgggtgccccgccctgaggsgcgttggcaggcgtggttgtcaaagccgtccctggcacctgcctctcatccacaggcccccggcttccacacatgcggccttcggtcctcccgtgactctgagaggccgctgtgtgaccctggggtcatgggacgctgggtgctagggggcaactcctccgtggtcacacagccggagcggctcaggca

SEQ ID NO: 516102 - DNA, 462 bp, Homo sapiens
gtcagtgcggcccctccagggctgtgggagtcgggagggctccgggcagtactggttttcaggagatgaggggcttccggagggctccgctgggcaggatggggtccagcccccgacttcctggtgctcactcccaggcttcctcctgctgctgctgcttctggaagcttctgtgccaggccctgggatgcccttgtgtgcgggtgtgagccttgggggcccattctgcaccagggcagggctgccgaccctgtgggtgccccgccctgaggcscgttggcaggcgtggttgtcaaagccgtccctggcacctgcctctcatccacaggcccccggcttccacacatgcggccttcggtcctcccgtgactctgagaggccgctgtgtgaccctggggtcatgggacgctgggtgctagggggcaactcctccgtggtcacacagccggagcggctcaggca

SEQ ID NO: 516103 - DNA, 462 bp, Homo sapiens
gtcagtgcggcccctccagggctgtgggagtcgggagggctccgggcagtactggttttcaggagatgaggggcttccggagggctccgctgggcaggatggggtccagcccccgacttcctggtgctcactcccaggcttcctcctgctgctgctgcttctggaagcttctgtgccaggccctgggatgcccttgtgtgcgggtgtgagccttgggggcccattctgcaccagggcagggctgccgaccctgtgggtgccccgccctgaggcgcgttggcaggcgtggttgtcaaagccgtccctggcacctgcctctcatccacaggcccccggcttccacacatgcggccttcrgtcctcccgtgactctgagaggccgctgtgtgaccctggggtcatgggacgctgggtgctagggggcaactcctccgtggtcacacagccggagcggctcaggca

SEQ ID NO: 516104 - DNA, 356 bp, Homo sapiens
gtctcctccatgtcccctctccccgtccgtctccccctgtccgtgtcccccgtccgtgtcccccgtgtcttctccccatgtcccctctgtcctgtccatcgtcactccttttgtttcctcccccccatccactgtcaccgactcgtgtcccctttcccccacagggtaccgtgagggttttctctggaagcgtggccgggacaacgggcagtttttgagccggaagtttgtgctgacagaacgagagggtgctctgaagtatttcaacagaaatgatgtgagtcacagacrggggtggggtgggggcctgtcccagggcggcatcccggcctcccacactggggcctgtggtggcc

SEQ ID NO: 516105 - DNA, 381 bp, Homo sapiens
gcggatggagcgaactggcgctgtgggtagggcagggccaggcagggtttactccagagacctcctcccagatacgtgtttccagggccaggcagggcagccgagcccagaagcctccatcagtgtgcaagcccaggtctgaagactgtaggctcagcacgggggagggccctgtgcctgttgtgagcgctgcccagcttgcctgwccccactgccatgtgggtgagtggagtcctgtgggtgtggagccctgtgggtggggagtcctgtgggtgagtggagtcctgtgggtggggagtcctgtgggtgagtggagtcctgtgggtggggattcctgtgggtgagtggagtcctgtgggtggggagtcctgtgggtgagtg

SEQ ID NO: 516106 - DNA, 506 bp, Homo sapiens
atctgctgctggcgtaggggcacagcgcgcaccggctctcccatgtccgacagggcaccactgatcctgctctcctgggccactatggtgactgctttcggccccttctgtgattagtattttaaagtgagttttggatctgtgtctacatggaggtgtyggatctgctgtcagttgtcttggacagttggcagggcatgggacggctctttcaaagcttcactggaaggcagtgctctccagccgccaaaccaccactaccagcagcagaaaacccactattaagttagtattacaaacctggcaagtcagttctctaaattaggcataagtctatgaatcttgatgtgactggtcacagtggcttatctctgcatgcatgctacgtggtggaccagaggataattctgtattcgtcgtccacagcctttgatctcttccctgcccatgaagatgtacttgagtcctccattccactttaaatagccagctcctgtccacacgga

SEQ ID NO: 516107 - DNA, 498 bp, Homo sapiens
gtggggagtccttgggtgagtgagtcctgtgggtgagtggagtcctgtgggtggagagtcctgtgggtggggagtcctgtgggtgagtggagtcctgcgggtgagtggagtcctgtgggtgagtggaatcctgtgggtggggagtcctgtgggtgagtggagccctgtgggtggggagtcctgtgggtgagtggagtcctgcgggtggggggtcctgccggtggggagtcctgcgggtggggagtcctgtgggtgagtggagtcctgtgggtgagtggagtcctgcgggtggggagtcctgcgggtggggagtcctgtgggttagtggagtcctgtgggtggggagtcctgtgggtgagtggagtcctgygggtgagtggagtcctgtgggtggggagtcctgtgggtagggagtcctgtgggtgtggagccctgtgggtggggagtcctgtgggtgagtggagtcctgtgggtggggagtcctgtgggtgagtggag

SEQ ID NO: 516108 - DNA, 498 bp, Homo sapiens
gtggggagtccttgggtgagtgagtcctgtgggtgagtggagtcctgtgggtggagagtcctgtgggtggggagtcctgtgggtgagtggagtcctgcgggtgagtggagtcctgtgggtgagtggaatcctgtgggtggggagtcctgtgggtgagtggagccctgtgggtggggagtcctgtgggtgagtggagtcctgcgggtggggggtcctgccggtggggagtcctgcgggtggggagtcctgtgggtgagtggagtcctgtgggtgagtggagtcctgcgggtggggagtcctgcgggtggggagtcctgtgggttagtggagtcctgtgggtggggagtcctgtgggtgagtggagtcctgcgggtgagtggagtcctgtgggtggggagtcctgtgggtagggagtcctgtgggtgtggagccctgtgggtggggagtcctgtgggtgagtggagtcctgygggtggggagtcctgtgggtgagtggag

SEQ ID NO: 516109 - DNA, 578 bp, Homo sapiens
gtccccatgtccccagagcctcctgtgggctgcgacccacaggtcaccctccctggagcccaggctctgcaaggactccaaggcaccgggtcctgagctgccgggagggagggagggaggctcagggctgaccgtccacattgcctgtccctcccggcgctggcaagatgcgaacaccacagmcatctagtaaacttcgggaatcactgtgcggggcccgtccaaccaactcaggacgaccacccaggcctcgcagcagcccgtgaagagtgggctctgagaatgtggggcacaccaggctccctctctggtccccaaccccagccgctgaaataagtgcagccacagcagcccccggtcacgacccgagacggccatttttcaacgctcaacttcactttcacagaaatgcaccaaaggcagcctcgctctgtggtctgcagcgattactgcaccaggagaaggcacccctgtacctgcagcacttctgggccagggctttgggacgggacgcgagctgaccacctgttccttctttccgcagggtcgcggagctcgccggccgccatgtggagctg

SEQ ID NO: 516110 - DNA, 578 bp, Homo sapiens
gtccccatgtccccagagcctcctgtgggctgcgacccacaggtcaccctccctggagcccaggctctgcaaggactccaaggcaccgggtcctgagctgccgggagggagggagggaggctcagggctgaccgtccacattgcctgtccctcccggcgctggcaagatgcgaacaccacagacatctagtaaacttcgggaatcactgtgcggggcccgtccaaccaactcaggacgaccacccaggcctcgcagcagcccgtgaagagtgggctctgagaatgtggggcacaccaggctccctctctggtccccaaccccagccgctgaaatragtgcagccacagcagcccccggtcacgacccgagacggccatttttcaacgctcaacttcactttcacagaaatgcaccaaaggcagcctcgctctgtggtctgcagcgattactgcaccaggagaaggcacccctgtacctgcagcacttctgggccagggctttgggacgggacgcgagctgaccacctgttccttctttccgcagggtcgcggagctcgccggccgccatgtggagctg

SEQ ID NO: 516111 - DNA, 455 bp, Homo sapiens
agcggggtgcagggttgggggaacatcacggcagcagggtgtcggggtcgggggtcacggagcgtgacggcagcggggtrgggggtcgtggggagtgacggcagcggggtcggggtgtgtgacggcagcggggtgaggggtcgggggcgtcactgcagcagggtgcggggtcgtggggggcgtcacggcggcggggtgcggagtcagggggcatcacggcagtggcggctttgaacaggcgactttcaaggactttcttcgctttctccacggagcttctgttttcatgagaaccaaatatgggctggggaaggaaaccacagtaaaaaaagtgtctcaaggagttgtgagaaagtaagaaagctctacgatgttgaggagcagcaggtcgatgctgtggcagattccagcgggattagggggtgggaagcagagcctgaggggcggcgggagct

SEQ ID NO: 516112 - DNA, 523 bp, Homo sapiens
cacaggggctcattctccacccaggttcaaactccctgaactcacgagacccaggctgaagacatggacagactcccagccccagcgcccctctgacagcacacccgaggccycctgggaacctgggaccccttgcagggtccccgcagctccttcctaggaaggaggttcctgccctactccacatttctctccatccaacttccaactccttcccactgggccctggagaacatgacgaagactgtgggggcctcctcccaggaaacacacacacacacacacacacacacacacacacacacacacacacacacacaccagcaacgcgcccagaccccaatccctggcagcccaactcctcgttctacagagaaggggtgaggatctccaggggtgactgctcacatctcggcacatgtagaaggcagggctggagcagcggcccctgcagcccaggccaggggactggaggcccttccacagcagccctttccttttgatacacggtcttgctctgtgg

SEQ ID NO: 516113 - DNA, 523 bp, Homo sapiens
cacaggggctcattctccacccaggttcaaactccctgaactcacgagacccaggctgaagacatggacagactcccagccccagcgcccctctgacagcacacccgaggcctcctgggaacctgggaccccttgcagggtccccgcagctccttcctaggaaggaggttcctgccctactccacatttctctccatccaacttccaactccttcccactgggccctggagaacatgacgaagactgtgggggcctcctcccaggaaacacacacacacacacacacacacacacacacacacacacacacacacacacmccagcaacgcgcccagaccccaatccctggcagcccaactcctcgttctacagagaaggggtgaggatctccaggggtgactgctcacatctcggcacatgtagaaggcagggctggagcagcggcccctgcagcccaggccaggggactggaggcccttccacagcagccctttccttttgatacacggtcttgctctgtgg

SEQ ID NO: 516114 - DNA, 374 bp, Homo sapiens
acccacatgctttgattttcagaaatgttcttagatcctgaaccagaatgtgctgcaggggggactgtttcacctcaaaaattacagcaaagtaaatgtccttgtttcaacttttccaatgtttaacttgtaacaatagctacaaaagtaatcaggcagcaatgtgtttctttaaacggctttcctgtgagtgttccgtttacaaagaaaatcctaaaaccaggaagtaattggtgactttggaaacagcaagcaaacttcggtgaagaargaggggcaggtgtacctggaaggactaacttgcagccactcatttcctttggagggcggtggggcctgcaccctgcagattagggtatattctgactcagcaa

SEQ ID NO: 516115 - DNA, 608 bp, Homo sapiens
gacgaataaagtacatggaaaaactgtgtattttctaggtaaatgaagcatgaatgaacaagatatttaggttttaaaggtctttatatcagaaattttaagctgtcataaaacgaacttacaggtagtgaatggtctagacgttcagcctgaaataagctatttaacttagtacatatcctgcctgctgttgtaagcaaattccattcattgaccttcttttctaccacttttcctatcagaaactgaatacctatttggaaaatgagaacacatgaaccactgattatgactgaacctggaactcattcccaccacctccatttctgagcaacagaacatagaagagccccactaaaaaccactaatcaaggtcctcaaatcctttgcatgggagctccagccaggcaagcctaggagacgtattgaggtgctggtagccaatgctcaggaaaaagaatgacytttgggtatttgaagaatagaaagcttcagtagtcacataacaggttgatgtgggacacacagatggggaagaaacggaggtagctgattcattcttgtattttaatgcctatctgccctttatctcatgtacccgggagaca

SEQ ID NO: 516116 - DNA, 608 bp, Homo sapiens
gacgaataaagtacatggaaaaactgtgtattttctaggtaaatgaagcatgaatgaacaagatatttaggttttaaaggtctttatatcagaaattttaagctgtcataaaacgaacttacaggtagtgaatggtctagacgttcagcctgaaataagctatttaacttagtacatatcctgcctgctgttgtaagcaaattccattcattgaccttcttttctaccacttttcctatcagaaactgaatacctatttggaaaatgagaacacatgaaccactgattatgactgaacctggaactcattcccaccacctccatttctgagcaacagaacatagaagagccccactaaaaaccactaatcaaggtcctcaaatcctttgcatgggagctccagccaggcaagcctaggagacgtattgaggtgctggtagccaatgctcaggaaaaagaatgacttttgggtatttgaagaatagaaagcttcagtagtcacataacaggttgatgtgggacacacagatggggaagaaacggaggtagctgattcattcttgtattttaatgcctatctkccctttatctcatgtacccgggagaca

SEQ ID NO: 516117 - DNA, 575 bp, Homo sapiens
ttggcatgtcttggtacacactgcctattacatcactaaaatgtactgcaaaaagacagcacacactgattgttctccccgggggctggcacagtaatgagatagcaaggactcatgtgaagaagctacaagagaagaatagggaaaattcacttggctattaggcaactaagtgactggaggtggggagtgattttacccccccaggaatatttgacaatgtctggagatatttggttgttataacctggggagtggatacagccactggcaacaagtaagtagaagccagggatactgccaaacactgtaaaatacacagagcgactctagccttcctttccccagacaaagaattttcagactcaaaatatccataaagcagaagttgagaacctctgctgtagagaaagaggaaaaaggaaaaggaagggtgactttgcaattctgtgtctctgtgattccagacatggagatttttattgagaacaatyaggagcccagaagtttctctgaattattggataaggggatgaatcatttcaaccagcttgagcttgaggttaatgggagag

SEQ ID NO: 516118 - DNA, 680 bp, Homo sapiens
agactgcatatttatttttccccaagacatccgtaaaacactttagtgcaatgtcatttttcctccctcacttctgactttcctcaagtgggagaaggaagactagagggaactgaatctttaacaactaatgttccatttttttattcaactgcctgcccaatccatctatgttatagttatgaaatcataatamaaatgattttacttcctgtgtctttgacagcctaagaaaagttgtcagaataagaaatgaagaggtttgtatgagcagacagtgaggggtgtggggataagaaataattctactcgctgctgaataatttacatacagaataatcaccatggtagatcatttgatcatcaaaatttgatattgcttcctaagctgtgatcataatcattaaaaagctatcattattggtatttgtgtatattagtagtgggcttagtaagaatcctgctaagcattttatatatacaatattatttattcctcataatactcctgaatgatatttttttccctcttatttaatagaggctaaaactcaagttctgaggggttatatgtggctggtaagggacagtactgggatttgaatccaggaggtatttcacccaaagatgaaacttaaacacaatgcttaccgactgcttactgactctattatccacag

SEQ ID NO: 516119 - DNA, 640 bp, Homo sapiens
tgcagccactggggggtccatttgaaaatgtgtcacaagcagtaaccagtgagtacagacttataagtgatgggggagtgcctctttcaagtagcactcggcttggaagtcattctctctctgccaagagccatagcagtctgtgaaatcctttctgtcgkagtgaagagaggattttccaacatgcatctacgtaggtgcttgtagaaatgtaagagacctgcaacttcaacctgtacaaggatctctgcagcggtaaacaggaacagaagtagctagtgcaggtgagaagtaaaatagagctgatgaagtttcttacttgaaactctgaaattgttactatcacaatagaagatgttgagacttctttgcaattcatttatcaatcccgacagaagaaagtgactagtccaccatggaacagtattgcatgtgtgcaataggatgtggcatgtgccaatacaggacactcacggggccatcagagacccaagaaccagacggtggaaaaaggagaagcagaagtagtttctattagcaaaatcacaacaaaaattttcaccgtgtcctacaaagagaggattgcaatctccatcagaaactacacagtgattatctgtctccttcaagcattatgaag

SEQ ID NO: 516120 - DNA, 640 bp, Homo sapiens
tgcagccactggggggtccatttgaaaatgtgtcacaagcagtaaccagtgagtacagacttataagtgatgggggagtgcctctttcaagtagcactcggcttggaagtcattctctctctgccaagagccatagcagtctgtgaaatcctttctgtcgtagtgaagagaggattttccaacatgcatctacgtaggtgcttgtagaaatgtaagagacctgcaacttcaacctgtacaaggatckctgcagcggtaaacaggaacagaagtagctagtgcaggtgagaagtaaaatagagctgatgaagtttcttacttgaaactctgaaattgttactatcacaatagaagatgttgagacttctttgcaattcatttatcaatcccgacagaagaaagtgactagtccaccatggaacagtattgcatgtgtgcaataggatgtggcatgtgccaatacaggacactcacggggccatcagagacccaagaaccagacggtggaaaaaggagaagcagaagtagtttctattagcaaaatcacaacaaaaattttcaccgtgtcctacaaagagaggattgcaatctccatcagaaactacacagtgattatctgtctccttcaagcattatgaag

SEQ ID NO: 516121 - DNA, 601 bp, Homo sapiens
aaaatgaaaattattcacagtcacttgtactgcataaaacattgctaaagtgaatagtaacacaatatttccacccggagtaatatttcagagactatgttttaarggtggcaaagcgttagttcagatttgtttttgccgcaaaaaaaatagaagaatattttcatgaaatccctgaagacaatgatattggctttataagctgtttttcagtcatgctcctttggtcatgccttgtttatctggtccccatgtaacttaaaatctagtcagtgtaaactcctgaaacacaaactctgtgtcctcattctccactcccctttgtcttttaagatctgttacaaagaacctcgtgtcccctcttcacgttttaagattcaacattatgacttcctaaaaataagcatctgctggataccatggtggtggctgcttaaattaaacgtgttatgcagtatgaataaggaaccatggctgagaagccctttccttttagacatcatatgaaaatagaaaatgactgttttcaaggatagcctcatttatacactctgaaatgaagctaggagcagagcgcaaaaaacaaattcccagacaagga

SEQ ID NO: 516122 - DNA, 505 bp, Homo sapiens
acttgggttgtgtaaggattgcatatacatgcacagaaaatctctggaaggatatataagaaatagttaacagtggttatttgtggcgagtggaatcaggatactttactttccactttatattattctgtgctattgcaatggtttgccatatgcagamattactgttataattttttagtaaaaaattcaaaaatactcataggagtctaccatgtaattaactcacttcaatcacgtgcatataagaattgcgttcatgtactgtcacttttactcagatgttccactctctgcctgaactagctgtttaaattctatttgataaataaaggtagaaagggagaaagcaattgcagttgataggtttcagcactagtacaaatggcagtacattgccaaccaaagagcccccctgtttttggaaggaaataaccacaatattcatacgtttgcagttttccaatcgactatgtactcgaattcttaccacaaacttgatgtt

SEQ ID NO: 516123 - DNA, 505 bp, Homo sapiens
acttgggttgtgtaaggattgcatatacatgcacagaaaatctctggaaggatatataagaaatagttaacagtggttatttgtggcgagtggaatcaggatactttactttccactttatattattctgtgctattgcaatggtttgccatatgcagacattactgttataattttttagtaaaaaattcaaaaatactcataggagtctaccatgtaattaactcacttcaatcacgtgcatataagaattgcgttcatgtactgtcacttttactcagatgttccactctctgcctgaactagctgtttaaattctatttgataaataaaggtagaaagggagaaagcaattgcagttgataggtttcagcactagtacaaatggcagtacattgcmaaccaaagagcccccctgtttttggaaggaaataaccacaatattcatacgtttgcagttttccaatcgactatgtactcgaattcttaccacaaacttgatgtt

SEQ ID NO: 516124 - DNA, 634 bp, Homo sapiens
aaagtactactcaggaggctgaggtgggagsgtctcttgagcccaggagttcacagccagcctcagcaacatggcaagacctcatctcaaaacaaaaacaaaaaagttgcaaagtatttttccattctcaaccaagttgagaggagtattttaagtaaacatctgtcataattttttcaggtactaagattgaaaacagagacaaaatatttttagattattagaggttaaatagtcaagtattcccaaaatgtttaaagtatgtctgtgagtgtgcgtgtgtgttaatgaattagattgctagactgcctcattttcatttttactctaaattctttcgtcactaggaatctagatataggtttgtttacaaatgaaaaaagttttcagaaaagaaatcacaactttagttcttgaattgaggattaatatattacctaggaacaatgtaggactgtttgggatttgagccatattagccttcgttcccagaaaccttctgaatattactacaaacacctcttgtattagcagttctagaaatacaccaagaaatgcacctaagaatgtgtaaagactcactttgttcaagaaatattgaaacagagaaaatgaatacagcagagatttactt

SEQ ID NO: 516125 - DNA, 634 bp, Homo sapiens
aaagtactactcaggaggctgaggtgggagggtctcttgagcccaggagttcacagccagcctcagcaacatggcaagacctcatctcaaaacaaaaacaaaaaagttgcaaagtatttttccattctcaaccmagttgagaggagtattttaagtaaacatctgtcataattttttcaggtactaagattgaaaacagagacaaaatatttttagattattagaggttaaatagtcaagtattcccaaaatgtttaaagtatgtctgtgagtgtgcgtgtgtgttaatgaattagattgctagactgcctcattttcatttttactctaaattctttcgtcactaggaatctagatataggtttgtttacaaatgaaaaaagttttcagaaaagaaatcacaactttagttcttgaattgaggattaatatattacctaggaacaatgtaggactgtttgggatttgagccatattagccttcgttcccagaaaccttctgaatattactacaaacacctcttgtattagcagttctagaaatacaccaagaaatgcacctaagaatgtgtaaagactcactttgttcaagaaatattgaaacagagaaaatgaatacagcagagatttactt
